United States Patent Application Publication US 2007/0083945 A1 - sequence listing, part 9

SEQ ID NO: 55146 - DNA, 386 bp, Glycine max
  unsure (1)..(386): unsure at all n locations
acactctcttagctcagtgttcatcttgagagacaagactaagagcttagatttcatattcatctataagatgattaagaattagttagtgagccaaacaaacaacatatcttttgatttgttttagagccaacaatggcttggtaggaaaaaaaatattgggttgttcaaacttggtgtaatggcttgattgtaagagccaagagtgatagtgatgaatactngtaactntgaaaagttattggatcctggtagtttgccaagaacgggacatagtctagtggaagagatgaactagtataaaactctnnttggttgatatatatctctttgtgtttaattgacctanggttnngaattgctnttattatgagatatatgtttta

SEQ ID NO: 55147 - DNA, 186 bp, Glycine max
  unsure (1)..(186): unsure at all n locations
gctttagccaaaggnctacctttaataatgttcntgatattctcttngagcctatnttcccttttattngataggaagctnattacaagccttaagggaaaaaccatgatatcacattgcccttaaggaatnttggagctgtggaattgtnttgggaataagctgggaataagtgtgggggggtat

SEQ ID NO: 55148 - DNA, 404 bp, Glycine max
  unsure (1)..(404): unsure at all n locations
atcgtagttgatcactactctataaactattccttttcacaccttgcaaccncatgatgcatcatcatataatatcatataatgcatgaaacaattgtaaaaactttgtacttcatcattgcatgcactattatttcaacatttgttctcctcataaaaatacatgttacgacttcataagaagacatgatcataaatgtcagacacagagaattgcnacctacatttagagcacagacattgactacagtaaccatgatgtaaattaatactgtcaaacaattttctatgttatgtgtctgctttcatgcaaacatattttatcctatcaatcaatacatatgtgtatattcaagcactctcgcactattactagtcacattgttttgtgtacatataacatg

SEQ ID NO: 55149 - DNA, 418 bp, Glycine max
  unsure (1)..(418): unsure at all n locations
atccttacagacacctgcggcatgcaagcttcctttagtgcgtcacgtatattatcgagctctatggtggtacgaagccttgatggtactcggcgggaagtgatgggggaaatcgacattcccattcagataggcccncacacttgcaatgtggtgtttcaagtgatggacataaatcccgcctatagatgtctcttgnggagaccttggattcatgcgctaggagtggtcccttcgacacttcaccaaaaattgaagttcgcagtgggcggacttttagtgatagtatcaggtgaagaggatatgttggtgagctgtccctcctccgcaccatacgtatgagcggcggaagaattcattggaacggatttccaaccctgttgagggggagctctgcctctgtggacacaattctttg

SEQ ID NO: 55150 - DNA, 386 bp, Glycine max
  unsure (1)..(386): unsure at all n locations
taatgtctgaaatctatgggattaagatggtcattgaccaatccctattntatgatttaacaaaattgactagtgaaggtgtactcttttgagggtgcactagatgatgaattgaaatttgatttctctgtgcatgatgcccgccggttggtttgcaccaaccaagcggacatgaccggaaaggcttttgccggtacatgaggctatagaaaccgcatgctccatcatatgattagacgcatgctgcttcctagatcttcagaccttgcctaagtttgtgaacagaattcattgtcttgctaccacacatcatggctatattcgcatgggctcatagaaacaatccttcatggggtttatattggtctgctacacttctttgctca

SEQ ID NO: 55151 - DNA, 374 bp, Glycine max
cgcacagaagcttctcaaggaagttttctcatgaaagcttatcaaggaagctatctagtctataaatagaagcatgtataacactcgtggtaactgtgatgaatgacagtcttatgagatacacttcaaagttccacttctctccttctattattccttcaatttcggtcaaccccttcttcttttcttttcctcattaagcatctcttcaagcttcttatccatggaaatcttggtgggaagctcttcttcttggttattcctagggagggcctcctctctctttctttctttcctgattcaagggaaatcacataaagaccatgaactaaatcacctcataagctcataacttctcagtgttaagccaaact

SEQ ID NO: 55152 - DNA, 292 bp, Glycine max
  unsure (1)..(292): unsure at all n locations
agcttcttcgctggaatatctcnctcccttgtctgatacttggtttatgataagagtcggatttggctttggatgatttangggtggcctttgcggctgatttanggttcctggctaatagggcgacgggtaatgagaagggctgatattggctgagtattggtactgttgagttggtggaaaatctggccatgtaagaatggcaccacgagcatggggtcccccctctgtctcattcctctccattggcccatttttctcatccacacaaaaggatgaactaatttggctc

SEQ ID NO: 55153 - DNA, 331 bp, Glycine max
  unsure (1)..(331): unsure at all n locations
tactaagcttagagtatggctagcnacttttatttncatatgaaattanttcgatagacctncaatctttaatggagagggttaccacttctggaaaacccgaatgcaaattntatatatgtaatagacttaaatatttgggaagccatagaaatagggccttatatacccaccacagtagaaagaaccacaatagatgggagcacaacaagtgggagcacaacanttgaaaaacctatagatagatggtttgaagaggatagaagacgagtactatataatttaaaagccaaaaacataattacatctgccctgtgaatggatgaatatt

SEQ ID NO: 55154 - DNA, 444 bp, Glycine max
  unsure (1)..(444): unsure at all n locations
tatgcgcatatntccttacatacgttctcttgcacaagacatntatatctaaaagtgcacccatatacaatcaaggcagcttcgttacctagattatntacacgtactgccaaggtgtattngttacttacatcacacacatctccttggcttgaattacatacatgcatactcaaaagcatttggggtaccaaaaattgcacatgtgcacatcttggtatttctaatacctatatatacacaaacttcatgatgaatcttgactatcttcacaaaaaggtgctacacttcatccctnnttttcaagttttgctacctaaagccgcatgcaaattcaagcatattttcctttgcggactanaantgtattcaaattaaaaggtatattttttgtaatatgttntcttcacataacatgcaacanntattatatatatatatttt

SEQ ID NO: 55155 - DNA, 346 bp, Glycine max
atgagctagagaggaagaatgtggcatcttcctcgcggcgacccaactagagcaagcctttgctgttggcaaagaaaagactactagagcacctgtatttactcttcctgaattttctaaaactttagagctacaatgagatgcctctggagtgggagttggagctgttttgatacaaggatggccctctattgcttattataaatgaaaaaatcatggtgccacccttaactacccatcctacgataaaaagctttattcccttatatgaacactccgaacttgggaacattaccttgtttcaagggaattgtcattcatagcgaccatcatccacttagttcat

SEQ ID NO: 55156 - DNA, 275 bp, Glycine max
gatcatactactacgacgactgagaaaactgtggcaaataaagagggtgagaaagagggagaaacccatgttgtgactgccattcctgtacggccaaatttcccaccaacccaacaatatctatactcagccaataacatactttctccttacccaccacccagttatccacaaaggccattcctaaattaccatcaagtctgtctaccgcacttccaatgaccaacaccacctttagcacacaccataaacaccaactcacaaagtgaattttg

SEQ ID NO: 55157 - DNA, 105 bp, Glycine max
ttagttctttaacatgttttttgaacaatatactttttcttcatttaactggctatgcgcttggcggacactctcaacaaagcactttccacacctactgtacgt

SEQ ID NO: 55158 - DNA, 353 bp, Glycine max
  unsure (1)..(353): unsure at all n locations
tataacactgtcatatgaatttgttttatcattatgttatgatggaatctcgactgagatttaccctattgcttggtgcaccataccatctattatcactgtgagaatngaatgtatatcgtgagttgcaaatcaatgttaattatcgtggtaaacatttattatttttcacagacatggtcaagtgcacagtggggcgatttcgatcttatataactcgactactggtgcaccagacacccatatcacttgagattgaatgtaatttgagtgcaaatcatgtcaattgttgtgaacatctatgtttctaagactggtaaataaaagtgtgcaattcatttatttacctctac

SEQ ID NO: 55159 - DNA, 417 bp, Glycine max
  unsure (1)..(417): unsure at all n locations
gaatgaatatgaactctaactagtcaagcacaatacttctactcggatgctgattggtcccgtatatatcgatancctcgaaatgaatggtgaatctctgagccaatcaaacgacaataacactttactcggatggttgattgagtctcgtaatatatcgagacgctcgaaaatgaatgttgaatctctgaactagttcaaacgacaataaccttntactcggatgtctggatgagtcctgtaatataacgatacgctcgaaattgaatgtgaatctctgagccaatcaacgacataaattttactcggatgctgattgagcccgtaaatatcgagagctcgaaattgatgttgacctctagcaatcaaacacaatacttatactcggtgctgataatcccgatatatcagacctca

SEQ ID NO: 55160 - DNA, 392 bp, Glycine max
  unsure (1)..(392): unsure at all n locations
cttctcctgtgtagttactggatatntattaaatttatgagatttcttcatgttaaaacaagactaacttagttcatgcaagaaaagatttttcatagagtattcagctccagaagcagagcctacgttttttataatattaattagagaaaaacaaattgaacttgtgaaaagcagtttcttataagacacttgggttacttataataataattttcacagataagaaagaatttgtgagagaaaaccattttcggaatcagaggaaggataactactatcagaaaagagtgcgctcggggatctctagtaaaggaaagtcggattataagtccatatccttgagtcggctgcggttgtgttccttgttgtacgtattatgtccagaggcc

SEQ ID NO: 55161 - DNA, 305 bp, Glycine max
  unsure (1)..(305): unsure at all n locations
atcgacaagtacaaagaaaagctagacctagtagcaactcatgtgcaaaagctagaagatgagtacaccaaggtatgagtcttacaagcggaaagggaagcaagggaaagggtgatcgattcgttgcacagagaggcaatgatgtggatggatagaatcgccttttaccttgaangggagtcaagagcttctccgattgctagctaaggccaaagcaatggcggacgtgtactcngcccccgaagaaattcacgggctcctcagttattgccaacatatgatngatctgatggcccacataatta

SEQ ID NO: 55162 - DNA, 376 bp, Glycine max
tcaaatctaaaaaaaaaatcttgttaatcatctataaccacgcaatagaaaaagaaaaactataaagttgagtgaatatgatcttatatgagaacaaaaataagataaaaagaatgatgggacccttggctctactctttgatttaaattctatctttaagcttcttattttttcttagcgtgtcttattccccatgctccctattctatgagatttaccccttatttacattttccctccttgtctttgcccattacacctttaagacctcttgactaatgtgtttgtataggctgatttttacttttatccttcatttttttgatttatgttactataacatatataaattccgctctttattaattatttatc

SEQ ID NO: 55163 - DNA, 477 bp, Glycine max
  unsure (1)..(477): unsure at all n locations
ctcagctcgtggatatgcggacccgtatatgtggactangtggtgatctggcgatggttgcttataactctcccacatccacaaatcanacatgaacccaccatccccaatggcccaccttcagctgagctcacgtactccgacgtagcccttatactcgttcctcttagcactgggcccncatcaacccctccaagcttccacaatatccaagcaattcaatntccaaacatcatgaactactctaaactaggaaaacagagtaaaggtagaaaaatctgcccaaaacacattcacatcttacagctttccttactcaaataccccagtaacattctctttgttccgattcgttaaccggtggatcgactntgaaaatntactggagattcctagtacataagtctacatttttgaccgtgggatctgctagaaaatgtcagaatcaatatgactacctttccataccagcaatga

SEQ ID NO: 55164 - DNA, 263 bp, Glycine max
  unsure (1)..(263): unsure at all n locations
ttaagtcacctgccgcagcaagcttgtgcaattggaaattcacttgttaccanttaaaccctattcctctcatgctaaagaacctttagatttgaatcatagtgatgtatggggtccacccccaatcttgtctccatctaatttcaagtactacgttcactttattgatgaattcatcagattcactttcactttttccttgaaacactactcttatatcatcctggtttccattctttgtctaacacttttcatactttttc

SEQ ID NO: 55165 - DNA, 155 bp, Glycine max
aaaacttgtccatgctagagggcttgaccaactcatcaccctcctacttgtcaaggctactacccccgacatcagacaatatcgctcgtcacatgacaatcatctttgactatttctttggcccgcaagctggctcatagcatgtggcttatgta

SEQ ID NO: 55166 - DNA, 451 bp, Glycine max
  unsure (1)..(451): unsure at all n locations
gcttaactgatcgtntaagtcgttntctcgcctaatttaaaaaaattatanattccaccgatcattngaatggtaatatccattaatttctgtaaaatgaaatccgaccgttcggtcatgccgtaaccacgttggaaaccaaaaagaggtaaaataataatataataaaaaaatatattntagtaaaataaaccaaaaaaagcaatcggacgtttctctttgggatttctctntcttaaattgaattgactaataactaaagtgaaactaaggctaanatcaacccgcanagtcaagctcgtccacaaaaatcactaaaaaagggatttaagattcaatacctcagttnttcttacanagtaaaaaggatgattttaaggtccaacgccttanaatgatcaccttccaagtaaaaagaaatcgtttgatcacccataagaaataactacat

SEQ ID NO: 55167 - DNA, 81 bp, Glycine max
cagcttatcagatgctgcatttcggtatcatcttctcttatcgaagaacgatatgcacttcttgcattgtaaatttgctct

SEQ ID NO: 55168 - DNA, 290 bp, Glycine max
  unsure (1)..(290): unsure at all n locations
tatgcgagattatatgttgaacccgccctcacccactaatattatcaagtactcgtttggtaagcaatgaaatngttggtccaacagaaagtcattacgtgtgcagcatacatcattgtcataattgacaacacataatgacatgcatgcgtataacagttngagcgcgacaacacattggctgacttcagtacacattctgaaactagcagttgctctacaacacattggctgacttgactacacattagcgacaacacatgggctgacttgactacacatttacgcgt

SEQ ID NO: 55169 - DNA, 265 bp, Glycine max
  unsure (1)..(265): unsure at all n locations
tcctctcagtcacctgccgcatgcaagctntgacatctgagcttcttccatgtccctanataacttgtaaattcaaattatgggatctaaaaatatttcattattgaattanagccatgttcacaatggaagatatgagtgtggctattatgtcatgcatatgatgtggaacgtataccatgcgggtctgacgaattgtttaataaaaactattctatcatataatctcgtataatacatgctatttagttataatctctttaag

SEQ ID NO: 55170 - DNA, 368 bp, Glycine max
  unsure (1)..(368): unsure at all n locations
agcttangaaatttctcactgcttaatagctccaatcctgctatttcttgaatcaaagggacccanaatgctatgtatacaccagctatatctaccaacccaacctcttcttctccaaagaatttcttgtccttgatctcattctcaagaaactgcagagcctcatatgtttctacaacattcttctcacgctctttctcatcaaccgtgaaaacagcatttcatgcagcacccacaatctgatttcataaatcatactatttattaatgatgtttcttnttataaaattatgaggacaagcgtaatctagttacctacgcactctctacataatctttttacacatgctatactattatacaaaatc

SEQ ID NO: 55171 - DNA, 418 bp, Glycine max
  unsure (1)..(418): unsure at all n locations
agctntgatgatatggtcttcaccgaagaaaggagcttatgtgggtctaaaaagaggcaaatctgatcatcatgctttgataaatgcaaaaccaccaaaaaaaaactagggcaaatgaagagggtgagaatgagggagaagcccatgctgtgactgccattcctatacagccaagtttcccaccaacccatcaatgtcattactcagccaataaacaaaccttctccttacccaccgcccattatcgacaaaggccattcctgaatcaaccacaaagtctgtcttccgcacttccaatgacgaacatcacctttagcacaatccaaaaacaccaaccaagaaatgaattttgcagcgagaaagcctatagaattcaccccaattccagtggtctatgctgacttgtcccatatctact

SEQ ID NO: 55172 - DNA, 423 bp, Glycine max
  unsure (1)..(423): unsure at all n locations
cgtaagactcaccaagggtggaccttgtgttntatgagttcctttatataaccgactanggaattgttcgtcttgcgttntagagagactcaccaaggacagacctttgagtttgcgaaccctttgaagaaacaacctatgagactcaccaagggtggaccttgggtttgacaagctcttggagaatcgaccagggaattatccgtcctgtngtttggagagactcaccaagggcggaccttanngttgacgaactngtangactcaccanagggtggaccttggattttcgagccctttgtagaaccaaccaacgacgcgtccatctttggatttgcaagagcactaagggcggaccttattaanacctctgaagtcaaaccctggttttgtctttggacaaatactgagtaagataaagta

SEQ ID NO: 55173 - DNA, 353 bp, Glycine max
  unsure (1)..(353): unsure at all n locations
attctgggcagtccatgggctatatcgatattacagttgatcatgtgtatggccaggtaacggattattatgtcactagcatatagtaatagcatggaagaataaaagccattaatctattaaactcagacaaacatggcttggatgtgttgatattagtaatttgaattgataggccatcacatacttgtcaattattgtattatgcatctcaagtctgaattgaaatgaacggacaaccttctggaaacatgcttatcttactggttatagttatatgatcatctannattacgacttctgtagtaaagaaacttcaaatctagtcttctttagacgtgctaaatcttcta

SEQ ID NO: 55174 - DNA, 297 bp, Glycine max
aaatcttttttgttgaaaaaaatgtgagaaggggggggggccctaaattggaggagaaaaagaaggagaaaagttgaactttgaagtgtgcctcacaaaattcttattcatcaaaagtacaaaggttacacatacttctttttatagcctacgtagcttcctttgaaaacttccttgagaagtttctttgagaaatttccttgagaagctatagtttagctacacacacccctctaataactaaagtcacctccttgagaagctatcttgagaagctactactgagctacacacacc

SEQ ID NO: 55175 - DNA, 274 bp, Glycine max
tatcaaataacaaacccatcttttgatgtgacttatcatttacatgcaaaacctcataattattacacatttaacatcacatgtgtgtatgtaacttagttaaatggtaactttcctttgagtcaattaccattcatataaataattacacacgttaacatttaacatttttcatgaacattctacacaatagaggtcactttggtgatatcttgattcaattagctcatttaaatgctaaataattaaaatgatataccataactaaattttg

SEQ ID NO: 55176 - DNA, 185 bp, Glycine max
gcaagctttttaaaaattttttttttaaggaaaagtgcgaaatcctcaacacatctgaagatgatacatgaaacactattggggtgggtggtataacaactattaaagggcttattgaataagtatttatcatgtaagcacttgtgtaggtactctcatacaaaaaaaaagaggcctaaactctt

SEQ ID NO: 55177 - DNA, 277 bp, Glycine max
tgctctaacttttgaaggaagttttctcaaagaagcttctcaaggaatttttctgaagaaagctaatgacgttagctgcctaatctataaatagaagcatgtgcaacacttgttgtagctttgatgaatgagagtcttgtgagacacaactcaaaggtcaacttctctccttttacttacttcaatttcgtgctcccccccccacccccctatttatttatgtccctctttcttttcctccattgaagcatcctctttaaacttattatccaaggct

SEQ ID NO: 55178 - DNA, 307 bp, Glycine max
agcttctcccccaattttctataaatagggggagaagtgaagtgaaaaagggttcaaccccttaggcacttctctctctttcgaatttgcttggaaaaattggttccgtgaagaaaatccaagccgaggcgcttccgaaacgtttccgtaacgtttccgggaggaatttcgcgaaagtttcgaccgttcttcgacgttcttcattcattcttcatcgttcttcgatcttcaacaggtaagtacctcgaaccaagcttttcgattcattctatgtacccgtggtgcgccacattgtgtttcgtgtatt

SEQ ID NO: 55179 - DNA, 270 bp, Glycine max
ttgctgcaaccaaatttgctgaaacaaataaatatgatccaaatttgctgaaacaaaatatgatccattaatagtataaacatgacagaacaaataaatatgaaacaaggtaaaacaaataacaatgtacctgaaagtaataccttaaaaagttttaatactagtagtcccaacacttacaatccaacacttggatttgataagtgctatgcatacatcatttgaatactgaaatcacatagcaattatctcattttcttctcttttatt

SEQ ID NO: 55180 - DNA, 321 bp, Glycine max
agcttccaagcttattttgatgatgccaaagactcaagtccagaatcaagattcaagccagtttcaagaatcaaagagtcattcaatcaagaatcaagattcaagaagaagactcaagatatgccagaacttcaagaaaagcatcaagataagtataaaaagattttttcaaagaaaagactgaataccacaatttttccaaaagaattttttcaaagaaaaatcttatacctgagtttttactctctggtaatcgattaccataaggcagtaatcgattaccagaagcccaaaatagctttataactgttttacaaagta

SEQ ID NO: 55181 - DNA, 270 bp, Glycine max
ttatgttactttaatatttagtttgacactcttctttcgcatttaaaattccacttctacgttttgccgtgacctatgcctatgacctatgaccaatcaagcatgaaacacctttgtccattcatattttgaaaagttagcatgctaggcaacttcttattgtcaaattttcaacacattaacaaattctcattaataacaagtcaaagtaatggatttccatgcctttttctaaatatattaacaatacataaatgattatattgttca

SEQ ID NO: 55182 - DNA, 283 bp, Glycine max
tatcttgtgcatccctattttttgatgaggatgtcccatatgttcttaaaactggactgattcatttgtttccaaagtttcatggccttgcaggtgaagacccccacaaacatttgaaagaatttcacattgtctgctccaccatgaaacccccatatgtccaagaagatcacatatttctgaaggcttttcctcattcattaaagggagtggcaaaagactggctgtattaccttgcctccaggtccatcacgagctgggatgaccttaaaaaagttttctt

SEQ ID NO: 55183 - DNA, 272 bp, Glycine max
tctcatccaacttggctttcttgtgtgcttcggccaaggatctttttttagccttattaaaggatgtagctccttttctaatgatgggggatagagaaagtttggattaaggggtaggatgaggtgatgactaaagtggaaaggctaaagaaggagaaggttcgaggtgtcagagttttaagaatcacataggcaaattctcggacttttggaggtgaaaagggtgtaagtaaaggttaaggtgtttgattataatggttggtcatttggtt

SEQ ID NO: 55184 - DNA, 182 bp, Glycine max
tttgaagccctttttttttgctgatcaaactgatacaggtctagaatcctaaaattcaagataaacgaaggatctaagtgctattatctaaagggggagatcggaattgactattgacatatacccccggaggatatcctccgattataaccctgagatttcacatctttcacttttactct

SEQ ID NO: 55185 - DNA, 274 bp, Glycine max
taaagtacgcccgagtcattcatccctatgagatgttgttgaagtattggcgatcagaattgccattccttggattatagggttgaaccaagctcatgcttttacaaaaaggttcatcaagtcaagttgaaatatggaagtaaccgtcttgcaaaattggggcaaaagatgaatcgagtcacatcattgcttcgtctactgccaaacacatttaggattattgatgtccttgttacttccagtttcaccttgacaaagatgtcatggaccatgt

SEQ ID NO: 55186 - DNA, 296 bp, Glycine max
actcgacccggatcttaagtcacctgcggcatgcagctttttccaatttaaacgacaataacctttttctcggatgtctgattgtagtcccactaatatattcgagaacgctctgaaaattgaaattgttgaagcttctgagccaatttcaaaacaacaattcacgttttacttcggatgttctgattgagtccccgtaacataatccaagaccactcggaattgaatggtgaacctcttacccaatttaaacgaccattacttttttctcggatgtttgaatgagtcccgtaata

SEQ ID NO: 55187 - DNA, 263 bp, Glycine max
tcaacattcaatttcgagcgtctctttatattacgggactcaatgagacatccgagaaaaaagttattgtcgtttgaattggctcagagcttcaacattcaattttgagcgtctcgatatgttacaggactcaatcagacattcgagaaaaaagttattgtcgtttgaattggctcaaagcttccacattcaatttcgagcgtctcgatatgttacgggactcaatcagacatccgtgaaaaaagttattgtcgcttgaatta

SEQ ID NO: 55188 - DNA, 295 bp, Glycine max
tgctttttttaacgtttattctaaacggagaccaacatgctagctattattgtctagcacccagaagagttttgccttgccccggcccacgagcatcgaatcgcagacgagtttgctccatgtttcacagaaaaagaagctataggaagggtgatcgactctttacaccaacaggcaaccatgtggatggatcggcttgctcttaccttgaacaggagataagaacttccccgcttgttagtcaagggcaaggcgatggcagacacccacttcgccccccaacagattcttgggc

SEQ ID NO: 55189 - DNA, 263 bp, Glycine max
tgtagggttaaagtctcacgattgttacgtgctgatgcaacaattggtagccgtggctatacgagacatcttgccaaacaaagtcaggttagcgataactcacctgggctttttcttccatgctatatgtagcaaagtcattgatctagtcaagtttgatgagttggaaaatgaggccgcaattatactatgccagttggagatgcattttccccctgctttctttgacatcatgattcacttgattgtgcatcttgtcagag

SEQ ID NO: 55190 - DNA, 268 bp, Glycine max
tgcacactagatcaatgaaaagtttttcctctgtgtgagctgtgaaatgagtatggagtgttccaaagggggctcctttataaaagcgatcaacgacggccataattaccgtggctccctgatagtttggtagaccagtaaccaaggccaaggcctaatcttcccacggacgtgacggtggcggagttggctggagtagacccgtcggtttctggggaacatatttagtttgtaagcaatcagtgcattgcttaatgaattgttgggt

SEQ ID NO: 55191 - DNA, 297 bp, Glycine max; identical to SEQ ID NO: 55174

SEQ ID NO: 55192 - DNA, 269 bp, Glycine max
tatcatcatttgtctttactagccccactgcacatttgaccatgctaagggtgaagctgggatatgagatttgccttctccaagaaaatgaagggcataagggtgccatttcgatcctgggaattgtggacagggacttctccatctctctcgttgatctcaacccccaagttattagttatgaagtttgtaaagggcgtttgtagtggtgctactcctccgtgtatgggagtcctcatcttgggagcaactatggtcccaccttaagc

SEQ ID NO: 55193 - DNA, 294 bp, Glycine max
agcttgtctttctctgttacaatggcctttaccctggcaggcaagttttttttccttcctgcaagttcttgcattgtttgaatagctcatcaccggccaacctggttcgtaataacttggcccacacacgggcaacttataggtgggggttcgatctcataacctcaacaagagcaatgatggcactagctaccttagagcgttccactcttcaaatagtgcaagcagcccccttttattgggaacttcagcctccaaggatgccactttttttaaccccttttagtgtggctg

SEQ ID NO: 55194 - DNA, 263 bp, Glycine max
tgaagaagagcttgaagaagttttgtcttttacatgtccaactctcttagtgacatttgtattgtttgttatattgaatgttgcatcttggtccatatcatatctttggtgcatcatgcatcatcatgtgtgtgagtgagaagaaaatttctaaagttagaaaatttcttcagaaggcaaaaatctctattttaatcaattacaacattatcataattgattacacaagttgccttaagcttgcagagttatgtctcgtatca

SEQ ID NO: 55195 - DNA, 283 bp, Glycine max; identical to SEQ ID NO: 55182

SEQ ID NO: 55196 - DNA, 276 bp, Glycine max
ttaaatgcagttaaagttagtagcattatagcataatgctaagggggggtatttgttagaaacccacaaatgggttgagttatcggggagatatacaagaaaaacagggaatgaaagggaacaaatatgctttggtagtatttcttgaattgcaaagaaaacaaagtagagattatccttcaaagggtttcccattcacaaaggatttcccctttcagcagtagagctaaggttcagtttcccaactattctaacaaactattctctttctgatta

SEQ ID NO: 55197 - DNA, 321 bp, Glycine max
agcttgcaaattggtttaccatgctatttttggtccggcctagcagtcgtgaaagaacaggaccaacgacttttcgtacgcagaatacgcccccatctttaggaaatacatgcggagatgcccttttggacatgtcgaccctttggacttatcaaagtgtggtactttgaacttgggaaggatgacgatgactggcacgagacataaatccgcccaatccgagaatgggcaattgccaaggccctcgactgatcttaacctctcttcaagcgcctccatcttccccttatcttccgccaagggaacagattcttttacggg

SEQ ID NO: 55198 - DNA, 278 bp, Glycine max
gcttgggcgcttgcacccatccagagggtgtttcccccaagctacggcttcaaccccaactcgctctggcggcatatgcccactttggcaccggttccaacgtgataaggaactatcccccgaggacaacatttaccctgatcccaatgacatatgatgacctcttggcatccctcattgccaaccagatggttgtgatatctcccggaaagatctactagcctcctttcccaaagtggtacaatcctgacccaacctgcgtataccttgcgaaaacc

SEQ ID NO: 55199 - DNA, 306 bp, Glycine max
  unsure (1)..(306): unsure at all n locations
agcttgagatgaagattttttgaaaggtttatacttcctgcttttattgttgaccacaaagtggtacctgtaaatatgacgcgggggtcaagaaaccttggggacgtctcgtggggtgctattggccaaaaccaagcttgaccaatcccgacccaacccgggcatagtcggtcattgagaacctgtgatgtacctaatcaagcgagctcctggcagtcaacaatataaaggaaaacaagaccacaaagcaaggaggcttgngggggctggccagctgggaattttgcgtaatatgtggattgtggc

SEQ ID NO: 55200 - DNA, 268 bp, Glycine max
ttattgatgaaaccaaaatcaacaggagctcttctaattgtcttgtagctctcaattagccaattcctaatatttgggtggtactcaaacgcatcagcacaaacattaccttactgatagctttacaagtgaatttattttttatcatccctaaattcttcgaaaacaacttacagattatggtacttgaaataattagtaccaaatataaaggattttgggcctgagtgaaccatccattacctataatgacctgccatgaaagtgg

SEQ ID NO: 55201 - DNA, 307 bp, Glycine max
agcttgcttccttttgattttcagcacgtctcgggacttcacatatcgtgcaacaaagggtgccaagtatctcgaagcggccaatcaaaggttgtatatcatcaaataataatccccggacgaaattagggtatgacagccacctgagaaatagatagagttttccatagacttagtacctggtgctggacctatatccatagctccttataagatgtctcctatagagttagttgagcttaagaaacagttagaggagttgttggataagtagtttattaagcctagtgtatctctgtggggagcc

SEQ ID NO: 55202 - DNA, 265 bp, Glycine max
  unsure (1)..(265): unsure at all n locations
tcttatcaaaggcactctcttagtggcgaagctccntctnnccaggcttgttccctagtggatggatcctcctccctcatctacttctttgactatcactgcatctcagggggggtaaatcaccattatgcgaccactttccgagaagcccatgaatcttttctggggcgcgataagtgtctgtcatctccttgggcttgcctaacaaacggggaaaacatccatttcggtcttagggtgtgattggacttgaaagcctcttgaa

SEQ ID NO: 55203 - DNA, 316 bp, Glycine max
agcttttagagaagatgtattagcagtttaagaaggctgagactaaggcatagaagattgaaagttcctatgatgatgaaaatagcaaggaagctaggttgactaaaattgttgagaaatgtcacaatcaggcgacatctttttacctgctcttatctctctttgactaagtctttgtatacttgtcattgtctgttactgactacttcggctttttcgtccagttgacagcttttggtgaagaacaataaattccatcttggggagtaaaagtttttggagataaggttattattctaagacaaagtttctcagt

SEQ ID NO: 55204 - DNA, 268 bp, Glycine max
tggataagtagccttaagcattatgatatttcctaaaaaaattcatgagtgtataatgttaatgtatgactacagggttttgatgatgccgaagtataaccaaacaagattgcttctagaaacattcaaggttaagaaaacatatattgcttcaagattaattgaaggtcaagcaaccaagattaaaagaatatcattagttgatcaacttttacctctaacacattgttttcaacaaatcaaggcattggtaatctattactaggca

SEQ ID NO: 55205 - DNA, 248 bp, Glycine max
acgagatttgagaaattcacaacacatctaaagatgaaacacgaagaatattcggctgtttggataaaacaactataaaagggcgtattgaaaaagtatttatcatgtaagcacttgtatagtttttataatcaaaaaagaaaaaggctcaaactatcttctatatactgaaggttgttttataatattttggagaggtttctgaaataaactaaaaataacttatgaagaaaccctagttttttcat

SEQ ID NO: 55206 - DNA, 272 bp, Glycine max
ttgagatcttaagggaaaaaaaactttatcttcacaactcaaatgtgatagttttcacaattaaacattagaggatgaagaattgtctgaagtgaacatattttcaccacaactgcctggaaattggatcacttagtagtgtttgcactaaacctcactgtgtttagcgctcaatcaaaaatttgcctcacagaccataagaaataaactatgaaaccacggttggaaatatttagtaaaataaaatatagaaatataggaacttgcagata

SEQ ID NO: 55207 - DNA, 300 bp, Glycine max
  unsure (1)..(300): unsure at all n locations
agcttctggggggacatcttgacttgctttccaaactgacattcaccacagattctgccttcttctattttcagaatgggaatgcctctaacagcacctttggcaatgattttcttcatgcctcttaagtgcagaagtccaaatctttgatgccatatattgacttcatcttttttggagactagacatgtggaggagtaactggtttcttgaggtgtccatangtaacaagtgtcctttgatctgctgcccttcattangacttcactcttttcattgtcccaaccattctgacttgtg

SEQ ID NO: 55208 - DNA, 273 bp, Glycine max
ttaaataggctctgaatccgcgacgttgcgcttagcaccaccttcgcgcttagcacgagtaagtggatttgagcttagcaccaatcatgcgctgagcctggctaaagacaaccatcgcgcttagcgagtagatctcgcgcttagcatgcggcctttgtggcgtcccgaaataatgactggtttaatagtaataaattaaatagcagaaaccatgggaaattttttttttctctctctcttttttttcacactgtcattcatttcatggtaatt

SEQ ID NO: 55209 - DNA, 262 bp, Glycine max
agcttgttgaaattgtcatgttgggatgagttatacatagccattctgttttagggtttttgtgatgatgtttgtgatgtttatatgctgaaattgctcatggaaaactgttagagatgaaaggtagagttaacctaggcttggaaagtgagaatgtggtgttatgaatggaaaaagagtgacgcttttagggttggaaagttaaatctggattctgtggtaaatggagtttaaagggagttaatccctacttgaaatgtca

SEQ ID NO: 55210 - DNA, 265 bp, Glycine max
  unsure (1)..(265): unsure at all n locations
tgtaggattatggggtncccatcacatgtggtactaggtggcggtcgggcgatggtgcacaacaagttttcaacatccacaaatcgcgcataaacccaccatcccctgttgcccacctccaactgagctcacgtactcccacgtagcccatatcctcgtttctctcaacaccgggtccccatcaatcctctgaagcttccccaacatccaagtaattcaaaattcaaacagcacaaactatcacaaccaagaaaacagggcaaac

SEQ ID NO: 55211 - DNA, 265 bp, Glycine max
agcttttttgagtaaaaatttgtgaccaacttattttatacccctaatggaagtccataaatactcacagacttttataccatacgagcactcttacaaatgctcaccctttgggccataaaatatgctcatttcagaaaaaaatcggatacccctgtgagtttcttgaggagccgtatttgtgtctccctttggcttggactaaaataacaagcggggaagatacttactgcctgccaaagaaagggaaaactgcttcctccac

SEQ ID NO: 55212 - DNA, 263 bp, Glycine max
ttttggagtagaaacatgggaccaactcattttatttcaaaaaggaagtcatatctagtcaaggtctgagagaccatacaagtttcctaacgatttctaattatgtgggccattaagtctatcatatgctgacaatagccgagaagcccatgaatctcttcgggggcggagtaggtgtctgccatcgccttggccttggctaacaatcggggaagttcttgactcccgttcaaggtaagggcaaaccgatccatccacatggt

SEQ ID NO: 55213 - DNA, 261 bp, Glycine max
agcttttttcaatcgtctataagggtgaaaagctttcagaaatcttcggtgcctggtgtatactgtcttctttccatgcttgagttggatgaagcttgtgtttttctcacaaataggacatgcatgatgccctttcacactgtatccacttaaatttccatatgctggaaaatcattaactgtacaaaacaccattgcgcgtaacctgaaatgttgctgcacattttgcatccacacatctacccctttttccatattttt

SEQ ID NO: 55214 - DNA, 266 bp, Glycine max
tgcacaacagagtgctaggttccttgcacttgatggccaatttttatcagcatatactaatgaatcacatctagaaagcttagcaaaaggtgttttaatcgtgttatcaatagatactaaatgcctttcaacaagatttgctcatcattttctgctcaaaatttgtacaaatacacttcattgtcagtctcagataaataaataggtgctattctatgttaaatgttatatcatatataaaaaaatcaatattttctctgtaatat

SEQ ID NO: 55215 - DNA, 304 bp, Glycine max
ttcttagggcttttctttgaagcttaccgaaataagctaaaaataattaattttaataattttctcattaagcttagtgaaataaagctagaaagatcttataagaaagtcacaaaccacttctataaacccatgtaagcactatgccctccaaatctgtgattattgcagtgggataatgttttccaaaatgatattattttctgcacgcatgggcgttgaatagcattgatgtcaggcatgtaactttaaagggtgttaacaagagaaccaaggtcatctccacttacaggactccaatatt

SEQ ID NO: 55216 - DNA, 300 bp, Glycine max
acacgttacactattcaagactcaagcttgctactgtatccgaggcgttgtgctcctgcccagactgccgctggacactagtcagctgattggagagtatcacgaggcatgcgctgatcccgtcttaatgctccgatcgaactcagcgagtatacttaacactatatattgcacgactttgtgagcagaccgggaaagcgcattggctacatacacctgctatgtactgcgtatacaaagcacaatttcctaggtgtcattcggtataaaagcacactgctattcatttaatggattttt

SEQ ID NO: 55217 - DNA, 297 bp, Glycine max
agctttgcttccacattttcccccattttgatgatgacacttctgaaatcaagaaacacacacccacttttttcctagtcgaatcactcctataaatgctccccctttgttttagaatttatgcttatcttaaaattaaattgattactcatgtgagttcttgatttatccctatttctctccccctttggcatcaacaaaaagccaaagtgcgtatcaaacttaaagtatgcaaatatatcttaaacattcatacaacattcataaaaaatatcaaccacatcatgaagtaaaaac

SEQ ID NO: 55218 - DNA, 260 bp, Glycine max
tgtaatcgattacacatatactgttttcgattaccagagcagattttcaggaaatattctcaacagtcacatctttttatgtggttcttgaatggctatcaaaggcctatatatatgtgacttgagacacgaatttgctaagagtttttcagaacaaaaaggtcttatcctcttataaagcaaaatcgttttcttctcttacaaattccttggccaaattacttgtgattcaataaggaattatttgagtgctcaaattg

SEQ ID NO: 55219 - DNA, 274 bp, Glycine max
tggagaggatgctttaatggaggatatgaaagaggcggagaaagagagaggggggagcacgaaattgaaggaagaaaaaaagggagagaagttgaactttgagttgtgtctcacaagactctcattcatcaaagttacaacaagtgttacacatgcttctatttatagactaggtagcttccttgagaagctttcttaagaaaacttccttgagaagcttctttgagaaaacttccttgaaaagctagagcttagctatacactcccatctaaa

SEQ ID NO: 55220 - DNA, 273 bp, Glycine max
tttttaattagtaattttaatgtttttttatgttggatgtgaattatctagttaccagcttacgataaagtattagatattgggtaagaactagctcttttgttatttcactgaaaaaggtaaaataaatttgttatatttttaatatattatataccttgtataatctcaatgttaataattttaaaatacaaaaatgttgatgaaatataaaaaatatggaataacgtacttgtgaactttttaaattatataattgaagaggaaagttga

SEQ ID NO: 55221 - DNA, 266 bp, Glycine max
tctcaaggaggtgagcttagttatgttaggggtgtgtgtagctaagctctagcttctcaaggaagttttctcaaagaagcttctcaaggaagttttctcaagaaagctacctagtctataaatagaagcatgtgtaacacttgttgtaactttgatgaatgagagtcttgtgagacacaactcaaagttcaacttctctccctttttcttccttcaatttcgtgctcccccctctctctttctctccctctttcttttcctccatt

SEQ ID NO: 55222 - DNA, 300 bp, Glycine max
agcttgcttgagtatttttggaagcattattataaatatcttgatgcatactgatgatcttgattcctgctagctgatttaagaatatcatgctgatttatagagcagaataagattctaaatccttcccccatttgtttttcacagtactttatgtaggcccgtctgattaattcaagagcgcaacgtcataagatatctgcacaatgaaatcatgcctcaccttccttgtatttctgagcttttattgcaaatcccaaattgcagtggattaagtggattatatacattgccttcatg

SEQ ID NO: 55223 - DNA, 267 bp, Glycine max
tcatgtgtaaattgagaggtcctgttcctgagagagaaaatagtgagtgcataatgagagcttaacaaaaatatcaggctgggtttcatctttgatactctttaaagctgtaaaattgtattaatattatttgaaaaggagttgtttgattgagatcgacacacgatactttacatcttctgcgtaaaaaaagtgtggagaagatattatatccattaatataatagtaatatttttgaaagatctgtctcatagtcttctcttata

SEQ ID NO: 55224 - DNA, 322 bp, Glycine max
tgcaagcttgcgagctattttgttagtcatattattactagaacctttgaacaccgtgtgttatgcttaggatgcatataggggtttgaactaaatgcttcaattctttgaatcctggcgtatagtattgggtaataactcaccatggcggagtgtgattttcttatctccaaattatgataatgcccacgacttcataatggtgattatgtattctataagatttgggtttctaattgaagtaattctgaatgatttatagcttaactctctttgaaaatattggctatgttattatgtattaaatgatgtattggactgt

SEQ ID NO: 55225 - DNA, 271 bp, Glycine max
tgttaaattttaaaataatgtaaattatgatttatgattgaatgactatataaaacaatgaatagacattaaactcataaattattatgggattactaatataattagtaaactcataattttatgtatgaaaatatactttttcatctgaataactctatcccggcttttattttcaaccctccaaaataaagatcagaaaaatattaatataatactgtcatctctttgatttcttttcttttaagttatggatattattataattcac

SEQ ID NO: 55226 - DNA, 272 bp, Glycine max
tgctctaaatttacattgatgtttgtatttatgggaggaggttatatgccattttttgctttaagagtaatgtcccactaaaactaactttccaaatgtttgccttcgcaggaatggcaccgaggaagcttgcctcaaagaggtccaggaaggacaaggcggccgaaggaactagttccgccccggagtacgacagtcaccgctttaggagcgttgtacaccagcagcgtttcgaagccatcaagggatggtcgtttctccgggagcgacgc

SEQ ID NO: 55227 - DNA, 308 bp, Glycine max
agctttgatccaatttttattataataactctttactcggatgttcgattgagacccgtaatatatcgacacgctcgaaattgaatgttgaagctctgagcccaatcaaacaataataactttttactcggatgtccgattcagtctcgtaatacatcgggacgctcgaaatttaatgttgaacctctgagccaactcaaacgacaataactttttactcggatgtgtgattgagttccctaatatatcgaggcgctcgaaattgaatgttgaacctatgaaccacctcagacgacgataacttttta

SEQ ID NO: 55228 - DNA, 273 bp, Glycine max
taaacattcaactttgagcgtctttttatattacaggactcaatcagacatccgagtaaaaagttattgttgtttgaattggctcagaggttcaacattcaattttgagcgtctcgatatattacgagactcaatcagaaatccgagtaaaaagttattgtcgtttgaattggctcagagggtcaacattcattttttagcgtctcgatatatgatgggactcaatcagacatccgagtaaaaagttattgtcgtttaaattggcacataggt

SEQ ID NO: 55229 - DNA, 208 bp, Glycine max
agcttttcccaaagatttccgtaaaatctgggacttagccatggtagaaatctctacataggccattgcctcccttgcccaatattatgatcagcccatgaggtgcttcacctttgggaacttccacctatcacctatggtaaaataatttgaagaaatcctaggatgccctttaggggggaggaaaccttactttttaaaagggttc

SEQ ID NO: 55230 - DNA, 264 bp, Glycine max
tgagtgggatttccccagttatattattactattaagttccatgtcattgataagaaaaatgtttatagttgggcagagaaaaaagtctaatgaatgactaataatggcataacacatttgtaccaattctatcgcaggggttaaactaaaatctaatagaagtcgttatgttaaaaattgaactacacaaaatgtcaaggtatatgtgctatgcaaaagtgcaggtctgcaggatcaaatcaattgtagaactataagtaaat

SEQ ID NO: 55231 - DNA, 274 bp, Glycine max
  unsure (1)..(274): unsure at all n locations
gctttttgaagactatttaagtggaggcctctccactaaaaaacctatggaaaaaaccatcataggggataattggcgagtcatgacagctcccagaatcattctgagattgtcattatgaagaaccttatctttgagctttcttaatatacatcagaatggtgattctaatgttaactgtgaaaagatctatgctgaaaaccatccttttgatgaagtaccactgtaatggctttctgaaataacatanctncatcatgctccacacatctcc

SEQ ID NO: 55232 - DNA, 262 bp, Glycine max
tcaacatcagaccacttccagggttttggaactacttcacatggacttgatggggcctatgcaagttgaaagccttggaggaaagaggtatgcctatgttgttgtggatgatttctccagatttacctgggtcaactttatcagagagaaaacagacacctttgaagtattcaaagagttgagtctaagacttcaaagagaaaaagactgtgtcatcaagagaattaggagtgaccatggcagagagtttgaaaacagcaag

SEQ ID NO: 55233 - DNA, 273 bp, Glycine max
catcttggctaatttacctgaaattgggagaaaatgattattaaacacacaaaatgaaaatactgagtatttattacctatatttaatagaaaatacttataacattacaaaataaccataaattgggagagtttgatacaatttatacaagttttatacacaaaagttagtcattttcaccgactaacatgttatgcgtggatgacattttgcttgcaactaatgataagggttttctatatgaggtgaaacaatttctctcgaaaaacttt

SEQ ID NO: 55234 - DNA, 267 bp, Glycine max
ttgcgaaaggcttgtctctagagctgacccatcaactgtcctaactctttcagactggcgactcctaggctcttgatcttgacttgatagaacctatttttaagcgaaggcgcctggctcaatcccatgctctttactaaagtggaataaaaaccagtgcgaatcaagactctgacatctatcataggtgaaatggatgaatgcatgaagaaatgtgtatggcacaaatgcattttatggatacgagagcccgggatattatctctt

SEQ ID NO: 55235 - DNA, 311 bp, Glycine max
cctggcgggcttgcttttcttgaaacaaaaataaaatcgttagcttgctcctaattcaattaaggaggttaaatgcttatggtaaggtgatagcaaaagaacaggtcccattttagtattttcttttaatcaaatcagcatagtaactcgggtttgtgttcctttacaagtgacttgagataaaaaaaaatcaggttagggtttataggagaaagatgatggaaaatattttgtaccttgctaatacccctgtcaccaattcagtgagaagatatcaacctattttataccttgtacatgacggagcttaa

SEQ ID NO: 55236 - DNA, 263 bp, Glycine max
acagaaggcaagattttcagttatccaacatcaatggaaacttctggacgagccattgacctagcccaaaatggtatatctgttgtgataatgtattttaaacaattcttatttcattttccttgaattagattgtgctgtaaaaatatcaactcatgttgctcttgttttgttcttaggccaaaaacattcttttacatttgataaagtttttacaccagaggcatcagaagaagaagtttttgtagaaatttcacagcttg

SEQ ID NO: 55237 - DNA, 317 bp, Glycine max
agctttgaagggaagatatagatcgatcacgagcacatagcatggtcttaaaagaagaattagcagcttgcttaacgtccaaaaagaacttgactcaacgtttgtgcgaaacaaacatcaacatgttggctatcatcaccaaatatcaataagaactaaatctagccacagcccacgagcatagggtggcaaacgagtatgcccaagtgtacgcggaaaaagaagctagaagaaaggtgatcgactcgttacaccaagaggcaaccatgtggatggaccaatttgctcttaccttaaacgggagtcaagaactttcc

SEQ ID NO: 55238 - DNA, 274 bp, Glycine max
tgtgtgtttagcaagatataccttatgtcaggttaccatcagattcgagtgaagtctgacgatattccgaagactacttttaggacccgttatggtcactacgagtatctagtcatgccctttggtgtgactaatgctccaggtgtgtttatggactacatgaataaagtctttcacccttactttgatagttttgtggtagtattcatagatgatattttggtatattcaaagactagagaggaacatgaagagcacttgaggattatgctgc

SEQ ID NO: 55239 - DNA, 246 bp, Glycine max
gcctcagatatcataatatagggggtctaattgaaaggttgcacactattttcccaattaacatcttattttaatttcaatgcaagtaaccacctccctttataaagaactcttaaattaagattctaaaaaaacaatctgaatataaatgcccaacagatataaagtattaagtttttgggaagacaaagcgccaactccgatttatattggtcccggcacacccttgtgtctacgttcggcccc

SEQ ID NO: 55240 - DNA, 272 bp, Glycine max
tctagtatttataagtcttcatcttttttgtttgttgtctctaagaaaaaaaatttcttaacttgagcttccgtatgaagtttatggttgttggagcatttaacatttgcatcatatgcatgtccttcttcatgctggaaaatcactttggttggcttttgtgttgactattgcagtagaacaatacttgctttaagtcagagcaggtctgtcatagtagagcacgtcttttgatgttgtttgggaactttcagatcttgaacttcatttat

SEQ ID NO: 55241 - DNA, 306 bp, Glycine max
agcttgcggactataccttcgaccgaacacggtcgtgtttctgtctaagcccaaattcaaggagggctgcaacatcggctccgcttccgtaactgtactggaggcggttgccgtggctttatcctctatggttttctggagttttaacatgacctccgagatggaagccatttgatcttttaaggccgatagatcggccttcatctgttcctgcacgccctcttcattatccatttttctggaccgagtgttataggggtgccttggtgttttcttagttatgacgaaattcctaaagaaataaac

SEQ ID NO: 55242 - DNA, 268 bp, Glycine max
tccatcaaatggtaatcagagctaggggtgggaataggccaggcaggtctacaggggcctacgatctggcctacataaagcttggcctgaactgacctatttaattaaaaagttaggctcagacttttttaaaatcctattaaattaaacagatcaggcttaggcttattaaaaagccttataagcctgataggccggcctatatatatatatatatacttatattattttttggatacaattaatttttttctgaaactatcagact

SEQ ID NO: 55243 - DNA, 307 bp, Glycine max
agcttcatgtaaaatgtcttaaaggtgcagttttattcaacattttccaacactttaactgcattctctacacctaatgttgctgcattaaacaagatttctgcaatctgcaatgaaaacgccaagcaaaatggtaaaaggaatgcagctagaagtgcatgttgaagtcgagaagattcaaacgacttcaaagtcgttgaactacctacgaattcattattcatggatgaatggtgtagattcaaccatggaggaaatggaggacggatgttgtttgaaaaagtcgctgaacatcacacgacttccg

SEQ ID NO: 55244 - DNA, 268 bp, Glycine max
tccgataaattatttttagaaacccataattacccctgctgcttacacctctctcttcgttctctgcatttcttcttcgcaacttcctcatattatttctcttttttcccttccaatgttcacacttcagaaccgttcaaattgaaacttctctctcccttaaaagactttctcgagagccaaaataggaagcaaatgcagaaaagtgaaatgcttcatcactttgacaacctccaccgcccaatcatgtgtttttccagccgcgttt

SEQ ID NO: 55245 - DNA, 266 bp, Glycine max
  unsure (1)..(266): unsure at all n locations
tacatcaactggtaatcagagcacattagcttcaagtaggtgctccttaaacctccattatttttttgctttaccttctcttccattgntttttcttcattttttctccatgtatctcctcaaatgtcttgttctaaatgttgttaacatgattctttagagttttcactgattaaacttgctatagaagctagattttattttctatggttcaaatttcttgttcttgttcttgaaccatgaattgtgttgagtttaagttcctt

SEQ ID NO: 55246 - DNA, 273 bp, Glycine max
tgtagaatggccagacatgatacttgtcagggttcggcttggttcaagggtaaaagggatgccccacattatttccatgacacaaatgcaaaaatgatgatttggaaactttatgcaaaactgggcatgcatgcacctatgtggacactcaagtgtcaaatttttatgctcatgtgatgctagggctcaggattcattccctctattttagtcaacccaatgtttccaaaatatgttcttttatccatttgtgcattcatccgagtccatttt

SEQ ID NO: 55247 - DNA, 182 bp, Glycine max
tctcaccgccggatcttaatcacgagctcacttttctagtagacttcaggtgggaaacaacactgcctcaatgctgctgggatagaggccctttaaggcgacatcttttagcaaggagacctgatgagaaacctttaaagagatgtgagaccactagcaagcataacatgaggcatacaagc

SEQ ID NO: 55248 - DNA, 270 bp, Glycine max
taataagaggcatgctaagtgggtagagtttttagagcaattctcatttgtcatcaaacataaaaagcggaaagggaatgtaatggctgatgcgctgtctaagagacatgccttacttgctatgcttgaaactaaattgtttggtctcgagtctttgaaagacatgtatgtgcatgatgtgaactttgctgaaatttttgctgcatgtgaaaagttttctgaaaatggttactataggcataatggcttcttgtttaaagcaaataaatt

SEQ ID NO: 55249 - DNA, 182 bp, Glycine max
ggatccttaagacgactgcggcatgcaagcttgttgtgtattttcaaaagagcagtgaacaagacttgtaactttgactagttacggaacctctattggtgtcaagaaatggatgtggacttggggttgagaccaaccaaattaattctttgcgggtttttctcttttgcttaactggaaaa

SEQ ID NO: 55250 - DNA, 260 bp, Glycine max
tgcattatgttgaaagatagagtgttgaaatgaggtgcataaatgaaaatgttagctcgcatgacaggaaagtactgaagaagaagctaattgttgcaaatcggagagttgggcgtatcttaattgggagaaaacgactagcatcaactactgatttttgcatgaatctttgaatgctaaatggatgcatgatatggaaatgatgaaggccatgttgaatgtatttttgctacagagccaaatagccaccttgtataagt

SEQ ID NO: 55251 - DNA, 299 bp, Glycine max
agctttatatttacgctaataaaataacaagccctaagcggagcaaattcgatcaccgttatgtttattgcgaaggaagaaattaacagttcactgggcgacttttacaacttaaaaaaaagggcacggattacaaggccttgaatggcatggaaaggcgtattaacatacccaaatggttttaacttggccactctgacaaaacttatatgtttacacttattgagtctaaaagaattatttctaatcgttcaagaggtgtgattgcgtgaattcccgactgacccaccttttcttga

SEQ ID NO: 55252 - DNA, 262 bp, Glycine max
  unsure (1)..(262): unsure at all n locations
taacccatattttgcaaataatgtttcccttgccaataaaaatgagagaacatcagtgtttggaacatgaacaagaccggtacaactctctataacttgccctttcttattcacataatgcataacctcncccctttgctccttaacaaatatctcgagcttcatcaatcaaatttgcctacaacttatctcctagaccatcaagtatgactttagtggtttcattggtagtcactctaacaatatctttttgtatagaagg

SEQ ID NO: 55253 - DNA, 308 bp, Glycine max
agctttgagccaattttaacgataataactttttactcggatgtccgattgagtcccataatatatcgacacgctcgaaattgaatgttgaagctctgagccagaacaaacaacaataacacttttactcggatgattgattgagtcctgtattataacgggacgctcgaaattgaatgttgaagctctgagccaattcaaacgacaataactttttactcggatgtccgattgagtctcgtaatatatcgacacccttcaaattgaatggtgaagctctaagcctatctaaacaacaataacgtttt

SEQ ID NO: 55254 - DNA, 268 bp, Glycine max
taaacattcaatttcgagcgtcttgttatattacgggactcaatcagacatccgagtaaaaagttattgtcgtttgaattggctcagagctttaacattcaatttcgagcgtctcgatatatttcgggactcaatcagacatccgagtaaaaagttattgtcgtttgagttggctcagaggttcaacattcaatttcgagcgtcccgatatattacggcactgaatcggacatccgagtaaaaagttattgtcgtttgaattggctca

SEQ ID NO: 55255 - DNA, 299 bp, Glycine max
cttcttcataaaattaatatagagcttatatcctaatgtcacatcctatcagagcgttgtgttctcgtgtcctctaacatgaagttcttcatagtcatccacctattcatctgctcccccaaacacaagttcaagatcatcacaagatccaaacacaacaacacacaaggaatgagttatcacattcctagctaatagagaaaacaagacaattaaatatacatattatataaatgagataccacttgcttaaacatagctcacgtaacttcaccacttcgctattcagaattcacttt

SEQ ID NO: 55256 - DNA, 267 bp, Glycine max
tgtgaacactaagtccctttctttacttattgtacctaaattttcatttcacaccaacgtgacatcatggattcaggtttctgcttggtgtcatcgccgaaccaccaagaagtagtccaaagccgtttcttcgacccctcatggctacaaatgcagccccacgtgcccatgagctttgtttggcccaaagagtgcttagtgaacgcgaatgaggagttccacgcgccaatggtggaccttggagggttcctaaggggtgatgatgat

SEQ ID NO: 55257 - DNA, 299 bp, Glycine max
caacttttatagcaaaaatgcttaaaaaggtttaaaagggaaaatcacattaattgggccctccaatgatcgtaagggctctaaatattaactaggatccttttaaggattgagaaaataatgaagaaatacttggtcctatagtgctatgtctaagtgttattgaaacactaatgtattttactaagcatacatgacttgacatatcattttccactaattcactagcaaaatatatttattcaccaatatgaaggcatttatgcatgtgttttcttattttaaatgttatttggtac

SEQ ID NO: 55258 - DNA, 263 bp, Glycine max
taagatggagtctaactagtctcatccactttattttgtgttcgagatcaagaaaacgaccgattgaaacaacattacaaattaaaacagatccatctccatgtgcaactatgagctttatataaaccaatgcaataccgtctggcatccatatatcagccccaaattataagaatcacattaactaaactataacatcaattaattgtaaagcaactaaaatttatgttttatgtctaccaacgaaataatattttttatta

SEQ ID NO: 55259 - DNA, 287 bp, Glycine max
tttacagggaaaaaggctttgagttcagcaagtcatcgtaaaattggtgacgctgatgataacttaaacgaagttcttgaggggaatgtttcctgatcttggctaatttgattggggtaacaaaaggattcatcaaaagagttaagaaaaactcctattgagttcttgtattagagatactctaaaattgaactaagctaaaataaacatgtagtatttaacttaaacttatcatattttttatattaaattatcacattaagtaacgccacatgatatctttttta

SEQ ID NO: 55260 - DNA, 274 bp, Glycine max
ttaaatgcagttaaagttagtagcagaatagcataatgctaagggggggtatttgttagaaacccacaaatgggttgagttatcggggagatatacaagaaaaacagggaatgaaagggaacaaatatgctttggtagtatttcttgaattgcaaagaaaacaaagtagagattatccttcaaagggtttcccattcacaaaggatttcccctttcagcagtagagctaaggttcagtttcccaactattctaacaaactattctctttctgat

SEQ ID NO: 55261 - DNA, 310 bp, Glycine max
agcctgtatatgtttttattggaatatttttgaactccgcatttaacaacacaaaattgctggacattcggaacaagagctggtatccaaaagctgcagatcatgtgaatacagaaaaaacatggcatgttgttgatgctacagacaaagttcttggaagactatcatcgacgattgctattcacatccgagggaaaaacttggtaacctacacacccagtgtggacatgggtgcgtttgtaattgtggtatgtattcttgaatagattatttgcaatgtgattgtgatcttcgcatttttgcatagatt

SEQ ID NO: 55262 - DNA, 270 bp, Glycine max
gcttgcttgtggagcttctatggaggctttatctttgagcttcaatgaggtccttcaatgcttattttccaccatggagatgcagcggaagataaaggagaagaggtgagaggaggcaccatccactagggaataagccatggaagaaggagcttcgccaccaagaatgtgccttggataagaagcttggagaggatgcttcaatggaggaaaagaaagagagagagaaagatagagaggggagcacaaaattgaaggaggaaaaggggg

SEQ ID NO: 55263 - DNA, 275 bp, Glycine max
  unsure (1)..(275): unsure at all n locations
aaataatatgctaacaaaggaaaaatcactgatgagagctacttggcatacaccgattaaaagacccattacataatgacatgtggtagtcaatgttttcccttaacaatcaactcttaatttctgtgctggagattcacatagtcaatttggaaaaaaaaggactcttataataaattaaaaatatggggaccaatttagtgagttgggaaaaatatggggactatnttcacaattaaacctatgacgagccaacaaattcttcctcatttgca

SEQ ID NO: 55264 - DNA, 311 bp, Glycine max
agctttgaaaaagaattataccttaacttttcgtggagcaaaacttggagctatgtcaggaaatgagggctttcgatgagtgcgggcttttaagtttcaaacaatgacaaggaccaccacgatgcgattagctcagcagtccagcactgcagcacgacagctatgacgacaaccacgacgacgcgagtagctcaacgagagtcactttggggggttagtagcttgaacaaggtagagtgagtgagtagaaagagtcgcgagagtcattttcgagggttgttgtaccaccccgttccgggttttaataaact

SEQ ID NO: 55265 - DNA, 266 bp, Glycine max
tgtaagctctattctatagggtgtgttttacccttctctggacatgaagggtcattcccagttagcaatctattttccctctactgaatcctttttggcatcacctcagactctccaaaagagatttccttctttgtatttccttgatttgagcttcgatttgaaacgccaagtcattcgtcacttgcatgctttggtcatgatcattgcgccttctcgcacttgttcgatgagatctaagtctatttgtagtgcttcattgttct

SEQ ID NO: 55266 - DNA, 320 bp, Glycine max
agcttcttagtttcatattatgcagatgggtttgtagctacctcatgcactcctctaatgactatggcatcatttctggcgctaaactgctgggagttggaggccatcttctcaattaaatttctggcttcagcaggagtcatgtctccaagggctccaccactggcagcatctatcatacttctctccatattactgagtccttcataaaaatattggagaagaagctattctgaaatctgatggggggggcaactggcacatagtttcttaaatctctcccagtactcatacaggctctctccactgagttgtctaat

SEQ ID NO: 55267 - DNA, 269 bp, Glycine max
tgcggactataccttcgaccgaactttgtcgtgtttctacataggcccgaattcaaggcgggctgcagcaccggctctgcttccctaattgtactggaggcggttgtcgtggctttatcctctatggttttctggagttttaacatgacctccgagatggaagccatttgatcttttaaggccgatagatcgaccttcatctgttcctgcacgccctcttcattatccattttttctggatcgagtgttataggggtgccttggtgttt

SEQ ID NO: 55268 - DNA, 271 bp, Glycine max
tattcttcctaaagtaatttttttttattccatttgggacttgaaagcatctgtacacggataaccctaaaatttgtataaagttcaatgttgtctgtactgtggagtgatactctattttggaaacaacaaaacaattatgaaaataaaccttgttttgatctttgtaaatatcttctacagcaattaatagagaaaaggaaggaaaaacgtgctgctgagttggtaaaacaggatgatgaagtaattgtaaaacttgaagattcatcta

SEQ ID NO: 55269 - DNA, 227 bp, Glycine max
ccgagcaaaatttccatccctgccggtgatggttttcacaacttgaaagcaaaattttattttattggtttgtgtttgattgggatgattatgcttaattatttggtgttgactttgggaacattttttatgagattaagaccggggaacttctgaagccaactgggtgggttgaactatccttgtctggagctgatcctaggtaagtatagagttctttctggatc

SEQ ID NO: 55270 - DNA, 266 bp, Glycine max
tccatcaagtggtaatcagagcacttgagcttcaagtaggtgctccttaaacctccattaattttttttctttaccttctcttccattgttgtttcttcatttttctccatgtatctcctcacatgtcttgttctaaatgttgttaacatgattctttagagtttccaccgattaaacttgctatagaagttagatttgattttctatggttcaaatttcttgttcttgttcttgaaccatgaattgtgttgagtttaggttcctt

SEQ ID NO: 55271 - DNA, 264 bp, Glycine max
agcttttttaccgctttttcaatgacgaagaccacctttagcacaaaccaaaaaaacaccaacaaaaaggaattttgcaacaaaaaacctgtaaggttcaccccaaattcccgtgtcatatgctaaacttgatcccatattcacttcaataatttatgggtagcccataaccccaaccaaggttcctcaacctccttttttttgaggatacaactttaacgcacctgttgcttatcgggaaagaaccctggggcattcctttga

SEQ ID NO: 55272 - DNA, 266 bp, Glycine max
  unsure (1)..(266): unsure at all n locations
tgtaggccttggatcttcttcatttttggagtcctttgcttcttgaagatcaatggcagaagaatggagaaggaacanngatgattggagatgccagttcaaggagaagatgagtcaagaagaagctccccaccataggaagccatggataagagcttgaaggtaggagaagatgagtggagggagagggagagaatgggcccaaaattttgtgcctcaaatgaggtcttaactttgaagtataattctcaaatgatcaaagttga

SEQ ID NO: 55273 - DNA, 284 bp, Glycine max
tatacaacctgcatgcatgcatgctttatgaaagactttttatactacagtatcccctaaacaaaaattgaaatgatgaaacttttcctaaaatccctctttgttaaaccctcattcgaagccccacattagatctggcagaaggcttacacaataggtgcatgaccttataaaaaactaatgccccattgtaggcgatggtgacaaccttagtgaatttctaaaaaataatggtggctctctttaaggaatgtcagatacccgcccttccaagaaaaaaactt

SEQ ID NO: 55274 - DNA, 260 bp, Glycine max
tcttagtctcgactgatgaagattatttcgtggatacttcatgcactcctctaatgacaatagcatcactgctggcactaaattgctgggaatttgaagccatcttcttaattaaatttctggcttcagtaggggtcatgtcaccaagggctccaccactggcaacatctatcatacttatctccatgttactgagtccttcataaaaatattggaggagaagctactcataaatctggtggtgaggacaactggcactt

SEQ ID NO: 55275 - DNA, 232 bp, Glycine max
agctttcattgttcaattttgagtggctcgatatattatgcggctgaatctgacctccgaatgaaaagttatgaccatttgaattgggggagagctacctttgttcaatttcgagcgggtcgatatattatgcgcctgaatcggaccttccagtgaaaagctatgaccatttgaatttctcgagagcttccgatgttcaatttcgagcgctttgatatactatgcgactgaa

SEQ ID NO: 55276 - DNA, 268 bp, Glycine max
tagccctagaggggatggaccttttcaggttttggagaggatcaataacaatgcctataggttggacctcccagaagagtatggagtcagcaccacttttaacatttctgatttaactccttttgcaggtggagctgatattgaggaggaggaactaacagatttgaggtcaaatcctcttcaaggggaaggggatgatgcaatcctccctaggaagggaccaatcactagaaccatgagcaagaggctccaagaagattgggctaga

SEQ ID NO: 55277 - DNA, 296 bp, Glycine max
cttcttaaagaaatctattgaataccatgtttgcatacaggccccaactttgtttattataaaaagcatcattccaccttagcacctaagagccctattaagaaaatgtttgaatcttccaaattatgttaatgtcggaacactttttctaattgccactccgggtggtattatgttcaaaaatgaccggtgcattccaatgcgaaggcacattactctaatattattaaaccaaaataacttaaaaaatacaaaatgttcagtaaaaaacaaaatgttttcccctacaagaaaag

SEQ ID NO: 55278 - DNA, 266 bp, Glycine max
tgcgagggttcatatatttcaatttttagagagttaagaatgtcacggatattgctatctatgtcaatggtgaagcaaaaaaaggtatatagaatgccacaagctatctacataactaatactactttgttatttttgtttctagtatctgttgtcaaataataatgttatgtaattatgtaacaataatgttgacaatctagtgacatattgtgttatcaaggagtttgacgggatagttccgtgtaatcttttttagtatacta

SEQ ID NO: 55279 - DNA, 297 bp, Glycine max
agcttgaaggtgtgttacccaccattttccatagtaaaatactggtaatgtgtctactatcattgtcatcatttttttttctccggcattgaggtgccacttgagctgccaggtctctccacctttgggcatatccttttgaaagatttgtgccccctttttgcacatgttctgtagttgcatcctatctgaagacattatactgacactgcctaacgaaggtaaccactaagtccttccaaaaatggactcgggaaggttccaagttagtgtaccacgtaacaactaccccagtaa

SEQ ID NO: 55280 - DNA, 262 bp, Glycine max
tgcttctacacaaccttggcccatatgctcagaaatctaccctgaggttcatgagaaccctagggccttctttagtagctctagcccaatcctcttggattcttctagccaatacccttggggggtaggattgcatcacgttggtggcgactccgcacgttttccttccttggaagacgcaccagtgagcctcgcatcaccctcccgccgaagggtaggttacgacaacattcaattaaatttgtacataactattgaattg

SEQ ID NO: 55281 - DNA, 324 bp, Glycine max
agcattcaagcttaaaacttttttatatggaacttgacatgacaggaagcaattctgaagcaagatgtacataccctgaccagggccactggcttatcccttttaactccacattagtagatgcattgacatcaagaaggtgcgtgacaaaacctacccaaggcttcctatttatgaagaagggaagaagggctttcagctctacttcaacaaagaaattcctaacaaaggtcagaaagtatagttagtcaactacccatgagactagaagcctatcttccaaggtcaaaagctcatcaaacaccttgatgttgatgatgttga

SEQ ID NO: 55282 - DNA, 267 bp, Glycine max
taaaattgtacgtatcacatgcttttatttgactattattaatgattataataggttaattaaattaattgtaggttgttgaactatttaattttatttatttatttaggtctccaaattataaacaaaaagtaaaattgtaactgagtatttgattttataaaatatttgtatccgagttccttaggttcttaaaacctctacaaattgtcattttttgacagtttcaagctgacatttaaattattttcagggactcaattataa

SEQ ID NO: 55283 - DNA, 310 bp, Glycine max
agcttcttggactaatttaactccgactctatattgagactgattagcccaagcttttggggtaatatgtactactcaatcttgacaaaccttctcaagaaggcacttgatccattaatgaccgggacttaccaaatgtcacttgattcaagggacccagaatcgaatcccacccaaccttgcgataggtgaaagagggaaatgtgaccatcgagtaaacacttgaaagaaaaagtgttattatttcattaatcaaaataaggatacattattccctgggtcggatggatgtgaccctctagtatcctaa

SEQ ID NO: 55284 - DNA, 267 bp, Glycine max
ctgtgcattcaatatcctgatgaggatgtcccatacgttcttaaaactggactgatacacttgttgcccaagtttcatggtcttgcaggtgaagaccctcatcaacatctgaaagaattctatattgcctgctccaccatgaaacctccagatgtccaagaagatcacatctttctgaaggcctttcctcattccttggagggagtggcaaaggactggctatattaccttgctccaaggtccatcacgagctaggatgacctcaag

SEQ ID NO: 55285 - DNA, 311 bp, Glycine max
agcttcagcttgatcgctaagtgacaccttatcctcggctaagcgcgactcaatgtcgccaagcgcaattccttacggccataactgaagtccatgaagctaagcgccagtcatggcagttaagctgaactcattgtggcaatgtgagcactaagtggggccttttcagctaaaggcatgcttctctgtacttaagatgcataattttagctaagccagccatatccaggcttagcgaaagttgcagcttttcggatctgcaaaacctcgctaagtggtgtgatcctcgcgctaagccaagcctgtgtaaa

SEQ ID NO: 55286 - DNA, 267 bp, Glycine max
taatgtgcttggttttggagtgtaagatgggattgtgagatagggaaactgcactgaggttatcacacagtaaggtaggagtaagaaatggcacttggagttcacggagaagggactgaatccagagtaaatctgcagtggtgtttgccatgctgcgatactcagcctcagtgcttgatctagctactagttgttgtttctttgatccccatgagatgagattagggccaaaatagatacatgaaccagatgttgaacgtctgtcat

SEQ ID NO: 55287 - DNA, 309 bp, Glycine max
ctagtaactttttgtacgctttttgcaagagcagtgaactgagtgttataatcatgaacagatccgatttgtgacaatttgaataactgagatctagtacattcatatggagatggaccaaattccagttctaaagcacgagtaaaatcaatccatgactgaaatggagtaaattgattagtcatttgaaaccagggaactacctctttttccatgtgaattgcaacaatggtaagacgttgagtatctgaagtgttgtagtagtcaaaaaattgctcagccttgaaaatccattgaagaacttcagat

SEQ ID NO: 55288 - DNA, 272 bp, Glycine max
cgaaggtaaaatagatgccttggttttctctggtaacccaactggccatgaataaaaaatctgcgcctatcgccagactctgtggtttatgctcctctgctgaccaccacgtagacctttgcccttttgtgcaacaatctgaagtaattgaacagcatgaagcttatgctgcaaacatttacaacagaccttctcaaccttagcagcgaaatcagccacaacagaataattatgacctctccagcaacaggtacaatctcggatggaggaat

SEQ ID NO: 55289 - DNA, 207 bp, Glycine max
tgggattccgatggggaatttagattttatgaaaaaacaaaagccgaagaataaggagatgatggtgttcctaaaaaaaaccgaattgatgggattaaaatcacaattactgcctttaaaggaaaaaatgatccggggggcgtacttgcggggggaggaaaaaaataaatgctgtttttttgttgcccaccttgacggaggaccaaa

SEQ ID NO: 55290 - DNA, 269 bp, Glycine max
tgtggtcccaaaagtgaagattttttttatgtgatggaatgcacatgatggttgtgttattaattaaaataatatttttttggattaacaaaacattttgatatataactcttatttaaggataaaaaaaaaatcaatatctttttaagtttttcttattgttgggtcgaccatccgtgtacttgacacaatcacaaggagaaaaagtcatggaaggcctcacctttatgcaatttgtgacaatttagccttatgcattgatagcttct

SEQ ID NO: 55291 - DNA, 301 bp, Glycine max
ctcgaccgggatctctaatcgaccgcggctgcagcttacaaaagcatgtgaagtgggtggaattcctaaagcaattcccttatgttatcaaacataagaagggaaaaggtaatattgtatccgatgctctttctcggcgtcatgcattactttctatgcttgaaacaaaattgattggacttgaatgtttgaaaagcgtgtgtgaaaatgatgaaacttttggagaaatttttaaacattgtgaaaaaatttcagaaaaatggtttctttagaaaagaaagctttcttttcaaagaaaaca

SEQ ID NO: 55292 - DNA, 271 bp, Glycine max
tatgcgcatatttccttacaaacgttctcttgcacaagacattctattaaccgaaaaaaatgcacccatatacaatcaaggcagcttcgttacctagattatttacacgtacttccaaggtgtatttgttacttacatcacacacatctccttggctaaattcacatacatgcatactcaaagcattttgggggaccaaaaattgcacatgtgcacatcttggtatttctaatacctatacatacacaaacctcatgatgaatcttgacta

SEQ ID NO: 55293 - DNA, 261 bp, Glycine max
tagcccataattgtcattccttttttaaagaatcccacctatttgtgaattgtttatattcatatctcaaatttgttgccttattgaacctttctgcaatatttgcccaaccaagcttagtgaagtggttgtgaggtttatttctagcattcacctattctatgcacactttcaacataatctcagtatttttatcacaccattctgctttctttcttttcacaggaacctgattgagagacatttcacaagcttaatgaa

SEQ ID NO: 55294 - DNA, 216 bp, Glycine max
agctttgaaacgcatgttaccctttggcatcatcaaaacatcagctcgatcctttgtctacaaattttactggtgttctaattattttcaatcatactatcatgtcataaaatcagcctgggatacaaattctactggtgttctaattattttcaatcatactatcatgtgatgaaattagcctgcgatacaaatactactggcgctctaattata

SEQ ID NO: 55295 - DNA, 269 bp, Glycine max
tcagggatatcaaattccgcctaacatacaataaatttggttttattgttagtaaattataaattttggttgataaagaaaatcaaagatgaaaactaaaatgcctgaatatcctcccatatcaaatccttctgagcagcagcgacttccttccaagtctcatatgtcacgtcaaccttatcaccagtgacaatccccaaatgtgttcttaatttcttcttgtggggactgtcggccttcccgatcgcaagatcgacatggaccactgg

SEQ ID NO: 55296 - DNA, 301 bp, Glycine max
tgccatctttttggaatataaacatgggacccactcctcttattttaaaaaactatatctaatcaaaggctgagaaaccatacaagtttcctagcgatttctaattatgtgggacattaaatctatcatatgctgacaataacccagaagcccatgaattttttcgggggccgagtaagtgtccgccctctccttggccttggcaaacaatcggggaagttcttgactcccattcaaggtaaaagcaaaccgatccatccacatggttgcctcttggggaaagaggcgatcacccttcctc

SEQ ID NO: 55297 - DNA, 264 bp, Glycine max
ttgaaaagtgattcctgttatgtatgtgaacttggaaatgtttgatacaagttttaaaatattttcctaagccctgttgattaggttgagtcatcctcaagtttgactttgttttcattccaatgaaaatgttagaagttacctatcattacataacctaactagtagtaacttgggttctcactctcacgtttttttcctttcatcatttgaatttcgaaaattactcccatactaaattgagggcgtgccctagcactacag

SEQ ID NO: 55298 - DNA, 296 bp, Glycine max
gcttcacattcatattctgttgccaaattcagttaaaaatgcttgtctttatagaactctttacatatcaaatacattcgttagaataaatgaaacaaattaaataaagcagaagctcataataacactttcacaagttaagtatggtcaaataactgacatatctcacattagaaggtgaaacataacattttcttgcctccatatcctatcttgcatctaactctgtgatagaagcttcattgaccgaccacagtttgtgatttgccgacgaaaaacccgcttcaaatgtaaca

SEQ ID NO: 55299 - DNA, 309 bp, Glycine max
cagctttgcctttaaggcttttacctcatcactttctttcgaaactttaacctcatcatttctcattatctttaaatttgggaaccaatcaatccttgtgtccggtcttttaacccgttatgataaccgccgatgaacccattactgcttcccctaaactctctgtcctttcttcacgccgcatcccatgccttgcgaactccttggagtaccctcgcgttgtggtcactgaaaccaattaatacaagctgtcttatggcgaggacgggattataattaatacaaccccttgttccatcaagggaacat

SEQ ID NO: 55300 - DNA, 271 bp, Glycine max
tcttgagatgcctttcgattatcttgttagaagctttggtaaagcctatgatctcattagaaacatcgatattgaaatgatcaatgaatcttaaggtcaagactacatatggaaatttataatccaccactcgacaacttttccacatgatatcttcaatcaacagtacccaattcatttgaataccttatttcaacccatatataatctgcaagtcatcatcggtgacttgagcatgattgctagatcttggtgccagaatatatgtaac

SEQ ID NO: 55301 - DNA, 287 bp, Glycine max
ctatagcacactcaagcttattattaacttttcttctaaaagttatgttacgccaaacactcaaaatggaaatgctcttttgcacccaacatttaacttcctccattacatgccgtagataaatataacaaaattcaatcttagtcttactcacttatcacatgacataataaaatattggagcatatattcgctacctaacaagttgtttattttatatgatattattgtttttttaccaatagaaaagatctgcgtattatgttaagtaatttcaaattatgttt

SEQ ID NO: 55302 - DNA, 312 bp, Glycine max
agctttaaaatttgaattaaaacgctcagaatgtgcttggtatcgattaccatatgtgtgtaattgaatacacaatgccaattttgaattcaaattttaatagctgttggaaatcatctttggccactggtaatcgattacatcctctggtaatcgattaccagaaagtaaatcttttgaataaagctttttaacttaaatttcttggccaaaccttttgctactttaaataggaattcccttcctatttaatatacccttcctaagactctagaaactgtcttgatcatccatcttgaatatctttaattt

SEQ ID NO: 55303 - DNA, 268 bp, Glycine max
ttgtgtaatcgattacacttatttggtaatcgattactagtgactgcttctgaataaatcaaaagatgtaactcttcaaaaaggtttttgactttttcaaattggttttatgtttttctaaaagttataactcttctaaatggtcttcttgaccagacatgaagagtctataaaagcaaggctttgatttgcttttaaaattcattctttcaatcttgaatacttttccaatcaatctcttacaatcctttacaagccttgaatctct

SEQ ID NO: 55304 - DNA, 315 bp, Glycine max
agcttgtggggttttgtgataatgattttgcacgagatgttgatgatagaaaaagtactaccggatttatgttttttatgggtgattgtgtttttacatggagttctaaaaagcaagccattgtgacactttctacttgtgaagccgagtatgtagctgcaacttcttgcacatgtcatgcaatttggctaagaagattgttgaaagaacttcacttgttgcaaaaggaaaacacaaagatctatgttgataatagatctgcacaagagcttgccaagaatccggtgttccatgaacgaacgtagcatatagata

SEQ ID NO: 55305 - DNA, 285 bp, Glycine max
  unsure (1)..(285): unsure at all n locations
acactatanaactctcgctcatccttatggcttgcctccggacttcactccccgtgccactccagaagatttaagccaagcccctacttttgaggggcaactcccgccttatgacaactatcccgggcaagacgatgaggaaggagatacccatctcggccccctgctccacctcaaagatccgtccccacatgaactaccccaaccgaacatagtccgccatatcccgacctcacccacacccgtaaaagaatctgttcccttcgcggaagataagggaaagat

SEQ ID NO: 55306 - DNA, 239 bp, Glycine max
agcttttaccactcggggtatcttttctggcgttcaccttgggactcgccatacgaggttttccgagttgaaagggcttgaggttgaaccctttgtattgtatcttctggctactcaaagtttggtagcttcttcttttaccttcgccattacttggactacgttcggggttactagtactaccctgctatgttcttcattttgggggcgcttgaacagtattctctttgccaacggtt

SEQ ID NO: 55307 - DNA, 270 bp, Glycine max
tgcaaactaagtgctcacctttattatgaggagaatccttcaggctgtttcatgttaacctcttcctctagatgaccattaaggaatgtcattttcacatccatttgatgtaactcaaagtcaaaatgagctactaatgccataattactcggaaggaatctttcttacatacaagagaaaaagtctctgtgtaatcaattccttctctttgagtgaaccctttggcaaaaagccttgccttatgtctcttaatgtttccttgtgagtct

SEQ ID NO: 55308 - DNA, 218 bp, Glycine max
agcttggttcaaccctccaacccagggaatgacaattttgatcaccaatacttcaataacatttcatagggaggaaagactcgggaatacgcatgctatgcatggaaaatgtaattatgagattgagatgcctgaagagacatcctttcttagttaaccacgcattaggtaccatgctcaaccattttgtttgggtgtttgtgttttttatttatttt

SEQ ID NO: 55309 - DNA, 269 bp, Glycine max
tgaagtgagaaagcgtggaagagtttatcttcctacttttatttgttgaccacagagtggtacctggagatatgtcgcgggggtcaggagaccttggggacgtcaggtggggtgctattgcccaaaaccaagcttgaccaatcccgacccaacctgggcatagtcagtcagcgagaacctgtgacgtacctaaacaggcgagctcctggcagtcaaccaataaaagaacaaagaccacaaagcaaggaggcttgtgtggtggctggcca

SEQ ID NO: 55310 - DNA, 132 bp, Glycine max
gccgcaattaatcagctattggcattactcttaagaaattcttcaagctcaaaagcccacataatccaagttttaggtcatgttcttactatggcctcgcagaaagatctccttgaaaagggtgctgtaact

SEQ ID NO: 55311 - DNA, 265 bp, Glycine max
tgggggagattttggggtgaatgattcttcacccctgccccttataacgttttctggtacaggggtgctcgcccaggcgggctaacctgaccattttttttgcaagaattctttgcaaaatttgactatccccgagtttttgcttgtttatttaaattcctaggattacgaacaaactaggcatattcaaccatgaattaagaaaaatagatgaataaacaacaagcagaaatttaaaaaggtactaggctgcctcccagtagcg

SEQ ID NO: 55312 - DNA, 283 bp, Glycine max
agcttatattgaaaagtttattatatttagctatggtcgagtaatgtgctctttaattagtaatgcttctatcacgaggagttgattgtattggttagctatcattgggtcccttctcagatgaatcaccatgggtttataattctgcatttttatcatgaggattgcattaattatcacgttgaaacttcagatttctgaattctgcataattttgattcgcagggcttcatacgaaaagatatgggcaaaacattttaattattaatattaattcaaatct

SEQ ID NO: 55313 - DNA, 266 bp, Glycine max
tggttttgccatatcgaaactaatgtaccctaacttttgcttatacaagtggtttcagaagcttgaatttatgttaaattatgaaattatgtaactggctttgataatatgcactatgcaacatgtatgtgttaataataatatagattaattgttcttttcgaaaagttattggattaattggccatattccatgattattttactgagacgcttcactaatgtcatcatttatacagtttgtagatactggattgggtttctct

SEQ ID NO: 55314 - DNA, 315 bp, Glycine max
tcagcatgcttgtctttgaagaaagtgatgaggtacaagccctaaaggcagagcttgaaagagcctgggtagtcgaaaagaagttcaagtccatagccatcaaagtctgaaaagagtatgatgaactaagggatgtcaatatggccaccgatgaagccttggaatgagaaaccaagaaggcccgaaaggaagaacacggccaaagcaaagttttgaggggctttatagggcagcaatagtgagctcaagctccgaagaggtgaaaggaatcatcacgggtcaaaggcatgatcttggaggacgagctaaaggtct

SEQ ID NO: 55315 - DNA, 264 bp, Glycine max
tcttttagaccttgaacaagcaatcaactcctctttcagaaccatgctatgtgctcgcgactggtccctttcttcccttcgcaacttgagttcactattgctaccccatagagctccgcgaaatttgttccggccatactcttccttgcgagccctcttggtctctcgttcaagggctcttgcggtaattgcattctcttcccgtaacccggcacactccttccgaacgtgtgtagcagccaacttgaacttctccttggcgag

SEQ ID NO: 55316 - DNA, 295 bp, Glycine max
  unsure (1)..(295): unsure at all n locations
atctntttattccaatttaaaaattcatgaaagtgttctaatgtctgaaatctatgggattaagatggtcattgaccaatccctattttatgatttaacaaaattgactagtgaaggtgtaccttttgagggtgcactgattgatgaattgaaatttgatttctctgtgcatgatgcccgccggttggtttgcaccaaccaagcggacatgaccggaaggcttcttgccggttcattggcttttgaaagccgcatcctccattatcttatagtccgcattttgcttcctagatct

SEQ ID NO: 55317 - DNA, 259 bp, Glycine max
tctcaaggagatgatcttagtttttagatgggtgagtttagctaaactctagcttttcaaggaagttttcgcaaagaagcttctcaaggaagttttctcatgaaagcttatcaaggaagctatctagtctataaatagaagcatgtataacacttgttgcaactttgatgaatgaaagacttatgagatacacttcaaagctccacttctctccttcttttattccttcaattacgttctacccctatctctctttctt

SEQ ID NO: 55318 - DNA, 261 bp, Glycine max
  unsure (1)..(261): unsure at all n locations
tgtgcaattgaacctttgatcacatttactcttgcatcacacaaatatcacagataccagtgtgaccacatacacactccaccagactcttcatataggctgactgactaacaattgcagcnnaatactgattatcttataactgaccctgctatttaaacagccttgaaaaatgccggtctgttgtatgattgcccaactagcactccgcaccacatcatacaatcttgtataggtgatatgtcacggtctgatcatata

SEQ ID NO: 55319 - DNA, 304 bp, Glycine max
agcttataaacaaagtactaaaatggataagatacccactacctaacaaatctaatctaataaaaaggttgcatgacacaactatattctctaaatttgacatgaagtgagactattatcaaattttagtggtagaagaggatagacacccgactgcttttgttgtcccttttggacattatgaatggaatgcaatgcccaaaggcttaaagaatgcgccaagtgaatttcagaatattatgaataatattttctaccagtatatgaaacttttgatagtatatttccatgatgtactaatttt

SEQ ID NO: 55320 - DNA, 272 bp, Glycine max
tcatggtgaatgtgattcaaaggtgttttgatgataacaatgatgacaataaaagatgatgacaaaggtgatgaacaaaaatctcaaagatcaaagaacaacgcaagtgaatcaagaacaagtcaaaagttcaagaatcatgaagaattcaagactcaagaagaaagcctagaatcaagactcaagaagaaagcctagaatcaagaatcaagattcaagattcaagatctcaagaatcaagatcaagattcaagactcaagattcaagaatg

SEQ ID NO: 55321 - DNA, 308 bp, Glycine max
agcttgggttcctaggcctagaattgcattcgggcactcattttaaatccttcatgatgtccctatacatataaaacagtcccacaactcaaaactcacaaaaccatgctcatatctcgttgaggcatttcaccgaacacttggtgggcgcatgtttaggcacgaatatcaggagaatggggacaatgtggcatgcgccatcacttcagaatacaccctatgccaaggccatcccttacaacccctcaattcaacaaaaacaagcaacaatttaaggataaatccctcacgtttcttagcaaacacat

SEQ ID NO: 55322 - DNA, 269 bp, Glycine max
tgatgtgagaaagcgtggaagagtcagtcttcctactttttttgttgaccacagagtggtacctggagatatgtcgtgggggtcaggagaccttggggacgtcaggtggggtgctattgcccaaaaccaagcttgaccaatcccgacccaacccgggcatagtcagtcaatgagaacctgtgacgtacctaaacaggcgagctcctggcagtcaaccaataaaagaacaaagtccacaaagcaaggaggcttgtgtggcggctggccag

SEQ ID NO: 55323 - DNA, 318 bp, Glycine max
agctttgagccaaaatcatgactcaccataaaccttgacccatggtgagaatgccaatccttaccctcggaagcaaaaaacgaagaaaaagaaaatttccaatcaaaagaaaaaggagaagggaaatttccaatcaaagaggaagcaaaaaaagggagagaaggaaaatttccaatcaaaggaaaaaagagaggaaaggaaattcccaatcaaagagtgggagaaagtaaaaaaggaagagagaaaaggaaagaaagctcctgatcaaggatcgaaagaaaacagaagaaatatgcagaaaggtctttggaccaaaca

SEQ ID NO: 55324 - DNA, 266 bp, Glycine max
  unsure (1)..(266): unsure at all n locations
ntggttactgggcctagggtatatgtggggcaattattctagccctcacgaaactgaacacatattcaaaaaatagaaaacatgcgccaaccaaaatggcccataagttgttttcctacaaaatcatgcgcaaatgccattgaggcatttcaccgaacacttggtgggcgcgcgtttaggcataaatagcgagagaatggggacaatgtggcatgccccattgcttcaaaatgcattataggcctagggccatctcatacaaaccc

SEQ ID NO: 55325 - DNA, 318 bp, Glycine max
agcttgtgaaggcattctgatgtggtgttatttgatggatgtattgaaagggcggagtccacccaaggtatgctattaaagaaaaaaagaaaaatatacacgtagagaagatgtcattcttcatgctcttcaactcgagaggcaaatgttaaagaagcaagaaaaaataggtgatgcttctgactagatcaattctagatcatataatatactgttaagaaaggcgtattaatgtatctagacattaagaaatgacaatgaaaaaacaaaatcatatgcaacatcggggtaaagagggttgggcctaatatttccttt

SEQ ID NO: 55326 - DNA, 267 bp, Glycine max
tgctcaatgttgactgctggggataatatcatgagtgtttggagggagcagtttgtgtcctatatggatgttagttcaaggtggtgaattgttgggctgtgacctaaatccataaggaagtttattctgttatttttttttgttttgtcctctgcctatataaggcaaggatgtcctgtatttcaaagatagaataagcttccacttgtatactgcaactataataaaagctttctgtttttccctcccgtggatgtagcctttctc

SEQ ID NO: 55327 - DNA, 290 bp, Glycine max
gctgctttcttgtggtagtgtttatctgaagattttccaaagaagggaaagggaaaacaaagtatcctgagaaagctggcgcaaagcttaataatgttgttggacaaaaacccggtgtaagtacaccaaatatgattcacagcgggaaatgatgctccttagattgcataaagggtgacccattaatggtgttgaaaaaaatgaactgagcgcacctgtctatggaaaatgagggaatcctatagcttgacaaaagccaattcacttgattctgcacatctggatgcata

SEQ ID NO: 55328 - DNA, 264 bp, Glycine max
ttacgcttggagcccttaaccaccaactttggggcttttcttacttgatcctacaagtagtatgatattattacaacataggactaaacgcacgagcctactgaaggacacacaaaaaaacacaatctaggaacgggggataaagcaaaaaaacctgctaatctattccacatatatagagtaccagaagtcaggctatatgggtcttgatgtcagctttcttggcagcaggaatagataaagtttcaatattgcttttcaatg

SEQ ID NO: 55329 - DNA, 161 bp, Glycine max
atacttatttgtgcatgactagggcccggagaaataattgtctttgatggccccaataatcttatttcaggccttggtgtcactaccggaaaaaaatttgtggtattaggctacaagcctgtaaacactttttttgagggcgggagtagattcaccaattt

SEQ ID NO: 55330 - DNA, 265 bp, Glycine max
tgccacccagctcgcccaagcgattttgtttgcttcctccagaagcaacagccttctggaggaatcttctggagggcccaagtgggcctggttgctatttgcacccccatttttactaagtacaccccctgcctttatttggagattctttcttcgtaaagttaccgaaacttaccaatttcgtaacgatactggttttcttttcgtaatgttaccgaaccttgtggattacctaatcatcccctttttgacttacgaaatatta

SEQ ID NO: 55331 - DNA, 259 bp, Glycine max
aacttatcggaaatgaatggtgctaatcaaaagcaaatccaatttaaaccgcaagaatatccgcttaaccagcagattacacgctcaaccctatggccctcaattctgaccgcaatgaattgcgcttggtgacattgggtctcgcttagcgcaggtgaagccatcgctcaacgatcagtttgtctcttagcggaattcaactcgaattgatttttgctgacccaaaccttggcttccttatcggaaaaaatcaacctca

SEQ ID NO: 55332 - DNA, 267 bp, Glycine max
tttaactgcctcagttcttcccacaaatctctcttcccagcaagatgacatggagcatatacattgacaatgaacaacttcaaattgtccttaatccatgtccctacaagcattaaaaaatttctgcctttcaccctcctgtccacctcgaaatctgaattgttccacatgcaaagtaagcctccagctgtgtgtactgatggaacactgtcccaagagacattagaatctccccatatgttttggcaaatgagcttggtgaaattc

SEQ ID NO: 55333 - DNA, 208 bp, Glycine max
  unsure (1)..(208): unsure at all n locations
agcttagctattattttatacatgcagcctatcaaagatattggtctataatcatttanggactgagggtggttaactttanggattaaagccaagaaagaggcattgctgcctctatggaaactaccatggacatggaactcatccacaaatcttttgaactctggtttcaccacaccccagaattccttaataaaattgaaattaa

SEQ ID NO: 55334 - DNA, 311 bp, Glycine max
cagcttgccgaactcttttaagcttatacgccaatcattggcaatagtgcttatttcttcctattccaatgatgtatatctgtctgtatctcgtcggcttaacgaattcctaccctccaaatttaatggaaaaaaggacaggtggtgaagaaaatagagtgacagcatagccattcacatgatcattgaatgttataaaacttttacctgttatgtagcacacccaccatgcctactttttttctttttctgtccttttcaacatacctcttatatttcaataactccgaacatccccctattataataaa

SEQ ID NO: 55335 - DNA, 262 bp, Glycine max
tatatgcaatgtgataccatgtgaatgaaaaatcatactagagaacttaggagttcataataagacacatcacacaatcagtatgtaaagtcactcttgctggtcactttatatgacgataatgttacaattatatgatatcaacatatgcttaaatgaacactcaaactaagcgtatttaccctaagacttaaattatgaagaatttgttaggatcttactgatgcaagctccattggagcttgtaggcctaggatcttct

SEQ ID NO: 55336 - DNA, 270 bp, Glycine max
tatagaaaggtgaaacttcctgcttttattcgttgaccacagagtggtgcctggaaatatgttccgggggtcatgaaaccttggggatgtcaggtggggtgctattgcccaaaaccaaacttggccaatcccaacccaaccccggcataattcgtcagtgagaatatgggatgtacctaatcacgagagcttctggcttccacagataaaaggaacaaagaccaccaagcaagggggcctgtggtggctggcccacttgtaattttgttc

SEQ ID NO: 55337 - DNA, 264 bp, Glycine max
tatcttaattgaagtgttattgtgaaatggaatgtagaggctaatgtacttaactacccccactttcatttctactaatcatagtctaacatattgacctaaccagtacttgagtaaggcaaatcacatcaacataacttcatatagaaataaactaggcacataatgagcaaaagagatattacctccaacatcacattcttgaatgacacaacttcctttgcctcttctacggagagctacacattttattgaatattagca

SEQ ID NO: 55338 - DNA, 297 bp, Glycine max
atcttctcccccattttcctataaataaggggaaaagtgaagggaaaaaatgttcagcccttctggtaatttgaaaatcacttgaaattagtgaaaaaaattgtttccgtgaagaaaatccaagccgaagcacttccgtaacatttccgtgggtgatttcgcgaaaattttcaaccgttcctcaacgttcttcgttcgttcttcatcattcttcggtcttcaaccggtaagtacccgaaatcgaacttttcaattcattctatgtacccttagcggtcctcatttgttttcacatgc

SEQ ID NO: 55339 - DNA, 264 bp, Glycine max
tcaatttgtagcctcaaatcagccactaccattgtttctcttgagacagaagacgaattagaaagttggttttcttcttcaacccattgaaaaaattgacagttatctgggtctgtttggggtaatgcacaagtatagaataaccttcctgggtttctccttgttcttgcagttcgaatagctgcacgtcttccatggtggcattgccgaatgaaactaccagaaaatgcacaacaacttccacttgcagacatggacaaatca

SEQ ID NO: 55340 - DNA, 289 bp, Glycine max
tttcttaagggaaatcaactaatggaggggaaagttggatagtgaattttatttgtccgattcacaattctgaattggcctagtacttagttggacatccatacgttgggcaactgacttaggatgagaagaatattattgttgatatgacaaagtcaatggagaaaccaataaacatcctgctaacgttgaaagagcttaatgccaactgttgcaccccaacaaacaaatattcgatgccagaagcgcctatggttctttcattagaggaagtgataatgaaacgcca

SEQ ID NO: 55341 - DNA, 263 bp, Glycine max
tatccataaactaaaactagtttatttataggttaaaaattagcttttggagaagtaatatcagaaaacttctactcattagcttatggagaagctttttctttttaattttcttctcctattagtgcttatagaaaagcttggcattgttggtgtttggaggagtaggagcagttcttggaaaaactccggtgacaaggtcttgtcgtaaggttctggttggaggttgcatggctatggccataacatttggcctcaccaaa

SEQ ID NO: 55342 - DNA, 472 bp, Glycine max
  unsure (1)..(472): unsure at all n locations
tactaagcttgtatgcctattgaactaagctccctgctctgcttattatttgtatatgttgaattatgntaagtggttctgaacctcgccatttgatgtgtggacaggacagagagtttgaatagttttggtggttccttagtttgattactttgttggatgattctattgcctattgctaattgtgtgtctgctttggtttggctgcattttcttttcttggttgataccttattcacatcaattgtttgatcttttcttgtttatgcttccaagggtgcataccactatactaggttcttgtttttcatgttgaggttgaagcatgtgtttacataagtcttcttctgttgtgtagacattgaattaagtaaatatatcgttcagctaatcattgagaagcatgcatatgttgcaaaataagtttaactcattntctcccttggcatagttaatagctttaatagataag

SEQ ID NO: 55343 - DNA, 488 bp, Glycine max
  unsure (1)..(488): unsure at all n locations
cttgtatgcctattgaaactaagcttccctgcatctgcttattatntgagtttatgttgaattatgtaagtggtttctgaaccttgccatttgatgtgtggacaggacagagagtttgaatagttttggtggttccttagtttgattactttgttggatgattctattgcctattgctaattgtgtgtctgctttggtttggctgcattttcttttcttggttgataccttattcacataattggtttgatcttttctgttttatgcttccaaggttgcataccactatactaggttcttgtttttcatgttgaggttgaagcatgtgtttacataagtcttcttctgttttgtagacattgaattaagtaaatatattgttcagctaatcattgagaagcatgcaaatgtngcaaaataagtttaactcattttcttccttgtcatagtttaatagctttaattanngatagtttaacaaatttcaa

SEQ ID NO: 55344 - DNA, 464 bp, Glycine max
gaagctctgataccacttgttatacatgtggtctcagatatcttaagaagggggggttgaattaagatattccaaactatttcccctaattaaaaatctatttcactttttaaccaagttatgaattcccttaatgacaatcttcttaaatattaattcaaatgaaacaatttgaatatgaatataaagcgataataaataaaggagattaagggaagagaaaatgcaaactcggttttatactggttcggccacacccttgtgcctacgtccagtccccaagcaacccgcttgagagttccactatcttgtaaattctttttacaagttctaaacacacaaggacaatccttcctttgtgtttagaattcctttacaacaagagactcacagtctcttaatcccttagagaatgagaagaagaagaagaacaaatctctctagaaagagaatggatttacaga

SEQ ID NO: 55345 - DNA, 472 bp, Glycine max
  unsure (1)..(472): unsure at all n locations
gtcttaaagggtcaacctcaagatgttattatcttattatggagatgatactntaaagacaacctctatccannattgttggaggatctcgaaaatttgacaaattgttaagatatagcagatgtcctatagacaattntggtcattggtatgagggagaaaaatatgttcatgataaggatactgttgtttgttattnttgtagaaaagcacatatgagatccaagtgcaaggacctacctaagaagggtgcttccaatgcattcagaactaacaagagaggacccaaaaagctttgggtacctaagaacaagattattcatgttgcatgtgttcttgacagtaagaaacgcttacctaccatggtacctggacagtggcagctcacgacacatgacanaagagaggtgtatgttccaatgtctaacccttatgcatggtggaactgtaactttcagagggaataaaaaag

SEQ ID NO: 55346 - DNA, 472 bp, Glycine max
  unsure (1)..(472): unsure at all n locations
tcatgctatcttatgcaatgactattaactttgtctacggccaatcactttttatggttggactttatttgccaaaaccagtctttagccatgggcaattatacgttgcattatcaagggtcaattcaaggcaaggattaaaagttcttattcatgataaagaccaagaaaatatgacttctactactaatgtagtcttcaaagagggtttcaaaaatcttacaaggtaactctaaattttcaaacaacaaattgtactatctatnggcaacaattccaaactgttatcttacttatatacattctaacatacagccaaatatgatatcattatatacaatgttaaatttacattgtcaggtttgcaatcctaatcaccacattaatatcttccatttataatttcattaactgagtggtatattacttagcgagttatcacaacttaacatttgctttgacatttacatgt

SEQ ID NO: 55347 - DNA, 335 bp, Glycine max
cgccagactctataggtgatgcgcctccgccaaccaccacacagacacttgcaccggcgtgcaacactcagaagcaagtgaacagcctgaagctcacgctgcaaacatctacgacagacctgctcaaccgtcgcagcaaaatcaggcacaacagaacaatatgacctctccaacacaggtacaatccaggggggaggaagcaccccaaccctagacggtggaatccttcacaacagcagcggcaacaacaacgacaaccctatattcaaaacggctgctgggccaagcgaccatacgatcctccacctatccaacaacaaccacaagcaatagcc

SEQ ID NO: 55348 - DNA, 395 bp, Glycine max
gctttacgtgtggtggataagtctgggattaggagaatcccgttgggtatcacagttataacattggcgatgttaaacactccgtgtcacttcaggctgcaacacttgggattatcaagtcctgaaaattctatgctaaggtggagaatatctatggcacgtgcataatatatattagtatgtgaaaagttttatctttcaacaacaaaggttgcttctaagggatattcaaaggcaaactgttgatatacttggatacttgtattgaagacaaaacgcgctatattaattcatctatcacagtcaaattacacaataggattgatttgatttggagaggagataaggaaatgtattggtttctcttctctatatccttctactttaggacttta

SEQ ID NO: 55349 - DNA, 440 bp, Glycine max
  unsure (1)..(440): unsure at all n locations
gctcgctattatttttcatctttatttaaatgccacattcttcttcaccagctcattgagaggtgatgcaattgtagagaaattaggaacgaaccttctatagaagcttgctaacccatggaagctcctaatatctcccacactttttggggtgggccatccttggatggccttgattntctcagggtccacttggaccccatttctaccaactacaaaacctaagaagactatattatctacacaaaaggtacacttctctatattttcatagagggtgttttcctaaggactggaagaacttgcctgagatgtcctaagtgatcatctaggctcctattgtccctaaaatatcatcacaatagacaactacgaatctacctatgaaatcccttaagacatgatgcataagcctcactaaggtgcttggtgcattagtg

SEQ ID NO: 55350 - DNA, 426 bp, Glycine max
  unsure (1)..(426): unsure at all n locations
caganatcataagaacggngggttgaattaagatattacaaattatctctccaattaaagttctattatactttctattctagttacaaattcccttattaatgaacttcttatataatgattcaaagagaacaatctgaatataagtataacacaataataaataatagagtttaacggaagagagagtgcacactcgaatttatactggatcggccacaccctagtgcctacgtacagtccccaagcaacccgcttaagagatacactatcttgtaaaacccttttacaagttctgaacacacaaggacaatccttgctttgtgtcagaattcttttacagtacgagaccctcggtctgttactcccttagagaattagatagagaagaagaatgaatctctctcgagagagattagatttaca

SEQ ID NO: 55351 - DNA, 430 bp, Glycine max
ctaagcttaacattcaatttcgagcgtctcgatatattactgtacttaattatacatccgagaaaaaagttattgtcgtttgaattggctcagagcttcaacattcaatttttagcgtctcgatatgttacaggactcaatcagacatccgtgaaaaaagttattgtcgtttgaattggctcagagcttcaacattcaatttcgagcgtctcgatatgttacgggactcaatcagacatccgagaaaaaagttattgtcgtttgaattagctcagaggttcaacattcaatttcgagcgtctcgatatgttacgggactcaatcagacatccgagataaaagttattggtcgttgaattggctcagagcttcaacattcatattcgagcgtctcgatatgttacgggactctatcagacattcgagaaaa

SEQ ID NO: 55352 - DNA, 291 bp, Glycine max
aaacactcttatgaacttcacgctgctccactcgagagtaataagtacagataaactcaagcttgtgtgcacacaatttttcgcacgtgcatactatacataacaatgtgaaacggtttagatttcggcaagaaatggtgcttgtaagggataatcagcacgcaaactgatgatatacgtgaatacttgtattgaatacagagagcgctatattaatctatcaatcggatgcgagctacgcggtatgaatgaattgaatctagaggagacattaaggaagtgtatggttaa

SEQ ID NO: 55353 - DNA, 402 bp, Glycine max
  unsure (1)..(402): unsure at all n locations
cacaacangttttccatatccacaatgtgcgcataaacccaccatccnctggtgcccacctccatctgagctcacgtattcccacgtagcccatatcctcgtttctctcaacaccgggtccccatcaatcctcccaagctttcacaacatccaatcaaaacaacattcatacagcacaagctatcacagccaagcaaaacagggcaaaggcagaaaactctgctcaacacaccaaccaaaatcacagcttttctcactcanagaccccagtaacaattccttcgatccaatttgttaaccgttggatcgactccaaaaatntactggaagtctatagtacataagcctacattgtgaccgntgtgatctactagcanacatctagaactcattctgcactac

SEQ ID NO: 55354 - DNA, 292 bp, Glycine max
  unsure (1)..(292): unsure at all n locations
caaagagaaaatgggagggtacatcccttgtggatctatgcttgtaaaagggtttttacaaggttgaaagaaatctcaaggaccgcangtcgcttggggactggatgtangcacaagttgtgatgcaatcctaccccgcaagggcattggataaaaaactccaagttgattgggccagagatgcaagagaaggccctagggttcttatgagccttagggtagatttcgggcccatgggctaagtatgagcccacttatctttgtaatattagattaagggttcattattttt

SEQ ID NO: 55355 - DNA, 482 bp, Glycine max
  unsure (1)..(482): unsure at all n locations
gctgctgtgggctttatggggctgatcttgagcttaatgaggtccttcttggtgattntccaccatggagatgcagcagaagacaaaggagaagaggtgagaggaggcgccatccactagggaattagccatggaagaaggagcttcgccaccaagatgagccctggataagaagcttggagagaatgcttcaatggaggaaaagaaagagggagagaaagagagaggggggagcacgaaattgaaggaataaaagagggagagaagtggaactttgaagtatgtctcacaagactctcattcatcaaagttacaactagtgttacacatgcttctatttatagactaggtagcttccttgagaagctttcttgagaaaacttccttgagaagctagaacttagctacacacacccctctcataactaagctcaccttcttgagaagcttncttaagaagattcctaaagaagctagagatt

SEQ ID NO: 55356 - DNA, 305 bp, Glycine max
  unsure (1)..(305): unsure at all n locations
ctcgatgatctgcatattctatatttactctacttaatctttccttttattctatccactggatcagagagagagacatggattcaagtctaacatcacactaatgatggtgcccactatgtctttcttatgctccatgggccagttccagcccttccagatctcttctanaataatttggaagcaatctaccccacctgtcacaatatgaaaaattattaagtgatcttaaatcttcacatctgctttgatcccggctcatactggaataatcatgagatatatagcttatgagatacttaccg

SEQ ID NO: 55357 - DNA, 290 bp, Glycine max
  unsure (1)..(290): unsure at all n locations
cccatcacatgtggtactaggtggctgtcggtctattgtgcacaacaagttntccacatacacaatgcgcgcataaacccaccatcccctgttgcccaccttcatctgagctcacgtactcccacgtagcccatatcctcgtttctctcaacaccgtgtccacatcagtcctcccaagcttccacgacatccaagcataacaacattcaaatagcacaggctatcacatgccagcaaaacatagcatagggcagaaatctctgccaaaacaccaaccaaaatcacagttt

SEQ ID NO: 55358 - DNA, 378 bp, Glycine max
  unsure (1)..(378): unsure at all n locations
gctcanaanattcgagataaactctgcttgaagggtagatacctggataattacaatcatcatgaaaatggtagattgtggatagaatggaatgataacaaggtagatgttagatatgttaggagtactagtcaatttattcactgtggggtttatgatgtggctggcacttttaagttntggttgacagcaatatatgcccacaaccaacttaatgagaggaaaaagctttggaaagatttggaggaaattcatgatatgcaacaggggccttggtgtgctgttggagattataacaatggggctaanagtcaagacagggttggaggtaaactggttactgaggcggaatatgaagatcttcatgctatgatggat

SEQ ID NO: 55359 - DNA, 421 bp, Glycine max
  unsure (1)..(421): unsure at all n locations
actagctgtatgactgacaacctaagatgcccttatgcctcatgactagttcatgatatctgctgtggaaatagtataagatgaatgaattaatgtgtacaatggcaggatatgtatgcantttcttctccttttcttaggttntttctccctcccttccgaatcgtaaatgtgtgccataataagggtaccgttttacagagttgtcctagcagtttgtgatgttttaagttctatagttaccaatagtgctcatcagttctttgattgtatcttttcttttctctttcttatgcgtttatatacatattcttttattgtatcctttaactgatatatgatataatacaaatgagcatttcttttattgaatataatgtgtacatcctttnntgtttgcatttatatntagactctcata

SEQ ID NO: 55360 - DNA, 476 bp, Glycine max
  unsure (1)..(476): unsure at all n locations
ctcgcccaggcgagcagggttgctttctctataatcaacagccttctggaggaatcttctggagggcccaagtgggcctggttggctattgcacccncatttttactaagtacacccnctgcctttatttggtgattctttnttcgtaaagttacggaaacttacgaatttcgtaacgatactggttttctttccgtaatgttacggaaccttgtggattacataatcatcccctttttgacttacgaaatattacggaacctcactaattgtgcaacgatgcttccatttgatttccggtgtgtcacggaaccttacggattgtgcatcaatattttcttttgttttccggcatgtcccggaatttcacaaattgcctaatgatgggtgccaagcacctcacatggaccaaacaaaagttgcatgtcatcaagcataggtccccggacgaaattaaggtatgacaccaagagaga

SEQ ID NO: 55361 - DNA, 462 bp, Glycine max
  unsure (1)..(462): unsure at all n locations
gctgagagtcgacattcccccctcccgggctgtattcgttgctctatgttaaacaanggcactaatcctggattatcttatctgtataataccgcggcaggtgtgccatgggtaattgctacagtctacagaaagatcatgagactgcactgaagaattttcaacgagctgatcaactgaatcccagatttgcatatgcacacaccctttgtggacatgagtatgaacattagtctttcttttatgatacacatgcgtacacacaagaattcggcaactttttatgagcgtgaatcacactacttttttgcaggatcgcgcactagaggatttngataatgggattacgtgctaccatagtgcacatacggttgagtcaaggcactacaacgcatggtatagacttggaatgctatatcttctgccagaaagttatgagctctctgnacatcatttccatat

SEQ ID NO: 55362 - DNA, 470 bp, Glycine max
  unsure (1)..(470): unsure at all n locations
tacccatcacatgtggtactaggtgttgtgtcgggcgatggtgcacaacaagttttccacatccacaaatcacgtataaacccaccatcctctgttgcccacctccaactgagctcacgtactcccacgtagcccatatcctcgtttctctcaacaccgggtccccatcaatcctcccaagcttccccaacatccagttaattcaacatccaaatcatcacaaactaacaaaccaagcaaaacagggcaaaggcagaaaactctgcccaaaactcanatgaaaatcacagctntttctcacttanagaccccagtaacatttccttcgttccaattcgttaaccgttggatcgaactcgaaaatttactggaagtctctagtacataattctacanttttaaccgtgggatctactagaanacatncannaacgcatatgtactactcttttccacaccagcaaatacat

SEQ ID NO: 55363 - DNA, 365 bp, Glycine max
  unsure (1)..(365): unsure at all n locations
tagagcctntcatgtctatgctgcagattctaatcttgtttctactcctgaatatgcagagcttgcatgatgtggtcttgcaacgaccagttatgagcatggaggagtttctgcagaatgttgcctagccaggagtccagccttcttctttgggagggggtgaggcctctgcaacccatgagcctcagccggaccaagaggattgatgagaatcctgaaattggccaaatacaggctaaaggcccaagtggagaagggcgaaggcccaagtggagaatgataaagcccccgagtggagaatgatgaacgcccaagtggagaaggatgaaggcccagaggcagagacactatcaagactattaatt

SEQ ID NO: 55364 - DNA, 461 bp, Glycine max
ctaagctctaaatcctttctaaagggtatataatactaatttttaaatgatcattccacaacatatactacatatttttagaaaagctttcccataaatgtatttatattattttagaatattcgttcgaaaaatggaatgttaaaaaatacaattctgaaatgcatgctacatacttttggaaaaacttttccaaaactatgtttatattatttttggaataccattcttgaaattgggagtgtttaaaaaatacaattctagaaaattcattttgaaacacaacttacatatatttctagaaaatgtttttcatgactgtatttatattcttccggaatacttgttcttggaaatagagtgttaaaaaactcaattatggaatgccacttctataacccatgttacatgttctggagaagttttttcataattcgtttaatatgcttctagaatatcta

SEQ ID NO: 55365 - DNA, 421 bp, Glycine max
  unsure (1)..(421): unsure at all n locations
actaagctggacttcctggtttgggaacctctccttcctcaggtgttctccattctttatcacctggttcaagcacgactntctttctgcttttgttggcttgccttgcatagcttgcattattcttttcaatttgaaccttcactggctcatgcaacttcttcacatactcagctttagcctgtgcatccttatgcttaaacatagcaatgttagacataggcaacaaatcaagaggagtcaaaggattaaatccatacactatctcanatggtgaacaattagttgtgctatggacagcccgattataagcaaactcaacatgaggcaaacaggcttcccaagaattaagatttttctttaaaacagtcctaagcagtgtgcctaaagtccgattgactacctcagtttgaccatcagt

SEQ ID NO: 55366 - DNA, 454 bp, Glycine max
  unsure (1)..(454): unsure at all n locations
taacccagcttgccttgaaccagaaatctgtacctgttgcaagggtctgtggtttgtgctcctctgctgaccaccatacagacctttgcccttccatgcagcaacctggagcaattgagcagcccgaagcttatgttgcaaacatttacaatagacctcctcaacctcagcagcaaaatcaaccacaacagaacaattacaacctctccagcaacagatacaaccctggatggaggaatcatcctaatctcagatggtctagccctcagcaacaacaacagcagcctgctccttccttccaaaatgttgctggcccaagcagaccatacattcctccaccaatccaacaacaacaacaacagccccagaaacagccaacagttgaggctcctccacaaccttccctcanagaactngtgaggcaaatgactatgcagaacatgcagtttcaaca

SEQ ID NO: 55367 - DNA, 499 bp, Glycine max
  unsure (1)..(499): unsure at all n locations
cactaagcttgaaagtgggtgttttaccttctcgctaagccaatccgttggtttattgatctgtacgctaagtgcaacactcattggctaagcgcaaggaagaatctggaagaagatgagctatacaggttcgctaagcgcaccatttcatctcactaagtgcaccactttagtccatccgttaagcgagaaaggcacgcgctaagccgaaattcactaatgtgcactaagcggtccagaattgtgctaagcacacgagcacgaacaaggccacttatttaagcctgaaatcagaatttaaagggggagtttgaactgggattcagagattttcatgtcttgagattctagagagagaaaggtccaagttccagagagttttgagagattctgttgtgtgaagattggcagaaaccatagcttgaagcatgagccgattngagagctcgagatgagtatgtgagtgattgtgagttcctagaggtgaacgagacaacct

SEQ ID NO: 55368 - DNA, 444 bp, Glycine max
  unsure (1)..(444): unsure at all n locations
ttatttgtacctcttactgttaatatttcccatgntgcctcaatcatcttaacttgcttgcaaagatagaatctaaggagagagaaaaggggacataatattaagcaaaagagaaaatattaaagcaagattaggttaatagaagcgtctaacttgatgcaacattatatcatagtgatctatttggatacctattgttggtgtagtcctgggtatgtgtattttttggatgctacgtcaccttgcaggtaaaacttcttttttttttaactctatcaagcaaagcaaaaagaacattttcaaatgtgtctccaactcccgattacacgaagtgcaaatatttaacccttatgaaaaaaaaaaacaacaacatggtggtggngggttcataaatattggaatcaaacagtgcaggggcattgctgtctctaatcaacggtcaag

SEQ ID NO: 55369 - DNA, 418 bp, Glycine max
  unsure (1)..(418): unsure at all n locations
taacctcatcgtccctcacagtctntagatttgtgtagctcttcctatccttgtgttcggactctcagccacttatgatagccaccgatgatcccattactgcttcccctaagctctctgtcctttcttcacgccgcatcccatgccttgcgaactccttggagtaccctcgcgttgtggtcactgaaacctcgtgcgatgaaaggcgtgatgcttttgtctgatggcactcctctcatgggacatccttcgcatgaagatagaatcctgattcttccttccttctagcgagggaaccatntaacagacgcccctccatgctagccaagagttggtgcacaacanacaattcttgcgctgctcttttcacatcctcggtcgaacgtgtcatacatggccaaaatggcgacgaccgggc

SEQ ID NO: 55370 - DNA, 448 bp, Glycine max
  unsure (1)..(448): unsure at all n locations
gtacgcttgtatttctagcatccagcatatgttcttttatttctcgagccgactagtagtatgatattatgacaacataggactaaactcacgagcaaattgaaggacataaaataatacacaatagtggaacggnggataaagcaaaaaagcctgcaaatctattccacatatatagagtacccgaagtcgggctatctaggtcttgacgtcagcttgtctggcatgcgggaatagataaagttccaatattgctcttcaatgatgaaacttactgttaaatgaaacaaataactaactgatgacaattatggaagagaaagatatgccgcatatctataatctatctgctgggacatatcagtgttgataagaaagaaagagaaaaggagagcaagagagaatcctgtgagaaagggcaagcactaacctcagttgtaacgcttct

SEQ ID NO: 55371 - DNA, 474 bp, Glycine max
  unsure (1)..(474): unsure at all n locations
tactaagcttgtacgtggtcgggttaacaagaaaatcatggttttttcttgattctacacttaggttcaaggagagcattcacctattccttgtctacttaaaggaccactgtttctttgacctcccaacctttattgacatgccacaattaacagtgcccaaaggtttgttttttttttggtatgcatttgctttcagttcatatttcccccttttttttctacgatgataggtattacaaaagaatgtagatctgattctctatgtgtttgttactcatattcctggaacataatttacccaaaacactctcccaaatttggaacaaatttgtcttgatccataataatgctctcctatagcctacggttgggtgcacaaaaatagcatatgcattntgctcatggttcaatgacacattcattcacatttaggctcacaagggtgcaagggattcaatcattcattaacat

SEQ ID NO: 55372 - DNA, 413 bp, Glycine max
  unsure (1)..(413): unsure at all n locations
ggctaacccatggaagctcctaatatctcccactctttttgttgtgtgccattattggatggccttgattntctcagggtccacttggaccccatttctaccaactacaaaacctatgaaaactatattatctacacagaaggtacacttctctatatttgcatagagggtgtttttcctaaggactgaaagaacttgtctgagatgtcctaagtgatcatctaggctcctactatacactaaaatatcatcaaaataaacaactacaaatctacctatgaaatcccttaagacatgatgcataagcctcataaagttgcttggtgcattagtgagcccaaaaggcatcactagccattcatacaaaccaaacgtggtcttgaaagcagttttccactcatcaccctttttca

SEQ ID NO: 55373 - DNA, 359 bp, Glycine max
  unsure (1)..(359): unsure at all n locations
agatgatgacaaanagcccacgagaatgatttcaagattgagtcaacacgtttcacgaatcaagagaagtttgatttcaagattcaatataagaaatcaaggagacttcacacgggaagtattgaaaatatttttcaaaaaacaaacatagcantaatttgtttttcaaaagagtttttctcagaattttctaagttaccaaagtttttactctctggtaatcgattaccagtttcctgtaatcgattaccagtggcaagagttgatttcaaaagttttgaactgatattgcagcgttccaattgatttcataatggtgtaatcgattacaagatattggtaatcgattaccaatgtat

SEQ ID NO: 55374 - DNA, 470 bp, Glycine max
  unsure (1)..(470): unsure at all n locations
aacctgannatgagagataatgattattattcttctctaaataaaaatactaagtatttattacctatacttaacagaaaatacttataaccttacaaaataaccataaattgggagagtttgatacaatttatataagttntatacacaaaagttagtcattntcaccaactaacagttgccccaaatttacagttntgcttgtcctcaagcaaaaagagaacaactcacttgtcctcaagtgacaatgacatgcagtgattatgtacgaaggtgtatgctacaaagtgactaattgcatgataagagaatggagtaaaatgccctcaacacttgtctttcacaacagttatctaaagacaagaataaaatgtaacctgaacagatagatgaagttaggcataagacagatattaaggaaagtagcttanaccacagtctcacagctaatggttcactcaagcacaagt

SEQ ID NO: 55375 - DNA, 417 bp, Glycine max
  unsure (1)..(417): unsure at all n locations
aatatacattgtgttttacactgtttctattttcaaatattagtacaggaagggaaacaatgcaaacatgttgtctttatcacttgtataaatctttaaaatcgaaaatgaagtgaaaaattgtagcacctttgcaattatttgtgaaaagaggaaatggaaacaatttttttttcttaaaccaaacaggcccaatttcatcattttgctgtaaaatcttatttttctttgggctttggtatgtatattntagttgntatgtgatgctgttcattntaagaaagtacatcatccttgcttgatggtaattacactacacaaatgcaacagcagcagcaaccatgcagagtcagattgacagaggcgtttcatacaaaagagtattaataatagtaacatatgtgggtaataatatta

SEQ ID NO: 55376 - DNA, 230 bp, Glycine max
  unsure (1)..(230): unsure at all n locations
cttcaaattcaatttcgatcgtctggatataatacgggacctaatcagacatccgagtaaaaaggtattgtccgttgaatttgctgagagcttcaacattccatttcgatcgtcttaatatattacggatctcaatcagacattcgagtaaaaaggtattgtcgnttgaatatgctctgaggttcagaattcaaattcgagcgtctcaatagaatacgggactcaatcag

SEQ ID NO: 55377 - DNA, 432 bp, Glycine max
  unsure (1)..(432): unsure at all n locations
gctagtgagagcttgttgagagccaaagtggagngattttacttgtaacttgttgaagcnagaagaacttggtaattagtcaagaactggatgtagtctcgatggtagatacgaaccagtataaatttttgtgtcctatgtgttttttcttttgaattgaattgtgttttgaaaactttttatgtcttgaaaattctattttcattgtctaaaagtgtttggcgaaaatatgttatctgtcttaataaagtctctcttcagacaataatttggttctttttgaaaaagttgttaaaattnttctaaaatcacaatgcattttcctttcttatgatattcacctttacagtttggtatcaaagctcagcctctaagggctgagcacctgacaatgtctataggaacaaattttgatggacgataacaacaatt

SEQ ID NO: 55378 - DNA, 490 bp, Glycine max
  unsure (1)..(490): unsure at all n locations
tatgcgcatatttccttacgaacgttcacttgcacaagatattctattatctaaganaaaatgcacacatatacaatcaaggcagcttcgttatctagattatttacatgtacttccaaggtgtatttgttacttacatcacacacatctccttggctaaatttacatacatgcatattcaaagcattttggggtaccaaaaattgcacatgtgcacatcttggtatttctaatgcctatacatacacaaacttcatgatgaatcttgactatctacacaataaggtgctacatttcatgctcttttcaagtntttgctacctaaagtcgcatgcaaattcaagtatattttcctttgctgactaaaattgtattcaaattaaaaggtatattatttttttgtaatgtatttcctttacataacatgcaacatatttatantatattttttgtgagacattntgactaccaaanattatatgtacataca

SEQ ID NO: 55379 - DNA, 336 bp, Glycine max
ccctttttgcaccacttttaatttttgattggtcttaattgtcaattaattaggcagatttattatttgggctcatttagctaatttgatgtttttaatctaatttcacgaattaatgaaacattgggcttaatccggatattggttgtggacttgaagagggcaaataaagcagtgcttaccttagttaatttctaattaggaaatttcgcaatttctaattatgctgttcagtgtttatatcgtattggaccaaagtattgtaatagggcccagtgactttgagtgactctatataaatagctgccttgtgattcgtgtagggcattctattct

SEQ ID NO: 55380 - DNA, 398 bp, Glycine max
  unsure (1)..(398): unsure at all n locations
tctcgatatattacgagactcaatcgcacanctgttgtaattgttattgncatangaannngngcgaagcttctattntcaatttcaagcatcatgatatatgacgggactcaatcggacatccgagtaaaaactaattgtcgtttgaatttcctcagagtttctattctcaattttgtgagtctcaatatactacacgattcaatcggactttccagtaaaaatgtattatcgtttgaatattctcagagcttctattttcaatttcgagcacctagaattattaagggactcaattggacatccgagtcaaaagttattgtcctttgaatttcctcagagcttctattttcaatcttgagcgtctcgaattattaaaggactcaatccgacattct

SEQ ID NO: 55381 - DNA, 481 bp, Glycine max
  unsure (1)..(481): unsure at all n locations
ctaagctatgctgcaacattataatagacctcctagtttcttattttctctcaacagaataattatgatctttcaagatacatatataatccgggttgggaagaatcatncaaatctgagatgggcaagtccaccacaacaacaacaacctgtccctcctttctagaatggtgttggtccaagcaggccatatgttcctcctccaatgcagcagcaacaacaacaacaacaagaacaaagacaacaagcaactggggctccttcttaaccttccttagaggagttagtgaggcaaatgaccatccagaatatgcaatttcagcaagaaacaagagcctccattcagagtctgacaaatcagatggggcagatggctactcagttgaaccaagctcagtcccaaaattctgacnnaatgcctcacaaactttgcagaatccaaaaaatgtgagtgccatcaccttgaggtctgacaagaaaa

SEQ ID NO: 55382 - DNA, 443 bp, Glycine max
  unsure (1)..(443): unsure at all n locations
tctgtgcctcatcaatagaaatgcaattgtagattcttatgatggtcaaaatccccatttcttgcagttgagccaccaacactaaggcttttgaattaaagctgtgaaaaaaggatgtacactngaacataccatcttaccataccactaaaaaacatttaagtggccggtatattggcattatgtatattagtggattgcttagttcagataaacactgaatatagggctagaaaactaaattgataaattggcttgagctatttgagaagtgtgttattatcgttatttttgttgagttcaaataactttttcaattttttttttggatgaaaagttgtttattgtaaagtcatattcttgttaatagtataacgaaaatgtttctgacacattttttaaatataaaacattttgtaagggatatatttttaaacatgttt

SEQ ID NO: 55383 - DNA, 448 bp, Glycine max
  unsure (1)..(448): unsure at all n locations
gctgagctggttaaccncgtatccaggaatggaaattctgattgcctatacttcaacaacatctcatagggatgaatgactcgggcatactttaagcttatgcacggaaaatgtaattatgaaattgagatgcccgaagaaacaccatttcctagttaaccatgcattaggtaccatgttcaattattttgttttgttgttgtgtgttttttttttagaaatgggtttatgatcccaacatggttggctcatggtgcctaacacatgcaactaagaatgtagtgtgaagtttcacgcttccccttttttgttttgttttgtagaggaaaacgcaaggatgagcaaacatgaaaacaaatggtatccaattntgcatatcaaaaagtttggtgaacgcatatgcatgatgatgccatgactcatgcaaaatgtgaggctgaatatgata

SEQ ID NO: 55384 - DNA, 334 bp, Glycine max
  unsure (1)..(334): unsure at all n locations
aaaatattttcgtggagaaattccagtggggggttcctacgttccgtacgttccgtggtattacgcgaagattctcgaccgttcttcaagattcatcgttcgttcttcattttcttcagtcttcaacgggtaagtacctcaaaccgagcttttcaattcattctatgtacccgtggtggtccacattntggttcacgtatttttattctcngtttcattcgctttttatacccccttttgacgtgcttaagccatttatttaagtcatttctcgcttaatctaanaataaaataaatttccaccgatcgtttgaatggtatcatcccgtaattt

SEQ ID NO: 55385 - DNA, 472 bp, Glycine max
ctaagctggagaggtgcttaatggaggaaaagcatgagggagagatagagagttggtggagcacgaaattgaaggaagaaaaagggagagaagttgaactttgaattgtgtctcacaagactctcattcatcaaagttacaacaagtgttacacatgcttctatttatagactaggtagcttccttgagaagctttcttgagaaaacttccttgagaagcttctttgagaaaacttccttgagaagctagagcttagctacacacacccctctcataactaagctcacctccttgagaaacttccttaagaagattcctaaagaagctagagcttagctacacatacctctctaatagctaagctcacctccttgagatgagaagctagagcttagctatacacaccctataatagctaagctcacccccatgacaaataacatgataatacaaaaaaaaaagtccttacta

SEQ ID NO: 55386 - DNA, 430 bp, Glycine max
  unsure (1)..(430): unsure at all n locations
ctaagcttctaagggaagtttctcaagagagcttctcatggaagctacctagtcctctgttagaagcacgngtaacacttgttgtaactttgatgaatgagagtcttgtgagacacaactcanagttcaacttctctcccccttttccttcttcaattttgtgctcccccctctctctttctctctctcttttcctccattgaatcatcctctccaaacttcttatccaaggcacattcttgctggtgaagctccttcttccatggcttattccctagtggatggtgcctcctttctcctcttctccttttccttccgctgcatctccatggtggaaaaccaccattgaaggacctcattgaagctcaaagatccaacttccataaaagctccacaagcaagcttccatcatcatgtgtcaagggaaatt

SEQ ID NO: 55387 - DNA, 159 bp, Glycine max
aaccaaggggggataaggagaaacagagcttcacatcgaagacatgatgctgagagggtgactgaatatcgagtaccaatgcgtgttattgataacacggcttgtgaacaagataaggaagctgggagagcttctggttatctacaaacaacgggtgat

SEQ ID NO: 55388 - DNA, 290 bp, Glycine max
tctcactcgagacttcaccagagcacgtcccgaagagaccaatcttactcttcttcactacacttacacttgcaccgagcacaagccagaaaaacttcatcaaatggcggagccatccgagaagagaaagggagcatctaacaccgacaccgctgctgcccaacgccgacacggcccatccggagcacccacagcaccgactcctccgtccctgacatcaacaagagcacgaacaacgttatcatccgaggatcaacgtccacggaacctcgctcaggtatctcccagaa

SEQ ID NO: 55389 - DNA, 241 bp, Glycine max
aacggacacaaacattcatgaatctctatgaataagaatgcacttacatggactagacgggagagagggatatctgcgagcagctgctctctatctgatgcaatgccccgtcatgaatacttgggcgtcgagagtcctattaaagacctccataggagagacacctatgttaatcactgagttgacaaacgccaatgcttatctcccaagaaccctataatgggaggaggttactcctctg

SEQ ID NO: 55390 - DNA, 475 bp, Glycine max
  unsure (1)..(475): unsure at all n locations
tgaaacttgaaagcaagtaaacataacacttgtattgaatgtgaaagttataagaaaaacatgaagttttcaaattataagcttgaatggtatggggctctccaaaagtaacctcaagatgtagttacacttaatcaagagattggttttctaagagagactttgtccaaatttgttggaagcactaaaaaacttgacaagtggttaagatatagtaaatgcccaactgataaatttggacatgtatattaaggaaaaaattatgttcataataatggaaccataatatgttacttctgtggaaagattggatatatgacatccaagtgtagacatctaccanaaaccgaatcatccagtgctttcagaactaacaagaaaagacctaatatggttngagtacctaagagaatatgttttttgttccaaatatcttcaaccacaacatagacacaccaatcatagtacttggaca

SEQ ID NO: 55391 - DNA, 458 bp, Glycine max
  unsure (1)..(458): unsure at all n locations
ggctcntacaagggaagatctcaggcccacgggctaagtatatccttcatatcgttgacatattacagtaacgtgtcataaatattggaccttgtaattagagctccataatgtaggtagggtaccctagaaatgtangattttccagcccttgtattatagggcacctagactagtaattgtattaggggtagttttgtaactcaacatgcattaagagaatattagatgcgtgtgctgagaaacaaatctaattgaattgggagaagcccaatccaaataaattctagagggggaggcgagcatatgcttgctacaccccattgccacatcatatagtcacactatgtgcatgaccttcatgctatacatgcctcatgacacctaagcacacttagtggagaatccaggacttgatcctggattagtgagctgaaccatagctaaaattcactaat

SEQ ID NO: 55392 - DNA, 433 bp, Glycine max
  unsure (1)..(433): unsure at all n locations
gacccaacccgggcatagtcggtcagtgatttctctgtgatgtacctaaacaggggagctcctggcagtcaacagataaaaggaacaaagaccacaaagcatggaggcttgtggtggctggccagctgtgaaacttgattgatatgtgagatatggtctttggtaatcgattaccaagggtgggtaatcgattaataggcttaaaattgaagacaggaggctaagatggtctctggtaatcgattaccacggngtgtaatcgattaccaggcttgaaaacgaggtcaggaagccatgagggcttttggtaatcgattaccaagggggtgtaatcgattaccaggcttataaaggtgactggaacattgtggaggcctctggtaatcgattaccagcctgtgtaatcgantacacagagggatgggtcactgta

SEQ ID NO: 55393 - DNA, 413 bp, Glycine max
tctccccttatttgctataaatagggggttaagtgtagattatatgggttcagccccttaggcacttctctctctctcaaaattgctgaggaaaattattttcgtgaagaatatccaagccgaggcgcttccataacgtttccgtgagaaattacacgaagattctcggccgttcttcaagattcatcgttcgctcttcattttcttcagtcttcaacgggtaagtacctcaaaccaagcttttcaattcattctatgtacccgtggtggtccacattttgattcatgtatatttattctcgatctcatttactttttataccccttttgacgtgcttaagccatttattaaagtcatttctcacttaatctaaaaatataataattttccaccgatcgtttgaattgtatca

SEQ ID NO: 55394 - DNA, 449 bp, Glycine max
  unsure (1)..(449): unsure at all n locations
tcgtccgtagatccctcatgtaagactacacccaatttagttatgtcctcttaggtttagactaacttaaactgagtttcgtccgcagattcctcatgtaagactagacttagctcaagtagcttactaaagtttagcctaatttagcctaaggttcgtccgtagatccctcatgtaagactaggcttaaactaaacaacattattgtaacaacataattaaaaccaaaacataacccgcagatccctcatgtaaggctaagtttcaatcctgcttcaatcaagttctaaggcaacaatacattntccaatgctaaagtcacctaactgtgcacacaaatgggtgatcagaccaaaagcatacaaacattaagcattgaaggaagcattgaacaaagaaaacataatcaattagatattaggtatttacatcagttgttcattagaaat

SEQ ID NO: 55395 - DNA, 457 bp, Glycine max
gaggtccaggaaggacaaggcagccgaaggatctatttcctctccggagtatgacagtcaccgctttaggagcgctgtacaccagcagcgctttgaggccatcaagggatggtcatttctccgggagcgacgcgtccagctcagggacgacgagtatactgatttccaagaggaaatagggcgccggcggtgggtaccactggttactcctatggccaagtttgatccagaaatagtccttgaattttatgccaatgcttggccgacagaggagggcgtgcgtgacatgagatcctgtgtaaggggtcagtggatcccgtttgatgccgacgctatcggccaactcctaggatattcgttggtgttggaagagggccaggaatgtgagtatggccagaggaggaaccggtctgatgggttcgatgaggaggccatcgcccagctgctatgtataccg

SEQ ID NO: 55396 - DNA, 407 bp, Glycine max
  unsure (1)..(407): unsure at all n locations
ctctctacaccccggaggaactatacgtgagggctacaatatgcatatatatatataagctaaggccttacgcaaaggttgactangtggagtaaaaatgaagtgattaggtgaacgtgggcaagctcgaaaactgagggatttgcagcctntaggggtttaaatttcaatgaagtgaagggggaatgaacgtgggtgttggtaacatattttttntgttgatgtaataaaataagggtgttgctaacaaatctctttggcaggttaaagaattaaaaaaaagtatttattataaaaatcataggagatcataaaaaacatttattgcaacacaataannatttactgtttccaataaaaatcttttttaatttaagtttntaatcaatatcttaagaagcattata

SEQ ID NO: 55397 - DNA, 463 bp, Glycine max
  unsure (1)..(463): unsure at all n locations
gagatgaggaagtgttgaagggtgaaacttcctaactttattgttgactcacatagtggtacctggagatatgtcgcggnggtcaggagaccttggggacgtcaggtggggtgctattgcccaaaaccaagcttgaccaatcccgacccaacccgggcatagtcggtcagtgagaacctgtgatgtacctaagcaggcgagctcctggcagtcaacagataaaaggaacaaagaccacaaagcaagggggcttgtggtggctggccagctgtgaactttgattgatatgtgggttatggcctctagtaatcgattaccaagggtgggtaatcgattacaaggctaaaaaatgaagacaggaggctaagatggtctctggtaatcgattaccacggngtgtaatcgattaccaggcttganaacgaggtcaggaagctagggaagcctctggtaatcgattacc

SEQ ID NO: 55398 - DNA, 370 bp, Glycine max
  unsure (1)..(370): unsure at all n locations
actagctgaatgaaacggagctctaaaaagtcaacgactctctctttatctcggatgtccgattgagccctgtaatatatcgagacgctcgaaattgaaaacggaagctctaagaaaagtcaaacgacaataaattttgactcggatgtccgattgagtctcgtaatataccaagaccctcgtaattgataacaaaacctctgagtaaattcaaacgacaataacttttcactcggatttccgaatgagtcccataggatatcgagacgctcgtacattgaaacggaagctctgagaaaaatcatacgacaatatactttaactcggatgtntgatcgagccctttaatatatcatgacgctcgaaattg

SEQ ID NO: 55399 - DNA, 334 bp, Glycine max
  unsure (1)..(334): unsure at all n locations
tatcctcgattatataaaaagctccgatactatatcaatgaaccaactttctcagatatttatacagtcaagngaaggcgaatgaatggtcttttatctgaaaacttttgggtacttcgaatattagaactatttattatagctttttcattttagcagcaagtgtgtttgtaaaaccatagacagacacagacttcctttctaccatgggaatggttcaaacattctatatcctcacagtgaaccccaccaagtaggtggtgtcacaggtcaggtcttaaatatgaggacatattgattgaccccaatgtgctgaatggtactgaactgacaa

SEQ ID NO: 55400 - DNA, 468 bp, Glycine max
tacgtgaactatgacactcagctttaggaagcactgtaaatgccttaaattcctcttatgtatattctcaatagacctttgggctacctcttttgttttaaaagccacaaaggcataacccttgtgttctctagtgtccctgtctttcactaatcacacctgataattaaaaacacatatttttttttaacaataatccctatttcccccacctacagaaaaggcgtgtttataacatgattagaacaattcatcaaggctttgacctcaagaatatcacccataggtattaccctgactcggggccaaagaaaaaagaagattgcaacaaagagcttaacaaatctagcactatcaagtaatcactggaaacttattccaggatcagtattgtgaatgatcaattcaagtattcacaaacgaataggaatataacgagagttatggaagtcaaagatgaggaacata

SEQ ID NO: 55401 - DNA, 382 bp, Glycine max
  unsure (1)..(382): unsure at all n locations
ataaaagggatgccccacattatttccatgacacanatgcaaaaatgatgaattggaaactttatgcaaaactggtcatgcatgcgcctatgcggacgctcaagtgtcaaatttttatggtcatgtgatgctagggctcaggattcatttcctctattntaaatcaacccaatgtttccaaaatatgttcttttatcaatttgtgcattcctccaagtccatttcgggcgtccgaggaaattttcacagcattcacccttcaggtgtagacacgttttttcttcaaaaatcggttatgaatcaatgaatttttttcaaagaanagttggaaatcatctcttttcanaagcatgtcggtttttagctagacaaactatttctc

SEQ ID NO: 55402 - DNA, 426 bp, Glycine max
  unsure (1)..(426): unsure at all n locations
ttcaaacgacaataatgctntgcttttatttttattgagacccgtaatacatcgagacgctcgaatatgaatgttgaagctctcagcaaattcaaacgacaataactttctactcggatgtctgattgagtcccataatacatcgagacgctcgaaattgaatgttgaagctctcagcaaattcatacgacaataactcttttactcatatgtctgattgagtcccgtaatatatcgagatgatcgaatatgattctgaagctctaagctaattcaaacgacaataactttttgctcggatgtctgattgagtcccgtaatctattgagacgctcaatattgaattctgaacctctaagctaattcaaacgacaataatcttttactcggatgtcttattgagtcccggaattcatcgagacgctc

SEQ ID NO: 55403 - DNA, 280 bp, Glycine max
gcaaagggcaactctaccaccggttatacgcggcagggactcaaagcagacgacgacctcgacgcggaaaaaggacaacccgcgagcaacggcccgcagccgcgagagacacaggcgctgaacgacgaaaccctgcggcaaaagcgacgatgaacaaggaaaggttaaacgaaaccacgggagaacgccggcgcggacgcaagcagaggaacacgtggagcgggacagacgaacaccggggcaacggcagcagccagatgacaagcgcagagaaaccaag

SEQ ID NO: 55404 - DNA, 437 bp, Glycine max
gtcatagacaatcgtacagcattgatatagttttcttctacactatcataaaccgtaataatcgtcgatgatggaaaggaaataccttgcccctccgaatgatggaactctcgaaggcccccaacagattagatgcacatagtccaacatggcctttgttgtgagcacaacatttggaaacttcatccaatgttgtttcctatagaataaccaaacctttttcactcaggtgacctagatgcagatgccatagagaattatcaaacgaaccattggacacatggagtccttgtccacattgagagaactcataaattcttataagagggaggaagagaggataacagaatcaatgccaaatcttcatctttcatcttaacatcaatgtcacatagctccatcggaatagaggttagctcatcaagatgttccttcag

SEQ ID NO: 55405 - DNA, 371 bp, Glycine max
ctcagcttagctaaataatgcaacactacttttcttttgttatttagggaaggtattgattcaatccattattcggatgctaatatatatactgggggggggggagactacttaatccccaatgctgcacccactccacaattcacactccatcacatcttccctcatttcttctttatatcaatcaaaccctatttcctaaaatactcatctctcatctacaatacctcattctcattctctcccccccataaatatttcccatctcccttctctttaacctccacttcacaaaaccgtaccacattatattctttataatactccatctaacctatcaatacctccctaccccctaaaccaatttctct

SEQ ID NO: 55406 - DNA, 439 bp, Glycine max
  unsure (1)..(439): unsure at all n locations
actaagctttctctcttatggatgggcaaaattctcgcaattggctcgtaattacatgagatgtgtccaattctgtttccaacataaatcttacacgtgttgggttaagaggtacgcttcanagtcttaatttctcattacttccaaacatcctcatactgaatataagctacaactccttgtctggaagtattcctcctcaaattgatgccttgtccaatctcaacactcttgacttgtccactaataaactctctggtagcattcccaacaccattggtaatttgtccaaactacaatatcttaatcttagtgccaatggtctatctgggtctattcctaatgaagtgggaaatctcaattctctctcacattcgatataattttcaacantctctctggaccaattcaccttcataggtaactaccccattgcaat

SEQ ID NO: 55407 - DNA, 426 bp, Glycine max
  unsure (1)..(426): unsure at all n locations
gctagagaggaagcttaatggaggaagagaatgagagagagattgctctctatattaaggagcanaagagggagagaagttgaactntgaagtgtgtttcacaagtttcacattcatcatagttgtgacaagtgttacacatgtttctatttatatcctaggtcactgactatgtgaatttcattttcatttcatgtgaatctaagagaaatattccaaggatatgtcaaaggcatcttagcatattcctttagatgccataagaatggaaggtgtgactctagcacattggaaaggaatatgccgcaagaatatttcaaaagaatattccaagaatatgccaaaggcatcttagtatattccttgagaagctagagaggggaaactacacaccccttgatgcaatgctaccctccaagggcattg

SEQ ID NO: 55408 - DNA, 426 bp, Glycine max
  unsure (1)..(426): unsure at all n locations
tctccctcatgatttangtccaacccanaaaacattntagcacacagactctatctatgaactgtacaaccgggtgtatttacccccaacgcctacactctgaagagtccattagggtctctcccttatgattcaggtccaatccaaaaaacattntagcacacagactctatctatgaactgtacaaaacacatgactccttaattattctcaaaatatttatctcgtcgcgcttgtgattaaactcgttgggtccccacagtggttcccatctcaatactcgtcacgcattaacttgtcgcccttaaaggaacttagcattaactcgtcacccttaaagggtcttatagtcctgtgattgacaattcatatctcacaactcaatgcacacaatatctcaatgcacatatatattacagggcaat

SEQ ID NO: 55409 - DNA, 439 bp, Glycine max
  unsure (1)..(439): unsure at all n locations
ctaagcctgggaagtccttctgattctatntatgcatttctgacttgttgacattatattatgttcanagatnggacctcttgctagttgttattaatgaatagcttacacacttatgctngagtgaaacaatagctgtgagactgtggtttaagctactttccttgatatttgtcttatgcctaacttcatctaattgtacaagttacattntactcttctctttgaataactgcgtgctttgtgaaagacaagtgatgagggcattttgcttcattcttttatcatgcaatcaataaattttgtgcatacacctttatacatagtcattgcatgtttttgtcactcggnggaccagtgagatgttccttatttgcttgaggacaagcanaactataaatttgaggggagtgttagccaatggatacgacttactttt

SEQ ID NO: 55410 - DNA, 384 bp, Glycine max
  unsure (1)..(384): unsure at all n locations
actaagcttgcanattattnnttgccggtgaaaggatcgaagatggtgtgttcactcgtctctntntgtcgaagactcaatgtctgtcgaccgagactactttagtctccctttgtcattcagagacaatcaagtccgatgacacccaaagaccaatgtggtcacctgcttttttgtcgaagactcaatgtctgtcgaccgagactactttagtctcccttcgtcatccagagacaatcatgttcaatgacatgcatagaccaatggtggtacctgctctctntgtcgaaggctcaatgtctttcgaccgagactattaaagtctncccccgtcaaccagagggaagcgagctcgttgacacgtagagacaaatatggtcatct

SEQ ID NO: 55411 - DNA, 361 bp, Glycine max
  unsure (1)..(361): unsure at all n locations
gtcccactacttctgttcttatttgtgttagagctaatctcttgggttgatcttcttttcactaggcatatcataaactatagttcttgcgagtttagagagagagaaagctactgtagtggagacccttaccatgttaaagggtcagcttactttgtctatggtaagtttgctcctctgtagtgtgaactatttcaattcaaattcaagtagtaattgagtaagagagcatgaaatacttggaatcttaggtgatacctgtcagaccttaatttcatccgggtataatacttttatcatccagatgatgatgtttgatcattgctaatcaaatntcggtgtttgacaccagttgcaatgc

SEQ ID NO: 55412 - DNA, 394 bp, Glycine max
  unsure (1)..(394): unsure at all n locations
gacacataactctagctgaacgactccggtgacagtatgactcttttattctcttagctcncgtgtaatacgagccttcgacatattatgcgcccgatcggacatacgtgtgaaaatcacgatcatttgaattctcgagagtttccgatgttaatttcagcgtatcgatatataaaaccctgaatcgacctcagtgtgacaagttatgaccatttgaattgacgagagcttccgtgttcaattctgaatatcactatatgtgatgcgcctaaattggacatcccagttaaatgatatgaccatttggatttctcaagagattctgatgttcaaattcgagcctctcggtatcttatgagatcgaatccgacatccgtgttaaaacgtatgacca

SEQ ID NO: 55413 - DNA, 407 bp, Glycine max
  unsure (1)..(407): unsure at all n locations
aaaagttcatgatcgggtaaaagacattgtaactatatttgggaagtcccaaaagaagacatcatctcccacaaacatgtggaagaaatgatcaatattctttgatcttccatactggtttgatctacatgtgcgtcattgtctagatgttatgcatgtggagaaaaatgtttatgatagtttaattggtacccttcttaacattaaaggcaagacaaaggatgatttgaaatgtcgtcaagacttggttgacaagggaatacgagagaagttgcattcgatatcacaaggttggtgaacatatctgtgcccagcatgccccacaatgtcaacaacagagaagagaagttnttgtcaatgtctacagaatgtaaaagttcacaaggatactcttcanatataaaaaa

SEQ ID NO: 55414 - DNA, 379 bp, Glycine max
  unsure (1)..(379): unsure at all n locations
tccctcttgttggactaagccttattgtgatctctctcttaggtttagactaacttaaactgagtttcgtccacagatccctcttgtaagactagactcagctcangcagcttacgaaagtttagcctaatttaccctaagcttcatccgtagatccctcttgtaagactaggcctagactaaacaacattattgtaaccaatggataatttagcataattaaaaccaaaacttaatccgcagatccctcttgtaagattaagtttcgatcctgcttcaatcaagttctaaggcaatagtacatttcccaatgctaaagtcacctaactatgcacacaaatggatgatcaataccaaagcatagaaacattaaacattg

SEQ ID NO: 55415 - DNA, 349 bp, Glycine max
cagaatcacctccaaggccaagatacaccaaattggagagattccaaatctgagatggaattgttccattggcggcatacgtcaggcgaagatacaccaaattggagagattccaaatctgagatggaatcttccccatgaatccagtaccacagaggtcgaggtgagtcaaggaagtcattgtcccgaggatagaacgaattgacatgccttctccaagaaatatattggcgctcaagtcaagatatcgatacttagagagattcccgatctgagagggtactgttccgttggcaacatctgaactcatgtcatgatacaccaaatttgagagattcccatctgagga

SEQ ID NO: 55416 - DNA, 453 bp, Glycine max
  unsure (1)..(453): unsure at all n locations
tcgtatttctgattctcaattgaaaattaaacataatattnggccaagctatcacttgccaatcaatcatccgatctctaacttattaagaagattcataattgataaaaatgttgtactttaaatggtagaagaatctaagttataacttgccaataagttaactgatctccaacgtataaagaagattcatgattgataaaaacactctaagttatttagttgtttaattttctgctagaagttattgtgtcattcatgtctatctcaaccatgtactctagtatatggcgtgttatttatatcgatcatgtcatttgtgtcgatttcatccatgaactattggtgtcatggcggattatttgtgccaatcgtgtcaatattgctagagtttctccgtgatgatcatgatcgtgatcattcctacttcgtttttattcggtgttttctcac

SEQ ID NO: 55417 - DNA, 477 bp, Glycine max
  unsure (1)..(477): unsure at all n locations
actcagctgcttctacaatcntcccctnttggatgttgacttcttcctanttcaaganacacacacacacacacacacacactttnttctagtcgatcactcacataaatttccattctccccctttgtttttgaatttatgcttctcttaaaattaagttgattactcatgtgagttcttgatttaatccctatttctctccccctttggcattaacaaaaagccaaagtgcataacaagtttgaaacatacaaatacaactaatcattcatacaacaatcatggaaaagtataaactaatcatgaagcaagagacatgattagatcaaatatatagaaaaatcacatagtcatataacataattcatagttgttcaaacacaccatgcanataaagaaatactaaatggttcanatatcataataatatagccaaatacacgggtggaatcaaagtactattatattaaatatga

SEQ ID NO: 55418 - DNA, 380 bp, Glycine max
  unsure (1)..(380): unsure at all n locations
ctagaagtaagaaccaaaacgtgatatcacccattgaggtaaaagcgtcaagctagtgacgttaaagaagcgctttctgggaggcaacccagttctaatttatgttagtttgttttatnttatgcattgtatcatgtggaacatgcttcacaatcagtacattggggtatatcagtttggttttgaatgatagatataaggttttcaaatttcttgaggaagggactaaaaaatacttcanattttttttcctgaaaatcagtcctttcgctaagcgcaagcctcgcgctgagcgcatctttngttatgcgctaagcggagagtctctggcacttatcactcaaccattgcatctcaagctgacttggtccactaagctg

SEQ ID NO: 55419 - DNA, 481 bp, Glycine max
  unsure (1)..(481): unsure at all n locations
tnctcggggccatttcctgcgaagggcaaacattggaaagttatgtttatctcattaatgctactcttaagacaaaaatggcatacaacctccttcaataaacacaaacatcaatgtaaatttagagcaaactcatgcacatatttccttacgaacattcactcgcacaagatattcttctaactaagaaaaatgcacccatgcacaatcaaggcaccttcgttacctagattatttgtatgtacttccaaggtgtatttgctacctacatctcatgcacttccttggctaaatttacatacatgcgtactcaaagcatttggtgtaccaaaaattgcacatgtgcacattccggtatttctaatacttatgcatatacaaactntgtgatgaatcttggctatctacacaataaggtgatacatttcatgctttactcaagtgtttttgctacctaaagccgcatgcaaattcaagtata

SEQ ID NO: 55420 - DNA, 391 bp, Glycine max
  unsure (1)..(391): unsure at all n locations
gtcatagacattctcgcactatngatcttcggaggagtcctctttccanatgtagatgggttggtggacctagtagcaatggacgcttttcttgcctatcatagccacaaggaaagcccggtacgaccgaagatgtgagaaaagcagtacgaggattgtttggtgtactccagctctttatgtatggttggtttcacacctttttcgccaagaggtgaggcatgcttgcccgcaagaaggtcaccgttcatgcacagagaaaggaggcacaaattgngaccaactcttagcaaacaaagaaagagcgtctatcaactggttccctcgatggaaagaaggaagaaccggagttcttatttcatgcggaggatatccgaatgttcccttgatg

SEQ ID NO: 55421 - DNA, 394 bp, Glycine max
  unsure (1)..(394): unsure at all n locations
tcttagtctcacctgatgaattcgtggctacttcatgcactcttctaattatcttagcatcacttctggcactaaattgctggaagtttgaagccatcttctcaatataaattttggcttcagcaggggtcatgtctccaagggctccaccactggcagcatctatcatacttctctccatgttgctgagtccttcataaaagtattggagaagaagctgctctgaaatctggtggtgagggcaactggcacataattntttaaatctctctcagtattcatataggctctctccactgagttgtctaatacctgaaatatcctttctgatggtcgtggtcctggaagcagggaaaatgtttctaagaatactctcttgaggtcatcccagctc

SEQ ID NO: 55422 - DNA, 438 bp, Glycine max
  unsure (1)..(438): unsure at all n locations
tcactcctacatttcatctctagcatgttttntctttctttacccnctcctcacgtttggtttttttagggaaaaacaccataactaaacgcgccgcanggtatccctatcgcaccagatccaaatctagaacgatgggtgatcaagaggagacgcaggaacagatgatagccgacatgtcggctctgaaagaacaaatggcctccatgatggaggccatgttaagtatgaagcagctcatagagaagaacgcggccaccgccgccgctgtcagttcggctgccgaagcagacctgactctcttggcaactgcgcaccatcctccctcaaacatagtaggacggngaagggacacactgtggcacgatggcagccctcacctgggatacaaccgagcggcttacccttatggattggccgccaaactatcaccacccg

SEQ ID NO: 55423 - DNA, 482 bp, Glycine max
  unsure (1)..(482): unsure at all n locations
tactaagctgaacctgaatctgattctgattctgaatcttttttcttngaaccttgaagcatcttgaacatcttaaacatcttgaactcattctttgattatcatgaattgacctttgagctttttttcatcacctttgttatcatcaaaacatctttgaatcaatcttgattcatcatgaagctttgcttctacaatctccccctttttgatgatgacaacttctgaaatcaagaaacacacacacacacacacactttttcctagtcgatcactcacataaatttccattctccccctttgtttttgaatttatgcttctcttanaattaagttgattacttatgcgagttcttgatttgatccctatttctctccccctttggcatcaacaaaaagccaaagtatgtaacaagtttgaatcatacaaatacaactaagcatccacacaatcattcataagaatatttcttaaatatgaa

SEQ ID NO: 55424 - DNA, 368 bp, Glycine max
gatccaaaagtctacgtctagtgataactcccaagagtactttcatctaactctactggcttctagagatatcatcctcttagataataacattgtggcagtaaggactaccagcgacaatgcttcaccaaaagaggaaaactctaggtaaggcttcactgttatcaagcgagtcggagacccaacatgaccacagaatgacctccactccctatgactcatacagacttgggtatagggcctaatatctcaatgtgtgtgcaaaggtgtaagtgccatgtttgcatagagcaacaaatatttctaactatgaatgtaatagatagacagacacacaccatacaaaataacaggcataggttatacac

SEQ ID NO: 55425 - DNA, 474 bp, Glycine max
  unsure (1)..(474): unsure at all n locations
tactaagctattcaattatccttctttcatactatttatgcctttgcttagcaaaagtcatgattgttgaagtgataccaataatttccaacagcggaagacgatacttatttgtcttgtaagttgtatcacacatcaacatggttggaaatgaatttaagagtttgattgaatttggatgtaccctcattatatctctaatgacatcttcattacccaattgtctaaaccagtaaacacattggtcgtgttctatcaacttcatccgatgttgtatttccgtccttagacccctttttttgagacgacatctctgacattcactgtatatggttttaatagtactaagaattgtctgatcttgatcttagaatgtcaatgaatattgaccaggcttcaccatgtattttgcactgctanacaactacatacgaatgaccaacaaggttctgcactttatggtatgaaccacat

SEQ ID NO: 55426 - DNA, 404 bp, Glycine max
  unsure (1)..(404): unsure at all n locations
gcttctacagtctcacgtggcacctatcatatctcanattactcttcattcnntnnngttgccaaactgtttcgagatgataagatgcagtcacatgcatgcttgtacttaacattcatttagcgcaacaattaaccaagcgttgtgctcaatattactcaatgcttacagcacccccaccgaatgtgctgaatgtgcaactattgatcggcagactctacccttggctctggagtacaggtcatgtaagcaagcaaaacaaaagcgtacattcatacccatcgaaagataagaataaataataaaatatatgcataagacacatatgagagggagagatacaaaacatcaatccataattactaacgttgagaatatctgttacaatgatagcctagaacatg

SEQ ID NO: 55427 - DNA, 462 bp, Glycine max
  unsure (1)..(462): unsure at all n locations
ntaagtgcgantcctttctttntctggtcattntcttcatgttgananagactcatgagttccatttcgtgttcctgaaactttccaaacaaagttgcaagagacatgttagtaagatctcttgattctgtaattaccattacctttggttgtcattccctgcttaaacatcttagaactttgttaataagatcttcattgggaaatatctaatgatgcaagatgatttactatatgtgtgaatctcttttgcatatcctatatagtttcagtttgattcattctaaacaattcatattcatgggttagggtatttattctagatctttttacatttgttgttccttcattggatacttgtaagggatcccatatttcttttgcattcttgcagtttgatactctaaaatattcatccatgtctaatgcaaatggtngttatattttggcttttaaagtata

SEQ ID NO: 55428 - DNA, 149 bp, Glycine max
  unsure (1)..(149): unsure at all n locations
gatcgaaaatgatgaagggaacaagaaatatgaattgcggcaccagaatctaaaagccaacaatcatgaagaanattagaagtggatgtagaaaagatcataccactggcagaagaaacaccttgagggatgacaacattggtagcatg

SEQ ID NO: 55429 - DNA, 483 bp, Glycine max
  unsure (1)..(483): unsure at all n locations
tgtatttacccncaaggcctacactccgaagagtccgtcaggatctctccctcctgatttaggtccaacccctaaaataatatttgcatgcagacaccgctcatgaattatacaatactcacgacctcccacctgtgtttacacacgttcaacataattgcactataattaacactgtttccttaattaaaacctacatttttcctttaacattgcgcataaaaaattttctcaagataaacactggtcaggttattgtacaattcacaactcacgacacaagtaatgttacatcaagtattaaccacaaacttattcataactaaaactcatgttcacaatttcacatctcttaatatcacaatccaccatcacatgtttacatgtatatcacannataacacatgttcaactnttcaattgtactaaattcaataacaatattataatctcaaagcaacatgttatnntcataattatcac

SEQ ID NO: 55430 - DNA, 288 bp, Glycine max
gataggggtgtatgtataatgttatttgacaaatatggacaaataagttacaaaaggtcatatctgcaacaatctctctaaactctaatgtattcataaacgatggacaattcttacaggacatttgttcgaaaagatgggatacttaaagcaatgacgttgtgaatgatgcatggcgaaagataaaaaaaaaaaaaaaaagtcggtatgctttgatgttgactttgagaagcacatcatttaataatgtcaatatctactttacatgacagatcaaataaattttgg

SEQ ID NO: 55431 - DNA, 463 bp, Glycine max
  unsure (1)..(463): unsure at all n locations
gcacattgttctcagttataccacatgcttatactatatgtatttctctatatatnntccaactggaccaatgagnttccattnttntctttatcttcatattaataatttgcaggtggagaagattgaggacagtattaaattcataaattctagacctaaacctcttgccctttatgttttcaccanaaaccaaacactgcagagaagaatgatatctganacatcatctggcagtgtgactatcaacgacgcaattctacaagtaataccaataccctatcaagcattaatattccactcttaatctaatctttttgcatattttatttattaattcctcagacttagtgcataatatttgtgttaaatntgtgcagtatgcagttgatactgttccatttggaggaagtggggaaagtgggtttggcatgtaccatgggaaattctcctttgacacatt

SEQ ID NO: 55432 - DNA, 460 bp, Glycine max
  unsure (1)..(460): unsure at all n locations
ttctctgatctatgacttcttatgggggngagcttgttcttgactcatcttctccttgaagtggcatctccaatcacctttcctcattctgcattctgttggcattgattttcaagaagcaaatgactttattgatgaacaagatctaaggcctacaagctctacgtggagctacatcatgtggtatcagagcattttcatctaggtgatgttctgttgcttcctttatcttttgtttagtcaattcaatttaattccatgttcttcattgtcttctccatgtatctcctccattgtcttgtggtttggtgctatttanagtagattcaaaaaaataaacctattaaatcttaaatctgcacttgntcttgcatttctatgggtcaaaatttatagatctactcttgaatcatgtttttgtggttgatttaggttctatcatctttcagtcataatcttc

SEQ ID NO: 55433 - DNA, 509 bp, Glycine max
  unsure (1)..(509): unsure at all n locations
tatctgcatgtacagaanacatggaacattaaccactcacggttggtgtgaagaggggaaattcgaacataagggttgttgctgccattgttggacatgctatactgctaattaagttgctntaatttaattagcagggatccttcagcgtgatctttcactctntagtttgttgagaggttgaataaagagaactngatcattaataatggatgcaaaggtaagagagggacaaaatggaatagtatgaataggaatatgttgtacaaaaaattaatatatatgtaggtccattctgcctctgaataaaaagaaaaaagatgagtcgacatccattcacacccaaattattaagcagtccgaaatagcaagtatccactgtctccagttaattagtcttaatataagtatttaaattctttaatntattttaaaaaatcatcaagttcttttaattatgacananagagtaatactcaattatatatatacttattaagtagagatta

SEQ ID NO: 55434 - DNA, 418 bp, Glycine max
  unsure (1)..(418): unsure at all n locations
ttagtcatttagttgaatctatcatctaattatggaaatnttaacttgtgtatccgtttttcacgtaatatttgaaattcaacaacattttcaattttcaaaatatggaatttattgctatattataaattaagaatactntgtgaactaagatcaatctttttccttttcttttacgaagggccattaaccctaaaactaaatattatgctcataaactaacaagaagtggaggaaaaaaaaagtcattggaagcttgttgtcgcgtgaataactgaccattagctgaacaaagttcgactgctccaacacaatttcataatttgaatatttgaatcaagtgatataattgccaagaaggaaaagttgtctcttgatcttacgagggctctcaaagntattaaaaaaaaaaaatact

SEQ ID NO: 55435 - DNA, 407 bp, Glycine max
  unsure (1)..(407): unsure at all n locations
gatccacaagggatgtaccctcccttgttctctntgaaaaaccaagtggatgtaccctccacttgaactgatccacaagagatgtaccctctcttgttctcagtataacaacctaagtagatgtaccctctacttgtgccacaaaggatgtaccctccaaagtgttaggacaaataattctcaggtggttagtcctttgaatcattgtaaggggaaacaaaagatatctcaggcggttagtcctttgaaatattttgtttaaggggaagggaagaatcaaaataattctcaggcggttagtcctttgaattctcttggaaagagagaagggagacacaaaagaattcaggcggttagtccttctatttctttggcaagggataagagaatgaaaagatagcagcaca

SEQ ID NO: 55436 - DNA, 468 bp, Glycine max
ttatatggcctgcatacggtataaataatatgaacactagaaaaatgagccacataatgtgaaccagatttgttaatactttacaatattaagaagaattactaaagcaaatagggcatgaatgcgatcgtgggtgtgaccaggagtgtacattacacgcgccttatggtcagcaaacatccacttatcgccgtggtgcacgtggatattactgtgaggaatccttgtcttgccagatcatgaagcaatcacctgtgatgcaacatggaaatgttaacatctacacaaagtagtaactagcgagcaaataaaaaatacatcatagactgcttttacaaaattcagaccttctacttaaataggcataacataagaacacacaaagtagcactctgagagcaatctctcttcttatcacatttagagataaattaatttaaacttataaatcataattagtcacacaat

SEQ ID NO: 55437 - DNA, 420 bp, Glycine max
  unsure (1)..(420): unsure at all n locations
ctaagcttacaactagtttctgtcttcactattntattcttgtttggttgctcaaattatatgcattgntctaatcttttaacattgctatttttctttgtaagggaaaacacacccaactaaattttttttttgaatagtttgtatgcgactataaaggaatgcgaaaacacacaaaaacagggatgaagaanaaaaatagagcaacaatacaagtgaagtttaatagcatcaatccaatttaccaagtcacaagattggcctcctagaatccttctgaccattaaaaggtccttttcttcttgggagtcaatttcttcactagattcttccncttttgcttcttcactttcactagaggaaggtgaagtagtaacctcatcttggctactataaatgtcttggcccttcataatcatg

SEQ ID NO: 55438 - DNA, 311 bp, Glycine max
  unsure (1)..(311): unsure at all n locations
ctaccttttgcctttntatgtttgataacataagggaattgctctagaaattccacccacttcacatgccttttgttaagcttgccttgccccttgatatatttgagggactcatggtcgctatgaatgacaaattccttgggataaaggtagtggtgccatgttttcaaagcccgtactaaggcatacaactccttatcataagttgaatagttaagggtaggaccacttaacttttcactaaaataagcaattggatggtcttcttgcaacaacacagccccaatcccgacatttgaagcatcacactt

SEQ ID NO: 55439 - DNA, 470 bp, Glycine max
  unsure (1)..(470): unsure at all n locations
gagcacaagagcttcaagtatgtgctccttanacctccattaattntttttctttaccttctcttccattggtgtttcttcatntttctccatgtatctcctcacatgtcttgttctaaatgatgttaacatgattctttagagtttccaccgattaaacttgctatagaagctagatttgattttctatggttcanatttcttgttcttgttcttgaaccatgaattgtgttgagtttaggttcctttgagttntgtcttgttattttttgtggctgaaacctaaaccataaaattcttacaaaaatattaaagtagaagaaaacctcaaaaatctagagtgacttgctcacctattgtagttntgtcatagaagtcatgtctagtcatgaaacttgtcacataagatttcttatgttgtgcctgaatttattntcttggttctttgtctaacctcattngtcatgagt

SEQ ID NO: 55440 - DNA, 347 bp, Glycine max
aatctgcacctgttgcaatagtctgtggtctatgttcttttgcagatcaccatacagaatcttgttcatctgtgcagcaatctggagtccatgagcaacctgaagcttatgctgcaaacatttataatagaccccctcagcagcataaccaacaacagcagaataattatgatctttcaagcaacacatacaatccagcttggagaaatcatccaaatctgagatggacaagtcctccacaacaacaacagcatgttccttcttttcagaatgctattggtccaagcaagctgtatgttcctcctccaatacaacaacaacagtcacaacaaagacaacaagcaact

SEQ ID NO: 55441 - DNA, 451 bp, Glycine max
  unsure (1)..(451): unsure at all n locations
atgttctaacaacttanactgctcatatgttccatatgacaaccatacatgcacaaattcattccatatttcaaacttcacaatatcacacgcaaaggtcattgaggcatttcatcgaacagttggtgggcgcatgttcaagcatganaaaatgaggaacggnggcaatgtgacatgcatgcttatgatttggatgtttaagtgcaacaattaaacaggtgttatcgtgttcaattttacttaaacacttacggcaccccattaattgagccaaatgactccggattcagtgggtaagatcgaaagtgtatgttcttaagaagtaaaagacaccagacaggaagtttaagatgcaaatcattaatccaatatttattaatgttgagatcatggtttacaaaggaatttaagactntggagatcccaatgagtccttggagaacaatcatgt

SEQ ID NO: 55442 - DNA, 390 bp, Glycine max
tctcttcacaaataactatcatagagcataaacctagtaaaactacccatcatatctcccaatgccccatacccacgagaatttatgtgagaagtctacccaaacctgatatttcgaagtcccacacgtagagatgcgcttcacgactccgaaaatgccttcctttcgcgatttggagcagaaatgcctaccaaaagttggagctttgttggagcttcaatggtggaggaagaagaagagaatggcaacgtgagagagagagggagaaaggcttctgaaattttggtgctgagtgaggagagagagtgttgctttttgtgttttaaaaaaaaaaagcttttctcttttcttattattttatgttaagctatgccacatgtctacatttga

SEQ ID NO: 55443 - DNA, 425 bp, Glycine max
ctcaccagttgattggcgagaccacttgcacccgctgtatgctgttctgaagcctagcctacaccctaatcactacacctctggactgctgcaccagtgcatgacaatgccactacgtctggcgagattgggtccaactcgccagtttgactggcgagaccaactggcacgaaatcgtcatgggtgctgacaagtccactgtcacgtggatcatccgtggaagactcgccattcgtgtcctacgtaaaaaacagcaccatcctagaattactttcaaaacaacaccatgctaagaatatgtttgtaaaacaatccctattaagacaatatgccgtggtatgtggtttgaccatatgaaccatgactgaggtgcgagtggtgtttgcatgtataagcggttctgcacgtaaaccgtttcatcacat

SEQ ID NO: 55444 - DNA, 422 bp, Glycine max
  unsure (1)..(422): unsure at all n locations
tatcttcggcagggtgaagagacgtctaattttctggtgtctcatctacttgctccatcctctttatgtaagtttatctggtcaaatagattccctttgtttctcatgttttgcttggaactgatgataagacttatataatgctgacaacatattatttaagcatcctcttaaaagtatgtttactttttggagctgctaatctttttggtagtggttactcatagtatttttatgcacttcatcagtctgtaagattttttattgcacaatgtttaacatgggaacgttgtgggagcttttttttgttagaattttgggaattgtcttgtctgtgatggaatgctccttanacccaggcttgggttcttttgattctgatacacttaatggttttagaatttagagtaggggatcatgat

SEQ ID NO: 55445 - DNA, 391 bp, Glycine max
cttgtgagaactcacatcggatcaaacgactaatcatatcagtctgtttatgaggaacctgatgaagacgggttgttggtgtttccctctcgcgatcactcctaactgtagctgcttcagctttgaggaccaatataacagacttatgccctcttgtcttgccgtattcggagcagctgcgctatggatgatcagtgatttgcaggaatatcttggcaagggtgaacaaggaaatgtatgtgccgaatttcaggaaggcttttgagcatttctgcatagatgccggtggtaagtcagttgtcgacgccatagaggaaagtctcaggctgcagaagaaagacggcctccaggatggcactatacagatttggcaatacttcatcttcttctg

SEQ ID NO: 55446 - DNA, 369 bp, Glycine max
  unsure (1)..(369): unsure at all n locations
atcttctntaggaagatccgnttgctctttctttcgagggtaagggtggagaattccatcctatgtcaaggttatggccaaacagttgatgtttgactcaaaacgcctacgaatggtgagacatgatgtatgacgggatatttgtttagcaagtggctcaagaataagggaatgacccaaatcatttccatgacacgcatatgacgatgatgattagaaatttatgcaaaactgatcatgcacacatcaatgtggacactcaaacataaagctntgtgaccatgcaaacactaaggcttagggttcgtttcccccattcaatcaacccaatgttttcaaaaaatgctcctttaccaagtcatgcataca

SEQ ID NO: 55447 - DNA, 411 bp, Glycine max
  unsure (1)..(411): unsure at all n locations
tgtgtagaactngaaacatgatcatgagtaattgaaatatttggaacatgctagaagaggcttaaatagtcactactaaaaaagagatcttttacgacaccgtatttacgtcggttatacgaaaaccgttgtaataaataaagcggtggcattttcgtaaataataatatctttttaaagacgggtaccttaaaaccggcttanaaaatactntatgagagcggttntaaaaaaccgtctttgaagtcatgcgttttttcaatttttaagttgacgtggcacgttataactgggttagctntaacaaccctatttcttactttntcttgtatggtgactcttcattgtcgtcatagagagagtgngggagagagaagaaacactntgccctctcatctttgagctccaatg

SEQ ID NO: 55448 - DNA, 349 bp, Glycine max
  unsure (1)..(349): unsure at all n locations
gcatgagagttgatctctaatactactttctgtaataatatctaacagtaatattggggtcttctttgtaaaatgagatctttctctttgttttttatatgtgctctgtcttaatgatggcaacccaaaacaaaataaaataaatagcacagggtacactttatgtagtaaaatgcagatgagtctcttacaatgcactaataaactcactgctatctatgaatttgtaagatctccttcatatatttatcattggttgactacttgcacttatccaaactgttgtagttntcctttgtgtgttgtttaactntggatagtctacatgtgctcaactttagtttcatgt

SEQ ID NO: 55449 - DNA, 450 bp, Glycine max
  unsure (1)..(450): unsure at all n locations
agcttcttatgtgagggagtgtttggtatatagtcattcatggctattcatgagccttcacccaacaactcaagccttatggagagtcactctgacaatcctaatnggttttaatgatctcttctgtcataccaatttangtaagagacgtggatggtcataaacttgttcagatccgaaatccatgggccaatgaagtggagtggaatggtccctggtctgactcgtcgcctgagtggacagataggataaagcacaagctgaagcatgttccacaggtagttctttatgcttttctgttgtggattagtcatattctttgacttcttagcatctctntatgattgagctgactattntctcttacccaatggtattaacagttgctgaccgtcaataaccatttatttgtactttttcacagtcaaagatggatattctgatgtctgc

SEQ ID NO: 55450 - DNA, 396 bp, Glycine max
  unsure (1)..(396): unsure at all n locations
ntgagcaaattcaaacgacaataactnttgactcggatgtcccattgtgtcccgtaggatatcgagaggctcgtaattganaacggaagctcggataaaaatcaaacgacaataagtcttaactcagatgtcctattgatccctgtaatatatcgagacactcgaaattgaaaacggaaggtctaagaaaagtcaaacgacaataacttttaactcggatgtctgattgagtcccgtaatatatcgagacgctcgtaattgaaaactgaagctctgagcaaattcaaacgacaataacttttgaatcggatgttcgattgtgtctcatagaatatcgagacactcgtaattgaaaacggaagttctgagataaatcanacgacaataagttttaac

SEQ ID NO: 55451 - DNA, 375 bp, Glycine max
  unsure (1)..(375): unsure at all n locations
cattcctctcttcccttanacttcttttatttattgctatntatctttcgctctatagaagtttattttgaatagtcttttgagtaattcatgttaagggtgcattgctaatccgaaaagagagagtgaaagtttaattggggaatagtctttgcatcttaattcaaccccccccttcttaagataactgaggccatatgtccaacatcctattcttgacaactcgcttctcgaagaagacaaactttccggaatgataaaatgaggccacatgaacgtctatatttttacttgaaaacacagtcaatcaaatgccctttttctttttgaacccctttgttttattatggaacttaatttgtttgaactttaccc

SEQ ID NO: 55452 - DNA, 347 bp, Glycine max
  unsure (1)..(347): unsure at all n locations
gtttggatgagttaagcttacccattcattttatggtttttatgatgatgcttgtgatgtttatgtgctgaaattgcttatggaaaactgttagagatgaaaggtagagttaacctagggttagaaagtgagaatgtggtgttatgagtggaaaaagagtgaggctttgagagtngaaaggctaaatctggattctgtggtaaatggaggttaaaatgagttaaccctagcttgaaatgccatttagaacatgtgagaaaggttaggctgagctagagagaaaaacaaatgaccaaagtgaaccaagagccatttctagggtaaaatggggtgttggagagtcaaat

SEQ ID NO: 55453 - DNA, 506 bp, Glycine max
  unsure (1)..(506): unsure at all n locations
gggatcctctgagttgcctcatgcatgcacgcttgtaataatcaattattgtttcaaagacttgtttgaattgatataatcacataaggcttactctcatattcaattatgggcttgataaaagtgttccatagaggaatttgacgaataaagattatctaaaagaaaatttaactttttttgaaaaccttaattatatttttaggtttcaaaatatttttaagccaatctagttcaattttgaagccttaatatttaaacgacacttagaactttcctcgttttttggcaaatagtcaaacaattcattatatttagtcattattaaatggaattatgtttctatgaaaattngaatatattctcacaccattgatntaaataaaatagtgatattttaatccaatgtcgaatatatatgtgcaaccaagaagctntcgtggagcaagaaaaatatccatccttaacttaatatttctctttctanaattactattaaccttaag

SEQ ID NO: 55454 - DNA, 420 bp, Glycine max
  unsure (1)..(420): unsure at all n locations
tcatgtgtgtccatgaaatgacataattgggcaaaactatgggcatattntcacattntgttttgctcgtgggtttatatgtatcacgtgatcatcccaataaatgctagttcatttaacgtgacaagccatcgcaacttgagagtgagttaaacaacatccttcttggcaacttgaagattcatgcgaacttgtcaagacaatgtagaagaatacttgngatacaaatgcatataccatgagaagaggcgacacanaatcaactagggagagcggagttggaaccaagaagggacacaactcatggtgctcagcaagcgtggacaaaacccgaagtgtcgttggcctatgtngtcaaaccacccaatcgagtttggcagaagaaagaaagtggaggacagatggtgaggtcatggcatg

SEQ ID NO: 55455 - DNA, 292 bp, Glycine max
  unsure (1)..(292): unsure at all n locations
cattcttgnacggtgatgagagtgacaaaagaattttatgaacctcttgaaatttttggcaaagaaaatgtttgggtcttgaaaatacatttggaagggttctcctatttaaggccaacccatggtcccgggaggaagtggtattgtttccctttaaaagagaagaggaagggattggcgagtgacttgaacagaatagtggataggaaagaaacaaacaagccccacataatgctgangtccatgtctaattgttgtagctttgttacttgtaggtggatagtgaatgaag

SEQ ID NO: 55456 - DNA, 367 bp, Glycine max
  unsure (1)..(367): unsure at all n locations
agaagaataccatcctgcttgtgctgttgcttacattcttgacccgctntacttagtgagggacactagtgggaagtaccttccgccgtttaagtacttgacaccagaacaggagaaggatgtcgataggctcataactagactcgttgcaagagatgaagcgcatattgctctgatggagctcatgaagtggaggacagaagggcttgacccggtttacgctcaagctgttcagatgaaggagagggatccggtcaccgggaagatgaggattgtcaatccacagagcagtaggcttgtgtgggaaacttatttgactgaattcaagtccttggggaaagttgcagtgaggctaatattccttcac

SEQ ID NO: 55457 - DNA, 344 bp, Glycine max
  unsure (1)..(344): unsure at all n locations
ctattcgatcaattattctccaccatatctttattggtaactatctaagttccatcgtttcattttaacattagcaattagttagtcaagttcaagaggacttatttacatgtgtttaggaatttgtatctttttctctcataaaaaaaatgagtcccttgatgcatntcataagtttatggacaataataagtgtacatgacatgcatttaaaggtgataagctatagaaaatgtttgcaatntaccgcgtgtactcgggtgattgcttatttttgtcacactttttgaaccattcttcatttgataaaagaggaagagtatcgatgaatttccaaatagtca

SEQ ID NO: 55458 - DNA, 449 bp, Glycine max
  unsure (1)..(449): unsure at all n locations
gagtcttttntatacaactacaaaggacttgtgcaaaatatttcacatccaaagtagtaacatgaacttgattttctagccattccaacaaagtatgcctgctgagcgaatgcaagatagcttgctgtgtgacttccggcataaaaaatcgggaggttntgcatganaattcgctattccaatcaatcagccaagagcanagactcggctgacttggatctgcgaggactacttgcttggcaccataacggttgctgcattgatcaagagtgaaatgggacaggttcccatctgaatccacatatttgattaatggaatgtccgtcactttggagctnttaaaacttgaccaatttgtagcaataaacagtaaaagattcagataaacaacttctgacactccatccacaagaatagaactctggatgcacttcgcataccaatcagtg

SEQ ID NO: 55459 - DNA, 288 bp, Glycine max
  unsure (1)..(288): unsure at all n locations
agcaaatcatggggctaaacacaccanatgattataatgatggatggctcatattctcacaaaggtaaaatcatcactttcaaatngagctctcaaaactatcatgacatgtagagaagaatcaaggatttcaagtcacaaaatgtcaagaacttttattttcaaaacaattacccatttcttgaacatatcctataattcaaagaaaaacatgcanagtcgtacgtgcacacaanaatgacccataatattaaactgaaaatgcgacgaaactaacaacattaacaa

SEQ ID NO: 55460 - DNA, 400 bp, Glycine max
  unsure (1)..(400): unsure at all n locations
tacctcttttgctttaaaagccacaaaggcataacccttgtgttctctagtgtccctgtctttcactaatcacacctganaattaaaaacacatatttttttntaacaataatccctatttcccccacctacagaaaaggcgtgtttataacatgattagaacaattcatcaaggctttgacctcaagaatatcacccataggtattaccctgactcggngccaaagaaaaaagaaaattgcaacaaagagcttaaaaaatctagcactatcaagtaatcactggaaacttattccaggatcagtattgtgaatgatcaattcaagtattcacaaacgaaaaggaataaaacgagagttatggaagtcaaagatgaggaacataagatccgcactaaatc

SEQ ID NO: 55461 - DNA, 409 bp, Glycine max
  unsure (1)..(409): unsure at all n locations
ttgcttgatggtatgctaagcctcacatctcatgctaagcgcatattgcaaaatatttggtgttgcaaaagcgctaagcacagcgtactgtgctaagccccagattctcactgaactttacaactttaagttaggcttaacccgaggctaggctaagcgcttgagttttaaactcaaacgtcacgtgggcacgctaagcgcaactgcgagctaagcgcaccatatgaatttcagtttttaaaaaccaaaggcagaggtaccttgtgtgataccccanagttacctctacctctggtactgcattttcttacttccaaatcacatatatgtcatctgcatgcctcatttccttgctcaaacataatccaagtaatttctcctgcattgttcctttgtatttntatttctc

SEQ ID NO: 55462 - DNA, 390 bp, Glycine max
  unsure (1)..(390): unsure at all n locations
ttctatgtacccacggtggtccacattgtgttnntgtgtattttattcccgttttgtttactttttatacccnctgttgacgtgcttaagccattttacttaagtcatttctcgcttaacttgaaaataaaataagtttccaccgaacgtttgaattgtattatccgttaacttcggttaaaataaattccgaccgttcggtcgtgccgtaaccacgttggaaatcaaaaaagaggtaaaaaataatataataatcaaaaagacatcttttagtaaaataaagcggaaaatcaatcggagcgtttctctttgggatttctctttcttaatcgaattgattaataactaaagtgaaactaaagcctcaaatcaatttgcctaatcaagctc

SEQ ID NO: 55463 - DNA, 171 bp, Glycine max
  unsure (1)..(171): unsure at all n locations
gtcgtctcggcctncaaacaattctaatgtcgacatactcatctattattcgtgcatcactcccttataataaattctcatgtctagctcctaattcaattgaatcaataatgttttataacatacaccttccctgctcatagggactgtgttaatatatttctattttcg

SEQ ID NO: 55464 - DNA, 356 bp, Glycine max
  unsure (1)..(356): unsure at all n locations
gagaacaattctcaagtttgtgtaccaatcatcataattggctccgactagctntccagattcaagaataccatgaagtgatagagaagacatactgttgattaaacacacaacaaaatatagttatgtcaaagcataatttttcaaaccttttaaaaaatataaaattattaataatatttccactaattacaataataatatattaatgtaagaaatacttatttcttttaagtggataacatacagcctcttaaaaaattgtgagcaagccactttggtatctagtcgtttctcatacacattctaagaaaatgtatcatattcattttcaaatctaaataagaaataacata

SEQ ID NO: 55465 - DNA, 455 bp, Glycine max
  unsure (1)..(455): unsure at all n locations
cttgacttgagtcatcaagagattataaatatgttactatggcataagtttcaaaaaaagatcaatcatcaatcatctntgaatcatctatctttcaatctttttcaacatcatctctcanacatctttcaatcaatctttcaatatctttctacagaattttctgattcatttctcttcatctttctaaaaagtttttgatcaacactttctcttccaagaaaagttctttgttcaaaaacttgtgctattcatctttttcattctcttctcctttttccaaaagaacaaaggactaaccgcctaaattcttttgtgtctctcttctccctttgccaaaagaacgaaggactaaccacctgaattctttggtctctcttctcccttacaaaagattcanaggactaaccacctgagaattctcttgattcttccccttcccttaagtaaaagat

SEQ ID NO: 55466 - DNA, 426 bp, Glycine max
  unsure (1)..(426): unsure at all n locations
agcttggtacttcaaaatatatgtgaccatcttatctaagtctcaaacctactataaaagcatgcttataatanactcatacgaggatacatactgttaatgtctctaaaccataaatatagaacatttgcatcagtttggatataataattttctggatcgtactgtctacaacttactagtttgcaaacacctgctgggaaacccaattcgatccttcacaaatcaagggttagtaattaagagataaaaactagttgtgtaaaaaattactaacagtttaaaactnttttaaaaattacttaattaatttaaaaatattaaaatcatattaaccagcctcatgaatactaaaagctctttcaaaatagtatttaaatntattgaaatataacattgctaaagtgatagaatgtttagtactta

SEQ ID NO: 55467 - DNA, 427 bp, Glycine max
  unsure (1)..(427): unsure at all n locations
ctgtgtcttgaatgaatgtntgagtctgactctgtgtgtatgaaaagaaaacattatattagagtgagagagagagagagagaggaatcagaaattgtggaatttgatgtgagtgtgtggatgcatgaaaatcaaaagtggggaaaaagcagagcgctgttttggtggtacctgctgcctagattccatctatgntttgtcgtcgagttgattacgcgtggcaattttccatgccaacacgtcagcaaacccattaattgcatgtgagttaaaatagacaaactttattttgaagtaattntgtagaggattcaagtttgtaaatntaagatntttttatatgtaagaattagtatccaaaaaattaaatgaattagacttctttaatttatagacttaagtttatgttaagttntttntatactca

SEQ ID NO: 55468 - DNA, 421 bp, Glycine max
  unsure (1)..(421): unsure at all n locations
tagctttgntcgcgagctccaatcgagacatttgagcttgcacattttgaattgtctccgcgctgcgcttaacatctgcactgaactccttcattcgcttgttatctgccatggctagatgaaagcaccaatgagagggaattactacacatggaaggatgtactctgtttattcccgtattgaaaagagaatcaacctctaacagtacagtgtgtacaattagaaggactgaatactatagtcatagagagaaagagaagaagaaagagaaatgttcacaccttcctacctctcactacccattctcctcctctaaataccactattagttggttacataatccaccaacctaaagttggttcttctctctctcacactctttctgttacccatagtggacacgtgtgattagcaaatat

SEQ ID NO: 55469 - DNA, 382 bp, Glycine max
  unsure (1)..(382): unsure at all n locations
ctcagcttaggctgctcaattgctccaggttgctgtatggaaaggcttatgtctgtatgatggtcagcagaggagcacaaaccacaaacccttgcgacaggtacagatttctgattcaaggccagctgggttaccaagttaaccaatgcattccagttgccttcaagcttcttagtttcagatgatgcagatgggcttgtagctacctcatgcactcctctaatgactatggcatcatttctggcgctaaactgttgggagttggaagccatcttctcaattaaatntctggcttcagcaagattcatgtctccaagggctccaccactggcaacatctatcatacttctctccatattgctgagtccttcataanaatatt

SEQ ID NO: 55470 - DNA, 409 bp, Glycine max
  unsure (1)..(409): unsure at all n locations
atctnntcaactgaattgcaacgttctaattgatttcataatggtgtaatcgattacaaggtattggttatcgattaccagtgtatctgaatgtngaaaatcaaaatcaattgtgaagagtcatatcctttcattaaaaactttgtgtaatcgattacatggttttagtaatcgattaccagtgacaagttttgatataancaaaagatataactctttcaatggttntcaggtttttctaaaggttataactcttctaatggttttcttaaccagacatgaagagtctataanagcaagaccttgactngcatttcaataacttctatatatttatttacaaccttngaatctctttgaacatcttcttgaacttcttcttcttcttcctttgccaaaagctttctga

SEQ ID NO: 55471 - DNA, 434 bp, Glycine max
  unsure (1)..(434): unsure at all n locations
cttatgacacagtctcatggtctnttctggactacatgctgcatagatngggcttttgtcataaatggagaaagtggatttcagcttgtcttcactcagcaacaatttcgatccttattaatggcagccctacaaagggagttaccccttctagaggcttgagacaaggggaccccctagctcccttactctntaacatagttggggaaggcatcacaggccttatgagggaagcagtccggaagaatctctatagcagctacaaggttggtatgaaaaatgagcccacaaacattctgcagtatgcagatgatactgttttngtgggtgaggcttcatgggacaatgtcttggtgttgaaggctatgctaagaggctatgagctggtctcgggcttgaagaataactatgctaagaagtcaattggtggtata

SEQ ID NO: 55472 - DNA, 507 bp, Glycine max
  unsure (1)..(507): unsure at all n locations
tcgacccgggatcctttgagtcacctgctgcatgcaagctngtaagtatttgttggtattaattgcctgttccattangctcttaatgtctttagaggttacttcctcattgacatattttgtcttgaatggaatcgccatgacaggtttattgttacttgctttgatggttggtaattgatatttgggtgcgggaggtaattccgattggattaactcaccatccttcacttgccaattngttatgacatttgttgttgatcacctatgatgtcttgtttccaagggtaatctatatcctttctgatggcataagcatgaaaccaatcaaagaaaaggacattaaatttgactctttcgacaaattcgtaaaacttgtcttggatttgttttctgtttgtacccttgtaatgatggaacaaccatctcctttggngttcattctccggagaataaaaatctttncctaagggttccttatcaatgctaaaagtgtcagataacatc

SEQ ID NO: 55473 - DNA, 219 bp, Glycine max
aaattgaaaatacttacagtctaccactttttattagcccattatctcctacaaagcccctaacaatatatgcctgcgtcaatgctaccacaccacagcatattacgaaaattaagggatgacgataaattatgtgattaaaaaagtcatcaattaaatgtgggaatgaacctctgacgacataactcaatatgagatgatctaggagaactaatgatt

SEQ ID NO: 55474 - DNA, 402 bp, Glycine max
  unsure (1)..(402): unsure at all n locations
atctntagtcaaacagaataatcctaanatgtctaagaattgggtgttgaaaaagcataacatgactttctgtgattggtttaaagatacaatctttgcagatgagaatgcttcagaaacattaagaaagctagcagatgggcctaaaagaaatgttataacctgtcaaggatacgacataaacaggtattcattntacacaaaagtacacgatgacaaaagtacaatgcaaaacagcggtgtcaccctaagggctgaatctcaacactttgcaagtgtcaatgatgccaatccctgtgtagcttccatcccttactttgggttcattgatcaaatttgggagcttaacaatgtganatttacgggatgtgtcttcaaatgtaaatgggttgacaacaacac

SEQ ID NO: 55475 - DNA, 448 bp, Glycine max
  unsure (1)..(448): unsure at all n locations
gtcgaaaacttttaatgttggagatttatttnggaaggttatcctgcccatggatagtaaggatcgagcctgnggcaaatggtccccaaattgggaaggaccgtttaaaataattcagatctattcgaatggtgcttatgaattagaggaattaacccctcagaaacgtactttgaggataaatggtaaatatttgaaaaaatataaaccaacattgctcgaagttaaaataagcatagaataaacagaagtgatggaaacataaaaatggcgataacagtaaaattgccacgaaagggcatgtgtcaatgttacatcaagagtagaatcgaaatacagaattcgaaataaaaaatcataagttctactaagtcatgatcaaatcctcatatagcttcttcaaggtggccatctctttgctcanaacctgntcagcactctccatagc

SEQ ID NO: 55476 - DNA, 439 bp, Glycine max
  unsure (1)..(439): unsure at all n locations
cttgactgcgtgcatgcacgcttcctttacattctaaggactcttcatttccaagatggcttggcatttatccagttggtgtgtatcccttgatgagtcagcatgaaccataaaacttttctctttctaccccgaagacacacttttcagggttcaacctcatgttatactttctgagctggcagaagaccttntgtaaatctgtgatgtgggttgctaaatcattagtctttgacctccatgtcatccacatagacttctaagtttcattcaagctaacactngaacactntgtccatcatatgctggtaagtagctccggcatttttaagttcgaatggcataaatntgtagtagtagtttgtggattcgataataaatgttgtcttcttctcattgatagcgtccatctttatctaattgtagctggaatatgcat

SEQ ID NO: 55477 - DNA, 475 bp, Glycine max
  unsure (1)..(475): unsure at all n locations
acataatacatgtcagggtttggtttggttcatggataaaaagggatgccccacattatttccatgacacaaatgcaaaaatgatgatttggaaattttatgcaaaactggtcatgcatgcacctatgcggacactcaagtgtcaaattntatggtcatgtgatgctagggctcaggattcatttcctctattttaaatcaacccaatgtttccaaaatatgttcttttatccatttgtgcattcatccgagtccattttgggcgtccggngaaatttcacagcgttcacccttcgggtgtacacacacatttttcaaaaactagttatgatcnagtgaattttttcaaagaaaagttggaagtcatctcttttcaaaagcatgttggttttccagctagacaacttatntntntnnttcttttcctctcttttttcttactggctctcnttttcccttactggctctcttctct

SEQ ID NO: 55478 - DNA, 185 bp, Glycine max
gccgctgttcctttaagacttcattttcaaggttgcgatatcagctgtttgtttcttgagagcacgcgcacctatactttttctttcacgctagaccagttttacgtcaactatgtttacttctagcggcgaacactttgtatctggatcgagtgcaaatattatcttgcctcatgtgtcacaaa

SEQ ID NO: 55479 - DNA, 315 bp, Glycine max
  unsure (1)..(315): unsure at all n locations
atcaacagggatgcctcacattatttgcatgacacagatgcacatctgatgattctgaaattatatgcccgactggtcatgcatgcacctatgcagacactgaagtgtcataatttatcgtcgtgtgatgctggagcgacgaatcattggcgatatgataaatcactcccatggttgcaaaacatgttctggtatgcatttgagcattcatccgagtccattttgggcgttcggcgaaatatcacagcgttcacccttcgggtgtacacacacattnttgaaaaactaggtatgatcagtgaacttttttcaaag

SEQ ID NO: 55480 - DNA, 459 bp, Glycine max
  unsure (1)..(459): unsure at all n locations
ctctagtattctatatctaattattgggtgtatttattagtgcatttcctatactgcgaaataaggtgtatgatntttaattgttccagtaaaattatttccaaaattaatgaattattttttcagttgttcatagattgtcttctagatttatataggttcaatgtattttggtgtcaaaatcatgtcttgggttgcagttccctagttttctccaagaaggttgctaggttattataagacttggctaatttaaatgtttatagtgtatactagcagaataagttcttcattntgatcttttattaattttagcatttagctctactgctgggatgaagaactggataattactttcacatntttgtaattacttatgaatcgtttattgctatactgtgaatcttcgcttggatataaggagaacatgtcnatcttgaacacaacagctgaaagat

SEQ ID NO: 55481 - DNA, 441 bp, Glycine max
  unsure (1)..(441): unsure at all n locations
atgctttaaatgaacattcaggggaaacgtttggtcaaccgaaactggngaataaatcactcatggtgtataaaaactcacacaggtaagtggtttacccttaatctaaaccatagctgcaccatgactttattntgcacatgatttcctatcgaaccaaaagattacacgcgcgatcacggatcaataggattttctcaagggtgatgtttttggagaggaagctgggtgttttggtcttttcctctttgtttacgtggggcgggacattgccagtcgagagcgaccttgaatggcaatcccaaaggaagaaccacttcaaaatgggttttccctttgccggcggtcatttaccacgccgaanatttatctggtccgaagatcttctgttctctttcctgggttcctttattgatcgagaattattctgttttcctccga

SEQ ID NO: 55482 - DNA, 445 bp, Glycine max
  unsure (1)..(445): unsure at all n locations
ctcgctgcanaattcacttcttggttggtgtttttggtttgtgctaaaggtggtgttcgtcattggaagtgtggtagacagactgtgtggtatatttagggatggccgttgtggataactgggtggtgggtaaggagaaagtttgttattggctgagtaaagatattgttgggttggtgggaaatttggccgttacaggaatggcagtcacagcatgggtttctccctcatcctcaccctctttatttgccccagttttctcagtcgtcctagtaggatgatcaaatttgcctctttttggacccacattgatcctttcactggcgaagaccaaatctgcaaagctttgagggtgcgcagcccaccatcttttcatagtagagtaccgataatgtgtctaccatcacgattatcgtctccctttccattanttggggtaccacct

SEQ ID NO: 55483 - DNA, 362 bp, Glycine max
  unsure (1)..(362): unsure at all n locations
tgctgcatgctatcttatatgaaagaatcataccaaatcagttctagctcaaatgtaaaagaataatgagatagctttattaataagagaagactaacataatcattcattcccacatcaattcaagcctatgatatgattatctcaattgacactgtaatctcatatgcatatgcatcatgtaatgttatgcgaacatgactccatagagattcttacaactttagggcgagcctcgtacgccccaccctctaccatggtgcaagtctctgaccattcacggagtcccttgagctgaccttgtgaatgtagtgtactcntattaaaactagacaagtgagggtaatgaatggcttgcttgt

SEQ ID NO: 55484 - DNA, 424 bp, Glycine max
  unsure (1)..(424): unsure at all n locations
tcctttagtagggaatctatccttcctaatatttatccaaacccagtcaatcttattaagaactagctcttttcttcctctattgcctttagttgaatacacctttgtttggttctctatttggttcttaaccctctcatgcaacttctttacaaattctgacctagattccacttctttatgtataaaagaagtgtccagtgggaggtgaatgaggtctaacagtgttaggggattgaacccatagacaacctcaaaaggggactgcttggtggttctatgaacccccctggtgtaggcaaattctacatgaggaagatactcatcccaagacttatggttgcctttcagaagagcccttanaagggtggataaagacctattcactacctctgttngcccatcnagttgtggatgacaagtg

SEQ ID NO: 55485 - DNA, 237 bp, Glycine max
agcttgtagggttaaagtctcacgattgtcttgtgctcatgctacaattgctagccggggctatacgagacatcctgccaaacaacgttaggaacacgattgctcggctgagctttttgttacatgctatgagaggcaaaagaacgatccagtaatgtgtgatgaggagggatatgaggccacaattatacctcgctgccaggagaagtgatttccacctgctatcttgacatcacg

SEQ ID NO: 55486 - DNA, 232 bp, Glycine max
gcatgacaccaacacttgctatgtatgttgtaccttgtcatggaaacgacaactccacatatgcattggagagggtcgtgcactacatacactacatgcattgtcggaccaacatgactatcatgcttcatacagagaaatcaaactacattcttttagccctgaatttggtgcctagtgacatattttatgttttgcgagaagtccccaagggattcattgcctaaaccac

SEQ ID NO: 55487 - DNA, 334 bp, Glycine max
  unsure (1)..(334): unsure at all n locations
tgaattagaaatctgcacctgtcgcaagactctgtggtttatgctcctctggcgaccactatacagacctttgcccttatgtgtagcaatctggagcaattgaacagtctgaagcatatgctgcgaacatctacaatagacctnctcaagctcagcagccaaatcagccacaacagaacaattatgacctcttcagcaacaggtacaatctcgggtggaggaatcatcccaaccttagatggtcgagtgctccacaacaacagtagctacaacaacaacagccttatttttagaatgctattggcccaagcagaccatacgttcctgcactaat

SEQ ID NO: 55488 - DNA, 360 bp, Glycine max
  unsure (1)..(360): unsure at all n locations
cttaggcacttctatctctatcgaatttgctgaggaaaaatagttccgtgaagaaaatccaagccgaggcactgtcgtaacgtttncgtgagttattacgcgaagattcttgaccggtcttcaaagattcatcgttcgttcttcgttctcttcagtctgtatcgggtaagtaccttcaaccaagctcttcaattcattctatgaacccgtggcgggccacattttggttcatgtatttttattctccgtttcatttacttattatacctccttgtgacgcgcttaagccatgtatttatgtcatttctcgcttaatctagaaatataataaatttccaccgatctgttgaattgcatcat

SEQ ID NO: 55489 - DNA, 365 bp, Glycine max
  unsure (1)..(365): unsure at all n locations
ccttagttccactctagttattagccaattcaattaagagagagaaataccacagagaaacgtccgattgattcttttgctttattttactanaagatatttgttgattattatattattattttacctcttttttggtttccaacgtgattacggcatggccgaacggtcgaatttcattntaacaaanattaacacatgttacaattcaaatgatcgcgggaaatttattctattgtttgattaggcgagacaatgacttagataaatgaatatagcacgtcaaaaggcggtacggaaagtaaatgatatgaaaataatagtacacgaaacatgtggcgaccaccaagggtacatacaatgaa

SEQ ID NO: 55490 - DNA, 392 bp, Glycine max
  unsure (1)..(392): unsure at all n locations
tgcttgtaagttacaaaatagagaaattctatataaacaaaatgcatccctttgcatntaatcantttattatattatgtaactactaccaactaactttaattaaaataagttttattctctttatatatcaagggttggacgtgttggcatggcatcattaattggtgaaagaagattctctctctctctctctctatatatatatatatatatagatatcaaggatcaagctcgcactatggtttataggcggacaaaataatgtgattaaatgaataactgcagtaaaatttcaaggatcaacctagcacaaagcttgaaaatcgactaaaagtagcaccggtaatagttttcttttgtgccaaactaatttgaaattcctagtactt

SEQ ID NO: 55491 - DNA, 398 bp, Glycine max
agcttaggaatgaatgtgttaagacaaaaactcagagtaccacttattgatgaaagatgatagaacttcgccttagatggttcggtcatttgagaataaagacgaataaaagctccactatgaagatgatcaaagatgatctgatactaatatgctggatacctactaaacaatgtaagaatttgttacattggtcctatataaagactatattggtcctatatagcatagagcatagacaaatgaggactacccaagccatataaagactacccaagtcatataaagactacattggtcctatatagcatagagcatagacaaatgaggactacccaagccatataaagactacattggtcctatatagcatagagcatagaccaatgaggactacc

SEQ ID NO: 55492 - DNA, 526 bp, Glycine max
  unsure (1)..(526): unsure at all n locations
ctttggacccttgtcgacccgngatcctctgagtcacctgcggcatgcaagcttgcttaccacagttntaggaattcaatatacacttatgatcaaaatttcagcccgtaattcagtcacccaaactggaattcaccatagacaccattcttagggaactttaaaggtccagaaaagggtcaccatccaagactctcttagaattatacctggacctggtaaaggcttattaacatgcaagaattgactccaatcaaataataggctaaaaaatttcatacactcatgaataaatgagttagaccaagaaacaagaaaaattaaattccacacaacataaggaatcttatgtgacaagttcatgactagacattacttctatgacaaaactacaataggtgaacatgtcattctagaattttganggtntcttctactttaatttttttttaagaattntatgggttaaagttttggccagaaaaaatagcaagaataaactcanaggaacctaaactcaacacan

SEQ ID NO: 55493 - DNA, 342 bp, Glycine max
  unsure (1)..(342): unsure at all n locations
atgttagtcagtttgtcaaattgattgtgaaggaatgcattaaccgtatctcagtgagagtgtgctncttanatttttgagagaaacnaactatcattagtactggatttttgcgtgattctctgaagtatgggctgaatgcatganatngaggatgatgaaggccatgtttgatggtgatagccacttagccaaaaagttgaccatgtgcttgaatgaattatccattgtacccagtttgagctgaatgaattattgattgattgaaccctgagcctatacagtgttatctcctgctaccttgacttaggttgtaggagagcatcatctacaggaagcatg

SEQ ID NO: 55494 - DNA, 421 bp, Glycine max
  unsure (1)..(421): unsure at all n locations
gctagttatgctctgagcttctttttataatttattgtgcaatccctgcagcaagttagatggtttctgactcctgctctatcttcaaaagccacatccttgaaaaataccttgtttctctcttgagcttgaaaatcactgaaaaatgtggcaccacagagaagttacaacagagctcatcacantatgacaaggaaagagaggaattttagaataataaagaaaatctaaaccagacaataatgaactaaatctagaagaataaataattaattaattacctgtcaagatttaaacttaggctgaggatgccaacaggaattgtgaagggatgaagctcccaaatggtttctagggatgggtgaacatatttacacttcatgtatgtcttacaagttgaaatccccataagccacaatct

SEQ ID NO: 55495 - DNA, 482 bp, Glycine max
  unsure (1)..(482): unsure at all n locations
gatcctctaagctacgcggctgcagcttatgaattangtatttcttaaaatctcttgataatttgacataatgtngtttggtggttattgatattttataaggatcccctaaaatttcaataagtggtatttgaccttttataaggtttattaaaaattctaacaagtggtatcagagccaccattactggtattgggatttaaaattgtttgatatgtattatatctggatcgctttaagtgtatgaaccctacatttattttggggagaaactattntttgttttttcaaatgaacaaaaagcctctgcatttgatttacgggtttgtatactatatttgtttgtgtcggtgtgcttacatattattctatttgggataaaggttcttcgtatccgcgcgtggttctcttcgacaatatatatttcgtgagaaaaaagtttttgttttgtttatacatataaggttaccacaactcttta

SEQ ID NO: 55496 - DNA, 473 bp, Glycine max
  unsure (1)..(473): unsure at all n locations
ctaagcttgtgctataagagtcctgtcttaccatcatttacaaatgtgcataagcatcggtacagttcaaaacatacgaaacatcgtacgtcagtccataagccctgcacaaatgttaaagatgtttgaggaatattacaatgatttagtatattattttgtaaccaagttatttttttcttttatacacaatccntttgttctattntacgtccgtacatgctgaaacatcatgttcctgtttatttcaatgattaatcagttcaattagagtgtaaaaaaaacctcattccaatttggggttgctgcctttcttgaaaaccagtaatgtgtagttaaattcatttcaatcagtgattcactaattcagaattgcagagaagatgtaaatgtaggttttatttgaataaacttaatcaataaacggtgtaagagaagagaataaggagtaaaataaatttacatttttccat

SEQ ID NO: 55497 - DNA, 449 bp, Glycine max
  unsure (1)..(449): unsure at all n locations
gcacatgacttctcaacttattgaactataaaaaaatcatatctttggcacttgggtataggccttacttgggagccagcacattttttgttaaaatatggttttctattttgaagccttattataacatgaaattgtcataaaatgacaatttggggtggctttaaaaatcttaagagatcaattacaaatattttacaagatcaacgacacaattactattttnttagtttagagacctaaataanaactcctaaatagttgagggaattaaattaaccttgaatgaacaaaaacaaaccaaatttcacatggatatgntaataaaaacaccanaattcttaattaaaatgaagctgtgacttttacggatcacctttncgtaaagtatgttgagtaacttacagatcacctgatccgtagcatcttcggatcaacttgatccgaaa

SEQ ID NO: 55498 - DNA, 309 bp, Glycine max
atgccgtttttgttttaagggtagcatttcttggtaaaactaactttccaaatgtttgccttcgcaggaaatggccccgaggaagcttgcctcaaagaggtccaggaaggacaaggcggccgaaggaactagttccgctcctgagtatgacagtcaccactttatgagcgctgtacaccagcagcgcttcgaggccatcaagggatggtcgtttctccgggagcgacgcgtccagctcagggacgacgagtatactgatttccaggaggaaatagggcgccggcggtggacatcactggttactcccat

SEQ ID NO: 55499 - DNA, 439 bp, Glycine max
  unsure (1)..(439): unsure at all n locations
cattttctccttatgatctcnacttcgcancgaagcgtcattcacacaatactgagactcacaccaccacaccttcattcacgaaactcataagttcttgataatgatcacagtctaggactgttggcgaattatacacgaacaggtgaaggactaattaacatgtcagattcgactcatataaataaataggctgaaaaacttgatccacttatgactaagcgagttaggctaagaaacttgatgagatacactcaacaacccctaaggaatcctatgggacaagcttcatgacatgacttacctctatgacaaactaccgtagggaacatgctctctacaccttgacggtatctctactcattatgtattaagaatatatgggtaagtttggccagaaaaatgcactataatctctaaggcactccgctcacactcg

SEQ ID NO: 55500 - DNA, 383 bp, Glycine max
agatttgtttctatgttcatataattgctctcagacccaatattggaaaactactttctccttggttcattatattcaatactgtttttgcaatcttgcctttatcttgctattttatcctattttatcctatcatgcacaccaccacagtggcactaaatatcttcacaaatactagtgaatattatcgccgccaaataaaagttctactccatgttccttatcttaattctccctagatctcaaataccctaaagatgtagaggcaagggccgaaagttggcttcaataaaaataagctaaaacaagtttataggattaacagtcttcccaatgatataatttggcaattcttttcttactcactttggacttcagacttt

SEQ ID NO: 55501 - DNA, 450 bp, Glycine max
  unsure (1)..(450): unsure at all n locations
ntgcagatcttatttctaacaagagtctgtacagtcttactatctatttcaacttgcatatccttacaccacccaacaaaaccattatcctgaaattatgttaacttccatatcctttgttaacaaaccattaccttgaaaagatattgaatactattacagaaggaaacctgcatacatcatgcttctaaaacaatnttctagaagatcaaagtatcatagaaaggcctgcaacaacaaaaaagacacctcatttctcaatttccaacaaattcaacttaaacataagtctgatagtataaatccaaatgcaagctagctacctagacattatagaggaggacggaggactgaaattcttatgtcataagtttgtataaccctacatagttacccctttttatatcatgaagtgaacctagaacctacatgcctttctacttcatgtca

SEQ ID NO: 55502 - DNA, 363 bp, Glycine max
  unsure (1)..(363): unsure at all n locations
caagcgggaaacaataacaatatgataaaagaaacaggcaactgttaaaaaatttcataataatatgaaaaatatgaagaaaaaaaactcattgtttatagaataggttatttcctatgccaccatggatcaaaaagaaaaggaagataactaagcaacgggtaaaatcttgcagaatgacaggaaaaatacggtgaagataaaacaaaaccaaaatcaccgggaatgttattaggtgggtcacacctacctttagcnagaattagcccactatggtgaggtgaactgttttcctgctgagataattccatgggatcattcaccctcttttcatttggaagaagcnattcatccatgtacgtg

SEQ ID NO: 55503 - DNA, 450 bp, Glycine max
  unsure (1)..(450): unsure at all n locations
ggtgaagttcttccaaggctgtccagagcagcattttgtatacatattggagcctttcttgaaaatcatcacgtatnggattctaattcctttctcttaatttgtcccatnttttaagtatttggttctgtttccttgaatgctttaactatttgataaattagtcttgcatggataggacataaacaaagtgttactgcaccaaagtcccttttcctcttgtgaagtggaatagttgtaggatgaacaagtatttcacctatattagatggatggcagagaaagaattagggattctgccaaagtaagctctgggttatatgcagggcctgatatattagaagctagatgaattctatactttgtagcatgtaattatatatggganaaatgagatataatangacattgngaatgctgcttagcttcttatctttcctttcattggtc

SEQ ID NO: 55504 - DNA, 387 bp, Glycine max
  unsure (1)..(387): unsure at all n locations
catgaataagctcacatcaaaaggtgtgctcatagtttcactatagtgcattctctcttagatagtcacatattagatatttcaagtcaacatgcaaaagacatcatcatcagtgtcactaacactgtcatcaactcatattacacatgctcgacgggataagcacatatttatatgagtcgaaagtatcaatatatcattcagatagaatacgaccaatgctaacaaagaacatntcatgcctgcgacgtatgatactcttaaacagaacacccaagaaactagtttacccattaccacttaacaaaatataaaacacatacatatcaaaaatacaaactccgtagttgacatcagtatcatgatacctaagttggacacacaatg

SEQ ID NO: 55505 - DNA, 401 bp, Glycine max
  unsure (1)..(401): unsure at all n locations
acctgcggcatgcgacttgtttctggccctaatggggcttatgattgatcaaatgacaagcttacttcaggatttttactctgttcatatcccaaatttggactgtttttttactaccttaccaacctctagtgctgcttatgttcttggaggacctcatttcttatctcatgctgtaactcattacttatctcatcttgtagctggtttcttatgtcatccttaattccaccgatgatatcagccaatggttgttggttgatcgatggtgacgatgtgctanaagcacgtgaggctcggccaaagtattggcttattgtgacacctgtccctgggacgcgaacacagcctggatgctcatgtcagccaagggccgtgttgagtatgtcctgtcgcccatg

SEQ ID NO: 55506 - DNA, 422 bp, Glycine max
  unsure (1)..(422): unsure at all n locations
tccgttntcaattgcaacgtctcgatatattacaggtctcttctngtcatctgtgcataaagttattgtcaattcaattttctccgaacttcggatctaaatgttgagcgtctcgatatattacgggactcaatcagacatccgagtgaaatgttattgtcgtttgaatttgatacgagcttccgttctaatattggagcatctctcgataaattacgacattctgtcaggcatccgagtaaaaagttattgtcgtttgaatcttctaagagtttccgctttcaatttggagcgtctcgatatattacgggactcaaccggacatccgtgtataaagatattgtcatttcaatttgctcagagcttctagtctcaattgtgagcgtctcgatatatcacccgattcaatcggacatccgagt

SEQ ID NO: 55507 - DNA, 453 bp, Glycine max
  unsure (1)..(453): unsure at all n locations
atgatgatataattaaactntatcaataatatatatataacaatgataacaacatttgattattcaagttaattaattgtatctataacctcttctaaacaacctaaaaatttatttattttattaattaaagttaaaaatatcaatttaagttatttaattaaaggaccacagctaggcgtgattttaaaaagaaaaaaaatgtatagatgttttaggtcatgtatttatatattagcatttgtgtaatcatttttaagtacaaaaataatttttacaaaaataaatatttttgtagttaaattgtcaattcataattaaggacaatataattgaaaaattatatacctaaaatcaatttaaaaaatgtatgaattattccgacaagaaaatattcaaaatattttcacttctaaaggtgagtacatatacactatattctaaatatttcac

SEQ ID NO: 55508 - DNA, 379 bp, Glycine max
agcttaactgatcaattatggtacctggatttatctcattggtaccttctagtttacaaacactaaattgatgtctgatatcgtacttgataattgtccttttactgctacaaaacgactaccatactgaggcttatatcagtataagacctattccattctgagatctatttaaggaaagaaagagaccagatttactacctgcagttttgggctaatactatttaattatgggtagcgtgaaagtaaatgagtagacaccaagtctataatagaaatcacacaagctagaacacaaaaagagtctaatctatctatttattgtacaaaaagagtctaatctaatctgcttcaaatgatatataataaaatacaccca

SEQ ID NO: 55509 - DNA, 344 bp, Glycine max
  unsure (1)..(344): unsure at all n locations
tctggatccttttgcatcatgtttncacatattccataaataaggtcctccccctgcaagagagtcaaaataatgagttattatagagataaaagtcagatcttggccatcatnatttagtatattatattaagtggatatcttattctctgctcttgtacttcatcattctataccgccaataatatttaattggtataaaaaaaaattgagtaaattgcaatatgtacacctcaatntatgcaaaaaaagaaagatacactgctattttcaaatactgcagccacatttgagagctaaatgcttctgtaaatantttttgcagttctctcaagatattaaaa

SEQ ID NO: 55510 - DNA, 462 bp, Glycine max
  unsure (1)..(462): unsure at all n locations
agcttctacgaagggcatggttatttccagtttcatgaanatatctaaaaatctagccagatgatgatctttttctttcttggaaggaccatangatatggtacttccacaccttcatccataactttttcactcttactcttctttgcatagctttctatttttagtagatgaagatgaatctgtggccacctcatggactcctctaaggataatagcatcatttcttgcactaaattattgggagttggaagccatcttctcaatcaaattcctagcctcaacaggggtcatacaaccaagagctccaccactggcaacatcaatcatactcttctccatgttgctaagtccctcatagaaatattgaagaaagagttgcttanaaatctggtggtgagggcagcttgcacacaatttcttgaatctttcccagtactcatacaaactttctccactaag

SEQ ID NO: 55511 - DNA, 502 bp, Glycine max
  unsure (1)..(502): unsure at all n locations
gatcgtcttgtattgcccaaggagagttgattatattccggngcggtgttacccaagtaggaaaaaatcattcattctttntaatataattgtggacggcatcagcctgattttcttgttgcaggttgtgttgtaaattactaaattataaggaaattataaagaaatgagttgaaatttctattcattaaatatccaatggaacggttgagagaaattctccacaaagggatccctttcagtgacttaattcttcaatgttatcttctgatatcttgtacaattcagtatatcacggtgcgtgtaccaaatggctttgttaattttgggaagaaattatcgtcattntcttagcatatatcagaggtgatattatagacaaaggtgcatttcgttccttactcttcactattagaagcctagagtatattatgttctcatcattatgcatgttcactgttgctattacnntctctcgtcacnntgtactatactctctccg

SEQ ID NO: 55512 - DNA, 435 bp, Glycine max
agcttgtacgattatggggtacccatcacatgtggtactaggtggcggtcgggcgatggtgcacaacatgttttccacattcacaaatcgcgcataaacccaccatcctctgttgcccacctccaactgagctcacgtactcccacgtagcccatatactcgattctctcaacaccgggtccccatcaatcctcccaagcttccccaacatccaggtaattcaacattcaaacagaacaaactatcacaaccaagaaaacagggcaaaggcagaaaactctggccaaaacaccaaccaaaatcacagcttttctcacttaaagactccagtaacaattccttcgttccagttcgttaaccggtggatcgacgcaaaaagtttactggaagtctctaatacataagcctacattgtgaccggtgggatctactagc

SEQ ID NO: 55513 - DNA, 479 bp, Glycine max
  unsure (1)..(479): unsure at all n locations
gagatcatccnctcgacaacattattggtgatatctttattgngtaacaactagacattctcttagagatttatgcaacaatatggctcctgtatctatgattgaacctaanaatataaaagaagccatagtagatgataactggatcattgccatgcaagaagaactaaaccaatttgaaagaaacaatgtgtnggaaatagtagaaaaacctgaaaattatcctgttatagggacaaaatgggtttttagaaataaattagatgaacatggtataattattagaaataaagccaggttagcagcaaaagggtataatcaagaagaaggaatagactatgaagaaacatatgctcctgttgcaagattagaagccattagaatggctttggcatatgcatccataatggattntaaactntatcaaatggatgttacgagtgcctttctaaatggcttaattcaagaagaggtatatg

SEQ ID NO: 55514 - DNA, 472 bp, Glycine max
  unsure (1)..(472): unsure at all n locations
gggatcctctgagttgactgcctcatgcacgcttgcttgtggagcttctatggaggctggatctttgagcttcaatgaggtcctttaatgtgtgattntccaccatggagatgcagcagaagacaaacgagaagaggtgagaggaggcgccatccactatggaataagccatggaagaaggagcttcaccaccaagatgagccttggataagaagcttggagaggatgcttcaatggaggaaaagaaagagggagagaaagagtggaagaaataagtcaagatgaaagaaagaaaataagagaggaagttcatacttagcccatgggcccgaaatctaccctaatgctcatgagaaccctanggccttgtcttgcatctttggtccaatcttcttggagtcttctatccaatgcccttggggggtaggatngcatcacgtagttcttacaaaagcggtaaagttacacgttg

SEQ ID NO: 55515 - DNA, 492 bp, Glycine max
  unsure (1)..(492): unsure at all n locations
atgagtgcatgtccaatggaaattgagttatatctttttctttctttncatttgctagatctttcgtgtggtagaaaatcaattgactagaatacaagaatcaaaataacagctagtgtagctagaggcttagagtatttgcatagtaaaatgaaacctcttatcatatatgaagacctgaaatgctccaatatcctgttaggtgaaggatatcattccaagttatctgattttggcttggcaaaagtaggatcaagtggtttgtgaaatagaaaggataacatactaacatgggagcaatttaggataacacatgttgttctaccaattctgcggagaaaataatggaatttttttttgctcatctaaagtaagttgtatatatataaatgagtaccagaggtactgtagatacataatgggagtggatagcagctggtctgaagccaagatcatataataaaaccaagtgacccgaagaacatatcatta

SEQ ID NO: 55516 - DNA, 398 bp, Glycine max
ttggagtgcccaagtgggcctggttgctatatgcaccccctgtttactaaatgcacccccctttctattgttttgtaattctttttccgaaacgatacgaaagtttacgaatttcgtaacgatacttatttttcttccgaaggttacgaatccttacggattatgtatttactcttttttagctttcgaagaagttacggaaacttgcggattgcgcaaaaacacctcttttcgatttgcgccacattacggaatttcacgaatcacgcaagcctgcttcctttcgatttctgagacgtctcgggacttcatttattgcatgtcgtcaagtaataatccccggacgaaattatggtatgacagttgcccctctttacttacctctcatcggagataag

SEQ ID NO: 55517 - DNA, 457 bp, Glycine max
  unsure (1)..(457): unsure at all n locations
actctctnggtggcgaagctccttcttctctggcttattccctagtggatggcacctcctctcacctcttctnctttgtcttccactgcatctccatggtggaaaatcaccattgaaggacctcattgaagctcanagatccagcctncatagaagctccacaagcaagcttccatcaagtggtaatcagagcacaagagcttcaagtaggtgctccttaaacctccattaattttcagctttaccttctcctccatttttgtttcttcattnttctccatgcatctcctcacatgtcttgtgctaaatgttgttaacatgattctttagaatttccaccgattaatcttgctatagaagctagaattgattttctatggttcanatttcttggtcatacgaacttttaanaatactaagaaatagtcactgcgannatttgagctgaaatttactg

SEQ ID NO: 55518 - DNA, 332 bp, Glycine max
ccgatttgttcaacgaatattttactaaaaattttggccgttagatgtcctttctttgttgctatgatttgggtgtaatacaccgatttggggttatatatatatatatatatatatatataacaacaaaaatcctcttcctgtaaaagattttcttttctttctcttttatgaagaaatgcactaccttgctgatttgttgtatctcaatctttggggatagtttttgttcttatttcggttgatgtttcttgaaatgtttaaatatttctttatatttaggtttaacaaaatgtcatgtgatttcaatctgctgaaagacatggatgaca

SEQ ID NO: 55519 - DNA, 336 bp, Glycine max
  unsure (1)..(336): unsure at all n locations
ctcttgtgaagagaaaatacgtagtatgtgcaatataatcacaaatcactntttctataaagtctagttgtgatttggaaaggtgaaaccatatggtgtatctggtctagcagatgctacgattgaagcccaatggggaactgacaaggctatgacatctagtggttgttggtccagttctaaattacactactaggatatatgcctttaatgttattttaacatcggttatattaatacctatgttaaaaaacatagtcgaatatttgtaaataagttgagtgtgctatacatcattcttttaaaacactgatgttgtgtggtgataataacatc

SEQ ID NO: 55520 - DNA, 338 bp, Glycine max
  unsure (1)..(338): unsure at all n locations
atgatgatgcacnaacgttaactgaagaattgttattttgcaccgaatgtaatgcattcacatactcccagtaagacggatcgtgcttcgttgatctttattgtttggtgatttgtatcttttaagccccttttgttttgacctctttaggaggaacacacatagaacttagatcagggtaggcaatttcccaaagtttactctttaaagtcactttgccacatacatcaagctcttctaaccgcttggatatgacttccatctattcgcttatgcaaacttcgggcttagataaaccttggtctaaaaaacttagcgtctgccaaaacatatggact

SEQ ID NO: 55521 - DNA, 431 bp, Glycine max
ttcatatcaatatgaatggagaattattgttataaggtcttatgactctattggctctttattttatttattttttatttaatttaattttttatcttttagaaagttcatttcaattctttatctttttaaaatgattcaaattgattcttttgtccatgaaaaagtaacacaattaactattgaaaaatattaatggataaaaacgatcacacaatatgtttcttctccttctgatagaacacataagaaaaaattcgtttgtcttaccccttctgtcaccctgacaccgctaccatcactgactccatcaagcgttgccttgcaagtgactcaatgccactctttccattgctccttcgttgagtgaggaaatcacatatattattcgagacaactactacttccgcacccagcactctgcactactc

SEQ ID NO: 55522 - DNA, 186 bp, Glycine max
  unsure (1)..(186): unsure at all n locations
ttaattttatttctcttcaggcatataagctagtaattacaattatttttctaaaaatggatgtacagacataaatgggtgtacaatacttatgctttccgtttaatatgtcgaaatattccttctcattggtgtgcagaagcacgnttctgcgttatactattaaatattatttatgcattatat

SEQ ID NO: 55523 - DNA, 407 bp, Glycine max
  unsure (1)..(407): unsure at all n locations
tggtcttcaccagtgaaaggatcgatgttgtgttcgataagaggcaaatntgatcatcctactaggacgactgagaaaactggggcaaataaaaagggtgagaaagagggagaaacccatgctgtgactgccattcctatacagccaagtttcccaccaacccaacaatgtcattactcagccaataaccaaccctctccttacccaccacctagttatccacaatggccatccctaaatcaaccacaaggtctgtctaccgcacttccaatgacgaagaccacctttagcacaaaccaaaaaaacaccaacaaaaaggaattttgcagcaaaaagcctgtagggttcacccncaaattccgtgtcatatgctaaacttgatcccatatccactcaataattcaatg

SEQ ID NO: 55524 - DNA, 475 bp, Glycine max
ttgcacgtgctgcactcggatcttaagcgacgaggctgctttcttggatatgattctatacaaagtttgtcgtttattcgactaacaagtcgcatgtgaataaccgtgagagaggtgagatgtggggcacaccggcactatttcttaaaccgatggaatgatctgatcctccaccatgatgctactatattagaccatttgctgtcactctcttagtatgacattaatattgttcatcccttacccttaggatgttcagactgaacgtgattatctccaatataattatatatcttttacacagaactcgccagtaaattattgggtctaaagggcgttggccgcacaatgattattacttctatatcatatgatattcatacctatcgtattagaggagtggactgcaaacaactttcagagcaatgctgtttatttcacttctcctattaaatgtgaaagacatcgcttagct

SEQ ID NO: 55525 - DNA, 465 bp, Glycine max
  unsure (1)..(465): unsure at all n locations
actaagctgcttctcaatctcccacttttgatgatgacaacctgttatcaagatacgcatacaagctctatcttctaagtgatcatttacttaattctccctctttgatcntgagtttaagctttacttgaaattaagttatttaattatataagctcttgatttaatcccaactttctctccccctttggcatcatgaaaaagccaaagtgcgtatagagacataaaatcatacattcactcataatcattcaagcaaggaagacaataatgcatacataaactaagcaaggatgataataattcattcataaactataatataatgtcagataatttagagaatcatccaagataaccaaattaaaacaactaaattagaaattaacatactaataagtgtttcagaaacatagtcataagacatcagaatataaaacaaatcatttgtctaagtcactagca

SEQ ID NO: 55526 - DNA, 392 bp, Glycine max
  unsure (1)..(392): unsure at all n locations
tgctngcttgtggngcttctatggaggctggatctttgagcttcaatggggtccttcaatggtgattttccaccatggagatgcagcggaagacaaaggaaaataggtgagaggaggcgccatccattaaggaataagccatggaagaaggagcttcaccaccaaaatgagccttggataagaaccttggagaggatgcttcaatggaggaaaagaaagagggagagaaagagagaggggggagcacgaaattgaaggaataaaagaggtatagaagtggaactttgaagtatgtctcacaagactctcattcatcanagttacaacaagtgttacacatgcttctatttatagactangtagcttccttgagaagctttcttgagaaaact

SEQ ID NO: 55527 - DNA, 453 bp, Glycine max
  unsure (1)..(453): unsure at all n locations
ctcagcttttaatagtccgcttgcttgccttcntattcttttaacataaacattangcataggcaaaagatcaagaggagttagtgggttaaaaccataaacaacttcaaaaggagaacaattagtggtgctatgaacaactctattgtaagcaaattcaacatggggtaaacaagcttcccaagtttttaagttcttcctcaaaactttcctaagcaaagttcccaaagtcctattaacaacttccgtttgcccatcggtttgtgggtgacaagtggttgaaaataacaatttagtgcctaacttgctcctcanagtcctccaaaaatggcttaggaacttagagtccctatcactaacaatgctccttggcnaccatggagtctcacaatctcttgaaaacaaatcgtcacatgggaacatcataactttttcatggataaatgaccattt

SEQ ID NO: 55528 - DNA, 330 bp, Glycine max
caaaacgactactcttctaccaacaaaatctgacttgcgtagacataaccgaatagatggtgagtttgaatcataatagggcggcttctacatagcgaatttaactttcttgctgctcactatcgtatcactatctatttcaactagcggcggacccacgaactcactacactttgacatcgctgatctattttactgacttaaggcacactgatgcatgcaaaactaccttatggccactatgtttgacatgtgtgactgggtcttaacttgtgtacacatacatattcatacatatatatatatatatatacacatacaactcacctc

SEQ ID NO: 55529 - DNA, 433 bp, Glycine max
  unsure (1)..(433): unsure at all n locations
ctcatcacctctaatntcctactcgttatcatagactaatgctaaaaattcaaattttagtagttactaagtttaagtatactaaattcaaattattattattattattattatatataaagtctacactgagattatcggattgaagactcgtctattcatacaatagaaaaataatcttacaaatattattaataagatattttgtcatatatatacttttatatacgggtctgtgatagaaaacttcaatctatggttctacgagccattaatgcaaaaacctcctttcatttttctttcaagtttgtgactntnttatttatgcaatattantaattaaatatattgggcatgtttatatncaataaattaagcagattcaactaanataacactataccttcaaaacanaactaanataacactacta

SEQ ID NO: 55530 - DNA, 264 bp, Glycine max
  unsure (1)..(264): unsure at all n locations
atatggtacttccacggcttcattcacgacnttntcactattaatcttcttttcattctcatgtttttcatctctttcaattatacttatttgtcgtgttacgtatttctacttgctatcttctttttctatggacatattaattctgtattattgaccatcatttgtatctctgtttcctgaatatattcacctctcacagcattattgcttgcaacaatacctttctcttcaacaactctcttcttgagtacaacagtcttc

SEQ ID NO: 55531 - DNA, 241 bp, Glycine max
  unsure (1)..(241): unsure at all n locations
acccatcacatgtggtactatgtgtgtgtcgggtgatggtgcacaacaagttntccacattcacatatcgcgcataaacccaccatcccctgtttgccacctccaactgagctcacgtactcccacgtagcccatatcctcgtttctctcaacaccgggtccccatcaaatcttccaagcttccctaacatcaagtaattaacattcaaacaacacaaactatcacaaccaataaaacagg

SEQ ID NO: 55532 - DNA, 444 bp, Glycine max
  unsure (1)..(444): unsure at all n locations
ataccggttcactcagatagagctacatctagntctcctttatgcanatataaaaggtttactaatcaaaactttgattacaaacaagtactatgtccttcacacctgactatataagtattatttcctttatgcaaatataaaggttttactaatcaaaactttgattacaaacaagtactatgtccttccacacctgactatataagtattatttttgccacttatggcacacccttagactcctctgtattatttttgccacttatggcacacccttagactcctctgaatctaanataaacaaaatattgtttaacactaagtcacttatagctttcacaaaccaaaagttgaatgaatacaatgattcaacaacactcaaaagtgaataatagttaagctcaaatacaataactttgttagcanataataaagagataa

SEQ ID NO: 55533 - DNA, 282 bp, Glycine max
cgcttgatgaagttgaagtggaagcggagtattattatctaagagcttccatgggagacatatatatttagaggaattatggctgaaagtgctgagtgcctaaatcaatgagtggtttttttttgtcgtggataaatcaaagattcgtttggtgaaaacatgttttatcgaaacactatatcttgaatgttgttgcggctgctttatgattctaaaacaataaattatattgcgtacgtacgtatcacttgaaaagtgcgtttagattggtggggttatata

SEQ ID NO: 55534 - DNA, 421 bp, Glycine max
  unsure (1)..(421): unsure at all n locations
atactcctttaatattaaattataagactgttttaattaattctgtcacttacaaaatatttaatgtagttaattatataaatatataggtattatactattatctaaaatatcaattcatatctctctatcaacttaagtggctctcattaatagttaggaaaaaaactaattaagtagggatataaaaaaaataataaatgaatttaaaaattaaaaaataatcttatataaaacatcttataattagagactgagtataaatctaaggagaggataatcataggtcttanctcaacccctatctattatggattntaatttcttttanaataaacaaggttnttactagttcctacttattntcgaccctactctccattacacactcgaagaggaaaatcanatacaataacaaaga

SEQ ID NO: 55535 - DNA, 473 bp, Glycine max
  unsure (1)..(473): unsure at all n locations
ggatcctctgagtttcctgcttgatgccttcttgaaccctgtgaccaaagtcttggaatattgtttataagacatttctaatgtgcactcttatgattatgaaggctnggttatgagtaacacagtgaaggacaagtataagatcacaagggctcaactaatgaaggacatgctgtatttgtataagtacattcttatagatccaaaaccaatgatggggtcagaatttctctcggctataccattggcagcaaggataattcttgataccaagtattttataaaagattactttggagatattccttaccaggttgaattatgctcgaatgataaactcaacctttattgtacaatttggttgagaaacaatgttggcagtgatgagtacttaaacaaagccattatgccaccccatgaatgtttcacattgaaaagaaatgctactatcaatgacttgaagctagaagttg

SEQ ID NO: 55536 - DNA, 507 bp, Glycine max
  unsure (1)..(507): unsure at all n locations
tctcctttctcaagtaattgagctgtcgaccctataggcattatattgaacttataattgatgtgttttggttttntgtttttttccttctctcacaagagacagccttttgaaaacacgatttagaagatcctcttatcattcatagaaaatacccaggttaaaaaagtattataattctatagaagagccgtaatagagtaattgtggattttctataaaaaaagattcaattaatctgttgttgttcaattaagtctaactgctgttacagaataactaattgtagaggtggtgacatgattcagagattaattaggtattttaattaggttgctgtggttaattttttgtattgatagttagatgaagaacccaattataaaacaaataagttcaaagacctaataaacaaatagtgcagagatcaaattaactaatggtaaataattaagagacctacggattgttattctggattntaattaaatcatacgtatgatatga

SEQ ID NO: 55537 - DNA, 490 bp, Glycine max
  unsure (1)..(490): unsure at all n locations
actgtncctttgagcccgggatcctnagagctgacgcatctgcacctctattaagctgaccatttatcaatatctcatgtgagtntattcagaaatttagagttattctctttatcttaaggagagggattctccctaaattcttgagtggattcaagaacactcttgcctgtattcaaaggacttttcacaaccctttgtgtgtttgccctcacttggaaagagtgagttttttctttcctatcatcttcaccctttgtctttcaaccacaattcagaaaatcacctcttgccaaattatctcgtgaccaaaacttccatttcacacactcanattaaagtgatcttgagcactaattgatttcaaacgagactttacctcgtttggaatacctcatttgagccctgagcttncgtagtgcatcttatattctgtccagcccacttacctacgtttaccatccatcatcatttatgtagaaacacctan

SEQ ID NO: 55538 - DNA, 426 bp, Glycine max
  unsure (1)..(426): unsure at all n locations
ctaagcttcagtcgtcctagacctcctctgtggtacggtctagctttcgttcatctgtgcattcatcgcatccactaacagacgttgagcgccgtccaactgatggtactcgtcaccaccaccacctgctccagccataattcaacaggaaaaaaaaatgtgcaataaaaattattaaggtttcaggacctcacaacactctactcacgtctcttagatggtagtacactcgtgtttaatgctctcaataggcttttgtgtaatgtattccctcttgccttttaccactcgtgtttcctcttaagttcctggatggaccaaattagacacacaaggtaatataaaataaaaggaaagacaatataatgatcacaaacagatttgatttgggataacaactnggacttgattgaataataatatatt

SEQ ID NO: 55539 - DNA, 371 bp, Glycine max
  unsure (1)..(371): unsure at all n locations
tacacgaaaaataagacttgaaacactcaagtgtttctgctctcaagaaaataagcatttctcacacaccagatgacatatcgcagaatgcaacactcagattgtggacatctgtcctatgaaccttcagaccaaatttcgagacaatccaacggttaacgaatgtaggaatacactnttaccgagacagctcagacaacttccttgagaaactttctcgtaaggcttcttgagaagcttcctcatgaggcttctttgagaagttagaagtttaactacccacacccttctaataactaaactcaccttctttgaaataaacatggataaaacaacacaataaataaaaataaacatcaattataattact

SEQ ID NO: 55540 - DNA, 504 bp, Glycine max
  unsure (1)..(504): unsure at all n locations
gctaaggatcctcaacaggtgattaccccaatttctatatttaaaaagtccgttagggcctctccctcctgatttaagtccaactcagaanaagatttagcacacatactctatctatgaactgtacaaaacatacgactcttcaattgttctcataattnttactcgttggattctcacaatggatcccatcacaatactcgtcatgcattaactcgtcgcccttaaagggtcttacagtcatgtgattgtacagttcatagctgataactaaatgctcacaacatcttaatacacatgtatcttacaaatcaacacatactcaatntatcacatacactcaatctcaatcataatgttataatcccaaaacaacatattatcatacctcatgaatgatatacacatcanacaatattaatatatacatggcacaatcacaaactttacctatngaatatgcaatacacacaactactaaattgtntcaaaatcatttaactc

SEQ ID NO: 55541 - DNA, 428 bp, Glycine max
  unsure (1)..(428): unsure at all n locations
ctgcttcttttatccaagcaattcttgggggttattctccttcttccttggcttattccctagnggatggtgcctcccctatcctcttctctttgccttccgctgcatctccatggngaaaaatcaccattgaaggacctcattgaagctcaaagatccagcctccatagaagctccacaagcaagcttccatcaagtggtaatcagagcacaagagtttcaagtaggtgctccttacacctccattaattttttttctttgccttctcttccattggtgtttcttaattnttctccatgtatctcctcacatgtcttgtntctaaatttgttaacatgattctttagagtttccaccgattaaacttgctatagaagttagatttgattttctatggttcaaatttcttgttctggtcttgaccatg

SEQ ID NO: 55542 - DNA, 448 bp, Glycine max
  unsure (1)..(448): unsure at all n locations
tctntcttaatgctattttntatgattatatgtcaactagttattgtgtaggggagtacactatgattgataatacactaatggaacacaataaagagttcaccagaattaagagattcttaggataatgatgcatatgcacagaacagaaggatagacgaggagaaaacacaatgaagcagacaatctgaattcctattatagaggcaaggactattatactaacttttcaacagacttgagttcaataagaaaatatatggaacaactgggacaaaaaatgaggatatcctccttctaagatggaatcctgataattaactcattcatacataagacaattatttcaattaaagttcacttttcctgtaagctgatatctcatcagctcgtaataatataaaaatatcatttgaactctgatgctcacccatacttacagggacac

SEQ ID NO: 55543 - DNA, 538 bp, Glycine max
  unsure (1)..(538): unsure at all n locations
gattatccttgagacccgggatcctctagagctgactccctggtgcacccgggatccctagagtcacctgcggcatgtcttcttatanatccatcacttttaataaatctttgcgaannaaagnaagacgangnnaaagaaaacaaatatttggctcaaaacaggagaagtattgaagagacaaatttcaaatttctctataatttaaccccccaaaatatacttattaattagaaagntatcaaaactcttcccaaatttaatatcatttgcttgctctcaagcaaaataaaaanaattcagagtttaccaatcacagttcatgagataactgcatacattccaaaaagcttcatttgccaattctcaagttcacagntgtcataagttcatgaaaagagcagaacaagatgtacttcaaatgaaattgttagcaagaatgacanatcacaaggaataattaccaacacttagtcatcacatgactagtgtttctctcaatcccacaagtgtctcggtaaaagtgtttgattataan

SEQ ID NO: 55544 - DNA, 494 bp, Glycine max
  unsure (1)..(494): unsure at all n locations
cgcgacacatagaaactcaagcttattaagaggacttctctagaagctcccttgaggcttctttgataagctntctcaagaggcttctttgagaagctacatccttatctatccacccctctattaactaaattaacttccttaaaaataattacggatgaaaataacgcaacaaataatcaaacatcaaacataattactaataatatatagatatatatatcagggtgttacacgctaagcctggattgcatgctgagcgagctgtccaattcttccaacttttcttcaaggattatttcttccattgtttgcatcaattttcctctaaagcacttgaaatcttcttcttttgacttatgctaataaaaaattgcaaagatgttaatttcttcgttattntattaaacacaatagtaaagtgaataaattacaatcattattagccaaaatngactatcagnatttgcagttatcacgaacacaatgtgatt

SEQ ID NO: 55545 - DNA, 411 bp, Glycine max
  unsure (1)..(411): unsure at all n locations
tatcttctcaaggtggtgagcttagntattatttgggtgtgtgtagctaagctctagcttctcaaggaagttctctcaaagaagcttctcaagtaagttctctcaagaaagcttctcaaggaagctacctagtctataaatagaaacatgtgtaacacttgttgttactttgatgaatgagagtcttgtgagacacaactcanagttcaacttctctccctttttcttccttcaatttcgtgctccccctctctctttgactccctctttcttttcctccattgaagaatcctctccaagcttcttatccaaggctcatcttggtggagaagctccttcttgcatggcttattccttagtggatggngcctcatctcacctcttctcctttgtcttccgctgcatctccat

SEQ ID NO: 55546 - DNA, 448 bp, Glycine max
  unsure (1)..(448): unsure at all n locations
ctttaagctgaagacgatctggatcaattntagcattgtctttgtacaagagcnttgtgtcaaaatggctcatgaatctgctntagatctccagtttcagagagctgtagaatggcagttgacatgtctacagccaaaggagagtccctagggaaggcctagcaaggcaaacaaaatgacaattattaattttgataacacaagcaccttatgatgagttagtcagatgcaaatatattgaaaaaactccagatctttaagaaacttgaatggtaacgaagaataaaaaatcaagggaaaatgcagctaatatggttgattcaacattttcaattaaagatatttgaaagacaatctaatcacctaatatgcatgttaacataattaanacaacacacaaatgagctactcatagaanagcttaccacatataagctctaccaaaatg

SEQ ID NO: 55547 - DNA, 436 bp, Glycine max
  unsure (1)..(436): unsure at all n locations
ttcttgaatagcctcaagtttaggggcaaactcttttctttttattatagagccaaagaatgtgctctggaagcgtgattcanaagatttatgattaggactgcttctttgtcgagtctatcaccaatctcaaatcaatgttcctttgttataattaattagaggttactattaggcacgttgtggtgtaactctattaataatacacatgcatttcacattctatcaataatacantttctaattctctgagttcctctcttccgntattattatgttctatcatgtttctcaacatttctcanaagtcttagcacctataataattaaaggaataaatttaagaatataatgcttatgaacagcgtatagacttttattcaactgaatatttccttcatccaaaaacaattattatttatgtacttttctttta

SEQ ID NO: 55548 - DNA, 452 bp, Glycine max
  unsure (1)..(452): unsure at all n locations
tacagctnggagaaaagctngaagatctttggctttttttgaccaactcccttgagtggcatttgtattggttgttatattttgtgttgcatcttantccatatcatatcttttgtgcatcatgcatcatcatgagtaagtgagaagaaaattttctaagttagaaaattttctttagaaggaaaaaatctcttttttattcgattacagccttatcgtaatctattacacaagtagtttgaagcttgtagagttatgtctcgtatcggcttaatcaattacagtcttctcgtaatctattacatagttgttctgagacaatgactgatttattcataagtctctgctttaatcgattaccatgttatataatcgattacttctctttctttaagtacttcaaaagtgaacaagaacactttaatcgattacgctgaatatctaattgatta

SEQ ID NO: 55549 - DNA, 300 bp, Glycine max
atcatcaataagcgtcgcattggtatgctgagttaactcagccaccgtcttcatttatgcgactatcaatcgtcactcctactgcactcactttcagaccttctggtttgtgattcttgacatcaagaataattacatgcctgatcacaatcacaacccgtataatataagtgcgaaataactactatctgccattcattctcataaattatcacaattaaaaatcataagatcaattcactagaaataacccttacctttcgttaacttatcatgtattagtcatgagagtgaacacta

SEQ ID NO: 55550 - DNA, 348 bp, Glycine max
  unsure (1)..(348): unsure at all n locations
accactcagtaatttgcttaacatggacgcagngtttntatttgatgaagacnttttgcaagcattcaacgccctanagaccatcctagtgtctgctcctgtgattatagctccaaattggggtcaagagtttgaactaatgtgtgatgcaagtgattatgttgtatgagctgtcttgggccaaagaaaaggcaaagtattccatgcaatttactatgccaacaaggttctaaatgatgctcaggttaattatgctaccacagagaaggaaatgctagcaattgtttatgcattggaaaagttcaggtcatacttggtggngtcaaaagtaataatttacatttatca

SEQ ID NO: 55551 - DNA, 331 bp, Glycine max
  unsure (1)..(331): unsure at all n locations
tcttccaaacatcacacaatcttacagatcatgtggcaattggctttaagcaggtcaacatgaccgacaaaagtccgcatgtcaacaaataattgtccccggatgagattagggtatgacagctgcccctcttttcttatcttttattggagataaaagggaagtaaagatatgacactaatttcgttcgagctgaatntccacctgaccgaccatntgctcaatcaacgaaacctatcataagaaagagcataaaagccatcaggtacatcaacaaaagccttggtgccttgaaagtgataaaaatggataaccgcgatggtctccgcat

SEQ ID NO: 55552 - DNA, 314 bp, Glycine max
ggagggtaaactagatgccttggtaacctggtaacccatctggccttgaatcaaaaatctgtacctgtcgcaagactctatggtttatgctcctctgctgaccaccatatagatctttgcccttctttgcagcaatctagagcaattgaacaacctgaagcttatgctgcaaacatctacaatagacctcctcaacctcaggcagcaaatcaaccacaacagaacaattatgacctctccagcaacatatacaatcccggagggaggaatcaccctaatctcatatggtctagccctcagccacaacaacaaca

SEQ ID NO: 55553 - DNA, 502 bp, Glycine max
  unsure (1)..(502): unsure at all n locations
tactcagctatacaccttgtcttatcttcctttcacaacanagccttcttattgagctacataaatttcttcagtcaagttcctattcaagaatgcagatttgacatctaaatgccaaattttccacttcatttgagctgccaaagctacaagaatgcgaatagtgttcttttttgtaaccggagaaaacgtctctacataatcaattccaggttgctgagcataacctttaacaacaagtttggtcttgtatttgttaatggacccattaagattcagctttaccttatagacccatttaactccaatagaatttttgtcttccagtttgtcaaccagctgccatgtattgttgtcttcaatggtggtcatctccttcatagaatggttccattgttcaaacttactagctntttcaaagctggtaggttcanattnttcggctaagagaacgaagactntctcaactatcctactggtatagaaattctccgctaacaac

SEQ ID NO: 55554 - DNA, 441 bp, Glycine max
  unsure (1)..(441): unsure at all n locations
tatgtactgagnncgggatcttagtgacctgctgccctttcctatttgcttaatagggtttgtgaaaaaaaaagtcaccttttgcacttctctcttctcgaaatgctgaagaaaattattttcgtgaaaaaatccagccgagccctttcgtacggttccggagtatacccaaaaatctcgaccgtctcaggatcattgtcgtcttcgtttcttcagtcttcacggtaagtacctcaaccangcttttcaactattctatgtacccgggtggtcacattntgttcatgttttttattctcttggccattgcttttataccccttttgcatgctaagccatttatttaagcatttcttgcttatctanaaataaataaattcacttgatcgttaatatatcatcgtaattttggtaaatgaatccgccgttcgtcgtcgtact

SEQ ID NO: 55555 - DNA, 429 bp, Glycine max
  unsure (1)..(429): unsure at all n locations
ctaagctggcatgattacatctcccctttctaagcaaattcttcngttatcatcaaaatcttcatgatcccgactcgttggtggaggatgcatgaatgacaatcaattcatggggctccgaataaaagtggagaatggaggataggcgaagagcgctaggcaatcaattcgcgggtctcccgactcgntggtggaggatgaatgaatgacaatcaactcatggngctccgaataaaagtggagaatggaggataggagaatagcgctaggcaatcaattcgcggggctgcagactcgatggtggaggatgcaagaatgacaatcaactaatagggctacgaataaaagtggagaatggagaataggcgaagagcgctaggcaatcaattcgcggggctccagacttcgtggtggaggatgcatgaatga

SEQ ID NO: 55556 - DNA, 143 bp, Glycine max
atctaccataaaaaaaaacccctcaatttatttaacccaaaggtagcgaaatttgaatagaaaattaaaacttgaaatgggaacgtgcgcttagcgagatgcagctagcttagtgcgccttatgaaaaacaacacactggctt

SEQ ID NO: 55557 - DNA, 492 bp, Glycine max
  unsure (1)..(492): unsure at all n locations
gagaacaatgacaattgaagaatttattatgctttctttgatgagtctaatgctatttctccaagaaaggatattttagataatattgtagaatctttagaacaaatgcacattcatggacaagattctaaaggaaaaggagaaggaagcaatgaagatcctccagtagaagtcaaagcanataatgatcttccaaaagaatggaaagcttcaagagatcatccccttgacaacattattagtgatatctcaaaaggggtaacaactagacactctctcaaagatttatgcaataacatggcttttgtatctatgattgaacctaaaaatttaaatgaagccataatagatgaaaattggataatagctatgcaggaagaaactaaaccaattgaaagaaataatggttgggagttagttgagaaacctgaanactacccaatcatttggaacaaatgggtgttagaaataattagatgaaatggatagtat

SEQ ID NO: 55558 - DNA, 452 bp, Glycine max
  unsure (1)..(452): unsure at all n locations
atgctactntcaccgttgggaaaatactatataacaattgttacaaggctcattaaaagacggttntgaatcgtctttaaaaaaattattntagaaaacgacacatttctaagacggttgttaaccaagaaccgtcttagaatattacacttctaaggcggtttcttaagtgaaaaccgtcttagaatgacaccattataagacgttttttagcgtgcaattgtcttaaaaagacacatttctaagacggttctaagctaaaatcgttntagaatgtattttttttaaaaaaaaatagaaaaataaaaaatgctacgaaggttctttcanaaaccgtcttagaaagtttttgaaacaaccgtctaagaatcatttttaaaaaaaattaaaattgatgagaatcctaagacgaattttcanaaaaccgtcttagaaaagtatttttttaccct

SEQ ID NO: 55559 - DNA, 363 bp, Glycine max
  unsure (1)..(363): unsure at all n locations
tgccctaaatactacaattatatctttgtcgtccatagtggtcttacccgacttgagtacgattgcgccccgagaaggatctaaagaaagtaattatcataaaagtccatgaatatcaataagatgacattctagggtgagctgataatgtaaaaaacctctacattgacagtgtattctaactaaatccattagaaaaaacattctttaactagtacaatttttttatgacatcagattatttcttttatcttcaacactccgtccaataagcatagagggatnttctcacttttgtctaattctattcatcgaacaagacattattctactctattaacactcgtcttatagcttctctct

SEQ ID NO: 55560 - DNA, 401 bp, Glycine max
  unsure (1)..(401): unsure at all n locations
tggacattgaaatagctntatttaatgtnaattacttctgtaatagagaataaatgaaattgcataacttaagttttgcacccaacccaggtgggtggttccagtggcaatagaatgttcatggaacgtagttttctcattcaannagtaaatccttattcaaaaacaaattgagtgtgtggtgcatttgctaagttagaacttcgctcttcatatcaggatttctgaatttggcaagcacaactgttcacaattntatcatnggttttgggttctctttattttttgggctggtntatggtgtctgaataagaagatgagcnaacatgcattcatgttgactaatatcatggtgtaaaaaatacctcactggaggaaatcaggatgttttataatggatc

SEQ ID NO: 55561 - DNA, 195 bp, Glycine max
  unsure (1)..(195): unsure at all n locations
ctcgccgggtggtccacagtngagtacatgtatatttattcacttgaacattcgcttctataccccattctgacatgcttaatccattaaaggaagtcattactcgcttaatggcaaataaatagactacgatgaacgcgacagtcatcccccatataatggcgagatgactccgaccgtctgcgaccgaacccg

SEQ ID NO: 55562 - DNA, 425 bp, Glycine max
  unsure (1)..(425): unsure at all n locations
gatctctaagcaccgcagcagcttcttatacagactaatactataatattccgtaaaacttagataaaactaaattttttatttattatcatacatgttatnggacaaaagggatacaanaactacccaagtctatcaatcagcttaacttttaacacatggagcttctctgtgcattaatgatttatatgttatcatagtattttttttttactagataatgttggccatactggtttacaattagctaaatgcactcttgtagtcttgtaaaccgagattcaatcattaaggagttagaagaaacttccactgtgacatgcatcttatatcttatgacatgtcatatataattggccaattagaattattatgtntccagttgagaacttccattttgcaaacaattcttagtctgttttagt

SEQ ID NO: 55563 - DNA, 513 bp, Glycine max
  unsure (1)..(513): unsure at all n locations
tctattgttganaggtacattgcagaagaagccattgttattttgttcagaacacttagagaaagctaaagctgttgggcttcctgagtgtcggcatgatgacaaagtgggtggtaagggttcaagaggactgcaggtgatcactccaagtgtagaagaattgttacaagctcacttgtatgtcttgaacaacagtaatgaagtttttccatacatagttaagcacgaagctttagtcaaacagaataatccgaaaatgtcaaagaattgggcgttgaaaaagcataacaaaactttctgtgattggtttaaagatacaatctttgcagatgagaatgcttcagaaacattgagaaaactagcagatgggcctaaaagaaatgttataacctggcaaggatacgacataaacaggtattcattntacacaaaagcacaagatgacaaaagtacaatgcanaacagcggggtcaccctaagggctgaatctcaacacttttgcagtgtcaatga

SEQ ID NO: 55564 - DNA, 486 bp, Glycine max
  unsure (1)..(486): unsure at all n locations
gttgttacttgagnnccggcganactnagagttgattcctgaagaccggatcttaagcactgagctgttctttgcttacaaaataattcttttattacatgcacaattacagagtagtaaactaataccaccaaagacagttacttaagtgggatgtaacttaaattctagttatttagattaactacagttcaatacaaagatgttgcttaatacttacatctttaggaggaaacacttcaattctggactccattcttgaatatactggcttcaagcttcattgacaaacattgtgacacaaaggtaanaggatatatatatatatatatatatatatatatatatatatcataatagatatatatatatatatatataacacaacagattattacactnttcacacctgtgttcgccactgaatagttggatataattaatatctaaacaaggacctgtgctctcctatcacctgtaaaaaag

SEQ ID NO: 55565 - DNA, 479 bp, Glycine max
  unsure (1)..(479): unsure at all n locations
attgtatagacgttcttcaattntacatatatttttatggtttatttacaactctaaaaatctgtcatgaaggttggacccccttgcacgttgccattcaaagcaaaaatagagatatatcaaaaatattgatagtcaatggtgctgataagactacgaaaaataaggtaattttgttgccacctcatactcggcacttataaatgatttaaatgcatcaggagaacaggcgctattatcattccttatattcttaacattgnttgatgacctatactttcttcgatatatttataatcctttagtgctatacagctagagtccattgaaactactgttgtgaagtgtctactcctttggtttcaagtatgtactgtttagacagaaattgatgaatctggctgcttcctttcatagaagtcatcagaggtctattctcttccttatgtgaaacttcatttgttgttgattatgttcag

SEQ ID NO: 55566 - DNA, 412 bp, Glycine max
  unsure (1)..(412): unsure at all n locations
acttgtctgtttctgtctcggcccggatntaaggcgggctgcagcaccggcttagctttcctcactttactggagggcggtgacgcggctttatcctctatatatttccggagaatgaacaagacctccgatatggaagccatttgatctattaaagccgatagatcggccattatctattgccgcacgccctcttcattatccgattttctagatcgaatgatataggggcgcgctagggctttcttagttatgatgaaatggctaaagaaataaacaacagcgagtatgccaccaaagcatgaatatgcaatgaatgatcggagcacttggatccaccccaaggttttttatatgacgtgaaaggacataccttctcatttataaaaagacatagctctcatctacaccg

SEQ ID NO: 55567 - DNA, 470 bp, Glycine max
  unsure (1)..(470): unsure at all n locations
cggacctataaaactcagctatatcattnnttttaaaaaaaacaganaggtaagcacttattgaatatgcaaaaaaaataaaaaagtggctaaaggggaataataaattgaaaataataatgctctatgaaaatcagtttgtgaaaagtggtcttcagatattgatcatgcatctaatgcatatcaaatatcatattactatcttatacccagaaaataacttcatgaagcctagtctggtgttntggtgattttttatattgaattgaaaaatagacttcctgactaataagtttacactcttcgatcaaacagtttgttactttgtaatttcccatttaaatctcagaaaataatattagcttgcatgcaagagtaccccaacaaacaatcctatccatatttgaaaaattgtggcaattaacgaatcaattgaaaagcatctttgtgttacattacaacacggtaga

SEQ ID NO: 55568 - DNA, 440 bp, Glycine max
  unsure (1)..(440): unsure at all n locations
agcttcccttgataaggaagactcttatatatgcaattaatctagttgggtttatctatgcccattctagtaccttaagtttgttgagaaattttacaaacaagagggaattggtgagacatgctattactagatttgccacttcttatctaaccttggaaaggcttcacaaagagaaagccaatattagaaagatgtttacttctgatgaatggaccttgaacaagctatctaaggagcctaagggaaaagaagctgcaaaggtagtgctcatngccttcttttggaatagtgtggtttacactcttaaagtcatggctccacttgtgaaagtgcttcgtcttgtggatggtgaaaggaaaccagccatgggctatatttatgaagcaatggacaaggcaaaagaaacaattatgaagtctttcaacaacaatgaaagc

SEQ ID NO: 55569 - DNA, 422 bp, Glycine max
  unsure (1)..(422): unsure at all n locations
ngaggttngactcctcctctagctatactcacactgctggtcttcctccaagatcagtggatgccctagaaattagttgatggtatctccatcaaagggaatccactggcccctcacccaggagcgcatgtctctgactccttcttttgtgggccaggaattagcatgaaactccatgtctatcttangatcgaacttatccatgggtgatacgagctgggcccaatgcctccaggctatcttctcttggaactcaacatactcttcgtcccccagttggactcgtctctctctgaggaatgaccagcctttgatggcctcaaaccaatgctggtgttccacactccgaaacctatgcctatcaaagtccatatcctcctgcggngccgcactggagccctcttcagtggcatctttcctgg

SEQ ID NO: 55570 - DNA, 104 bp, Glycine max
ttagactcatgacctccctcttatctcagctctcagacagctatctctacaagctctggtctgtggatatctatacacaacaagatatgtcatactgtgtacat

SEQ ID NO: 55571 - DNA, 466 bp, Glycine max
  unsure (1)..(466): unsure at all n locations
tctctgagagaacttcattgagaagctagagcttagctacacacacccctctcataactaagctcacctccttgagaagcttccttaagaagattccttaagaagctagagcttagctacacatacctctctaatagctaagctcacctccttgagatgagaagctagagcttagctacacaccccctataatagctaagctcacccccatgacaaanaacatgaaaataacaaaaaaaagtccttattacaaagacaactcaaaataccccgaaatacaaggctaaaaccctatactactagaatggccaaaatacaaggcctagacgaaggaataacctattctaatatttacaaagataagcgggctcatacttagcccatgggctcgaaatctaccctaaggctcatgagaaccctagggcctttccttggatncttagcccaatctacttggagtcttcta

SEQ ID NO: 55572 - DNA, 424 bp, Glycine max
  unsure (1)..(424): unsure at all n locations
agctttttggttagcggaagatgcaatagatattaccatctctactcattaatgtccagcatatgttatgcatgatctttcctcacttgcttgangggagaagaccaagctcatccctctctatatatcccttgaatgaacaaattcgcgtcaattttatgggaaattgatgatatatatgattaaattcgagagactacatgaacaccaacttactgtaccaatggttgtcagacacaaaatgaatatattcatgtaaatgacatataatttcattctttaaaggctaaatgtgattttaatcaccaaatttgtatacatgttattgagagatattaacttcttaaatttattctgatactttaaagaattatattttgactctcgaaggagatactatgagtaattaaaaaaatgtaatgca

SEQ ID NO: 55573 - DNA, 481 bp, Glycine max
  unsure (1)..(481): unsure at all n locations
tctcttgtggatcctcatggtattctatataattgggattgtgatgcagntgatccatgcagctggaacatggtcacatgttcccctgagaatcttgttattagcctgtgagtctctcttcaatcttctgctgcattntcaagttggaatgtttgcaaaacaaaaagcttaaaatgttgaacattccacaacaaatatcaagggtgtgttgtaaaatgtntttaacagnttgatgaacctggtcctgcttttctaggggcattcccagtcaaaatttgtctggcactctatctccaagcataggaaacctaacaaatcttcagactgtgtaagtaatcttagaaaacactatgcattntagaattctcaagatcgattcttcttatanttattacttccattaatactagtttgggtggtctggatcacttttcanggtgctacagaataacaacataactggaccaatcccttcagagct

SEQ ID NO: 55574 - DNA, 410 bp, Glycine max
aatttaatcaaatttgtcattggtataattgcttatttttcatccaacaaggggaaaattttgcatgaattcttacttgttagtagaataaaccatatacaaattgaagtaaataggatttgtggttatagatacttaacaagatatgctatgttgtgcactagaaagaaacaaatgagagagttttaactggatgaaatcatgccaggttatcttattggtgggtgtttctttcattttctctaaaaaaaattgtctaattaaaaatggattaacttttttctcatttcagaatgacttaaaaagtatatgttatttattggtgcctctcagacttggttatttcttgaagctggatataggaagctctatgcatgtctaccctataatttcacgcatctattttcatg

SEQ ID NO: 55575 - DNA, 479 bp, Glycine max
tactcagctatacacacgcgagactattgggccctataggacaaaatatatgagcttatactggctgggtacctagcaaagtttgctaagaggtcgaacaaacaccaagcatgagagagacccataggacaccagaaggattaacacatgaatcacgatgcaggcagaagaagagatagagcataagatcgaggaagacagagacacagtcaaccaagatgcgatcgacaacctccacaagaacaagaacctgcctaacaaataagaggtgtgattaacaccattgcaggtggattctcctacgaaggccagtccaactagtcccgcaagcgccacctgcacgccatccaggacattgacatctactatgtcgatacaccatcaccatgaagtctctctcctatcactttcgctgatagagacttcaagggtattaacccataaacaaagatgaccccatggttgtctccatcataatc

SEQ ID NO: 55576 - DNA, 467 bp, Glycine max
  unsure (1)..(467): unsure at all n locations
cgcttgatacaactatcatcacatgacgctttattgtcatagaataagttgctttctaagtaactngagattntaacagaaacacttggtaagtttccaactaaactgtttattggtcaaccttcatattcttctgttttgcatattacaagttgtaccatctgtggtgaggctcatgaaacaggacaatgtaatcccattgaagaaaacactcaagaaattcattttatgggaaatcaacagcgacaagggtatactcaaggaggattttcaggcttccagtagggtccttataatcaacaaggacaatggaggtcacaccctggcaatcagttcaacaaagatcagggtggaccttcaaataggccaatcctacaagggcctaacatcttttagaggactagtaagctagaagagactttgactcagtttatgcaggtaacaatgtcaaatcataaaagcattga

SEQ ID NO: 55577 - DNA, 494 bp, Glycine max
agaactgagggaaaatcaagaacaagcttgtacgctcatcgttcacgtgtatgatatatactccacaaggtttgaagtagaggagaccttcaaccctataacgcaacatggcggacaaaagtgggcagttaacttgaatggtcatcattgtcaatgcggaaggtattctacgcttcactatccatgttcacacattattgcagcttgtggttacgtgagcatgaactactaccaatatatagatgttgtttacacaaatgagcacatcttaaaagcttacaccgcacaatggtggcctcttgggaatgaagcggctattcctccttctgatgaggcatggacacttatccctgacccaactacaattcgtgcgaaaggtcgcccaaaatcaacaaggataaggaatgagatggattcggtcgaaccatctgagcaccgaacaaaatgtagtagatgtggagccgaagggcataacaggcgtcgctgtccaatgc

SEQ ID NO: 55578 - DNA, 523 bp, Glycine max
  unsure (1)..(523): unsure at all n locations
tactcagcttctaagcaagcttccatcatatggtatgaatgtctntgatttatcaaaatggaagagacaaaacatcacagaggtttaccacaactggaagaatctagtatgtgatgcactttgggttatttttcaagtagtatcgcatgtgattgataggtactttaattatatgcaagattagttacaaatattatttcatcaataaaattaattgaattacaattactactaagatccaaatgatacctagtcatttggaaattgttcttaatggttctattcagtattgattgtagtagcattatttttgtaaagaaaatttgtcatacgttgataccgtagtgtttgatgataaattattaactctgaattntattaattttggctatctctatcttggttggtttttttttgcactattattctttaattntgtcanaaatcaagattattgatagtaacaatacaanggttgatacatgctannttatttgagtggaagcanatactngtatctata

SEQ ID NO: 55579 - DNA, 246 bp, Glycine max
tttatttccttctttttaatttccccccttttttttgaagattgggatttacataaactactagcttctaattaaatttacatgaaagtgacctataactgttcccaattgattttccaagtactcccccaacttattcaacttaacacataattgcttgcatactctatgaagattatgtctgcttcttaatagatataacattgaaatagttgagtagaacgttagtcatcacataaacctatc

SEQ ID NO: 55580 - DNA, 488 bp, Glycine max
  unsure (1)..(488): unsure at all n locations
ggcttctacataatggcatccaccacttgtacttttctttttttttcttgcatagtccacatcacagtatcctactaacctaaaatcttggtttttcttataaaacagactttggttagtagtgcctactagatatcataagatcctcctttgagatgtgattcttaagaatcagattgaaatctagtacataaacatacaatatacataatatgaggtcgactagttgtcaaatatagaagcgatccaatcatacctttgtagatcgcctaatctactgtttagcttattcatctttcttagaggatcaaaagcatgcataaaagttttcattggtttagcaccttccatcttaacttcctcaaaaactctataatgtatttntggtgatgaatgaatatacctctgctatcatgtttgatctaaagccctataaagaacttaatnntctccatcatgctcacttcanactcattcttcatcaaatc

SEQ ID NO: 55581 - DNA, 383 bp, Glycine max
  unsure (1)..(383): unsure at all n locations
aacttttatatataaagaatttntttttatctaaaccacacgtatcctccaccggtgaacaatcatgttgagtcgggtaggatcagtatgaccggcaaactctccctttaagtatntaatacagctatatactcagaactcanatgcgcaaaacctctgattaagcttgaacaatcccaccggttgatccacatgcttggtgattgcatatataaagactaaaacttacaggtttttttttttttttgtaaggaactaaaacttaaaataaaaacaattacagagaccggatgaatagtttaaccttttttattagaaaaggaatgttattaggaacaagttacagaatgagatgatatacctgagtttcctgagaaataact

SEQ ID NO: 55582 - DNA, 433 bp, Glycine max
  unsure (1)..(433): unsure at all n locations
tcatacctcaaatttatgaatttttatttcattcttttcatccttccttccacacgtgcgtggctcacacatgttctattgcaaacatggtaccacgtgcaccgcagacaattaattgtgcaccctcttcacgtaactcattaatgaagggtcttgctaatcaataatctntatgaaatngattaaagaattttaaaaaagtatttaaaataaaaattataagaaaagataaaaaatttatgaacatcgtaattttttttttatttttaatgaaaaaatttattntaaaaattctttcaagactttcctaaatatactgattaacattttttcaatgaaaaaagatccactacattgagttngaattatttttcctatttcgatttaacaaatatttgaacactttattttgaagaaaaaatatttatgtact

SEQ ID NO: 55583 - DNA, 369 bp, Glycine max
  unsure (1)..(369): unsure at all n locations
tggtacctggagatatgtcgcaagggtcacgagaccttggggacgtcaggtggggtgctattgcccaaaaccaagctngaccaatcccgacccaacccgggcatattcagtcagtgagaacctgtgatgtacctaaacaggcgagctcctgacagtcaacagataaaaggaacaaagaccacacagcagggaggcttgtgtggtggctggccatctgtgaatcttgtgtgacatatgggttatggcctctggtaatcgattaccagaggtgggtaatcgattacaatgcttaaaaatgaagacaggagactaatatggtctctggtaatcgatcaccacggggtggtatcgattaccaggcttgaaaac

SEQ ID NO: 55584 - DNA, 473 bp, Glycine max
  unsure (1)..(473): unsure at all n locations
tcttctcgaagctacttgtctcctttgtgcatggctcaactatcaagtacgtagtccttcaagcgcaagggggtattacttntgcctttgggctttgctatttgtgactcctttctactaggtgtatcattcctgtcgccttcgaataacaccttgtccttaaggtgatgaagggatttaagggttgaccattcttcccacgatgcttcatcaggatgcagacccttccattgaactaacactagttgctttgggcttgtgtctgacggaatggtcttgtgagccaagatggctaagggaactagaactggttggttgtccacgggcaagggaggaaggtgcgtggcctattccgatgtcggagatccgatgaagggcttcaagatagagcaatgaaagacgggatggatgcgagaatgctctggtaatgccagcttatangcaactggtcccatctntctacaatatggaat

SEQ ID NO: 55585 - DNA, 216 bp, Glycine max
ttattttcagtagatgaagatgaatatgtggctaccttatggactcctctaagaacaataacatcatttcttgcactgaattgttgggagttggaagccatcttctcaatcaaattcctagcctcagcaggggtcatatcaccaagggctccaccacaagcagcatcaatcatacttctctccatgttgctaagtccctcatagaaatattgaaaa

SEQ ID NO: 55586 - DNA, 496 bp, Glycine max
  unsure (1)..(496): unsure at all n locations
nngagaaacccttcaagatcaagtagatggttcactatactattntgctcaagcatgtaaggcttgagaaactcttaaagaaaaagagtctaggttatgcactgagattgagagaaatgctagcgaanaagctacccttttaagaacttccaggagttggaaaacaaactgaaagatcttcaaaaggatctgaaggagcttaatgaacttcacaatgataaaaagaaagaaggatatggtctctgaagagaatgtgaacaagcatataaagattatgatgaactcaaagtgagtaaacacaacctttgggtggaatgttaagaacataagaaatctgcaagttttttgaaaaatgagcttttgaagcatcaagaacttaatggccaacctcaagatattgtaaaacttcatgaggaaataagaaccttaaagactactggtagaagtctactgacanatatnggaatggatatgaagggaatgtatatgttcatga

SEQ ID NO: 55587 - DNA, 416 bp, Glycine max
  unsure (1)..(416): unsure at all n locations
ctgtttactcggatatctgaatgagtgccgtaggataacgagacgctcgaagatgaatgttgaaccttagagccaattcanaccacaataactntgtactccgatgtgtgattgagtcccgtaatatatcgagacgctcagagttgaatggttaagctttcagccaaatcaaccgacgataactctttactcggatgtctgattgagtcccgtaatataacgagacgctcgaaattgaatgttgaagctctgaactatttcaaacaacaataacttttcactccgatgtctgaatgagtcccgccatatatcgacacgctcgacattgaatgttgaatctctaaggcaattcatacgacgataaccttttactcggatgtctgattgagtcccgtacataacgagacgctcaaaat

SEQ ID NO: 55588 - DNA, 451 bp, Glycine max
  unsure (1)..(451): unsure at all n locations
ctcagcttaacngtcattttcgagcgtctcgattaagtacggttctttatagacatccgagaaaaaagttattgtcgtttgaattagctcagaagttcaacattcaatttcgagcgtctcgatatgttaccggactcaatcagacatccgagtaaaaagtcattgtcgttttgattggctcagagcttcaacattcaatttcgagcgtctcgatatattacgagcctcaatcaacatccgagaaaaattatggcgtttgattggctcgagcttcaacttcattttcacgtcttatatttacggactcatcacacatccgaaaaaaagtattgtcgttgattactcaaagtcacattaattcagcgctcattgtactgactaataacatcagaaaaagtttgcgttgatgctcaactcacatcattcagctccatattacgaccatcaactc

SEQ ID NO: 55589 - DNA, 216 bp, Glycine max
cttacctaagcatctgttctagctgttcctgacacttctaagactcctgagccacgatgtcaagccgctggagcgggagctggagctgtattgttacaaggaggtcaccttattgcttattctagagagaaacttcttagtgccaccctcaactaccccacctatgatgaagagctttatgccttaataagagccctcctaacttgggaacattac

SEQ ID NO: 55590 - DNA, 197 bp, Glycine max
ctcttatattaaaattgccttaaagatattgaaacgatgatatgtggaacttattacgtgttaatatgtttattagtaagactgcgaacaatggaaaacttcgaatgaatatgaatttgagaccaatgttgtattactcttaaaaagatttcaacgtctatcgaagattattatatcaaagaattagatttattctt

SEQ ID NO: 55591 - DNA, 283 bp, Glycine max
aattggtctagccaatagttggacatgcatatgccgtgcaattgagctaaagctgagataacactctattgctgatatgaccacatccatggcgaagaccataaacattttgcttactctgaacgaacataatgctacattattggacgacccattaaccgaattcaatgcgggaagtgcattccgttctttcataagaggaaaccgatcttagaaacgcgaccatctggtgaagcttcttgaacgcgagcagtatatgtcatggcacgtaatgaaggatgaa

SEQ ID NO: 55592 - DNA, 289 bp, Glycine max
acacaccaaaagattatgatgatggatggctcaaattctcacaaaggtaaacttatcactttcaaattaagctttcaaaactatcatgacatgtagaggaaaaacaaggatttcaaatcacaaaatgtcaagagacttttattttcagaacaattacccatttcttgaacatatcatataattcaaagaaaaatatgcaaagttgtacatgcaaacagaattgacctataatattaaactagaaacccaacataactaacaaaactaacaaatttaacaaaaacaaaac

SEQ ID NO: 55593 - DNA, 450 bp, Glycine max
  unsure (1)..(450): unsure at all n locations
ntcttgaganaacttccatgagaagcttctntgaganaacttccttaagaagctagagcttagctacacacacccctctaataactaagctcacctccttgagaagcttccttgagaagattcctaaagaagctagaccttagctacacacacctctctaatagctaagatcacctccctgagatgagaagctagagcttagctacacacaccttataatagctaagctcacccccattccaaaaatacatgaaaatataaaaaaaaagtctctactacaaagactattcaaaattccctgaaatacaatgctaaaaccctatactactagaatggccaaaatacaaggcccanaagaaggaagaacctattctaatnattatcgcatgannatgtggacatgtnagttttatcattntatttcacatggtggagtcttagttcattctc

SEQ ID NO: 55594 - DNA, 441 bp, Glycine max
  unsure (1)..(441): unsure at all n locations
agcttctcattatggagagaaatgtaattactcactnactacaaaaaaagacanttaacgttaaaaaatccttttaacattggttttgaactgatgttgtatcgtcgatgttgatttcaacatcttttttaaaattgatttaaaaaattcatttctacattggttgttcctaaaaccgatctaggaagtgtgtcaagaattataaatctaccaaatatcacatcacttgtggttntaaccgatgtagacagccatctactatagtctataataattgcttcaatgtaaaagggacaacatcattaatagaaaacaatctgcatcactcaactnttgtgaataatttagagcaaaaacatgttccaataaagtcttaccttcatcttagcttgtctttccttgttgactaaatgatacggggctntatccaagataaaccat

SEQ ID NO: 55595 - DNA, 480 bp, Glycine max
  unsure (1)..(480): unsure at all n locations
ntatcatgaatttgtctcaattgtctcattctcagccaagcttaatggtttccctttcaaaaatttcaaccccatcgtggtctcagacagggagagccactctccctatatctctttattntgtgtgttgaaactttatttgcattgatttcaagattggtggaaagaaattatttgcatggtgttaaaatatgtttgtgagcatccgtgatctcaaacctcttctttgcaaatgatagcatcatctttgcaagggcaactttagaggaaataactcatctcttagctatcctcaagacttatgaagcagcctcaggaaaaaaggtgaacctcaacaagtcaaagctcacatgcagccgaaacattcctcctaccagatagatccagctccagtagctggcttagagtaaggcgagagaaggatcgatgacttattggggtatactgactatcatcngtcggtctaaacccaagtgttaa

SEQ ID NO: 55596 - DNA, 210 bp, Glycine max
tggtttgtgttttttccgttgtactttatccccgtgcggctagcattactagcttttcgttactgaataatagttcacgacttgatgatatcgtactcgtaaataatcgacgtcgcggcgtccactgaataaaagagtaaatattatatcaagactttataaaaagcgaataacgcgttctttgatttatctatgaatgtaactaggact

SEQ ID NO: 55597 - DNA, 327 bp, Glycine max
  unsure (1)..(327): unsure at all n locations
gctcgcgactgtgccctttcttaccttcgcaacttgagttcattattgctaccccatagagctccgcgaaaattgttccggccatactcttccttgtgagccctcttggtctcttgttcaagggctcttgcngtaattgcattctcttcccgtaacccggcacactcctntcgaacgtgtgtaccagccaacttgaacttctccttggcgagtattgcctttcctaactcgcttatgagagctnggacttcttcgacctcttacggtgcttcanaaatctcttcgctgacgactnttaacttggcgagccaatctaaacctcgtatg

SEQ ID NO: 55598 - DNA, 346 bp, Glycine max
  unsure (1)..(346): unsure at all n locations
taagctcctagctatcctcatagtatgcctttatgagagtagtatatgaagttctagtaggtttacatccgtttgccaccatatcaaccagataatctatggcaagactggtttgctgagctttacatagtcccatcattattgagttataaatgaatgcattgggtttaataccaaaccctttaagaatggaaaatttgattgttatgaactttcttcacactangcccccactactgaagtgcaagttattagatcaggcttaagacccttataacacatctcttccaagagctctacagccagttcggcttttcccacctctaagagcccattaattattata

SEQ ID NO: 55599 - DNA, 145 bp, Glycine max
agcaagctctaatggtgttggtgtacgaattgtgaagtttgctcttctattacttcatcaattatatccaccttgaagcaagctcctttatccttggggtgtgcatagctcacgcacatcaatatgatctccttgtcatcactcg

SEQ ID NO: 55600 - DNA, 62 bp, Glycine max
aaagaaattcaataaaaaaagagaaattcatcagaaatctaaaaagagaaagaaattccatc

SEQ ID NO: 55601 - DNA, 206 bp, Glycine max
  unsure (1)..(206): unsure at all n locations
gtagacttctcgatgtgattccttgacccacgtttctatgtactgttcacattctngacgtgtgtccttgcgcaacgatgactggggctanggaacataactgagcaaactatgctgactcaacatcataacctttcaagacggaacatatgtagcaatataatgacataatatactcttacattatatactacatctccagtgag

SEQ ID NO: 55602 - DNA, 192 bp, Glycine max
tttttttttttttgggaactacctcaatacacgatatccaatatggcccaccgcaaaaaaataagacctcatatatatatcactatcacaacaatcatagttactgataaacacgcgaacttctacacttgggagattggagaactattaaacaatttaacgtttaaaataaaagtttatttacccttaaaa

SEQ ID NO: 55603 - DNA, 457 bp, Glycine max
  unsure (1)..(457): unsure at all n locations
ctaagctccacatacttgaagcttaacttcttcagtggctggggctcacggtctacctttaaacttgcgcaatctatgacgccggttcggaagataaccgtcttcgtattgaatggttcgcatactcttaattacaaaatatgccaccggtcatttgttaaggatgtgtttagtacaaccgtccttattcacgcgtcatataaaatgctttaattagtagtgattgtagtggtatttccaaagaaaattgaangaacctatagtttcatcaccctcaccaatccatcccaccctagaattttgggtcatttcttcaaagatctgcaanattctttagaaagaatcaacctcctctcttctacatcttcaaccctctcacacaaccttatgttcaccacttatagctcctccactttggaaattatattagcacccanaccatcaaataccttcacat

SEQ ID NO: 55604 - DNA, 78 bp, Glycine max
tgatgtatcaagcttgtgttaaaaaattattggttcaaaaatattatattatatatatatatattatatatatattta

SEQ ID NO: 55605 - DNA, 350 bp, Glycine max
  unsure (1)..(350): unsure at all n locations
cacaacaagatattcacatgcacaaagcgcgcataaacccaccattccctggtgcccacctncatctgagctcacgtactctcacgtagcccatattctcgtttctctcaacaccgggtcctcatcaattctctcaagctgtcacaacatccaagcaaaacgacattcatacagcacaagctattacagccaagcataacagagcaaaggcagaaactctgctcaacacatcaaccaaaatcacaagctttctcacttagagaccccagtaacaattccttcgatccaattcgttaaccggtggatcgactccaaaatattactggaagtctatagtgcataagcctaca

SEQ ID NO: 55606 - DNA, 368 bp, Glycine max
  unsure (1)..(368): unsure at all n locations
caaacatcacagagtttccacactggagaattagatggatgcattgggtattttcagtatatcgcatgtgatgattgtacttaatatatgcagatagtacaatatttttcctcataaaataattgaattacaattactaactaagattcaaattgatacctagtcattntgggaaattgttccttaatgggttcttattcaatatttgatcgtaggtagcattattntttgtaaagaannatttgtcatacgtcgataccgnagtgttggatgatanattattaactctgaatttattattttgctatctctatctggtggttttattgcctatatcttaatttgtcaaacaagatatgatgaacata

SEQ ID NO: 55607 - DNA, 261 bp, Glycine max
tacaagttgaaaatattttacttctgctataagacgtatttagagacatactagtagacaaagcggttaggcaaatatactatctgcaaatagacagttgaacctgagcaagtagaccctgtgatgagaaaccaagtagactctttgctcctagatgaaagaatttatagccttgattaaggattttagttatcctaactataatatgtagactcatagttatacttaagacaaagatcatgatatttctcgttctaaatg

SEQ ID NO: 55608 - DNA, 377 bp, Glycine max
  unsure (1)..(377): unsure at all n locations
ctaagctatgaaacataagaaagctagcagatgggcctanaagaaatgttatacttttctangatatgatataaacaagtattccttttatactaaagcacaagacgagaaaagtacaatacacaatagtagggttaccctaaggctgaatctcaacacttcgctagtgtacatgatgacaatccccgtgagcttcatccttactttggttcatataagaaaattgggagcctaaatatgtcaatttaatgttgtgtttcaaatgtaagtgggttgatagtaatatcggtgtacagaatgatgatgcacgagttacgtcggtggatcttaagaaactcgcttaccagaatgatcctttcatcatggcaaaacaatct

SEQ ID NO: 55609 - DNA, 259 bp, Glycine max
gtccaccagttcaagatcaagattaatttccagattccttagaggaaatcaagaagaatccagattccagagaagatgaattccagattccagagaagaaatcaagaagccaccagtccagacttcacaagggaagtattggaaaagaattttccaaaaccaaacatagcacaattttggtttaccgaagaagtttctcaaatttttctaagataccagagtatttactctctggtaatcgaataccagtggtaaaaat

SEQ ID NO: 55610 - DNA, 293 bp, Glycine max
  unsure (1)..(293): unsure at all n locations
tactaattctctgatatggcttgtatttttatttaactgctttacagatttgatttaatatacaacgaaacttgtagcaacttaaatcagctaagagaacaaaacagaatgcaatgatcaataattaaaaacaaacctatttcaatcaagacactaaatatatttaagaggccctacccaattgtacaatcctgaatgggcctaaacttggggacacttatattgctttgcactacgaaatntttgtagggtgcattaacataacattcgcatatgactgctctaattatgta

SEQ ID NO: 55611 - DNA, 205 bp, Glycine max
taaatgacatttcaaactgggattaactcactctaacctcccattaccactaaatccagatgtggcttttcaaatcctcaaagcattacacttttccactcatatcactacattctcacttttaagacctaggttaactctacgcttcatctctattcttttttcatcagccatatcagcacacaagcatcacaagcatcatcat

SEQ ID NO: 55612 - DNA, 342 bp, Glycine max
aaaaaaaaaaagaggtttattttgtagaaaaaaaggggggagggggggaaaaggaaaaaggaagggacccaaggggggtggggagaagggaaaagagaagggctcacaccacaaaacagcccaggcacccaggccccggtaaaaacgggccccacaaaaaggggcagcccgccaacacgcaacaaacgccgaaaaagggaaagcggacccgccgaccaccacaacaacccaaaaccaagggggagaccgcccaaaccacacgaataaaacgccccagaaggcccgaacaacaaacgcaagcgccaaaagaaaaaaacaccaagaagaccccgaaaggccaaa

SEQ ID NO: 55613 - DNA, 343 bp, Glycine max
ttttttttttttttttaaaactgggggggtccaattttcaaatccctccccacctagtttgggggaaccccccgtggtattttttaggatttttttaatagaaaacctagggcccctattcactcatccaaaaaatgataagagaggcggcaagacagatacggcgactatcggcttgaagacaaaggcttcatctggaggtatgttaaactccaaaaccataatgataagccacgcaccgcctcagtacagtaggagcgagccatgtgtagcccctgatccggcctaaaaaacacgcggtcgcgaagatatccgaagtatcttatgctgctcgactacccct

SEQ ID NO: 55614 - DNA, 367 bp, Glycine max
  unsure (1)..(367): unsure at all n locations
atacatgtggactaagtgtctgtttgctatggngcacaacaagantggcacatacacaatgcgcgcataaacccaccatccgctggtgtccaccttcaactgagctcacgtactcgcacgtagcccatatcctcgtttctatcgacacacgggtcctcaatcaatactctccagctttccatacaatgcaagcaagacaacattcataccgcatcaatctttacatgccaacaaaacagagcaaaggcagaaaactctgccaaaacaccaatcaaatcacagcttnttctacttaaagacnccagttacatattcttcgatccaattcgttaaccgttggatcgacatccatatattactggaagtc

SEQ ID NO: 55615 - DNA, 237 bp, Glycine max
  unsure (1)..(237): unsure at all n locations
gaaatatatccatgtagaatggtctctctcgttcctattccagaatnttggactgctgaggtgattgcatcaaatatatttctgattcatatttctgaaaaaatgatgatgcaacaaaccgaagccgatgtccgatcttacagcanattacaagagtagacttcccgtgtaaagaagggttttgattctgcccttggtgatagcaattccatttgctcactcaattgttggtaatgt

SEQ ID NO: 55616 - DNA, 420 bp, Glycine max
acttgatatggtctcaatgatagacacgaacatgtataaaattttatgtcttacatgtttttcttattattctaccttaaactggcctaggtttgaatttaatttctttttggaacatcatgtctattttgaaaatatatattcattcgttaaaagtgtcttctgtctgaaaaaattatgtcttatatagtttttcttcaaacaataactttgttttcttcataaaagtctcgagagatttctaaacatataattcaatccttcttgtgatattcgcctgtacaggtggtaagcaacacataacacagttatattaaacatattatgaatacaaatctataatatactatagtcatcacaatatgaaaatcatctaattatgaatacaaatgtatactatattatagtaatcacaataac

SEQ ID NO: 55617 - DNA, 323 bp, Glycine max
  unsure (1)..(323): unsure at all n locations
atcgataccaagggtgggtaatcaattacaaggcttataaatgaagacaagaggctaagatggtctctgataatcgattaccaaggggtgtaatcgattaccaggcttgaaaacgagattaggaagctaggagagcttctggtaatcgantaccaagggggtgtaatcgantacccangccttaaaatgggactgggaagattgtggaggcctctggtaattgattaccagcctgtgtaatcgattacacagaggaacaggccactggtaatctgataccaggtatgtgtaatcgattacacagtgcctttttcaagttacat

SEQ ID NO: 55618 - DNA, 208 bp, Glycine max
  unsure (1)..(208): unsure at all n locations
tatctaactcattttgaatggcaattttttgctattttattcacatatatgtacatacactcgagaagcaacttcatgctatatattcacacatattcacatttcatttgaagagaaaatctcatgtatacatncacacatatatacattcatttgaaggcaattcttatgctacttatcacatnttgaaggcaattcatgtatattt

SEQ ID NO: 55619 - DNA, 301 bp, Glycine max
gtttttgaaaaaaattggatggaaaattggttaactaaaggtttttctactattagtttgaaaacccgttaaaccaaaaaaatcttctaagggagacacatcaaataatatatataataatatttacgcatttcatggattttcattacataaaatcaattcttttattttcttagccttttctttatccacaaatatttatattataaataaagttaaacaaaaaaacttgttcacttttagatagagcacatctaatagggataaatctaaaacacatccaccttcatctacccctcat

SEQ ID NO: 55620 - DNA, 316 bp, Glycine max
  unsure (1)..(316): unsure at all n locations
catgggcagaaatatgtcagcatttatagggtaaattgttcctcacattcctgagaaatgtaaggacccaggtactttctgtataccttgcattattgggaacagtaaatttgagaatgccatgctagatctaggagcatcagttagtgtcatgcctctggtcattttcaattcttaatctcttgacctttacaatctacagatgtggtgattcatttggcanatagaagtgttgcttaccccacaggtttcatagaggatgtgntggttcaggttggtgaacttattnttcctggttgattttatgttcttaata

SEQ ID NO: 55621 - DNA, 69 bp, Glycine max
  unsure (1)..(69): unsure at all n locations
attgggaagccactggnttggaggctcctactgtggcccctacatggttggacaaaaatgggagtttga

SEQ ID NO: 55622 - DNA, 198 bp, Glycine max
  unsure (1)..(198): unsure at all n locations
ataggacacctcctaacgtaatcacataaaaacatcttattgatcaatttgaagccttgcacatagttgactaatgctcangaggttatgttgtagtccatccacatatagaacattctatatctatgttgtgtactaatttccaatatttccttcntccattatctttcctttattttgtgctcgaaaagagacata

SEQ ID NO: 55623 - DNA, 289 bp, Glycine max
ggaatgtgataaaatgaattaaacaggaatttgtttatagtaaaaatatatgggcgaataggcttatggaacagtctcacctcatttgttaggttcacaactcctgtggttataattgtgacaaatctttctaaaccaaatactatgccttttaaattaattctattgaggaatttgagaatgtaacaaggataacatcactctgtaagagaacatcaatatgtgtgagatattgatcaaaatgcaagaactgttactagataggtgaatgtgctcacgaagttatgaa

SEQ ID NO: 55624 - DNA, 312 bp, Glycine max
  unsure (1)..(312): unsure at all n locations
ctggtacctacnagtttgtaaaggtcacaacacctgcatgagagagacccttagacccagaggattaaccatgaatcacgatcttgagaagagagataagcaagatcgggaaacagagacacagtcaccaagatgcgatcgacactctcacaagncaagaacctgctacaaataaaggtgtgatacaccattgcggtggattctctacgaagccagtccaactagttccgcatgcgcacctccacgccatccaggacattgacatctactatgtcgatacaccatcaccatgaagtctctctcctatcactt

SEQ ID NO: 55625 - DNA, 292 bp, Glycine max
  unsure (1)..(292): unsure at all n locations
cacattatttccatgacacanatgcataaacgatgaattggacgatttatgctaaactggtcatgcatgcacctatgcggacactcaagtgtcaaatatttatggtcatgtgatgctacggctcatgattcatttcctctatatcacatcaacccaatgtatccaaaatttgttcttttatccatttgtgcattcatccgagttcattttgtgtactcaggaaagatttcacagtattcacccttcacgttgcacacattttttttcacaactagcttgatcagccaatttt

SEQ ID NO: 55626 - DNA, 183 bp, Glycine max
tgctttttccgacccgccactctcacggtgacacactgacttctgcagttgcttctactgttgaactgactttgtctttcggctaaattctcgtgcattactggagcattaactttgcaacttactctgaccactgagctcaagctacttgtttctacggttctgcttgatttgtgctgattg

SEQ ID NO: 55627 - DNA, 316 bp, Glycine max
atctactcatatgggattctctgtgtattggatcgtcttgtccagtacttttgtgtaacctttgtcctgtctgaaggcaaaccccactggagagtatctaacgagttttctaaataaggaaacataaacaaacgcttgtcttgcaatattatgctgattctagcacacctacaaatatcggatacctggtgaaatgctgttaccacatgttaccttcccttactgcttactacccctaaatgtattaatactctatcgctggacatctgttctatacctgatcatctgtcttctatctctctaccctacttatact

SEQ ID NO: 55628 - DNA, 374 bp, Glycine max
  unsure (1)..(374): unsure at all n locations
actgagcgtttatagtgagacaatatcatatatctctcatttgcaattcaccatatcctggcgatagtcaatgttcaaatctgatagtcttggaaatgaatccaaaactgtgatggtgccatcnttaaaagcctgacttatgttactacacatgtagagggataacttccaagattttcaatgcccctaatgaagaacagaaatacgctctagtctgattctctcacgtttatacaaagctgagtagtttgaaatcgtctagttcacacggatgaaaaccataatntgtcatgataagaactgttacttcactcattttctctatgtactctggaaaggaatacttcttagtttgacgatttaaaaccataact

SEQ ID NO: 55629 - DNA, 312 bp, Glycine max
tttctcgagagctttcggtggtcaatatcgagcgtcttgatgaattatgcgcctgaaccggacctccgagttaaaagttatggctatatttatatctcgagagcttctgttgttctatattgagcgtctctgtatgtgatgcacctgaatcagacttctgagttaaaagttatgaccaatttgaatttctcgatagctttcgttattcaattttgagcttctcaatatgtgatgcgccagactcagacttctgtgtgaaaagttatgaccaattgaatcattcgagagcatctcgtgttcagtttggtatgc

SEQ ID NO: 55630 - DNA, 363 bp, Glycine max
  unsure (1)..(363): unsure at all n locations
aatacctggtacgccgtgcctctgctatgccaattggcaaaaccccatataatatgatttccagttccacaattntgtaactatcactaagaattaatcaagtacgaaactttatattttattgtagtaatgtcattttcataaaanagttaccatgtcaatgaacaacatatcgcatctaatttaattttcgcttatggctgaaccggtgtttgaaaacgaaatcactatggcctgctaagtgctaatnattgaccgactatactgcactaaacaccaggcattaaccccataattagtatcacattcataaccatcatgtatttgacttagtaagttcttagcaagtcattttcattacca

SEQ ID NO: 55631 - DNA, 298 bp, Glycine max
ttttttttcccccaaaaagggaaattttcctattttgaggcccatcctttccttggggaataaaatttcttttaatatggaaattttgttcatggtggaaaaaacaaaaaccctcaaactccttggttcccttctttcctcccttaaaattgatggcaaaaagaaaccaaaagagtggaatcaaccacccctttgctatatatattgcccgaatgatatatagtttttatacatgcatgattaattatgataatttattaaaatgttataaatacattgattaaaattgaaataatca

SEQ ID NO: 55632 - DNA, 407 bp, Glycine max
  unsure (1)..(407): unsure at all n locations
ctgtaaggacagctggataactatcttacatattctgaaccgggtacaatactcacatatgctatagcaagatagtgcatagcataatggctgatatactgaagaatatatatacganataaataataattattttatagtatacacatataaatgcttaanaactgaaaagaatccaatattanatttatataattaattataanaaaatcatatccagacacacattcaccattaatntatagctatgattaacaatcagagaaatgagaacataaatacaaacttattaaaaaaggagatggatggatgctacagaaaaattagtggaatgcatagaagtaatgtgaagaacatactatacacaacaacagggaaaagaatagatatcttcatatatgtcatag

SEQ ID NO: 55633 - DNA, 418 bp, Glycine max
attacagcataagaccccaacagactctcattcatgttcagtggaactctatacaaatgctcagtttgttcaaaaacagtctatcctctggaagatgattgtaatatcagcaaactctattgtaagactcacaattataatgacacaaaggaatataagatttttttcccaatactatcttagacacatttacggtgtttttgtaacagatacgcatatatgggtctttggtgatttcgtgttgtcatcaatagaattcagttcactaatgattgcgtaatatgctacataagatctcgagataaactctatctattgagaacacggaaagccctaggaatgaactagtttgcttataactgatttaatatcacctaataacattggtgactgaactatacagacttgttgtaacaat

SEQ ID NO: 55634 - DNA, 284 bp, Glycine max
  unsure (1)..(284): unsure at all n locations
cactttttcactcacatntcaccattctcacatttaaccctaggttaaactgtcccatcatctctaccaagtttctaccaacaatttcagcagaccaacatcacanagcatcatcatanaaccctaaaacagaatgggtagcgttagtcacataaaacgtgtcaagtttagcatggtttcaacanattccttcacaaataactaccataaggcataaacctagtagaactacccatcatatctcccaaanacccaatacccacgaaattcatgtgagaagaagt

SEQ ID NO: 55635 - DNA, 358 bp, Glycine max
tgattcatgccccttgggttacccggttaaccaaggcatctagtttaccttcaagcctcttagtctcagctgatgaagatgaatttgtggctacttcatgcactcctctaatgacaattacatcatatcttggactaaattgctgggagtttgaagtcatcttctcattaaatttctggcttcagtaagggtcatgtcttcaagggctccaccactggcagcatctatcatacttctctccatgttactgagtccttcataaaaatattggagaagaagctgctcacaaatctggtggtgaaggcaactcgcacataagtttctaaatctctcccatattatataggctctctcactg

SEQ ID NO: 55636 - DNA, 149 bp, Glycine max
ttgacatgatggccattgatgaacttactacatccatattgatttgcatataatgataatgcacaggtgctatgcaacaattgaccatactcactaaatatttaccacacaagataaaaaaaaaatagaggtagcaatgtattacacat

SEQ ID NO: 55637 - DNA, 438 bp, Glycine max
  unsure (1)..(438): unsure at all n locations
cacaccaacacaatcctgtcccctcacagaacacatcctaggttcatctccgtcattgtgaaggtagagctccagatgcacaggtacatgcaacatgtgactagctagcaggcggctaatcacaggggtcaggtgcagctgaatgagactttctaccggtacactatgcaccagcagagccaagaccncagtcctttcccttggcctacccccgagcagttgggggccacagttgcttggcctggggatgaagcgtgatttgagataggggcaggacccgcaggggcccctgtggacgacgagggagcccatgangacgataatatggctgatgtgctagaattcttcacttgaggaggcagagttgcacgactaggatcgccccanannattttgatttgtcttatttgatgtcatggcttcagcttatttgtatct

SEQ ID NO: 55638 - DNA, 229 bp, Glycine max
ccacaatattataacactgtcgcagcatacgactattatgaataccatttttcgttattttatgataaccaagcctctaacaccacagcatcctttcttgtacgaactccactgtcgagctaccccgcaaatgttgactctgctatgacaaccggtggcagatcggggtttttaacttgtccacgaccggcggctactacgatcttctagagcgaagcatgcgcccacc

SEQ ID NO: 55639 - DNA, 414 bp, Glycine max
agtcagacgtgttacgcgaggtgagactctgtatttgacaattctacctttttctgactatcggagaatgcatcgaagataggcgtttcatattgtcttttgttgtgggcaagtgcagcgcacacgcgttactcttgcgtacgtgtacattatgaattacgtttgtttaggagacgccatatgtgaatgagtggcgctgcaatatggtgcaaaattctatggcgccatttaagctcttgccacttatcgaagagttgcgccctcatttaaatagagcgtacacttgattgtttttatcaccgccactcttcaattttgtctttcttttctgaaatctccttacattatgcttacagtctctacaatctctacttctcttgtgaatgcttcctcgtcttaacgacacctcttaca

SEQ ID NO: 55640 - DNA, 169 bp, Glycine max
  unsure (1)..(169): unsure at all n locations
gaatttgaatcttgattccgagaagaaggttgttatactttcacaatggaagtcatgagaagatttgtctaaaacaaacataggacaattttgtttttcaaannaacgcccgccccccctttctaatttcaaaagaatatactctctggtaattgggttctaactttcc

SEQ ID NO: 55641 - DNA, 477 bp, Glycine max
  unsure (1)..(477): unsure at all n locations
ccatacaccctatatggtaagaggtatgccattttatgcgngcgagtagaantactaatccggctaattactaagtgcttgtttaacgtgtgtatgtgtgcccgataatactgcatcaacatgaagtctgagactactacagtatacaaagataggcgttgttgcttctccaactcttccaatggagatttatgattgctatataagggaatcataatgatattcatgattgttgtacctggtgatccaaacactcttagttagcatactaaattaagtttagagcatctggaactaattctactaccaacatgtatctaacaggagactggtgactaagttatttaatatcacgcaattaatatcacacaaatttgtggattcattatggaattagtcgacatattatatgggcctcgacctcatgtgttgtgtgcacatatgaacatctgatctttcaattattgttgatataat

SEQ ID NO: 55642 - DNA, 405 bp, Glycine max
  unsure (1)..(405): unsure at all n locations
ttagacttactaagacttcctgacatggctagtattcaagcacctagtcatatttgccgaacgtcctcagacctacagtcaggcagaggcagctaacagagtcatcctttgggccctgcatgctagactcgacatgtctaagggtctatggaaagagaagctcgccagtatactcttgacctaccactgttcaccccagacagcaaccaatgaaacacattaccgactcatatagcacacatgccatgatccccgtggatgtcagggaaccctttacgcggagactactattccagcaacaacaaaatgaagaaactatatgggtagaaccctatgatcttttcaaagttttcttatcaagataagaacatccatagccatatctccaaggcntttaaaacccaa

SEQ ID NO: 55643 - DNA, 426 bp, Glycine max
  unsure (1)..(426): unsure at all n locations
atccttagagtcacctgtggcatgctagcttcgtcctcaaaaagagaggtcttaagcatgtctgctcccacggcactcgcgcatgagtaggcggctattcttatctactccagccactatggtgggctggcatgcttacaagtaaccaacttaactcattnntcttcccaattttaccttctttagacgaactcaatattctcgcagtgcttattggtgaggttgcaaatcttgtcgcttatatatatgctcctgcacttctcgttactccccttggtgcactaagtattattgtcaagtattatattaacaacacttctcatcaatcttaggttgactttcttttcaaactcactcaatccccatctttatctatcgggatatatagtgcttgcttggctcacttcttgctcaaggaaaagcttc

SEQ ID NO: 55644 - DNA, 230 bp, Glycine max
  unsure (1)..(230): unsure at all n locations
tattttatccactatatcacacaactttcaattacaatcactcaatacccacatcccttttccccctcaactatctacctactacatatttccatattcccttttctaacccacatcccatcaatcctccaacttcacacatccaactatcacattcaataaacatctatcataccaactnnnaacacacaccaacaactttcaaaacctaaccaaatacanttttctat

SEQ ID NO: 55645 - DNA, 290 bp, Glycine max
  unsure (1)..(290): unsure at all n locations
tatggggaaccgagcccaaaggttctcagaggtggtccggctacggcgacacacaaattctccacacccacaatgcgcgcataaacccaccatcccctggggcccacctacaactgatctcacgtactcccaagaagcccaaatccccgataatctcaacaccggaaccccaacaatcctcccacgcttccacagcatcccagcacaacaacaatcaaatagaacaagctatcacagccaaactnnncccaccccccccccacaactctgacaaatatccaaccaaatca

SEQ ID NO: 55646 - DNA, 371 bp, Glycine max
  unsure (1)..(371): unsure at all n locations
cgacgagggatagtggttgccggtgagagcatgtgggtcccacaacccaatggccaatgtctatatccaactgaaaaatttcagttaatggagaagccctgaaccccacatttaggacattatgcgtgtgtcttaacaaatatttctaacttaatataatagtattactttatactttaataatatttctatatattttttataattgcgcgtctaaaattaagtgattattatcaacatatgtaaaaaaaatgacttttactaaatcaatntatttgcttttaatcaaactgaattctacaatattaaactatccaaaattaaggttggacaaaaatgttaatttgtggaacttcagaacttgtttcgta

SEQ ID NO: 55647 - DNA, 285 bp, Glycine max
  unsure (1)..(285): unsure at all n locations
cgcggatgattccccgagttgccttgtattttgttggctccctcgtcctcctataaatggccggttggggcgggttttttatacttgaacgcgaacctggcggcccagctaaactgctgtttgaatccggccaaatcacggggtagtgcccaaacatcgttcgcaatccgtccatataaagcccctggatttgcgggggggatgacttttagtctnnnnntcctcgccaccccacccaccgttttccaccaagaatttaggcccccctttaatttggcttcaatc

SEQ ID NO: 55648 - DNA, 386 bp, Glycine max
  unsure (1)..(386): unsure at all n locations
ggatcttaagtcactgggctgcagcttgatatgagattgtcctcaacaatctttganatntgcatctgaagtctgaaagctctangcagataagtcttgcaaagctggaagtggggctgaagtanaagatgcaaggatgccagctattggtgcanaggaagagggagcatcagctgctctgatcttggtcttccttgcctctagaanattaactgtttggtcattcgcattccaacagttccttatgatataagctaagtcaatggctggccttatgttntcataggaggtaagggcatcagatcccactcccctcgatctgcacaaggttgtgattaaagatgggaagcctaagcgagaagaagtagattgagccaccatggtca

SEQ ID NO: 55649 - DNA, 399 bp, Glycine max
tgacacttagatactcagctcaagataatggcctcaacaaacttcttattcccagaaggaaactctataaataggcctcctatttttaatggggaaggttaccactactggaaaactcgaatgcaaattttcattgaggcaatagacttaaacatttgagaagccatagaagttggaccttatgtacccaccatggtggctggtaatacaacaatagagaaacatagagaagagtggtctgaagaagaaagaagattagtacaatacaatttaaaggctaaaaacatcattacttctgccttaagaatggatgaatattttagggtgtcaaattgtaagagtgctaaggatatgtgggacactctacaagttacacatgagggaacaactgatgtcaaa

SEQ ID NO: 55650 - DNA, 352 bp, Glycine max
  unsure (1)..(352): unsure at all n locations
gtgcaagctaagaattctatgatatgncttgatgttctcaaacacgtctgtgaaaggatgtgagagtcacacagaattgtcagccactttggaagctctaagcttcaaatctaantataatatgccaaaacggtgtttaattgagtggctcaatatgtangcaacatcctaccgaaaacaaccacacgttcgggtaattttacaaagttaagaagttgtacagaaatngngtctangttggttgaaagttgattattgctcanaaggatgcatgttgtattacaaagaaaattcagataagagcgtaacannattgttttgtttataaaagggatcgatacgtgactatcac

SEQ ID NO: 55651 - DNA, 365 bp, Glycine max
acctaccatgttataagtctccacagatgtcattgcctctctcacctcatattatgatcagccattgaggtgcttcacctttggagatttccagctatcacccatggcaaaagaatctgaagagatcctatgatgtcctctagggggaaggaaaccatacctcttctcatggttctatccctcattagctagaatgtccaagacagtccagatctcaacacaggaattataccacatgaagccatgcgaaaatggggtgtgtggaataccaagataatatttggaggcaaaagctaaaatcttggctgtataggcgagtgggccccgtacatagatattcttgcactgttgatcttcggaggagt

SEQ ID NO: 55652 - DNA, 379 bp, Glycine max
  unsure (1)..(379): unsure at all n locations
tgtaggattatggggtacctatcccagtggtactaggtggcggtcgggcgatggtgcacaacaagttctccacatccacaatgcgcgcataaacccaccatcccctgtggcccacctccaactgagctcacgtactcccatgtagcccatatccccgtttctctcaacaccggatccccatcaatcctcccaagcttccacaacatccaagcaaaacaacattcaaatagaacaagctatcacagccaagcaaaacagagcaaaggcagacaactctgccaaaacgccaaccaaatcacagcttttctcacttaaaaaccccantaacaattccctcnttccggttcatcaaccgttggatcgactcgaaaattttact

SEQ ID NO: 55653 - DNA, 476 bp, Glycine max
  unsure (1)..(476): unsure at all n locations
agctngctcattatttaatctggtataccaactctattagaatcaccaaaacttcattgtttaattacaaattacgcttagtacgtaatacaattatattgataattangtgcatgcaagcgctatatctatctgtattatcaacgatcaaaatttccatattaaggggcatagttaatttctgtcatgtgtccgtaattatattattctgtgttggagcaaacaagaaaataagcttagctagttaggtgtgtgttgtcaatcgtaaacatgatacaatattacatgggcgtaattaatatatacgtganaaatatgactatgatatactgctaccagctggacctattacacaaccaacagaaacttactgctacctcttacttgnnngaatataatatagatcgactatagatttctgcttcatgttacgtcaaaaacagccagacctctagccattttatgttacnctatct

SEQ ID NO: 55654 - DNA, 384 bp, Glycine max
  unsure (1)..(384): unsure at all n locations
ttaaataaattcgttgaacgtgcgcggatgacgcgcagagttgccttgtattttgtcggctccctcgtcctcgtatcgttggccggttgcgggcgcggtttttttcagactgcggagcgcgaaccgtggcgggccgaggctgaagctgcatgtctgaaatccggcgaagtcagggagagtgccgatctcgttcgcatccgtccgatcaatggccccggcatttgcggcgcggaatttcccctgaaggtctcggnnctttgtgaaaacccggcgtacggctttgccgacgaggatctcaggccccccgcgtcaatcggccgccagccgcgctggccgatcgcgcagcccgcctaccggacgcccccgccgccatcctaccctgaa

SEQ ID NO: 55655 - DNA, 341 bp, Glycine max
  unsure (1)..(341): unsure at all n locations
ttcacacncaatcttattacagatgantattatttgtaagatgtcaaatgttacacatgagatgacacanacgttccttcacaaataaatatatatagatcaagaaatgaatccaaaataagaaacaaggagggaatagttagggtaaaagaataataagggcagtcatgtaatatacataatataaaataagtcatgtaaatatatatatcgatntttgtctgtgtctctcaatagtggtttgaaatgacttaacgatactcaacaaagtaaatccaagtctattgctaggtggattgggtgtaaagtaagtaatttaaacaatatgcttatacttatat

SEQ ID NO: 55656 - DNA, 357 bp, Glycine max
ctgatgggttctttattttttctttaaggcattgccttcccttttcaagtgccgcaatgcgtgaatcaacatgtttggtagccggttttgatgaaggtagctcttttaacatggtcaaaatgtctacgaccaggtttgatccatgatatgaagatttattgggcggtaaggggagtgtagtgagcataatgcaattctcgggatgctcgataccttcttttgtcgtcgccagctttgtccaagctgggcttatcattattttttttggccgatgcggcatccatccacacctgattcctatacttggccaactcttgcatctgcatgtacttagccatcctcattcgaagttcgttg

SEQ ID NO: 55657 - DNA, 397 bp, Glycine max
actcatggtcactatgaatgacaaattcctagagataaaggtagtgtggccattgtttcaaagcccgtactaaggcatacaactccttatcataagttgaataggtaagggtaggaccacttaacttttcactaaaataagcaattggatggccttcttgcatcaacacaaccccaatctcaacatttgaagaatcacactcaatttcataagaatatttgatagttggcaacgcaagtatggtggcattagttagctatcgcttaagaacattgaaagcttcttcttgttctctcccatttaaaccaactttttcttgacacttaatgagagtgctgccatgtgtatatccttcacaatgtcataaaacttgttaccagaaactctcactcgcaca

SEQ ID NO: 55658 - DNA, 280 bp, Glycine max
  unsure (1)..(280): unsure at all n locations
tcccagttatggaaagctaaatcctctattgtatcttccttgtaggtacttgatgtaaatatctttgtttttatctatataatgatgttttgtgtgttcactgtgctattataacttaattctaccatgctcttgccttgatcatgtagatgcatgtgtttttaggatcattcaacagtggaaacaagtatgattcttagaacttgataggacacggctagtttatcgtattttcatggaggaatangggaactgtgacctatgtgttgtatgactgtca

SEQ ID NO: 55659 - DNA, 381 bp, Glycine max
atcaggtgactctatcattactaacctttaaagcttgatctaaactcttttgaataatctggctcactatcaaggttgaatttcagtatatatttaacctagcgcataccatttaaggatgaattataatgattcaaaatatgtatgtttttatagtatgtaacatgtatctagagagggtaaatgaatttggaactgattgaatcattataagagataaattggttgttaagagattgaaaggaattatttgtctagatctcgaagttaatatcactgattaaactgaaataaccttgctctagttgataatatataaatgactgaagctcgaagaaattaataataactcctgaaatctttgcatcgtgcactaaatgt

SEQ ID NO: 55660 - DNA, 438 bp, Glycine max
  unsure (1)..(438): unsure at all n locations
ctttctttgagcanagcataggcttgctcttgtttctcaccccaggtaaatgctccattcttcttcaccagttcattgagaggtgaggcaattgtagagaaattaggaacgaaccttctatataagcttgctaacccatggaagctcctaatatctcccacactttttggggtgggccattcttggatgcccttgattntctcagggtccacttgtaacgacccgcctcgtcgctacggtatccacactttaatatntgataatttcaatctttttataaaaagaactcccttaanttttgcttatgaaaatagaagtgattttgtacaacataaattcatccaacaacacgccattacttaagtgaatatacataantacatagaaacaataattcggtacttgtcatacacataacgaanaataaatatgttcata

SEQ ID NO: 55661 - DNA, 403 bp, Glycine max
ttataagaacaaaattgccttaatcatttccaaatatgcatgtgaattaggacgcatcaacaagaatcaagccaaggctattgtgcaagcaatcaatggggcaaaacacaccaaatgattataatgatggatggctcaaattctcacaaaggtaaaatcatcactttcaaattgagcttttaaaactatcatgacatgtagagaagaatcaaggatttcaagtcacaaaatgtcaagaactgttattttcaaaacaattacccatttcttgaacatatcctataattcaaagaaaaacatgcaaagtcgtacgtgcacacaaaattgacccaaaatattaaactgaaaatctgacgaaactaacaacattaacaaattaacacaactaacaaattaacaaaac

SEQ ID NO: 55662 - DNA, 499 bp, Glycine max
  unsure (1)..(499): unsure at all n locations
agctntctattcanacctaganatccaagcaggctctttaatttatgaagtttatgggattaagatggtcattgaccaatccctattctatgatttaacccaattgccaagtgaagatgtaccatttgaaggtacattgattgatgattggaagtttgattnttctgtgcatgatgcccgccggttggtttgcaccaaccaagcggatatgaccggaaggcttcttgccggttcattggcttttgaaagctgcatccttcattatctaattgttcgcatcttgcttccaagatcttcaaaccttgcacaggtttctgaagaagatcttattgttatgtgggcttttcataaaggcctacaaattgattgggcacatcttgttagatatcgcatgcataaggcattgcgaatgaatgctccattgccatatccacacctagtcaccctctttctttaacactttaacatncctcttgattctgaaccctatgttccaatc

SEQ ID NO: 55663 - DNA, 411 bp, Glycine max
  unsure (1)..(411): unsure at all n locations
tcattactcacgcttgcttgcggggcttctatggaggctggatctttgagcttcaatgaggtccttctttggtgattttccaccatggagatgcagcagaagacaaaggagaagaggtgagaggaggcgccatccactagggaattagccatggaagaaggagcttcgccaccaagatgagccctggataagaagcttggagagaatgcttcaatggaggaaaagaaagagggagagaaagagagaggggggagcacgaaattgaaggaataaaagagggagagaagtggaactttgaagtatgtctcacaagactctcattcatcaaagttacaactagtgttacacatgcttctatttataaactangtancttccttgagaagctttcttgagaaaacttccttgaga

SEQ ID NO: 55664 - DNA, 395 bp, Glycine max
  unsure (1)..(395): unsure at all n locations
ttctaagagagataggctcttaatgcataagaagcaacaatctatttaataatgttctttaaacatgcaagacacaattgattgcaacaaaatatataagataagggaggagagaatgcaaacatagtttttatactggttcggcaaagtccgtgcctacgtncagtactcaagcaacccacttgagatattccactccctttgtaaaaatctgtttacaaagtctgaaccatacatggacaacctgatggaagcttgcttgtggtgcttctatggaggctggatctttgagcttcaatggngtcctttaatggtgaatttccaccatggagatgcagcggaagacaaatganaagaggtgagagaaggcaccatccattaatgaataagccatg

SEQ ID NO: 55665 - DNA, 423 bp, Glycine max
ctatcaggtgactgtatacattactcacgcttgaacctcatcgtctctcacagtctttagatttgggagccaatccaatccttgtgttcggactctcagccacttatgatagccgccgatgatcccattactgcttcccctaagctctctgtcctttcttcacgccgcatcccatgccttgcgaactccttggagtaccctcgcgttgtggtcactgaaaccccgtgcgatgaaaggcgtgatgctttcgtctgatggcactcctctcatggggtagccaagagttggtcccaattcgcctttccttttttcgacgcacgagcgatgaccttgtagcggatagacgggcctaccttcttggaaaaaaaggtgcgaaaccagccacacatagagagccggtgtacaacaaacaattcttgcgcc

SEQ ID NO: 55666 - DNA, 424 bp, Glycine max
  unsure (1)..(424): unsure at all n locations
agctntgactattacctcaacagcaattggttccttatagacttgcctcagcaccttgtcttcgagactgaggataattgcactgtgtgccttctgcagtagtgctttcttatccccatcagccatcatcttttcaaagttggcttctccatcaagtgcttccaccaggccctgctgaacaataagagctctcaacttcaatcgccataacccaaaatcattttgccctgtgaatgtttcaacctcatacttggccgagcccacttcttgaatcgaactcanaatcgctccatggctcaccgcaccaattggtgtgccaagatcagatttacttcacanaagaatgagtttcttgatgaacaagataagcaaatgcagaaaaaattaacaanaactgccagactcaataccactttattcatct

SEQ ID NO: 55667 - DNA, 382 bp, Glycine max
  unsure (1)..(382): unsure at all n locations
tagcacaacggtgtgcgcttagctgaaccattcagccaatcaatcaggggtttttgcgcttagcgcgagcaggctcagcttagcgcgtgaagagatggtgcttagcgcaaggtttgcgcttagcggataagcaatctgaaaattttctaagtcattttctgcttatctcttcacacataattttaacaaccctttttgtttattactaaacaagctgaaatcaatcacaatcacaagcaagatgtcctaactagatgcaagaaataaaaatgaagatagagaagggaaagaaaacctgngttgcttcccagtaagcgcttctttaacgtcactagcttgacacatcatcttgttatccaggatccaataatgttcctacttc

SEQ ID NO: 55668 - DNA, 459 bp, Glycine max
  unsure (1)..(459): unsure at all n locations
agctntggcatgaacctacacagggatgctagcttaccgttcagcttctgaacttcttggatgttggtggggctacgcatctctagtatggcagtgtatttgtcggggttggcttcaatccctcagtgagtgatcatgaagccgaggaacttgcttccacctaccctgaaagtacantttttagggttgaggcacatgtcatatttgcagagttcctcanagacttgttccaggtccgccacatgctggactatgctttgagacttgacgaccatgtcgcccatatatacctcgatgtttcatctgatctggtgtttaaagactcggtccatcagtcattggtatgtagcgcctggcatttttaggctgaaaggcatgaccctgtagcaaaagttgacatcttcactggataatgtncgtttctccttggctggggtatacatccttatcttggtatat

SEQ ID NO: 55669 - DNA, 384 bp, Glycine max
attgaaccctccatagcaattgctacttaacccttactgcaataagttgtggtcacgcttaaccttcaaaagcaacaatcacttgattgctcttctgagtttccttatcctaaacaatttctatttgaaccagtacctaatacatctaacaaggaaaaactcattaataagctccccatgagaatatgtttacatactctatgtggctagatagatttggctatacaaatcaagatagtatgggctaaggaagtcaacaatcagaagttgatgagccttttgaattatgacctctctaagttgtttgcttcctaccaaagaactccacatgcacttcaacgtccttatatagactttctaggagatgaagttgcaccatgttac

SEQ ID NO: 55670 - DNA, 404 bp, Glycine max
  unsure (1)..(404): unsure at all n locations
agctngacattatatggactgaaaaaggacttgaatcctgtantttttggctcgngatcttgattcatatngcatgtgannaagttctcgtcaggcagtagattatgatgatctggantttgtagggtaagagccaaagtgtttgaatcattttgaattgattggtggagtcccttcaccatgtttgaaatccagttcatgaatgagctcatcctgttaacatangatntgaaaccagaagattcttcaatttgctttntgactcttttactcccaattatcaactggtgttgaaagttacgtctctttcttacctgtgaanaaaagccagcactgttacagctctcaacacttgaatgactgtcattctcctgcctcgataatattacatttgcatccccatc

SEQ ID NO: 55671 - DNA, 381 bp, Glycine max
  unsure (1)..(381): unsure at all n locations
tgatattggatctaggcaaacactacaagatcatagatttccaccaccagaatctttctaatttgagactgttcaagactgtttcaccatgtctggtacctaactacctatcatcaaatcaaataaatgttaacattagtacatttgataagaattgctccagattcatgagaaatccaactttactcccatgacttaatgtataagaaagttgcaaactctttctattctattacctgccaaattggacacagntccagttgatcagttttgggaacttcaggtttcagctgttcagacaatgggtgactgccacaaaggaaggaacaagaaagagttagcaagaggggccagagcttagcatgaaatatcaaatgcgta

SEQ ID NO: 55672 - DNA, 441 bp, Glycine max
  unsure (1)..(441): unsure at all n locations
agcttcatcctcagatccctcttgtggactatgctcaatntagacagccctcctagggtttgactaacttanactaagattcatccttagatccctcttgttggactagacatagcttanatagcttatgagagtttagactaatttagcctaagctttgtcctcaaatccctcttgttggactagacttagactaaacaacattattgtaacagcatatttaaaaccaaaacttaatcctcagatccctcttgtaagactaagtttcaattctgcttcattctagttctaaggcaacaatacatttcccaacgctaaaatcacctaactaggcacacaaatgggtgatcagaccaagagcatacaaaatttaagcactaaaagaagcattgaacacaagaaacacaatcaattagatattaaaataattaccatcagttt

SEQ ID NO: 55673 - DNA, 382 bp, Glycine max
  unsure (1)..(382): unsure at all n locations
tatccttatggctttgcctccgaacttcaccccccgtgccaccccggaagatataagccaagcccctactttcgagggggcaactccaccttatgacgactatcccgggcaagatgatgaagaaagagatacccatcttggccccctgctccacctcatagatccgtccccccatgaactaccccaaccgaacatagtccgccatatcccggcttcacccacacccgtaaaagaatctgttttttttgtggaagataaangccagatggaggcgcttgaagagaggttaaaagcantcnanggccttggcaattacccattctcggatntggcggatttatgtctcgtgcccaacatcgtcatccctcccaagttcaaagta

SEQ ID NO: 55674 - DNA, 315 bp, Glycine max
  unsure (1)..(315): unsure at all n locations
agctntgatgatatggtcttcaccgaagaaaggatcaaagtgggtctaanaagaagcaaatctgatcatcattgcttgataaatgcaaaanaaaaaaaaaaaaactagggcaaatgaagagggtgagaatgagggagaagcccatgctgtgactgccattcctatacagccaagtttcccaccaacccaacaatgtcattactcagccaataaacaaaccttctccttacccaccgcccagttatcgacaaaggccatccctgaatcaaccacaaagtctgtcttccgcacttccaatgacgaacatcaccttta

SEQ ID NO: 55675 - DNA, 365 bp, Glycine max
tgagatgaggaagtgttgaagggtgaaacttcctgcttttattgttgaccacagagtggtacctggagatatgtcgcgggggtcaagagaccttggggacgtcaagtggggtgctattgcccaaaaccaagcttgaccaatcccgacccaacccgggcatagtcggtcagtgagaacctgtgatgtacctaagcaggcgagctcctggcagtcaacagataaaaggaaaacaagaccacaaagcaaggacgcttgtggtggctggccagctgtgaattttgtgtaatatgtggattgtggcctttggtaatcgattaccaagggggggtaatcgattacaaggcttaaaaatgaaaacagggggc

SEQ ID NO: 55676 - DNA, 417 bp, Glycine max
  unsure (1)..(417): unsure at all n locations
taagcttggaactcctgactagtactagtagcattatgaactgacgaatngtgaggaaaagcaggtccagataccatggaggctacaagaactggctctctaagaattattatataaatccaggatcattgggaaaatcaagtcaggaaaaaatataaatacgtccccatagtttagatataagttaatagtatagtctcaaggatctttaggttaccacttttacagtagcaggagccacattcccaacatgaactggtgccggttggaataatcataactaaaatcataaaaattcatgtaattataaataaatctcaaccgacatcacaaatagccattcctttttataactgtgccatgaccataacagacaatattttcctatacatgtatgacaatcctgctaattttttt

SEQ ID NO: 55677 - DNA, 369 bp, Glycine max
  unsure (1)..(369): unsure at all n locations
tttgcttttgaaagattgaagaaatttagatctagtattgctatgaacatttcaactcaacaacttaatcccagctggtttgaattaataataatacttgtcactcataaaaatattaatgcaagttgcatgacattcttgtctgtctcactatgatttagcttaatgacctctgcataagctgtttgaaaaagatctgagaccagttntgatttatatcgattatcgaagtcccttggcctcattgtggaacactagatttgttcatctactttggaagatcctttggtaataggaaggctttcacaaaacccaaggcanctaagtctttttggtagtgacagcctaaatagttcatttntgtgtgct

SEQ ID NO: 55678 - DNA, 412 bp, Glycine max
  unsure (1)..(412): unsure at all n locations
tcacatgtttgtctatcatcaaaaaggagagaatgtgaatgtatgtatacatgatnttgatgatgtcaaaagaagaatcaaacaaggctcattttgcttcaagattaatacaagattgtttcaataaacaaagccttgattcaagatttcttcaagatcaagccttgcctcanaatgaaaagatttcaagtcatccaaggcacatgtaatcgattaccaaggcacatganagtgtgtaatcgattacacatcatatgtaaggcgccatacctatactggagtgatcgattatacaggagtgatcgattacacattatgtcctaaggcaatgctctcactagaatctacccaacatagaggtgtnctacatcttctaccatacaatgcctcgtaaggcgccatacctatactg

SEQ ID NO: 55679 - DNA, 431 bp, Glycine max
tatcaggtgactgtatcattgcatacccttaaaggcgtactcaaagctggtgtatttacccccaaggcctagactctaaagagtctgtcagggcctttctcttctaatttaggaccaatccaaaaaacattttaacacatagactctatctatgaactatacaaaatacacaaatcttctattgttctcaaaataattttaactcatcgtgcctcaaagtgatcaactttgttgggttaccatagtggatcccatcacaatactcgttgcacattaactcgtcgcccttaaagggtcttacaatccattgattgtatgattcatagctcacaactcaatgcacacaacatctcaatacacatgtgatctcacaatttaacacatagtcaacttgtcacttacacacaattcatcacactttcataatccta

SEQ ID NO: 55680 - DNA, 307 bp, Glycine max
tattcaatcacccaaactgaacattacaatacacactatcatgctgatacttataagttcaagaccagggtcacaatctaacactctctaagaatcatacacgagcatgttaatgactaattaacatgcttgattcgactcatatcagatcatacgctaagctacttcatacactcatgaattaatgatgtagacacacaaactagagaattagattcggcaccgcataaggaatcttatgtgactcgtttcatgactagacattacttctatgacacaactacgataggtgaacatgtcattctac

SEQ ID NO: 55681 - DNA, 394 bp, Glycine max
  unsure (1)..(394): unsure at all n locations
cattataagcgaatgagcatgagattgtatttatgactgaaaacgtttgtcagtatgtcaaattgattgtgaaggaatgcattaaccgcatctcagtgagagtgtgctccttagatggtgagagagacaactatcatttagtactgatttttgcgtgaatctatgaaatatgggctgaatgcatgaaagtgaggatgatgaaggccatgtctgattgtgatagccacttagccaaaaagttgaccatgtgcttgaatgaattatncactgcacccactttgagctgaatgaattattgattgattgaaccctgagcctatacagtgttatctcctgctaccttgacttaggttgtaggagagcatcatctacaggaagcatggttcaaagcaaa

SEQ ID NO: 55682 - DNA, 371 bp, Glycine max
  unsure (1)..(371): unsure at all n locations
gagtgacggagataaccactagttttgtgaagatacattgggatgttgtccttgatatggagacgatcgctccagcctggggaacatgcgtccctgaatggaaatgcatctgttacacgatgaacatatttttatcgtggtgtattctaaaattacgaatcacatgtgtcggagactctgtgagcggagatgagtgaccatgtaaaacaaatcacacacctttgctgctgtgctacatattcgtggaatatagatatntaaccgaacacatttgcttggctataacagtaaatttgtaccaaacgtctnaatctcttttcatatnncatgtatnaaattcaaaattcatataaaaattgacaagtgcactg

SEQ ID NO: 55683 - DNA, 321 bp, Glycine max
  unsure (1)..(321): unsure at all n locations
tgcaagcttctcccttatttcctataaatagggggagtagtgaagggaanaaaatgttcttccctcttggtaattcgagatcacttgaaattagtgaaaaaaattgtttccgtgaagaanatgccagccaaggcgctttcgtaacgtgttcgtgggtgatttcgcgaagattntcaaccattcttcgacgttcttcatttgttcttcgtcgntcttcggtcttcaaccggtaaattcccgaaatcgaaattttcaattcattctttgtacccttagtggtcctcatttgtnttcacgtgcctcttatttcatttcatttac

SEQ ID NO: 55684 - DNA, 371 bp, Glycine max
  unsure (1)..(371): unsure at all n locations
aagttttgatgataacaaaggtgatgactaaaagctcaaaagtnaagaacacttnatgataacaaagatgatgatttcaagaatcaaagtatgagttcaagattgaatcaagaacacttcaaggttcaagaggaaatttgatttcaagaatcaagtttcaagattcaagcttccaagaatcaagatcaagattcaagaatcaagagaagacttaatcaagataagtattaaaaagttttttcaaaaactgagtagcacatagatttttaacaaaaccttttaccaaagggtttttactctctggtaatcgattaccagattattgtaatcgattaccagtagcaaaattcttttcaaaaagctttcaactg

SEQ ID NO: 55685 - DNA, 384 bp, Glycine max
  unsure (1)..(384): unsure at all n locations
gcgtgcgagctcgacactacttgccatctttgttagtatgttataaaaattgctctgatgaatatttnttgaaaattgccatgtttgtctttgactcttctttcttggatcatgaggagctatttagctagtgataactgctaaataattgtattntgatagtagaaaattagtcaaatattggcctgaaattaattatttagcagttatttgtgattaanagttagaaaaataattaaattgacattttgggtgcagatataaaaattggaggtgtaacaagcaaaaatggcagaataataaagaaaagaagattatttgaagaaggccaacccaatatgcgcgctcagcgcgcgtcacgggctaagcgggccatgatgtaca

SEQ ID NO: 55686 - DNA, 341 bp, Glycine max
  unsure (1)..(341): unsure at all n locations
taagtggattggtcctttagctgttactaatgtttttccttatggtatagatgaggtcaaaagcgactccacaaaacaagaccttcacggtcaatggacactgacttaagccattcctcacaaacccttttttattggacgtactggtggaagagacttccttactccaccctactcttgctccaccatgacatatggagttattcttattctctctccttatttcacttcattacatatgccttatnnnactcgatggctcaattgcttctaatcctttaaatgtgctacattaaggacaacgcgttgataacatatggggggggaggtgtctttggttt

SEQ ID NO: 55687 - DNA, 451 bp, Glycine max
  unsure (1)..(451): unsure at all n locations
agctnntgattctgtactctgtgcaacgcatctcattaaaactaatgcattatttcgagtaatcacatattactatgtcttcaattcggggaagtcattaccctgaatattttttttcacttgctcagccaatccagaactcaaaggataaagggtgccatcgagatatgaatatatcaaaaaccagttatcaatatcaccgtggcaggataatgacgctagcatgtaagagtgagaaagtaatcatgaatcatgaaggcttaccaaataaaagacaatcatatttcccctttgaaatttccaggaactgatccccgttttccatctcagactctagtaggctcaactacacgcanaagaaggaatcatngcagcatgttaaactgagaagtaaagaaaatctagaatactgtattatactatcatatggatcatcacattcacttactgg

SEQ ID NO: 55688 - DNA, 395 bp, Glycine max
  unsure (1)..(395): unsure at all n locations
tataaatctcagcttcataggaattntttctcccttctccaagtattctggtaaattcgacatatacttaaccagttcatcttcctcacttgcccattgataagttgcttgcttttgcttatttccgtaaggttttaaagagttgtctttgtcatttttggtaatttcatgacgaaaatcagcatatgacaaagaagctttctccagtttcaacctgtcattaatttttctgttcattctgatggatggtttccagcatttcactctgacctggcatcagctgaataaaccatctcagctgtggctttgaaaacaatgtacaacctttttgttgttcaaagagagtgcagttgggaaaatgctaatgcttctttttcagctgcacaactggatta

SEQ ID NO: 55689 - DNA, 414 bp, Glycine max
  unsure (1)..(414): unsure at all n locations
agctngagatgatgaagtgttgaagggtgaaactttctgcttttattgttgaccacagagtggtacctggagatatgtcgtgggggtcaagagaccttggggacgtcaggtggggtgctattgcccaaaaccaagcttgaccaatcccgacccaacccgggcatagtcggtcagtgagaacctgtgatgtacctaaacaggcgagctcctggcagtcaacagataataggaacaaagaccacaaagcaaggaggcttgtggtggctggccagctgtgaaacttgagtgatatgtgggttgtggctctggtaatcgattaccaagggtgggtaatntgatacaaggcttaaaaatgaagacagtgggctaagattgtctctggtaanntcgataccagggaatgtaatcgatacc

SEQ ID NO: 55690 - DNA, 348 bp, Glycine max
  unsure (1)..(348): unsure at all n locations
gtctgtgcctctttaatagaattgcaaacgtagatgctgatgatgggcaaagatccccatttgttgcagttgagccaccaacactaaagcttttgaattaaagctgtgaatataagatgtacaacttgaacataccatcttaccataccacttaaaaacatttagtggccggcatattggcattatgtattttagtggattgcgtaggtcagaataacactgaatataaggctacaaatctcttttttttatttttcttcngctatttgagaaangggttataatcgtaatttatgtgagtcaaatactctttaattttttgtttggataaaaggtgttatagaaagt

SEQ ID NO: 55691 - DNA, 413 bp, Glycine max
  unsure (1)..(413): unsure at all n locations
agcttgaagattatggagtcccatcacatgtgttactangtggcggtcgggcgatggtgcacaacaagtttatttccacattcacaatgcgcgcataaacccaccatcccctgttgcccacctncaactgagctcacgtactcccacgtagcccatatcctctgttttctcaacaccgggtccccatcaatccttccaagcttccacaacatccaagcaaaacaacattcaaacagcacaagctatcacagccaagcaaaacagagcagaggcagaaaactctgctcaacacatcaaccaaaatcacagcttttctcacttaaagaccacagtaacaataccttcgattccaattcgtaaccggtggatcgactccaaaactttactggaaggctatagtgcataagcctaca

SEQ ID NO: 55692 - DNA, 289 bp, Glycine max
  unsure (1)..(289): unsure at all n locations
agctngaatcttgacctcagtgtngaaagtatgtatctntgaatntcttcggaggcattcgtgttcaatttcgagcgtcttgatatgtgatacgcctgaatcgaacatccgtgtgaaaagttatgaccatttgaatttctcgagagcttccttggttcaattccgagcatctcgacatattgtgcgcccgaatctgaccatcgtgtgagaagtatgaccatttgatattctcgagagcttcggatgttcaatttcgagcgactcgatatattatacgcatgaatctgac

SEQ ID NO: 55693 - DNA, 395 bp, Glycine max
tatagaatacctaagcttctatagaaggttcgttcctaatttctctacaattgcatcacctctcaatgagctagtgaagaagaatgtggcatttaactggggtgaaaaacaagagcaagcctttgctttgcttaaagaaaagcttactaaggcacctgttctagctcttcctagcttttctaaaacttttgagctagaatgtgatgcctctggagtgggagttggagctgttttgttgcaaggtgggcaccctattgcttattttagtgaaacacttcatggtgcgacccttaactaccccacctatgataaagagctttatgccttaataagagcactccgaacttgggaacattaccttgtttccaatgaatttgtcatctatagtgatcaac

SEQ ID NO: 55694 - DNA, 338 bp, Glycine max
  unsure (1)..(338): unsure at all n locations
ggagtaccatcacatgttgtactaggaggcggtcaggcgatggtgcacaacaattctgcacatccacaaatcacatataaacccaccatcccctggtgcccactatcaactgagctcacgtactcccacgtagcccttatcctcgtttctatcaacactgggtccgcatcagatcctccaagcttacacaacatccaagtgattccacatccaatcatcatgaactaacataaccaagcaatataggcaaaggcagaatactctgcccacaacacaaacgaatatcacagcttntcacatacaaataccccagtgacattctctttggtcccattcgg

SEQ ID NO: 55695 - DNA, 388 bp, Glycine max
  unsure (1)..(388): unsure at all n locations
tcgcctaagtttattggtggaagaccaagtactaagtgtctcctaactagatgattgagatgatgcatgtttatgtgtgctgtactacgatgccacagccaagaatcatttatcttacttaccaaacaactcagcttatgatatgatgcatgctcaatgtttaacatatagatattacctattactttgccaatatggacaacctcactagacgtagattcaccaataagataacaattcttattgaattcaatattgaacgctttgtcacatagttgactaatgctcangaggttatgttgtagtccatccacatatagaacattctatatctatgttttgtactaatttccaatatttccttctcccattatctttcctttattgt

SEQ ID NO: 55696 - DNA, 310 bp, Glycine max
  unsure (1)..(310): unsure at all n locations
agctnttagccaattcaaacgacaataactntttactcggatgtcgtgatgaggccggtcatatatcgagacgctcgannatgaatggtgaagctctgaaccaattcaaacgacaataactgtttactcggatgtctgattgaggcccgtaatatatcgagacgctcgaaattgaatgttgaagctctgagccaattcaaacgacaataactttttactcggatgtctgattgaggccacgaatatatcgagacgctcgaaattgaatggtgaagctctgagcccattcaaacgacgataactttttact

SEQ ID NO: 55697 - DNA, 347 bp, Glycine max
  unsure (1)..(347): unsure at all n locations
tcactccatacctattttgctggactcagtctaactcttgttccatgatcatgaccactttttctattgtcgccatagatagatagaatctggagaaaaggtattgatctcttccccctaccgtgcatccaaagatctcttcgaacgcctctatgggtggtgttaactgaaagtccacagatgtgattcatctaactgattggacatagtcttgattgatagatgcaatggntggnnccgccccccccgatcatcgccatattcttgattttaccatttaccttacaaaatgcctgacgtttaacttaatccattcacatgttcattctatttttcctatacttttt

SEQ ID NO: 55698 - DNA, 450 bp, Glycine max
  unsure (1)..(450): unsure at all n locations
agctntatacaccttgtgcggttntcctctattctgttggacccagtgtttcttctaatgttcttttagaaacaaaatgcanatgtcttanatctcatttttggttaagagaaattctatctgcacgctntcattccccactagtcgcattggtttttgaaaaaatgtgtgtnttntcttatcggttagggctttgtttctttaacaagtgtgttcgcattntagtgaagggggtttgcaaaanaggtcatagctagggttccaaaagaactcaagataagtgtgataagcaagaagatagtattatgcaataacaagataaacaaggtgtgactagtaaacaaaaaaaaaacaatgaaagtaagcaagaaattaaagtgcaagaaatgtaaactagacggatcctaagagtggttggatgaccacatctaaggggtccaacanaacact

SEQ ID NO: 55699 - DNA, 335 bp, Glycine max
  unsure (1)..(335): unsure at all n locations
tggttntgggcaaaagcaccccacctgacgttcccaaggtctcctgacccccgcgacatatctccaggtaccactctgtggtcaacgaataaaagcaggaagtttcacccttctacacttcctcatctcaagcttgtaggattatggggtacccatcacatgtggtactaggtggcgatcgggcgatggtgcacaacaagttttccacatccacaaatcgcgcataaacccaccatcctctgttgnccacctccaactgaactcacgtactcccacgtagcccatattctcgtttctctcaacaacangtncccatcaatccttccaagcttccc

SEQ ID NO: 55700 - DNA, 420 bp, Glycine max
  unsure (1)..(420): unsure at all n locations
acctggaattttgtttgttatagctcaacttcaaaggcctacagaatctatctaccatagagcaacanagtaatcatcagcagggatgtcaaatntctggagtcagatagttgggactggaaaaatgataagaggtccgagtttcaggaggagaatgaagatgttgatgaagaacccataagaggaaccagatcactttcagacatctgccanaggtgtaatgttgctgtgatggagcctgagggatatgaagaagctacagctgatcagaaatggataaatgcaatgaaagaggagcttacaatgattngaaaaaataaaacatgggagctggtggacagacctaaccacaagaaagctgatggtgtcaagtgggtntatagaaccaagctcaatccggatggttctgtanacaaatac

SEQ ID NO: 55701 - DNA, 398 bp, Glycine max
tcttccttctcctccaaatgcttccttggtattcctgccaccccattcctattttgcttcactcagtctagctcttgttccaagatcttgaccactttttctattctcgccatagaaggatagaatctggaaaaaaggtatggcttccttccccctagcgggcatccaaagatctcttcgaactcctctatggttggtgttaactgaaagtccccaaaggtgaagcatctaagtgattggtcatagtattgagtgagagatgcaatggcttcaacaaatacttttatcatcaccagatcctagatcttcccatataccttacaaaaagcctgacgttgaacttaatccattcgctgtaacatcccatttttcgtagactaatttgaaaggagttgtta

SEQ ID NO: 55702 - DNA, 394 bp, Glycine max
  unsure (1)..(394): unsure at all n locations
tggatgcctgcaggctctctatcgatgacagctgtgttcacgagcggtacataagttctatagtgtgaataacctctatacattggcccagattttacattcgctgtggctggaactaccgtggcgttgcatgtcaaagctaaatggcttgagaatgtactttaagcagctggagtactacccattatgccggagcagatgacccttatatgctattgtgcaacatgaatggagattgtacaccgatgcagattgttcttatttcacatgctnnnngcttaacgcctcgcatatggagcgctcaaacagcgatgtgctctgatggaacatgatgaaacaaaggctgacggacacgaacatgcggtgggtccagagacctacaaagcatgaacag

SEQ ID NO: 55703 - DNA, 429 bp, Glycine max
  unsure (1)..(429): unsure at all n locations
gcttgctaagactcattntctatatgcatatatgatngaatattaatgatcatanattgtgtttattttattgaatacataccaagaataccagtataatatgaaagtgggacatcagtgtgctcaattntgaaatgtattagagatgaggggatgaagctgaattcttcccatttagtgattccccatactaagtcacctttcttataatcttggtgttcagattcaaggactttanaaaccccatatcctgttaatggctgcatttacataagggttagtaactacatgagtctatgactaanaaattgtattttcaatactacactacaagcttttctttntattagagcttgtcttcaattatcaaatttctatattcaattttctcaatgccccatttgtanagacatgttatacacaaatata

SEQ ID NO: 55704 - DNA, 365 bp, Glycine max
tgtgaggccttaatacatcctgattaactgattatttcttacttgctaaatgtctgtattatacttgttataggaaccttactgcttcatgtatctatcctctatactatggggacctgccttaattgcatacatagtgtcgttgtttgtgattccctgttcttattgatggcagctaagtctatatgcggatgactcatatcaagagatactaatactgaatactattttgctcgaccttctactctacgccacctatctttgtgtggtgcttaattcaacatgtagaaacactggaagcgtgagtatattcattcccattatatacctacataaacacttggacactgatgatctgaccaatc

SEQ ID NO: 55705 - DNA, 396 bp, Glycine max
  unsure (1)..(396): unsure at all n locations
aaccgttcttntacgctcttcattcgttcttcatcgttcttcgatcttcattgggtaagtacctcgaaccaagcttttcgattcattctatgcacccgtagtggtccacattgcgtatcgtgcttttttattctcgttttgtttactttttataccccctgttgacgtgcttaagccattttacttaagtcatttctcgcttaacttaaaaataaaataaatttccaccgaacgtttgaattgtattatccatttacttcggttaaaatccattccgaccgttcggtcgtgccgtaaccacgttggaaatcaaannnannttnnnnaataattttttaatcaaaaaaacatcttttagtaaaataaagcggacaatcaatcggacgttttctcttt

SEQ ID NO: 55706 - DNA, 127 bp, Glycine max
cttttatcgatcgtagactgtcggtggccaatcttcatctatcttggatcttcaacgggtgtgtggcatcaaccatgcggtataattcattgtgtgcacacgaattggaacacagtgacatcaacgc

SEQ ID NO: 55707 - DNA, 425 bp, Glycine max
  unsure (1)..(425): unsure at all n locations
gcaagctggagtgtatgcttcaatggagganaagtattatggagagaaagagagaggggggagcacganattgaagggaaaaanaggagangaagtgaactttgagttgtgtctcacaagactctcattcatcaaagttacaaaagtgttacacatgcttttatttatagactaggtggcttccttgagaagctntcttgagaaaacttccttgagaagtttctttgagaaaacttccttgagaaactagagcttagctacacacacccctctcataactaagctcacctccttgagaagcttccttaagaagaatcctaaagaagctagagcttagctacacatacctctctaatagctaagctcacctncttgaaatgagaagctagagcttagctacacaccctctataatagctaagctca

SEQ ID NO: 55708 - DNA, 378 bp, Glycine max
tgcctaggatgtggagagtgcaggtaacaatcctgagagcattaaagaatctaggttctatgtcccttgaggaacttgtcagtatcctcaaggttcatcaacaagaactttagcaagacaaatgacccaaaagagaaaagtctctagctctcaatagtcagaagaacaaaaggcatcatcgtctagagaacaagtcttgaaaagtttatccaaagctcttaaagtcaattattcatctaatgatgaatctggaaaagactcggatgaagatgagctaacctttatttctcaaaatatccgtaagatgtggagaaacaaaggaggctccaattagaaaaattccttatgaagaatgcccaaagaatagaaagataaaga

SEQ ID NO: 55709 - DNA, 429 bp, Glycine max
  unsure (1)..(429): unsure at all n locations
gtgtctaccatgatagggaccttattcagaagggcagacaagccttgacgtgtattcttttggngaagattacacataaaatgtgtaacattaatgataaagaaagccatatgacatctgggttcacaggtttaagcatgaaacacactgcactcaaggaccagtaattagaacttagaactctgcaaattaaacagttagaatttcaatcttgagtcgaatntcataaactggctcaaggaaatagtggattcttctatctcataatctgagacatgcaacatcattgttctcagctcctcaaacctctttatggtcgatgttgtccttgagttgctcaaggttgacacacaagttccatcctagnttgacctntaacaagtgctcgtacttagtgaagaatgctgaacaatacgtgtcttcaaatat

SEQ ID NO: 55710 - DNA, 371 bp, Glycine max
  unsure (1)..(371): unsure at all n locations
tcaagaacttttatttcacttgaagcacatgttcagagattaagagaaaggaatcctgagaaacacaatgatcaagccttacaagctcaaacaagcagaaagtttgacaagcaaggagacaaatccaaaaagaacaaaggaaagtggcgtgatgagaagtggagaaagactgaagattcaaaatgtggtgattctggatcatcttcacagaaagttgtgtcaaattcaataagccaattattagggaaaaannnnncggctcgacaacaacaaggtgcattgttacaactgcaaaaactttnntcattttncnnntgattnnnaattcanaaaggctctcatgtgaaaggtgataaagcaaagttggcaca

SEQ ID NO: 55711 - DNA, 440 bp, Glycine max
  unsure (1)..(440): unsure at all n locations
agcttaatacatgtaaatcatagttatggagccttgtatgttcatcccgtaagaattgcactggtttttgttttttggtattaactccgaccaggctactacactaccannaaacttgattgactctngatatcctttatagttgtgtggtaaaaatttctcttatgcttgagcagtacctctttntcatggataacacttaagacactcatccctttgtggaaaaaatngatcttttaataattattttcttgtttgccttcaaagtagatttcaggaaataccatatgttgaaaatgtcatagctgtaaccatcctacgcaataatagagataagcaggaccatcaccatttgccttgtctatgtcagtaacaacttaacanatgttattcattactctgctgacttaaatgattatacatcatgctttggtcattga

SEQ ID NO: 55712 - DNA, 380 bp, Glycine max
  unsure (1)..(380): unsure at all n locations
taaggccaaggtccaatttttgcgatttcaattgcaaagatgtctgcacactcttgttttttttagacttatttttatatttcttgtacattttctctctgttattttttttcatcaacttatcttgctttgtaatagacaaaaatttcacataattaaaattatatagaccttcaaagtaaaaatataaatagaaagagaaaaagaaaaattaataaatccaacatgtaatacaataagaaatntaaaaaaaacctatgaagaaatataggatgaatttaaaaacatcaacnancggntggttaaataaaaaaattgttcctgtcctaaaagatgaaagcacccgtacccagaaaagaagaaaaaaacatgattagaac

SEQ ID NO: 55713 - DNA, 343 bp, Glycine max
  unsure (1)..(343): unsure at all n locations
tggctagacatgatacatgtctttgtttgggtngngtcaaggataaaaaggaggccccacattatttccatgacacagatgcataactgatgattaggaagttttatggaagactggtcatgcatgcacctatgtggatgctcaagtgtgaaaattttatggtcatgagatgctgaggctcaagaatcattacctatattttaaatcaacccaatgtttacaaaatatgttgtttatacatttgtgcattcattcgagttcatggtgggcgtgcgggagaatattagcagaattagtcttcaggtgtacacacatttgttcatatactagctgtgatcagcga

SEQ ID NO: 55714 - DNA, 360 bp, Glycine max
  unsure (1)..(360): unsure at all n locations
tcctcatcattataggatgagtacgtgagtgactctcccatattgagggaagctcgcatgagaagctcttatggtggctggatctttgagcatcgataaggaccttaaattgtgattttcagcatagatttgcaagggaagatgaaggaataacggcgagaataggcatcctccactagagaataagccatggaaggagaagcttcaccaccaatagagtgacttggataagaagcttatatatnaancntnnnttgnccgcgagaatgagacacataaatattaagggggaagcattggaattgcatgatattaatgagagaagtttagatttgcagagtgtctcacatgattatcatt

SEQ ID NO: 55715 - DNA, 402 bp, Glycine max
tcgacccgggatcctctgagtcacctgctgctgcagctgaagcaacttgatgcatggtaacttggtacccagctggccttgaatcagaaatctgtacctgtcgcaagggtttgtggtttgtgctcctctgctgaccaccatacagacctttgcccttccatgcagcaacctgtagcaattgaacagcctgaagcttatgctgtaaatatttacaatagacctcctcaacctcagcagcaaaattaaccacagcagaacaattatgacctctccagcaacagatacaaccctggatggaggaatcaccctaatcttagatggtccagcccttatcaacaacaacagcagcctgctcctttctttcaaaatgctgctggcccaagcagaccatacattttctca

SEQ ID NO: 55716 - DNA, 375 bp, Glycine max
  unsure (1)..(375): unsure at all n locations
ttataccagttgataccaataaaaagaaaatggtaagagggtagctccctaaatttacaaaatggagcttaatttatttcattcttttatccttttccaccatcaatttatgtccccaactccaactccattcctaaatttcctaacaacacgacaagtttaattaccgtggcatcttgatgatgaatgcgtatcttaagaagattaccacaaatgatgcataataacacgtggaaaaaatatnattaacgcttcggttcaatgaaatttaatacataattnttattgccaatatcagagcacaagaaatcattatttgaacaatctaattctctaggtatctcatgttgtagaaacaatgagacaaacaagaaa

SEQ ID NO: 55717 - DNA, 201 bp, Glycine max
ttttgcacaataatgattattctatataatattactaatataactatacatttttacctaatcaataacttatataaatattttgctttgttctcactctgattatcaaaaaatatacaaatatttaccatttctttcataatacactatcttattataatataacactcttatacattccacaagtattcaatttactat

SEQ ID NO: 55718 - DNA, 465 bp, Glycine max
  unsure (1)..(465): unsure at all n locations
agcttnttatttcagtagatgaagatgaattcatggtcacctcatggactcctctaaggacaatagcatcatttcttgcactgaattgttgggagttggaagccatcttctcaatcaaattcctagcctcggcaggggttatatcaccaagtgctccaccactggcagcatcaatcatactcctctccatgttgctaagtccctcagagaaatattgcagaaggagttgctcataaatctagtggtgaggacagcttgcacacaatttcttgaatctttcccaatactcatacaagttctctccactaagttgcctgatgcctgaaatgtcttttntgatgacagtggtcctagatgcaaggaagaatntctccaagaacaccctctnntgtagaccttgtggcctcaataacttaagagggataggcttagaatgcagaagaagcaacaacaatcaatntaata

SEQ ID NO: 55719 - DNA, 394 bp, Glycine max
gtgataccggactccttatcttctctctcttgttattttccttaccaaattcgtgtaagcttctcattcatggttccaaattttcattttcattcttagaagcttgagattttaaggatctgagttccttgttcatctaagtagtttcgtgtagcttcatcaaggcaaggggggtctttccaattcttgaaccctaatcttgttgtctttggaagctaagtttcattgaatgttgttttgatgttcaaaattcgtagctactaccctgactgaaactgtagatatgttgttatttattttgaaattttaaggtaaaaaatgagttccttgggtgtcaaaacttagggttagccttaaatttcacataaattgaagctttctaataaaagttatg

SEQ ID NO: 55720 - DNA, 474 bp, Glycine max
  unsure (1)..(474): unsure at all n locations
gaccggatcttaagtcactgggctgcagcttgatggtgtcagagaaatacatgtttgtatcatcaaagaggggagaatgtgaatgtatgtatacatgattttgatgatgtcaaagaagaatctaacaaggctgcttcanatgataagcatttgcttcaagaataattcaagattgcttcaacaaacaaagccttgtttcaagaatcactaaagaccaagccttgccttanaacaatgtgctttcaagacatgcaaggctctggtaatcgattaccaggaagtgtaatcgattaccagaagacagggttgagaaatagctggtgaanaaggttntgaannttgaatttcaacatataatcgattaccatatgtctgtaatcgactaccagcaacgaaactttggaaattcanattcaaaagtcataacccttcaaatagtactgtgtaatcgattacacanacctgtaatcgata

SEQ ID NO: 55721 - DNA, 399 bp, Glycine max
tgccacccagctcgcccaggcgagcagggttgcttcctccagaagcaacagccttctggaggaatcttctggagggcccaagtgggcctggttgctatttgcacccccatttttactaagtacaccccctgccttttttttggtgattcttttttcgtaaagttacgaaaacttacgaatttcgtaacgatacttgttttctttccgtaatgttacggaaccttgtggattacataatcatccccttcttgacttacggaatattacggaacctcactaattgtgcaacgatgcttccatttgatttccggtgtgtcacagaaccttacggattgtgcatcaatattttcttttgttttccggcatgtcccagaatttcacaaattgcctaatgatggg

SEQ ID NO: 55722 - DNA, 541 bp, Glycine max
  unsure (1)..(541): unsure at all n locations
agctntatctntntcaatctataatagacttcgtttttgttctttcccctgatctttttcatggttctcatgagagttgggtctgttcatcctgcctagttntaacaataaggtcgtaggaaaattcgaagtttgtcttcatactttntaatatattaaaatcataaaattgggtgaaagatttaatcttttgtttgtgtagtgtcaacaaatctattagcctactgttaattatcagatggaaaatggagaaagggacccgaattaaaaatcctataaagtatgataaccggatttgtgcaattaaaataatgaaaaccaaaattacatagtgcaactaagaatattgataaattcttttaaaattcagtacttggaagaaaaaaaatgttaaaagtgatattaacattgctcttttcctgtacaggtataaaaagagaaaggtaattctttaaccatttagaaatgtgtcggatactcgtttcaccacgttgaacgtggaattacacatttattacaanacctgagcacaagggtgtgt

SEQ ID NO: 55723 - DNA, 407 bp, Glycine max
  unsure (1)..(407): unsure at all n locations
actcacgcttctcaaacctccatacacgaaggaaaagggggatcgaaaagagtaagaaactaaaaagtaaaattgggtgaaaaatgattatcctataaatattataatttaactaattaatatttacctaatcaataacttttataaagatttttctttattttcactctgattattaaaaaatatacgaatgaattagtatatttttcataaacactataatatcatgaaaaaacaccctgaacggaagagaaatattcaatgaaccgtanttggcaatggagagttattatgcgttgaaaactgttgtttgcgccttcaaaataanttatttttcatgatatttaggctctttcccttctttgtttaatctttcgaaatccaccctgaattattgcattattaat

SEQ ID NO: 55724 - DNA, 524 bp, Glycine max
  unsure (1)..(524): unsure at all n locations
agcttgagccanaatcccaacttaccatanaccttgaaccagggtgagaatatcaatccttgccctcggaagaaaacacaaaaagaagggaacttcccaatcaaaagagtggaagaaaacaaaaagagaaaattcccaatcgaagagtgggagaaagcaaanaaaaggaaagaaaattcccaatcaaagatcggaggaaaacagaagaaatatacagaaaggtctttggaccagacaatatctgaacaatacagaattgtcaccaagaaaatatgaaaagaaaggaaaccacgacctanagtggtcctctccctttgattaccaaccaaaatcctgtgcgtcggtgacttgttngcctcgcgctaaacaaaaatagaaaataaaaaggccaaaaacactcanagccaaatttcccaccaagaanaaccccattcccaagaaaaagtcctactgatccatgatcacgcatgtaatctttgattngatagganatgatttganaatcaagtcatgacatacctatg

SEQ ID NO: 55725 - DNA, 404 bp, Glycine max
actcacgcttctagcttaggaaatccttttcaagtgttgttagcactggaacaagaatagatagtgcaaggattcgagaagtgcattggaatggtaaaggggttagaggagccattttttggtggaagtgttcctcaaggggttaaaggaagagattggtactgaggtaaggcttcatgaaccaaagaacttgatggaagctatggttatggcctgaagagtagaggataagaacagagttttagggaagttacctttgagtaatagccaggggtataatatgcaaaaacctagttattcgggtcataaatttgtaagggattggcaaccaacaaacagtaaggtagttgatcctactaatgctactaaaacaagatccagtgggtgacaaggtagaagaacct

SEQ ID NO: 55726 - DNA, 320 bp, Glycine max
  unsure (1)..(320): unsure at all n locations
ctctggaactggaatatattttgcagggatgctacaactgcaacgtaatggccaaggggttacacgagccattcatggggggaaatgttcctcaaggggcctaacgaagacattggtactgaggctacgtttaatcatcccaagaactctatcgtcactagggatatggaccgcagaagctacgataagaacctacttatacggaaattacctttgagccattttctttggtctannnnnccccctcctatctctccatgccatatatcacatatgtattgccaacacgcgaacacatgagtctttgaaactactaatgc

SEQ ID NO: 55727 - DNA, 347 bp, Glycine max
  unsure (1)..(347): unsure at all n locations
actaggggagcagggtatgtttatttcattgagatatacgctttggacgtgaacatatggggtcccacaatggattgagttctattcagtggacgaatctgattgtacatccaaccctgagaagacaagtgtgtttgcacttgattcgcaatacaaaaacaatgtaacaattactcgatcctcaataactgaaaacaattacaagaaagtaacgttcgtatgcttagtaagaaactcatgttataacatacataagggnanacctcaccaagtgttgaattgagcttcttattgactattgtcttatgatggaaacatttgcttctattcatatgatgaaagtcaac

SEQ ID NO: 55728 - DNA, 380 bp, Glycine max
  unsure (1)..(380): unsure at all n locations
ttcaggatgttcattataactgacaccacgcaactggcgagcaggcacttctccgaatcaagagcttgtgaggaattataatgaaggcctaaagggtcctggtagttttatgcacccgacattattacaaagtacaacccgtcgcaaccactgttggagaccatgtttgtgtaatggtacaaacacttcctacgtatctagtttactaaaaattggccgcaatgtaacggaattttcaggagttgtacatccttaaccggataaacttacggaaactgacgtatnntccccccccacccacccagtgttttaaacgtatttggtgcgtttcaaaccatactgatcgaaatcacttattaatttttacccatatgttcaaa

SEQ ID NO: 55729 - DNA, 381 bp, Glycine max
  unsure (1)..(381): unsure at all n locations
ttaaatgacattttttttaaaacaagtaaacatgtggaaatttgaggccaagcatttcatacgtagaaagcactaaagatcggggtccaaaggaattgcttgtagtctccggcgtacttggtgattctgcatattataggaatggtggagcaacctgaataaataatatatagctcatacattttgctggtaattaagtagttaatcaagtaattgcaataagaagcataggaatggaattatactgcgtgtgggcccgtgtgtattgtgcaccatataaatcnggaacaaaaaatangtggntttcaggtctaaagattaaaaattaaaattccaacgatgtcattatgaatacaaaaaacattcaaaaaatatttaatt

SEQ ID NO: 55730 - DNA, 378 bp, Glycine max
tcattcaatataagcaagagaactttgttgaagcttgcgagagattacatgagttgcccacatcatggatttagccaacagaggatagtgcatatattctattgtggactatcctctcacaataggactagccttgacattgcttgtggggggaaatcttacgcttaaacccctcgctgataccatagagatcattgaagacatgtgcttcaatccctacaacaattctggggaaaggagaatcatgaagatgttaatcaaccaagttgactcaaccgagtcatatattgaactgcggcaacaaatatacgcactctgtgggaagagtcagacattcatgaacgcatcatctcgtcgtcttattacctcgcctccata

SEQ ID NO: 55731 - DNA, 381 bp, Glycine max
tatgatttgtgttcaaaaggtttgtcataattaaaatgccaagggttttagactcaacaatctccccctttttgatgatgacaaacctttaaacaaatctaagtcttttgaggggtttctcaacatatagattataatcaactcccccttaacatatgcatccatttcaacatatgataaatattcattaagcataaagatcatatatgaagacattttgttcaaacaaagatatgaatgaataaaacttatataataataaggcacaaacatatcatatcagatcatatctttcatatccatataatatcatatcatatcttccatatcttttcctttctcccttttggcatctatcaaaaggggggatgtatgagtcat

SEQ ID NO: 55732 - DNA, 412 bp, Glycine max
  unsure (1)..(412): unsure at all n locations
agctcgtaggattatggtgtacccatcacatgtggtactaggtggcggtcgggcgatggtgcacaacaagttntccacatccacaaagcgcgcataaacccaccatcccctgttgcccacctccaactgagctcacgtactcccacgtagcccatatcctcgtttctctcaacaccgggtccgcatcaatcctcccaagcttccccaacatcaaagcaatacaacattcaaacagcacaagctatcacagccaagcaaaacagggcaaaggcagaaaactctgcccaaagcaccaaccaacatcacagcttttctcacccaagaccccagtaacaattccttcgttccaattcgttaaccggtggatcgactcgaaaatntactggaagtctctagtacttaagcctacatt

SEQ ID NO: 55733 - DNA, 387 bp, Glycine max
  unsure (1)..(387): unsure at all n locations
taccatttaatggtaatttaagaaaaagcccatgccaaacttcattaattttaacagaaacgcaaacacaaagtaaacaggcagaaaatcataagacatgcaaaaagttatcattaattttgagttgtttttagactagctgttgtctaacatgtgtaatgatgagacaatgttgaatacttgtaatattgtttacatgttgtaacaaaagtattttgcagaatgtcccaaaagatttctttatatttttccgtctnnntgcctttgtaccttcagtttggactttaagctgttgtaattgataattggtttgcaggctttactgacaaagtcacaaatctgaaaagaatgggtgcctttaacgcatgagttactggcacacacaaa

SEQ ID NO: 55734 - DNA, 363 bp, Glycine max
  unsure (1)..(363): unsure at all n locations
tctccctcttttccctataaatagggggaggatggaagaacaaaaacgttcaacccttctggtatctgaggatcacttgaaattagtgaaaaaaatcattttcgtgaagaaaatcctattcgaggtgcttccataacgcgtccgaaacgttttcgtgggtgatttcgtgaagattattcgccgtctttcgttcgttcttcgacgttcttcggtcttcaaccggtaagttcccgaaatcgaacttttnaaccccctctatgtacccttggtggtacacaattgtttcgcgtacttttattttcatttcgttaactttccgtatcccctttttacctgcttaaatcatttatttaaatcattttc

SEQ ID NO: 55735 - DNA, 489 bp, Glycine max
  unsure (1)..(489): unsure at all n locations
ctctgagtcacctgcggcatcaagctagctagtcaaaacaatgttaaatacctatccanaaggaaggggataaaaaaataagggtctaagagtcgaaactaattaggtcaacaatgaaaatatcttcttacatatntatttaaggatactcctgatttaagtgggtgagttagtgagtcagctaggtaagcattgtggctaaaactaaatnttctgttaatgttttcttggtcattgaattagaatgaagcactcaagccttaattgatttgcaactgatattttgccgcaacacctaataccatttgacattataaaaacaataactntgtattcaattnntgggagggagtctggtcaggtcaactgctaccacttcttgtgccgtatagatatcnatgtccagttagaaaaacanatngtcattgactttttcttttgtcaacaagtacaaaattntatgaanntggaatttctangattctttgt

SEQ ID NO: 55736 - DNA, 375 bp, Glycine max
  unsure (1)..(375): unsure at all n locations
tgaagcatgtggagaaatagtttgccaagtaaaaaaagatatatgtggaagtttagaaaatagggagagcagccatataggcacaaaatattaccatcccaatttttaaaatctgaatgaattaacaaaacgagtaaatgacaagttgagttgtttcagcttttttatattataattataattattgttttttagttggataaattaaaaaactccgaaaatttaagtaccacgtgttacgtatatacatttaaaaatcatttcacaaaaattatgtgaatatttattttaaattcataaaantcactatgcaaccataaccaatatgttttacttgataactgataattagctttttagatattaattttcctt

SEQ ID NO: 55737 - DNA, 432 bp, Glycine max
  unsure (1)..(432): unsure at all n locations
agctngngttcctaggcctataatcgcattcggtcacttattntatcctctacgtgctgtcctaatacatataaatcagccccacagtccanagttcacaaaaccatgctcatatgtcgttgaggcatttcaccgagcacttggtgggcgcatgtttaggcatgaatatcaagagaatggnggcaatgtggcatgccccatcacttcagaatgcaccctaggcctaaggccatcccttacaacccctcaatttcaacaaaaacaagcaaccaaaatacatcaatggaaagctagagagcctaagaatgaggtacttacttgttggagatgaataatagcgcanaacggaatcaaaaacgccgaaaatggtgaccctagggctgcaaacttgtgaaatccatgggtcttgcttttgaatgangggnggggggg

SEQ ID NO: 55738 - DNA, 400 bp, Glycine max
tctttggagtagaaacatgggaacaactcattttatttcaagaggtcgtatctagtcaaggtctgagagaccatacaagtttcctagcgatttctaattatgtgggtcattaagtctatcatatgctgacaatagccgagaagcccatgaatttcttcaggggcggagtaggtgtccaccatcaccttggccttggctaacaatcggggaagttcttgactcccgttcaaggtaagagcaaaccgatccatccacatggtttcctcttggtgtaccgagtcgatcacccttcctttagcctctttttccgcgtatacttgggcatactcgtacgcgatcctatgctcatgggccgtggctagacctaactcttcttggtacttggcgatgatagctagca

SEQ ID NO: 55739 - DNA, 338 bp, Glycine max
  unsure (1)..(338): unsure at all n locations
agctgaaccagtttatcaataatcacaagttgagntttattcataatattagagtttatctcttttatcttagtgagagtgattctcctanattcttgagtgattcaagaacaccctggctgtatcaaaggactttcacaacctttgtgtgttgccctcgctggaaagagtgattctttccttccaatcatctccacccttgttctttcaaaccacaattccagaaaatccacctctgcccaaaattatctcgtgaaaggtctcgttttgaaattcaacttaggctcaagaatcacttaatttgagtgtgtaaaatgggaattatggtcactagataa

SEQ ID NO: 55740 - DNA, 394 bp, Glycine max
tgtgaccattcgaattcctcgagagcttccgttgtttaatgtcgagcgtgtagattagttatgtccccgaatcggacatctgtgtgaaaagttatgaccattcgattttctcgagagcttgcgttgttcaatttcgagcgtctcgatatattatgaccccgaatcggacatctgtgtgaaaacgtatgaccattcgactttctcgagagcttccgttgatcaatttctagcgtgtagatgagttatgtccccgaatcgaacattcgagtgaaaccctgcgaccattcgaatttctcgagagcttccgttgttcaatttctagcgtctcgatatataatgtaccctaatcggacatcccagcgaaatgttatgaccattcgaatttctcgagagc

SEQ ID NO: 55741 - DNA, 396 bp, Glycine max
  unsure (1)..(396): unsure at all n locations
tgctcctccacctttactaatagcccataagatatcttcccccaccgcgagcttatcaaggattcggccattagcgctaactatacctgcatctaggacatcgtcaacttcaaggccatactttctcatcatggaaccatatgcacctcccgtgatgcgccgttcaacacctaaacttgtgcaatggcctgcagggaagccatgaaccatgcttttctcatatattttgttacaaacctccccagtcgcggcactgattttgatccannnnnnccgcccccccatatcaacgttgacagtgttatatctntnccnnnnnnnnnntattaanngngtntnatcttcaaaaacatatgagagtccttcattatcatggccaccgctactaaatttcat

SEQ ID NO: 55742 - DNA, 268 bp, Glycine max
agctgatcatgcaaggcttgatcatgacacgcagatcatggttagccgccaaatgatacccacgataataatgtatagactatactaaaacttatgcttctgttggtcgttcacaacgcaaagcttattctagctgagagaactctcataacaatatgaagcgataccacctgaatgtaaaaaaaatacagaaagaattttatgtcactacaccctcgctgagtgatgagagagacacatcttccttaacatatcataaatctaaaca

SEQ ID NO: 55743 - DNA, 394 bp, Glycine max
  unsure (1)..(394): unsure at all n locations
ttgtggcttataaatactttgcgtgggtctcttttttcggtttgagctagaggttgtcttcctcattggaagagcggtaaacacactttgtgggtgatttacggacggcctttgtggataaccggttgtgtggtgtatggacgaggttcgctattggctgagtcatgaccttgttcgtttggagggaaactagtccgggtcgaatgatggacacacatgggttatttcctctttcttaccctgtctattagattnattttcgcagnnnnnccgccccgaccagcatatttgccttttttcctatccacttctatctttttgcttnctattaccaaatctgtaaaacttgaacgtgtgtgactccccatttctttcatagtataacaccggtcac

SEQ ID NO: 55744 - DNA, 389 bp, Glycine max
  unsure (1)..(389): unsure at all n locations
ctctgcatgcgtgtatctcgatcttctttgtgtgctctaaattgtgggagtgtgttcaaatatatggngcaattctgatttgttttcttgcttgattaggttgaattaggggtttgtatgagatggccctaggcctataatgcattttgaagtaatggggcatgccacattgtccccgttctcttactattgacgcctaaacgcgcgcccaccaagtgttcggtgaaatgcctcaatggcattagcgcgtgattnttgtagggaaacaacccatggggcaatttggtttgcacatatttctgggacatgcattcattttcgaaagagctagagtaattgccccgcatatgtcctangcctanngaaccatagttttatgcaaaagtaca

SEQ ID NO: 55745 - DNA, 401 bp, Glycine max
  unsure (1)..(401): unsure at all n locations
acaccgtacattctgtgcctaaacaccacctttagcgtaaaccaaaaaggaattttgcagcaaaaagcctgtaggattcagcccaaattccggggtcatatgctaacttgctcccatatctaattgataatgcaatggtagccataacccctgccagggttcctcaacctccatttttccgaggatacgactcaaacacaacatgtgcatatcatggaggagatccgggacattccattgagcactgtatgactttttatctgaaggtgaaaancctaattgatgtgggctggctgaaatttgaagagaatcacttgtgaatcctaacattgacaagcggcaccacacatggggcaatttgaaggttggtgtttgatgtctctaatgactcattaagattt

SEQ ID NO: 55746 - DNA, 442 bp, Glycine max
  unsure (1)..(442): unsure at all n locations
agcttaagattagataagttgcatattgtaagatactggacatgtcatggcgtgagatcatatccttcgtccatgggaaaagagagaataaaanaagaagttgagttggtagccatatttcacagctggtgtaaaccttttagtnaaagacaacacaatgatagaaagaagagaaaaaatattaccttattactgtgacactnttttactgtattctcaaaacttagcaaaagctttcactcacatcacaatcctattaccatagaggtcaccctggcaatggcatcactcttcaataattggattccttgtcattgatgtttctcattaaaacgagttaacaacacaagactcgagcaacatgctactttntcttcggtaaatgtgtgacatgggcatagcataagaataatttaaagataatacccaaacaataatctca

SEQ ID NO: 55747 - DNA, 380 bp, Glycine max
tgcatgtctaagtttcttgtgtcaaacccaatgatttcctttgatggataatagacatgttacattttgatttgatagttcactaagattaatcttataaagattaccttttctattaccagtgaaaagttgtgttccatttttgtgttggacaacacaaccttctttgctaaagaaaacatcaagtccactgtcacataattgacttatcctaagcatattatgtttaagccgtttaacaaacagtacattaaaaatgggaggataaggatcaatacttatctttcctactcctactatcttccccttctgatttcctccgaaactgattgttccaccatgcatgagagttgggcattggaacatacacttttctttta

SEQ ID NO: 55748 - DNA, 476 bp, Glycine max
  unsure (1)..(476): unsure at all n locations
agctngcttgtggagcttctatggaggctggatctntgagcttcaatgaggtccttcaataggtgattttcaccatggagatgcagcggaaggcaaaggagaagaggagaagggaggcgccatccactagggaataagccatggaagaaggagcttcaccaccaagatgagccttggataagaagctnggaaggatgcttcaatggaggaaaagaaagagggagagaaagagagaggggggagcacgaaattgaaggaataaaagagggggagaagtagaactttgaagtgtgtctcataagactttcattcatcanagttacaacaagtgttacacatgcttctatntatagactangtagcttccttgagaagctctcttgagaaaacttncttgagaagcttctttgagaaacttccttgagaagctagagcttagctacacacacncctctcataactaagctcacctcctt

SEQ ID NO: 55749 - DNA, 381 bp, Glycine max
tctagtcgtccatagacctcctctgtggtacggtctagcaaacgttgcatctgtgcattcatcgcatccactaacagacgttgagcgccgtccaactgatggtactcgtcaccaccaccacctgctccagccataattcaacaggaaaaaaaaaatgtgcaataaaaattattaaggtttcaggacctcacaacactctactcacgtctcttagatggtagtacactcgtgtttaatgctctcaataggcttttgtgtaatgtattccctcttgccttttaccactcgtgtttcctcttaagttcctggatggaccaaattagacacacaaggtaatataaaataaaaggaaagacaatataatgatcacaaacagatttg

SEQ ID NO: 55750 - DNA, 393 bp, Glycine max
  unsure (1)..(393): unsure at all n locations
agctngagatgaggaagtgttgaagggtgaaacttcctgctnttattgttgaccacagagtggtacctggagatatgtcgcggtggtcaggagaccttgnggacgtcaggtggggtgctattgcccaaaaccaagcttgaccaatcccgacccaacccgggcatagtcggtcagtgagaacctgtgatgtacctaagcaggcgagctcctggcagtcaacagataaaaggaaaacaagaccacaaagcaaggaggcttgtggtagctggccagcagtgaattttgtgaatatgtggattatggcctctggtaatcgattaccaagggtgggtaatcgattacaagggcttataatgaagacaggaggctaagatggtctctggtaatcgatta

SEQ ID NO: 55751 - DNA, 375 bp, Glycine max
  unsure (1)..(375): unsure at all n locations
tccttaagaagattcctaaagaagctagagcttagctacacacacctctctaatagctaagctcacccccatgacaaaaaaacatgaaaatacaaaaaaaaagtccttactacaaagactactcaaaatgccccgaaatacaaggctaaaaccctatactactagaatggccaaaatacaaggcccagacgaaggaaaaaccaattctaatatttacaaagataagcgggctcatacttagcccatgggcttgnnnnncaccctaaggctcatgagaaccctanggccttcccttggatctttancccaatctaccttnanttttttacccaatgcccttgcggggaaggattgcatcactatagccttgagctt

SEQ ID NO: 55752 - DNA, 376 bp, Glycine max
  unsure (1)..(376): unsure at all n locations
acgttcagtaactgctggtaatcaaatatatgtgtaatcgattacacagtgcannatttgaactcaaattntaatagctggtgtaaatcagttttggccactagtaatcgattacatcctctggtaatcgattaccagagagtaaatctcttgaaaaagactttntaacttgaatttcttggccaaaccttntgctacttcaattggaattctcttcctatntaatatactcttcctaagactctagagactgtcttgatcatccatcttgaatatctttgatttctttgtcttgaataaagctttgagaaacatgcaaccctttggcatcatcaaaacattcagcttgatcctttgtctacagaacaaccaccat

SEQ ID NO: 55753 - DNA, 376 bp, Glycine max
  unsure (1)..(376): unsure at all n locations
tgtcacccagctcgccctggtaagccaggttgcttcctccagaaggcaccgccttctggagaacatcctggaaggcccaagtggacctggttgctatttgcaccccctatttactaaatacacccctttcctttttttgctaattctttttccgtaacgttacgaaactttacgaatttcgtaatgatacttgttttctttctgtaatattacgaaaccttacggatcacataatcatcccctttttgggctttncggatgttacggaactttacagattgcgcactaaaacttcctttcnacttccgacatgtcacggaacttcacgggttgtgcaacaatgctttcttctgacttccaacatgtcacagaactt

SEQ ID NO: 55754 - DNA, 380 bp, Glycine max
  unsure (1)..(380): unsure at all n locations
agctggagacattaangatttgagctccttgttcatctaagcaatntcatgtagcctcatcaaggtaaggtgggtctctagaattcttggaccctaatcttgttgtctttggaagctaagcttcattgaatgttgttntgatgttcaaaattcgtagcaactgccttgtctggaactgtatgatgtgttagttttcttgaaatttntaaagtaaaaatgagttccttgggtgtcaaaacctanggttagccttataatttaccaaaatcggagttttcaagtaaaagatatgaacaaaacaagtntaaagaattttttaggactaaattgtcacgaaaataacatngtctggntctatggacggtctttcttaaaaaatt

SEQ ID NO: 55755 - DNA, 406 bp, Glycine max
gacactattagtactgtgcatttaaagaaacacatttgtgactattaatagttagacacatctcatatattttgatgcgtatactttcatgataagatacaagtattcatacttctatttcttcatacagaacttttcgtgtaagagcacacactttcatttgtaaatcttccacacatttaaccaacaccaattaacgcaattgaacctttgtatggtaaaacagacaatgataagatattacatttatcaagtccaagcatttttttggcgattttagaaattaaatatctagtaaatatgtaagagcgaccctcttgaactcaagccaattattttatgaaaatgagtttacaaatagttggttgaatataagtctttagctgattggcataagatatggaag

SEQ ID NO: 55756 - DNA, 100 bp, Glycine max
  unsure (1)..(100): unsure at all n locations
agcttgtgcagagttgttacatacanatggacctactaaactaataatcaagtcgtattgatagaaaatgtgcataaatcaagtacaaaccctgcaaaac

SEQ ID NO: 55757 - DNA, 370 bp, Glycine max
  unsure (1)..(370): unsure at all n locations
ttataagcgcgggttgnggagactaatgtcattcgttcgccatatgcgacgatgatgttccgagtactttggatttggtccgaccatgccctcctgatttccagctgggaaattggcgagtggaggaacgccccggcatttacgcaacaagcataatgtgaacctttagggttttgaaagctctatagttgggcctaggctttaaagttgttccttttgataaggcactgagcctaatgagctttaatatataatacaaggatctttcttgatctgttcctggtctctacccactctcattcatttgtatgtttacttctttttctgaaacggcttatccgatgacgagtcccccgaaggtactaatacc

SEQ ID NO: 55758 - DNA, 448 bp, Glycine max
  unsure (1)..(448): unsure at all n locations
agctngcttctacatggtttacatttcttgcttactttcatagcttatttcctttaccttccattgcaaaccgcctagatagcttgccttttaccaattaatttttaccttatctttcacacctcttttagtggttattttagctagtttcaaccatagtttcttttaccttttggtttcaagcccccaacaagaaagaaccacaacttataaaccaacatgagacttcattcttcatctagtgttaatggtgagggttctactcctaacgaccccttgtataagatattagatgagttgagatccattaagttgtggaaagaaaaatatgagagaaatagaaaacggaaaaaaagagtggaagaataagtcaggtgaaaagagaaatacgggagaaaaaaacgacatctaaagaagtagaaagaaaacatgcctctatatagcatac

SEQ ID NO: 55759 - DNA, 374 bp, Glycine max
  unsure (1)..(374): unsure at all n locations
tgcacaaagattttctgtacatcgaattcagatgtcatggcaagcctgcacattactgcttaatagaagaagagaaggatggtaagccttcgtactttgatatcaaacactacattgaagacaaggaatattcgcatgaggcctctaacaacgaacagaagatgttgtgaaggttgacggccagcttcttcctgaatgggaatatcttatacaagaagaaccatgacatggtactgnttcgatgtgttaatgccagagaagctgaaaaaatgctggcaaaggtacatganggatcctttggaacacatgccaatggacatgccatggcctgaaaaattctgagagcagggtattactggctcaccgtggagagt

SEQ ID NO: 55760 - DNA, 420 bp, Glycine max
  unsure (1)..(420): unsure at all n locations
tggcatccatgctntgactngactcatcaagagattataaatatgtgaccatggcatgaatntcatatcatctttntcaacatctctttcaacaatcaagaaatctatctttcaatcttctctctcaacattattcaactctttcaacaaatttttcctgaatcgtcttctcttcatctntctaaactttnttgttcaaaactttttctttcaagaaaaaatctttgatcaaaaacttgtgttattcatctttttcattctcttctctctntgccaaaagaacgaaggactaaccgcctaaattctnttgtgtctctcttctccctttcgaagagaattcanaggacctcgactgagaattcntttgattcttccctttcccttaagcaaaatatttcaaaggactaatcacctgagata

SEQ ID NO: 55761 - DNA, 397 bp, Glycine max
  unsure (1)..(397): unsure at all n locations
tgcttgcggggcttctatggaggctggatctttgagcttcaatgaggtcctttaatggtgattttccaccatggagatgcagcggaagacaaaggagaagaggtgagaggaggcgccatccactagggaataagccatggaagaaggagcttcaccaccaagatgagccttggataagaagcttggagaggatgcttcaatggaggaaaagaaagagggagagaaagagagaggggggagcatgaaattgaaggaagaaaacgggaaagaanttgaactttgagttgtgtctcacaagactctcattcatcaaagttacaacaagtgttacacatgcttctatttatanactangtagcttccttgagaagctagagcttagctacacacacccctc

SEQ ID NO: 55762 - DNA, 410 bp, Glycine max
  unsure (1)..(410): unsure at all n locations
ctcttagactagactcatcatgagatcatagatatgtgaccatggcatgaattctatatatctttgtcaacatctctttcaacaatcaagaaatctatctttcaatcttctctctcaacattattcaactctctcaacaaattgttcctgaatcgtcttctcttcatctttctaaactgttttgatcaaaactttttctttcaagaanaaatctttgatcaaaaacttgtgttattcatctttttcattctcttctctctttgccaaaagaacgaaggactaaccgcctaaattcttttgtgtctctcttctccctttcgaagagaattcagaggacctcgactgagaattctttngattcttccctttcccttaagcaaaatatttcacaggactaatcacctgagata

SEQ ID NO: 55763 - DNA, 393 bp, Glycine max
  unsure (1)..(393): unsure at all n locations
gggctactatggaggctggatctttgagcttcaatgaggtcctttaatggtgattttccaccatggagatgcagcggaagacaaaggagaagaggtgagaggaggcgccatccactatggaataagccatggaagaaggagcttcaccaccaagatgagccttggataagaagcttggagaggatgcttcaatggaggaaaagaaagagggagagaaagagagaggggggagcatgaaattgaaggaagaaaacgggaaagaanttgaactttgagttgtgtctcacaagactctcattcatcaaagttacaacacgtgttacacatgcttctatttataaactangtagcttccttgagaagctagagcttagctacacacacccctctaat

SEQ ID NO: 55764 - DNA, 227 bp, Glycine max
tgctcgtgatttttctatgagggctggatattttatccacaatggtgagctaccaccatgtatatgctttgtatagcaatagaaagaaggataggggaggcactattcattatggaataatttgggaacacaaaatttaacgaatatgacaaggacaaaaatgaaactttaagtgtgtgttgaaggactttttttttctaaattacaacatttttacacatgcttct

SEQ ID NO: 55765 - DNA, 450 bp, Glycine max
  unsure (1)..(450): unsure at all n locations
gatacaacttcctttatacttattatcctatgcttatactctctcatataatagttaaatatattgacttatgtttgaacgcttaatctttatacttagtgtcattatatttttcttttttattattgtatatttatgtttcattgctggaatagaactataactcttcatatctcctttgttttctcttctatttcctctctctatatatgtatcgctaatatgatatcgagagtaagatgaattcaagccacaccttttgcatatatatattgtgcacgtaatgatattatagttgttctataacatgagatgatataaatntatgaataaatgttattctacaaatggtttatcatataacatttcgatttaaacatattgagagtatattccatgcatataatgtctaaatttatatatcttaattagaccaaatttctacttacc

SEQ ID NO: 55766 - DNA, 378 bp, Glycine max
attcattgctcacgcttccaactttaccttgctgtatgatattatagtattgtttctgtttttgtaagctgagatcaggagaattagatttaagatttgacagattagtagtttttttgtggttaagcataatgggagtaattgttgtgcaagggtgtattctgtgaacatatatgcggatcgagggaaagtgatggtgtcagggcatgtagatccagctaaactgataaaaaagctgaaaaggtcagggaagcatgccgaactttggggtggtcatagaggcatgatctgcaacgcaaactaccccacctaccctcaattcaagaacttgcacatatataacaccaaaaggggttgcatggacaataagtttcaaaa

SEQ ID NO: 55767 - DNA, 409 bp, Glycine max
  unsure (1)..(409): unsure at all n locations
agctgtagactttacagtattatacattatatatataccgaagttnntaactctaactaaaccattgtttatgctaaacttgagataaggaaattgggaaactaatcctaagagatcacctatgacattgtgaaatattctaaggaaattgataatttgattctatgagatgcttttcctatattctcaagagaacatttttggtgacaaggtctatagattttcaattttatagtaagctttttgtattaatcccgctaagtataaatgtccaaacaaatgagtggaggttggagtattttggcttccaagtgtgtccatggtgttcgaatgagaaactattaataatttcttaaagaatctatggttcanaatcttctgtctaaattggttgttagtaagtaaactc

SEQ ID NO: 55768 - DNA, 357 bp, Glycine max
  unsure (1)..(357): unsure at all n locations
actaatagacctgtgcatcaattcatcctatatgtgctttaaaacggttaaactgagtatcgtttccatagggattttgtttgtactcaactagtgcatattcaatttgtgtgcaattaatgaacgaattgggtaaatgctaagtaaatcattttggttgtaaattaaacgatggcgcaattctagactggaactgagtaaagggaacaaacactgagcttgatgatgaaaagcaaatgcaggatttgattatttttgnggttccttnnaaacctctcttgatgtaactaggataaatattctctatttaatattattctaattattacctacatatgtgaaattactctaaccggg

SEQ ID NO: 55769 - DNA, 417 bp, Glycine max
  unsure (1)..(417): unsure at all n locations
tgcaagcttgagccataatcctgactcaccatanactctttgacccaggtgagaatgccaatccttaccctcggaagcaaaaaaaaaaaaggaaaaatgagaaggaaaatctccaatcaaaggaaaaaggaaaggaaattcccaatcaaagagtgggagaaagcaaaaagaatagaaagaaaattcccaatcaaagaatgggagaaagaaaaaaagagagaagtnaaaaagaagatagctcctggtcagagaaaccagaagatatgtgccgagaggtccttggaccagacaatatctgaacaatacagaattgtcaccaaatgaataaaaaagaaggaaaggaaaccacgacctanaatggtctcccncctttaattgccaaccaaaatcttgtgcgcnccgcactaaacaaaaaca

SEQ ID NO: 55770 - DNA, 373 bp, Glycine max
  unsure (1)..(373): unsure at all n locations
ctgtgtaatcaattacactaatttggtaatcgattaccagtgattgtttatgagtaaatcaaaagatgtaactcttcaaatggtttttgactttttcaaattggttttaagtttttctaaaagtcataactcttctaaatggttctcttgaccagacatgaagagtctataaaagcaaggctttgatttgcttttcaatacacttttccaatcaatcttatacaatcctttacaagccttgaatctctttgaacttcttcttctttgtgccaaaagctntccaaagttttctggttttctaaaccttgaaaacttatgctattcattcttttcatctcttctccctttgccaaaaaagaattcgctaaggact

SEQ ID NO: 55771 - DNA, 376 bp, Glycine max
  unsure (1)..(376): unsure at all n locations
tcgcctttcctaactcgcttttgagagcttggacctcttcgtcctcttccggtgcttcaaaactctcttcgctgacgacttttaacttggcgagccaatctaaacctcgtatatgaactttcagccattcatggtacccaccaatgatgccattacgaatgcccctaagttcttgatctttccctaacggggtttcccatgccttatggattctttgtatagcctcgaaattctgtgcgccgaaatccctaacaacgaaaggagacatgctttcttccgtcggtgctcccctcatggggtaccctagttgtcttatatcnagcgcgggattgtagttaatacaacccctcgttcctattagtggaatgtttgggta

SEQ ID NO: 55772 - DNA, 256 bp, Glycine max
agctcgcctattcgatgcagcagtaatgatggtccgagttatgttggggaacggatacaaaccccgtatgggttgaggcaaagacaactgcggcataactagcttgataaatgccaaaggatatcatgggaagtatggtttatgctatatacccactcaggcggatataaagagaagcatcgcgggaagaaagagcggcggtcaaagctcgcggttgagacaagagagtgaaagaagcccgccctgccacataagt

SEQ ID NO: 55773 - DNA, 382 bp, Glycine max
  unsure (1)..(382): unsure at all n locations
tgcttgtgaatcttctatggaggctggatctttgagcttcaatggtgattttccaccatgaagatgcagcggaaggcaaaggagaagaggagaggggaggcaccatccataagggaataaggggggagcacgaaattgaaggaataaaagagggagagaagtggaactttgaagtgtgtctcataagactttcattcatcaaagttacaacaagtgttacacatgcttctatttatagactatgtagcttccttnnncagctttcttgagaaaacttccttgagaagcttctttgaaaaaacttccttgagaagctagagcttagctacacacacccctctaaaagataagctcacctcctcgagaagctagaagctagagc

SEQ ID NO: 55774 - DNA, 353 bp, Glycine max
  unsure (1)..(353): unsure at all n locations
tctccatcttctgacattatcaaactggaatataggcatagnaataagaaaacagttgttcgtgctgtagttataactgcattggtgacatttatagctgcagcattgctctttatatgctgtactcggcatcgtaagactggccatttcagactcaatgatgataggcctcttcttagctngagcatgagtgactanctctgtggtatgtatcatatgaccattcattcataccttgntaataagtttttactagtcttgacaaagttgaattttatcctacaggtccttccagttattcgttcggaaattcaataagaggggagaaagttgagtttcagtcatcaagtaat

SEQ ID NO: 55775 - DNA, 382 bp, Glycine max
ttcatttatgatcaccatggacagaccagaatatgtttggctacagacatggcaatggattgcagatgatatcacattcaatcaaagaaaacaaggtcattttatatattcgaaataattattgtttactcataatcattatgtttcttattttactaatcacaggtattcgccttactgtaaaggaaacaatccatttatgcttgactgagattgagaatatgttacaagccaacagaatgaacttgcgaaattttccatccatgccatacccaatatgatatgctcgcaaccaacaacataataatctgatccataatgaaatggtatatgacaaagaaatgctatcagaacaatacaacacatcataccaattgctcac

SEQ ID NO: 55776 - DNA, 369 bp, Glycine max
  unsure (1)..(369): unsure at all n locations
tcgttgcaagccagcggttggaggagaaggctggatggtgaagttgatttgtggagtgcataatcatgaattggtcaagtcattagttggacatccatatgcggggcaattgactaaagctgaaaaaacacttattgctgatatgacgaagtccatggcgaagccaagaaacattttgctaactctgaaggaacataatgctaatagttgtacgaccattaaacagatatacaatgtaagacgngnntnnnggtcttccataagaggaaacgatcttgaaatgcaacatctgatgaagcttcttgaacgtgatcagtatattcattggcacataataaaggatgaagacgtggttcgtgatatcttttg

SEQ ID NO: 55777 - DNA, 315 bp, Glycine max
  unsure (1)..(315): unsure at all n locations
cgggcttaaaactattggggtgacgacttttaacttggcgagccaatctaaaccttgtatatgaacttttagccattcatggtacccaacaatgatgccattacgaatgcccctaagttcttgatctttacctaacggggtttcccatgccttatggaatctttgtatagccttgaaattctgtgcgccgaaatccctcanaaggaaaggacacatgctttcttacataggagctcccctaatggggtaccctatttgtcttatatcnaacncnggattnnngttaatacaactccctctatctattaatggaat

SEQ ID NO: 55778 - DNA, 330 bp, Glycine max
  unsure (1)..(330): unsure at all n locations
gcaagctttacaanaaggtttattaagtnaagttgtattatggaagtaaccattctgcanaattggggcataagatgaatcgagtcacatcactgcttcgtntactggcaaacatatttatgattatngatgtccttgttacttccagtttcaccttgacaaagatgtcatggaccatgttgaanatctaaattgattcaaccccatatcctgcgtaaaaattcgcaatacttcgacttgtcatcattcgcatgcatccatgcttttcataggttgattgctcattgcattctctccttgaagaataaaataaaataaaatgaacttatc

SEQ ID NO: 55779 - DNA, 373 bp, Glycine max
  unsure (1)..(373): unsure at all n locations
tctatataagctgaaccattttatcaataaactcaagttgagttttatttagaaaattagagtttttctcttttatcttagtgagagtgattctcctaaattcttgagtgattcaagaacaccctggctgtatcaaaggactttcacaacctttgtgtgttgccctcgctggaaagagtgagtctttccttcctttcatcttcacccttgttctttcaaaccacaattccataatatccacctntannnncaattatctcgtggccgtaactcccattttacgcactcaaattaantgattcttgagcctaaattgactttcaaaacgagacctttcacctcgttttggaatcacctcatttggagccctgta

SEQ ID NO: 55780 - DNA, 293 bp, Glycine max
  unsure (1)..(293): unsure at all n locations
cctatgtntaatttgatggtgcataatcaattattctttgatagataaggtgcacatgttaagtntgctttcctctacaaattntatagtaattattttgagaagtgacaactaataataataatcaaagaattggatcatgtgaaggggtttagaagtagtatgggtttgattccatagagggaggatgaacttgtggtaaaagagaagggttactagtgaataatatttgattcttaaacattanagtagcatgctagcataggcattctataattcctaatggcttaatt

SEQ ID NO: 55781 - DNA, 419 bp, Glycine max
  unsure (1)..(419): unsure at all n locations
tgactctatcaaattgtaaccttgtgcctgcttctttgttccctaggttcgtaccttacattgctgctattgacacaagggtgtgttgttttgtttttatcgttgagaagtaattaaggtacgtacaaatgggtaagaagcttgatgctctccttggtagaaccttcaaggtatcaaagttcaaggctattgttaaccttgccatctcacgcctagctgttctcaagaaccagcgccaggctcgccttagacatgcccgttctgatgtccttgaactcctccaacttggncnnnccgaacgcgcttcacttcgagtaagatattatacatgtttgttgtcttgtctctcaaaaacaatttttaaaatttaatttattttcactgatggtgtaaacaaaattatactagcaatcaatcag

SEQ ID NO: 55782 - DNA, 437 bp, Glycine max
  unsure (1)..(437): unsure at all n locations
tgcagctgaagatcttagtggggaaagaataggagagagaagagacggttatcacgaaattgaatgaagaaaaaaagggagagaagttgaactttgagttgtgtctcacaagactctcattcatcatagttacaacaagtgttacacatgcttctatttatagactaggtagcttccttgagaagctntcttgagaaaacttccttgagaagcttctttgagaaaactttcttgagaagctagagcttagctacacacacccctctcataactaagctcacctccttgagaagcttccttaagaagattcctaaagaagctagagcttatctacacatacctctctaatagctaagctcacctccttgagatgagaagctagagcatagctacacaccccctattatagctaagctcacccccatgacaagaaacat

SEQ ID NO: 55783 - DNA, 388 bp, Glycine max
  unsure (1)..(388): unsure at all n locations
ttgtgaaggaagatatcctcaggaagctacctaatctataaatagaaacatgtgtttcacttgttgtaactctgatgaacgaaagtcttatgagatacacttcaaagttccacttatctccctcttttattccttcaatttcgtgctccccccttctctctttcttttcctccattaaagcatcctcttcaagcttcttatccaaggcaattcttggtggtgaagctccttcttccttggcttattccctagtggatggtgcctcccctntnntacccgcctttgccttccgctgcatctacatggtgaaaaatcaccattgaaggaccttattgtanntcaaaaaaccanccttcttanaancttcacaagcaagcttcgtatcacc

SEQ ID NO: 55784 - DNA, 436 bp, Glycine max
  unsure (1)..(436): unsure at all n locations
tcactcctacatttcatctctagcatgcatcttctttctttacccactcctcacgtttggttntttcggagaanaacaccataactaaacgcgccgcaagggatccctatcgcaccagatccaaatctagaacgatgggtgatcaagaggagacgcaagaacagatgaaagccgacatgtcggctctgaaagaacaaatggcctccatgatggaggccatgttaagtatgaagcagctcatagagaaaaacgcggccaccgccgccgctgccagttcggctgccgaagcagacccgactctcttggaactacgcaccatcctccctcaaacatagtaggacggggaagggacacactgnngcacgatggcagccctcacctgggatacaaccgagcggcttacccttatggattgccgccaactatcaccacccgt

SEQ ID NO: 55785 - DNA, 415 bp, Glycine max
  unsure (1)..(415): unsure at all n locations
tatcgtatactcacgcttgcatttggagaggttccatcaaccgccctaattccttgatgctggtggtatctaggcctttaaccttgacttggtaaaacctcttgccggtttgattagtccccatgcttactaaagtgagacaaaaagctggtgcaaatcaaaactccgatatctcatgggtgggatggatgaatgcatgaaggaatgcatatgacacagctgtattttaagaatgcgggtgcccgggacattgtctcctttttagacacaacgtntangggtancaaagngccccaatgtatgtatttaaaacggtgacccggaccctccattgattttgtctatagaggggatcaagacagaacccctatgcaatgcatatgcaaaaggcgcaatagcatgaaaatattcactg

SEQ ID NO: 55786 - DNA, 214 bp, Glycine max
  unsure (1)..(214): unsure at all n locations
tgctttgcaagctgaaggcgtgtaacccaccattntccataatataacacagtaatatgtctactatcattgttattatttctttcttcggcattgagagaaacacttgggctgccaggtctctccacctttgggcgtattctttgaaagatccatgcccttttttgcacatgttctgtaattgcatcctatccgaagtcattatactgacact

SEQ ID NO: 55787 - DNA, 380 bp, Glycine max
  unsure (1)..(380): unsure at all n locations
tctccttctttntcctataaataggggaaggagggaagaacaaaaatgttcaaccctcctggtatctgagaatcacttaaaattagtgagaaaaattgtttccatgaagaaaatccaagccgaggcgcttccgtaacgcttccgtgacgtttccgtgagtgatttcgcgaagatttccaactgttcttcgtcgatcttcattcgttcttcggtcttcaaccgggaagttctcctattttcactttgcaattnattctatgtacccctagtggtccccatttgttccgcgtgcttttattttcatttcatttactttatgtacccccttttgacgtgctttagtcatttatttaagttattntctcgcctaatcaaaaata

SEQ ID NO: 55788 - DNA, 447 bp, Glycine max
  unsure (1)..(447): unsure at all n locations
agctntaagataagtcaaacgacaattacttttgactcggatgtccgattgagccctgtaatatatcgagacgctcgaaattganaacggaacctctaagaaaagtcaaacgacaataacgtttaactcggatgtccgattgagtcccgtaatatatggagacgctcataattganaactgaagctctgagcaaattcaaacgacaattaactttgactcagatgtccgattgtgtcccgtatgatatcgagacgctcgtaattgaaaacggaagctctgagaaaaatctaacgacaataatcttttactcggatgttcgatcgagccctgtattatatcgagacgctcgaaatgaaaacggaagctctatgaaaagtcaacgacataactttaactcgatgtcgatgagcctgtaatatatcaaccttaaattgaaacgagcttaa

SEQ ID NO: 55789 - DNA, 325 bp, Glycine max
  unsure (1)..(325): unsure at all n locations
tcagttttcaattacgagcgtctcgatatattacgggactcaatcagacatccgagtcaaaagttattgtcatttgacatttcatagagcttccattttcaattccgagcgtctcgatatattaaagggctcaatcggacattcgagttaaaagttattgtcgtttgatttttctaagagcttccgtgttcaatttcgagcgtctcgatatactatgggacacaatcggacatccgattcaaaagttattgtnnnccgacatctgctcacagcttcagtatataattacgagcgtctggatatattactgnnctcaattnnacat

SEQ ID NO: 55790 - DNA, 475 bp, Glycine max
  unsure (1)..(475): unsure at all n locations
agcttatcaatggcgttcttgaattacatatggaacaacctgaaccaagcattcatggcttggattgcatcacatttatcactaccgctgccgataattatcaactaacatgggcaatgtgacaccctntaccccanaagatntatctaaataatagttgtggaaaatgatataaaatgcacatgtganaataacaaattttcaaaatattttccacaatttttcanaaaaaaaaataattaaatagtnntttttattaaaaaaacaattaatagaacctganttgagttttgggacaatgtaaaaaagggagttcagttggaattgatagtcattatattcaatgtcaaaaaaatagtcacaagagatagtatttgtcaagaaagataatataagatttgaaactacatgtctagagcgactaattacccaatggctatggacttatcttacnggtagcccaaaagactcatca

SEQ ID NO: 55791 - DNA, 383 bp, Glycine max
  unsure (1)..(383): unsure at all n locations
tattggattatggggcacccgtcatatgtggtactaggtggcgatcgggcaatggtgcaaatcaactctcccacttccacaaatcaaacataaacacaccatccccagttgcccacctttcaactaagctcacgcactcctacgtagcccttatcctcgttcctctcagcaccgggtccccatcaacccctccaagcttccacaatatccaagcaattcaattccaaatatcatgaaactaccctagaccaataaaacagggtagaggcagaaaactctgcctaaaacacattcaaataccacagctttccttactcatataccccantaacattctctttgttccgatttgttaaccgttggattgccttgaaaattttact

SEQ ID NO: 55792 - DNA, 433 bp, Glycine max
  unsure (1)..(433): unsure at all n locations
atccttagagacacccgcggcatgcaagctntattgatatgaagaattcataatacaatgtttactctaacatactagtgagaaaataaggataaaatctgtgaatntacctcttttaatgaagtaataagtaaaactggttacagcgatgtctntattntagcactctcttcatcactagcatggtgtaacctgagcatgcacttgtgtgcacatattcaaaatgtggtttgaaaaaaatatcactaagaatgtacgaacacatctttantttaacaaaagaaaaaataccagatatcttgctatgaatatacattgaagaatcaaagttgctagctagtntgttggaatctatggnggaattgctgaactatcttncattggngcatttgaacatctatcatgaacttncatttgagactttggtatcgat

SEQ ID NO: 55793 - DNA, 234 bp, Glycine max
acacttgagtctcagcttctgtgaagttcttcctatgtctgtaaatagcctacctcctagagagctggagaagaagaatgcggtatgaacctggggtgatgcacactaacgtgcctctgctttgctcagacaaaagcttactaaggcacctgttctatcttatgctgacttttataaaactattgaactagaatgtgattcctctagaattgcagttggacctgtattgttaca

SEQ ID NO: 55794 - DNA, 352 bp, Glycine max
  unsure (1)..(352): unsure at all n locations
agctngcatattatatatatgtgtgttggctcatagacgtgtacttcaaccttagaagcatgcttctaaagtcttaaacagaacccacacttggttgtctctntaaaaactgatcttctacctcagataataatgaatacaactatgaacatgatggagagaagataatcatatgaaatatgtagagatatcatcaatcgatgtcatgctgaaaacacagaaccaccacgttttgattataatatctaataaagtaacatatatatgcacattaacttaactgtccaaataggagagcagagaggcagttttgcacattcttgttgtcttgagtgcaccacgtgtgatgtca

SEQ ID NO: 55795 - DNA, 381 bp, Glycine max
  unsure (1)..(381): unsure at all n locations
cgcgctcggtttattcgacgctcgacagattcttagcctttactgctacacaaggcaggctgaaacagacgtatgcaattgttaacaatcgtagaaaaaaagcatattgatgcggaggttctacacacaaatctttttaatgtgatgaatggataaatacaacaagagactgataccacagagatcgactgctaggactcattaacgctatgactttcgactgctctagcgatacagctgttctttgattacannnnnaaccaccagcctatgttatcaatcctgactttaccctccantaacattattaaatccttnataaccacggattatctacaacctgcttatcctttcgggataaatcattctaactacctctga

SEQ ID NO: 55796 - DNA, 324 bp, Glycine max
  unsure (1)..(324): unsure at all n locations
tggacttgatgggggctatggaagttgaaatgtttggaggaaagaagtatgantatgttggtgtggatgattttttnagatttaaatgtgtttattttattanatagaaattataaanntttgaagtatttaaagagtagtgttttataatttaaagaaaaaaataatgttttatgaagagaagtaggaagtacttttgcagtgnannnnnnaccggcccgcctactgaattctgcacatctntaggcatcactcattaattctcttcnnccatcataccacatcaaaatggcatagttgatagggaaatacatggactttgca

SEQ ID NO: 55797 - DNA, 438 bp, Glycine max
  unsure (1)..(438): unsure at all n locations
agcttgtngcattaacattggattanaantaaattctgcgattgcaagatagaatagaacaattgtattttatattatgggctgcatgtcaccctttactttgcatttcagttaactgcaatacttggtgagatgggactgaatattcaagaagctcatgcatcttccaccactgatggatattctctggatgtctttgttgctgagggatggcctaatgaggtaggacaaaagtaactaaacaatgacctcataaaatcactagccagtgtcttgtgaaacagaaagaccttatttatttatgccttgatcaatatcttgctatgagtatggtttgcgattttgacttcgaaaaagaatataatactttaacttctcacctctcatggatgttaccctttatttcagagaaatatggatattatgttgctctgggca

SEQ ID NO: 55798 - DNA, 327 bp, Glycine max
  unsure (1)..(327): unsure at all n locations
atcaaatctagataagacaagatatagatgatataatatctagatgagatcaaatctaaataatatctagataagataagataagatctaattctgtagaataaaattgtctgccctcttcaagtccaagcccaattntgtattcaagcccaatgattcattaattcttgaaattagattaaaaacatcaaattagctgaatgggcccaaataataaaactgcctaattaatttgacaattgagactaatcantacttaaaatggtgcgaaaagggttaagatataggagaaaataatggcacatcagcactctagaacaaaacata

SEQ ID NO: 55799 - DNA, 383 bp, Glycine max
gcttgtctcagcgtttatgcgagacggagaccaacatgctagctatcatcgtttagtaccaagaagagttaggtctagctacggcccacgagcataggatcgcggacgagtatgctcaagtatacgcggaaaaagaggctagaggaagggtgatcgactctttacaccaagaggcaaccatgtggatggatcgatttgctcttaccttgaacgggagtcaagaacttccccgcttgttagccaaggccaaggcgatggcagacacctactccgcccccgaagagattcatgggcttctcggttattgtcagcatatgatagacttaatggcccacataattagaaatcgttaggaaacttgtatggtctctcagaccttgact

SEQ ID NO: 55800 - DNA, 456 bp, Glycine max
  unsure (1)..(456): unsure at all n locations
cttatgaattaaaantaataaaaaatatattatataaattaatgttgacaaaacatattttagctcattggtattgcaagaattgtcggtgtcgctgcttcgaagcaaacggaaaaaaagtgtagccaaagctgcaagtcatctggagatgggtgatggactgcccatttctctttctagagtttaacaactctgacgctttctatctgaaaatcctactttaaatttattaagtatatcatatcatcaagggataaaatgattttttttttacatatcacagttgtaaaaaaaatattatttataaaaaaaaagttgtaataaatttggcagttttatacatatattagaaaagctattttaactaagagcattttaaaagtgttgttaaggaaaatactttaatatcttattttgacataagattttgggaagattctaaatttattttttatt

SEQ ID NO: 55801 - DNA, 426 bp, Glycine max
cttgtgtgtaatcgattaccagacatgaaaattcaaatttcaaatctgaagagtcacaactcttcagaaactaactgtgtaatcgattacaacaattatgtaatcaattaccagtaaggaattttcgaaaataactcccaagagtcacaactgttcaagaagtttttgaatggctatcaaaggtctataaataggtgacttgggacatgaaattttgaaaaagagaattttcctgaacaaattgtcttatcctctcaataccaaattgtcttataactctcaaaaagaattccttggtcaaaacacttgcaaatttaataaggaatcttgagtgatcttcaattgtaatatttttctcttatagagagaattcttcttcttcttcttattcaaagagattgattaagggatcgagagtctctttgt

SEQ ID NO: 55802 - DNA, 263 bp, Glycine max
caccaaaatcgagggattatttgaatttacttgggattgaaattaaaatttgtgagccatattttggaaccaaaatttcactaattatgattagtggaatttagttatgggtcagtccactaatccaagatcaagccaagattttcactaagtgtgctttggtgtctgagggcatgtaagcatgaaagacatgcacaagtgtgacttatgatgtggaatggggtgtagcaagcaatgtcacatgcccctctaaattaaatgga

SEQ ID NO: 55803 - DNA, 428 bp, Glycine max
  unsure (1)..(428): unsure at all n locations
atgtcttcccttccatgtntggaaattactgatcgctnttaaaatgttgatctaccaaaatcctgagactaatttacatggcaccaaaatactgtcacaaacaggctttagtgacagaaatggattgcctcaccccctgcctgagaaaacaactgccacatataaaacataactgtcgtacatgccgataaaaaaaactctcgtacacaaattgtaactgttttattttttttttaagataatttctcattcaaaataagaaatacattaaattaataagatattttttattgataagaataaaaaaatactatttaaaatttacaataagttacttgtcaatttatcatgtttaaccaattgaactagaataataagataatattaaaaataaaattaaagagttaagatgcgtatatttaatatct

SEQ ID NO: 55804 - DNA, 348 bp, Glycine max
tgaagcttgttaagcatatttattaccaacatgggcattgcctgagttctggtaaaagcaaatgaatgaacgctttacaagtaaacaaacagtagagacacacaacaatgtgaaagctagggtagggacaatgtagtagattgccaggtatttatgatgagacatagatcaagcattaaaaagaaaagaacaaaaaatgattatgcccatttatcacaatgaaataaataagaatgagtcaagatggcttcatccatattctgtattatcagaacaacaaagtgtttgatagctgatccacaccacatgagactaaccagtgtgtcatacaatatgataatctacctt

SEQ ID NO: 55805 - DNA, 430 bp, Glycine max
  unsure (1)..(430): unsure at all n locations
aggtcataaacgcgcccgnnnattatatgtctttctttggtggccttaagcaagcttttattgctagtggaagtgaggattcacaggtatgaatcttcaatcatcattgatcaaaatgggaaaatattcgccagtgtaattttttatatattgcaaattgaaagcctcgatgtttatatgtctctgttaaatgttttttatttgctaattttttattgctgtctcaataatttgctaagaaaagatcaacatgcacttgatgcatgctatcgaggatcactaaaatattggcataaaagacccatgaaatggttctttgtggtctgatttactggacttgaatgaattgaactacaaattgttataatgttcaagagttaccggcttctgcaatattattctagtttatcttgataaaactacgaacatc

SEQ ID NO: 55806 - DNA, 393 bp, Glycine max
  unsure (1)..(393): unsure at all n locations
tgtcttctgagnactgggatcaggtgtttatgctacaattcattaattgaattcaaatatagcctaactgctccttgtattcttttaattggggtgatcatgacatttacattctgtatgaaatgagatttacaattaaaataagcgatgttgattggtgcagatgagtatatcttgcttccctacttcttcagttattcctctccatgaccatcctgtgatgactgtatttagcaaacttctctatggctctttacatgtgaaagcttatgactgggatgagcctccctgcatcatagaaagcaaagaaccaggatatgctcaaggtctgacttgtatatttcatttacttatgagttgactttcttattctctcccattctttcatttact

SEQ ID NO: 55807 - DNA, 281 bp, Glycine max
  unsure (1)..(281): unsure at all n locations
agtcgagctgcggcatgcaagcttaaccaatcaatctttctaataagactctttatagaccagaggcctaacgagtntatagccaataccacagagtatcaaaacacacaagtgtgagatccaaatactacaagataagaaaagcgctgattataatgagcgaagttgcatagccagaatatacggcatagaagagacatatgatgtgaaactcaaatctataaaagtggaggtggcgggggaaaatcgaaactctggcgaatggaaccgacatcctcttc

SEQ ID NO: 55808 - DNA, 401 bp, Glycine max
  unsure (1)..(401): unsure at all n locations
actaagcttccataataatgctaccactatttggggcttgctattccatgatacatgttcagaccctangaatngacatgtaccactagtactcttcctatctatttntgatccagcaaaatctgaatcagagtatcctactaggttgcataaagaattcttaggataccataatccttaactaaatgttcctaataaatatcttataattctttttactgccattaaatgtgaaaactttggatctgattgaaatcttgcacacatgcatacactaaacataatgtctggcctacttgcagataagtaaagtagagatccaatcatacctctgtattgctttggatcaacaggttgaccggattcatctttgtcaagataacaactcgtattcatagggg

SEQ ID NO: 55809 - DNA, 248 bp, Glycine max
  unsure (1)..(248): unsure at all n locations
atctagacattacaagacgcatcctgaagcacatgtacacacccgaccagaccaccgctaaaccctctaaactccacatgagcatatgccccgcatcaagaaggcgcgtgacagaacccacccaaagccacctactcaatgatgaaggggagagaaagagcntccagcctctacttcaacaaagaaatacctaacgaaagggcagaaggaatagccagacaactacccaagaaactagaagcctatcc

SEQ ID NO: 55810 - DNA, 402 bp, Glycine max
  unsure (1)..(402): unsure at all n locations
ntaaattgtacgtatcacatgctnttattngactattatttatgattataatagggtaannaaattaattgtaggttgttgaactatttaattttatttatttatttaggtctccaaattataaacaaaaagtaaaattgtaactgagtatttgattttataaaatatttgtatccgagttccttatgttcttaaaacctctacaaattgtcattttttgacagtttcaagctgacatttaaattattttcagggactcaattataaaattttatataattaaggaaccattatatgtcagctaactttaaaatattttaaagattaatttaatctcatcttaaatctttggtgcttaactttttcatacccgtttcttccacaggtgaccatgaatttata

SEQ ID NO: 55811 - DNA, 361 bp, Glycine max
  unsure (1)..(361): unsure at all n locations
tcttgagatgcctntcgattatctcgntagaagccttggtttatcctattatctcattagaaacatcgatattgaaatgatcaatgaatcttaaggtcaagactacatatggaaatttataatccaccactcgacaacttttccacatgatatcttcaatcaacagtacccaattcatttgaataccttatttcaacccatatataatctgcaagtcatcatcggtgacttgagcatgattgctagatcttggtgccagaatatatgtaacaatgtatattaacattntgtctttccgttattagaccaccaacacccaatttgtcccttaaaattcttttcgagtcaagaagcatacctc

SEQ ID NO: 55812 - DNA, 306 bp, Glycine max
  unsure (1)..(306): unsure at all n locations
agctngctctanatntacattgatgtttgtatttattggaggaggttgtatgccatttttgntttaagggtagcatttcttggtaaaactaactttccaaatgtttgccttcgcaggaatggacccgaggaagcttgcctcaaagaggtccaagaaggacaaggcggccgaaggaactagttccactccggagtacgacagttaccgctttaggagcgctgtacaccagcagcgcttcgaggccatcaagggatggtcgtttctccgggagcgacgcgtncagctcatggacgacgagtatactga

SEQ ID NO: 55813 - DNA, 285 bp, Glycine max
  unsure (1)..(285): unsure at all n locations
ngcttctacactggaggactgccacggngtacattaacgttttctttggaggctacgtcactagaagagtacttagcatactagtaaatttgtctattgaggcaattgctctagccattatttgtgagcattgtggcacaaagttcatgaatagttggggagatgaattggaagaccactttgggcactccttgtggggaaccaactgggctaagacctcaagacattatggaaccttattgagcagggcaaaatatttgagtagatagtcaaaaaggcaatcat

SEQ ID NO: 55814 - DNA, 424 bp, Glycine max
  unsure (1)..(424): unsure at all n locations
actcagcttgagccaaatccgactaccattaccttttccagtgttgtaatgtcaatccttaccctcgaaagcgaanagaataaaagggaaatttccaatcaaagaaaaggaaagaaggaagatttccaatcagggagaaagcaaaaagaaaagaaagaatattcccaatcaaagaatgggagaaagtaaaaaaggaagaagaagaaggagagaaagctcctgatcagggatcgaaggaaaacagaagaaatgtgcagaaaggtctttggaccggacaatatctgaacaatacagaattgtcaccaaatgaacaaaaagaaggaaaggaaaccacgacctanaatggtcttctccctttgattaccaaccaaaatcccgtgcgctacaactttntcgccccgcactaaacaaaaacagaaacatg

SEQ ID NO: 55815 - DNA, 283 bp, Glycine max
ctatgagaatatattcatgggaagaaagagcttcaccaccaagatgagccttggattaaaagcttatagaggatgcttctttggaggaaattaatgagggagagaatgagagaggggggagctctaaattgaaggaagacaaaggagagactctgactttgagttgtgtccacaacactctcatcatcaaagttacaaccagtgtacacatgcttttatttatagactaagaagcttccttgagaagctttcttgagagaactctcttgagaagcttctttga

SEQ ID NO: 55816 - DNA, 349 bp, Glycine max
tcaagaatcaagattcaagtttcaggaatcattattcaagtatattcaagatcaagattcaagactcaagattcaagagacaagagaagactcaatcaagataagtactaaatttttttttaaaaacaatgagtagcacaagaagttttacaaaatcattaccaaagatttttactctctggtaatcgattaccagaaggtagtaatcaattaccagtgttttaaaatgttaagatttcaaatttcaacagttttaaatcattttaaacttgtgtcacaatacttgtaatcgattaacagtgtctctaaacattttaattttcaaaattcataatgataagtcacattt

SEQ ID NO: 55817 - DNA, 230 bp, Glycine max
  unsure (1)..(230): unsure at all n locations
ttgaccgttgggatctgctaaaaatgtctagaacataagatatactaccttttccgtgacagcagaaactagcactacacaaccatttntttctgcataataggcagatttgctgcacaanttgatagctttggtgcataattntgcagattttcgaaatccaacttacatgcatnccaattcactcaaatgggatcctacaagtcctaaatcatgtataaatcatgttc

SEQ ID NO: 55818 - DNA, 406 bp, Glycine max
  unsure (1)..(406): unsure at all n locations
tgcagcagtaatgatggcccgagntatgttgttgaactgtgttcgaacccggaaggggtttaggcaaagacaacgacggcgtaactagcctgataaatgccaaaggaaatcgtgggaagtatgggttaggctataagcccactcaggcatatataaagagaagcatcgcgggaaggaagagcggtagtaaaagctcgcagttgagacaagaaggtgaaggaagcccaccctgccacataagtaggagctttataagcgcgggtcaaggggacgaaggtcaagtggtcgcgatatacaaagatgatgttccgagtacattggatttggtacgaccatgccctcctgatttccacgctgggaaatggcgagtggaggaacgccctggcatttacgcaacgagcataat

SEQ ID NO: 55819 - DNA, 310 bp, Glycine max
  unsure (1)..(310): unsure at all n locations
acagaattgagacttaaccttccaactctcaaagcctcactaattttgcactcataacatcacattctcactttctaaccctagggntaactctaccattcatctgtaacaggtgtgcataagcaatttcagcatataacatacaaacatatcacaaaaccctaaaacagaaggggtatgtctaactcatccaaacatggcaatttcaacaagctttcaacaaatgtcttcacaaataatcatcacacagcagaaacctatgaagactacccattatatgtccccaaccccatacccacgaaaataaagg

SEQ ID NO: 55820 - DNA, 379 bp, Glycine max
  unsure (1)..(379): unsure at all n locations
ctaatctataaggtgaaatataatttgtagttaagttaaatctttatgtcttatagtatgtgggggggacgaaagtatattacgataaagcaaaatgtggtagagaactcattnttagaattatctcaatctaacaatcagagatttatctctaagtggggcttcattatttaatataattatttattattattatataataataaagaatatgattaaaaactaaagataaactagaaaataaaaataaaaaatacaattcctgtttctacccattttccttatgtcatgttaaaaatatgattntttttaataagaatgtatcattatggtaaaactttctttactgcaatttcatatataggagtagtggaatata

SEQ ID NO: 55821 - DNA, 358 bp, Glycine max
  unsure (1)..(358): unsure at all n locations
gcttcaccggatgatgccgatcgaatcatttctaatcgacaacatccaattgttattcatgtatngaatagaataaacaatggccggtgtcggtccttatatggcctcgactgatatctttcacccgacattgcgctatttcttttacaaatgctggccgataattgttttttatttaccgtagaagaagattgttgttttggtgttgcctaaataaattacaacgcaagtcggcttggttttttcgtatgagctcaaccgagtgttcgttcccaccgacactggcatgttgatcttctcatttacgaggccaagaaaacgttggcccacctcggccaaaacataaaaaaaacattat

SEQ ID NO: 55822 - DNA, 405 bp, Glycine max
  unsure (1)..(405): unsure at all n locations
ctgcacttttagaatctctaaagaacttttcatgagtgttttagtatgagagggngtgtgaactaactctacttcctcaggaagtttctcaagaaacttctcaaggaaagtttctcaaaaaacttctcaagaaactacctaatctataaatagaaacatgtgttacacttcttgtgagagtcttgtgagacatacttcaaagttccaacttctctacctcttttattccttcaatttcgtgctcccccctctctctttctctccctctttcttttcctccatagaagcatcctctccaagcttcttatncaaggctcatcttggtggtgaagctccttctttcatggctttattcctagnggatggcgcctcctctcacctcttctcctttgttttcgctgcatc

SEQ ID NO: 55823 - DNA, 398 bp, Glycine max
  unsure (1)..(398): unsure at all n locations
caccgacaaaaggatcgaagtgggtctgagattatgataanttgattattcagctntgatgaataggaagcctggcgcatatagagagaataagaaggagggaggaacccatgctctaactttcattcccagatgactaaatttcccaccaactcaacaatatcagcccttctcattacccatcaccctatcagccaagaacacccaattatccacaaaggccacccctaaattagccacaaagctcgcctgccgcacatctgataccaaacaccacccttaacacgaaccaaaacaccaaccatggaaggaattttctagaanagaagcctatagaattcaccccaattctggtgttgtatgctaacttactcctatatctactcaataatgcaatg

SEQ ID NO: 55824 - DNA, 365 bp, Glycine max
  unsure (1)..(365): unsure at all n locations
gcttctcgggccatctctgcgagaactatatttagaagtttttctacaagattatgcttatcttaacgcagaaaatgtcatgctaatctctctgattctagaatgaactgacccctcacctagaaacagctgaaacacgtatgtgtggaatatcctactatctatatcaacatagaggccatccaacacattctaattgtcatacatatatgcatctgaaaagaacatacattctcacgcccaaggcattgcgtcaaaactcacacttaatttatatcctaaacattcgctatctacaaactacctacgtatggttgaaatatatatcatacanatttgtattggctcactcacatttatcatat

SEQ ID NO: 55825 - DNA, 426 bp, Glycine max
ccagatctgatatcgaaggacttggcaactgccttcattatgcagttccagtactatacggatatggctcccgatcggaaccagcttcagagtatgactaagagagagcatgagtccattaatgaatatgcccaaagatggagagatcttgcagcccaagtcgtaccgcccatgacggagagagagatgatcacaattatggtagatacgttacccatgttctactatgaaaagctgataggctacatgccagctaactttgcggatctcgtcttcgccggagaaaggattgaatccggactacgaaaaggcaagttcaaatatgcttccaatgtggcccccaacatcaacagaatagcctcagttgtggacgcgaggaataaggaaggagacgcccacgtggtcaccaccgccccgatgtggatg

SEQ ID NO: 55826 - DNA, 402 bp, Glycine max
  unsure (1)..(402): unsure at all n locations
acctgcggcatgcaagctagctgccacctcgttttttctttgtcttatcttctacnaccggagaaacaattgaggctctataacttgtactaatggatgaactcacctctgtggctgctgacttattcctttgcgaatttgaatcaatcctgctgaagtactgaatatctcgcattatgagtgatgcaactgtgcctcgggttcctatttccactggaggaaattcagccttatcttntgtgtcatttgagtcaagggtagcggatttgagcatgcttctgttggttggtgttgtggagaaagcaaaatcttgtgatttaagggtgcattgtgagtttgctctagaggggaaactgcacggactctgaagcattntttctagtacaaaagatgcgggttcac

SEQ ID NO: 55827 - DNA, 379 bp, Glycine max
gatctataagacaaagaatcaaacaagaggatcgactgcgcaatactttgcctactaacttttatgttggattctgataaaaatttatgtttatttggtgctgcattaattcaatattttgatcctctaatttattattttggttcaatgtaatcttctattttttttcaatctgatcttttaatttttaaaattaattcaatttaatattgtaattttttttttcaatttattcctctaatttttaaaatcgactgattttctttaaaaaaatatacattttataacgttttaaaatcggtgatgttgaaccatcataaaacataatttctgaagaatcaaattaaatctaaataataaattaaacttacaaaatact

SEQ ID NO: 55828 - DNA, 439 bp, Glycine max
  unsure (1)..(439): unsure at all n locations
agcaagcttcactnnttctttgtataaccagattattatatgcattcaatcnncattcctccagctccaagagttgtaactttcttctttcccctgatatagcctcatcaaaattcagaaatttcaaagcccggtatgccttaagctctatttccaccggtaagtggcaggcttttccataaacaatttggaacagagacaggcctataggggtcttgaagacagttctgtaggcccatagtgcatcatccaagttgcttgaccagtccttccaagagagaagccacagtttctccaatattttcttcaattccctagtggaaacttcagcttggccattttttttgtgggtgataaggagaggccactntgtgtgtggcatgatagtggcctatcaccttttgcatgtagctggtagcaaaataagagccgccatcac

SEQ ID NO: 55829 - DNA, 361 bp, Glycine max
ataaactgaattatactagcaaaggaatggtaagagatgttaaagttatatttatcaattatcaagactaagtacattatctcagatcacaccttcttgcttattcttatagggaaatgatcattttatggcaacataagtaattgaagccgtaaaggatacacctctactgccaattcagtctgggaaagacctgaactaaataactttccttgccaatgtaggtcaccgccatacctagtcaaggggaacaaagttaggcaactcattaaagcctagttaaagggttagtcatctaagttcgtgtaatatatcattaatataatatatcacttattacatcttagatgaactatatatg

SEQ ID NO: 55830 - DNA, 358 bp, Glycine max
  unsure (1)..(358): unsure at all n locations
agcttccttaaaactatgaggggggctactactctcctccgaagctaagcccaactatacaangctaanaccctatactactanggtacccttaacttgaactcttaatttgtnaggtaccctacaaacctaaaatggcaaaaatacaatgccccaaaagaaggaaaacctattctaatatttaaaaagaaaaatggactcaaccttggtcaatgggattagaaatctatcctgaggttcatgagaaccatangaacttcttcagcagctctagcccaatccttggtcaatgggatcagaaatctatcctaaggtgtcataccctaatttcgccggggaatattacttgatgatatgc

SEQ ID NO: 55831 - DNA, 472 bp, Glycine max
  unsure (1)..(472): unsure at all n locations
gcgtttatgcgagacagagaccaacatgttagctatcatcgccaagnacgaagaagagttaggtctagccacggcccacgagcatagaatcgcggatgagtatgctcaagtatatgcggaaaaagaggctagaggaagggtgatcgactctttacaccaagaggcaaccatgtggatggatcggtttgctcttaccttgaacgggagtcaagaacttccccgactgttagccaaggccaaggcgatggcagacacctactccgcccccgaagagattcatgggcttctcggctattgtcagcatatgatagacttaatggcccacataattagaaatcgttaggaaacttgtatggtctctcagaccttgactagatacgaacttccttttgaaataaaatgagttggtcccatgtgtctacttccaaaagcttgtgcaaatcaagtcactcccgcatttcatctctagcat

SEQ ID NO: 55832 - DNA, 443 bp, Glycine max
  unsure (1)..(443): unsure at all n locations
tcatggtgaatgtgattcanaggtggtttgatgataacaattatgtcatattaagatgangacaaaggtgatgaacaaaaatctcatagatcaaagaacaacgcaagtgaatcaagaacaagtcaaaagttcaagaatcatgaagaattcaagactcaagaagaaagcctagaatcaagactcatgaagaaagcctagaatcaagaatcaagattcaagattcaagatctcaagaatcaagatcaagattcaagactcaagattcaagaatgaagaaaagactcaatcaagataagtattaaaaatttttttcaaaactntgaatagcacatgagtttttgacaaaacctttacctaagagtttttactctctggtaatcgattaccatattggtgtaatcgattaccagtagcaaaatgagtttgaaaaagttntcaaaact

SEQ ID NO: 55833 - DNA, 358 bp, Glycine max
  unsure (1)..(358): unsure at all n locations
agcnttgatgcaacctgttttgttaccattttatttgttgcaactagatctaccgaaataaatgaacaaaatatgatccattaatattataaacatgacataaaaaataaatatgaaaaaatgtgaaacatataacaatacacctgaaagtaataccttatgaagttccaacactagtagtcccaacatttgcagttccaacaagtcccaatattaacagtatttaaagtcaaatcaaacaattctaacaaatttgatcgattcatttcgattttgatcggatctaaacccatgacccgtacccaaatcgtacataaataattttgataagttcgaataagttttgacctaaatacat

SEQ ID NO: 55834 - DNA, 475 bp, Glycine max
  unsure (1)..(475): unsure at all n locations
agcaacacanaatctagggatcctttatcccttattttaatggatnnncaagggttaagaagtgaaattgagaatggggtaaatttggagcaaactctcacctcacacaagtctataacatcaatttaaacttgctcaaactatatttacacctaaaattccaccgaatcaaaatttgactcctcaacacccaattttaccctagaaatggctctttgttcactttggtcatttgtttttctctctagcacaggccaaactttctcataagtcctaaatgacatttcaagctaggattaactcactttaacctccaaataccactaaatccagatatggccttccaactctcaaaacctcactctgtttccactcataacaccatattctcactttctaaccctaggttaactctacccttcatctctaacaagtgtccataagcaatntcagcacatatacatcacaagcgtca

SEQ ID NO: 55835 - DNA, 349 bp, Glycine max
aataccaatctattgtgtattttttctagtatttctataagatgaatatttagtggttttccatctacatgaaagaactatctcaaagaaaaacatcagatgcaagaaagttatgcaagccaacatatctgcaaatgaaagatatgcaaagagtataatatagtgagtgtcccgatgagttcaaaacaagctcataatggatgtctcaactatgctttcaagtgagaagcttaagaaaatttgaaagaatcccatatgttgatgaagttaatgcttcttgatgaagttagtgcttccctttgaagatctcaatcttaccatgttgtaaagacatcaagaaagccttact

SEQ ID NO: 55836 - DNA, 292 bp, Glycine max
  unsure (1)..(292): unsure at all n locations
ttattattttttaaaaaaatgtctagcaaggcataaatttgaatttgaacttatgaaagaggcttaagaccttcctaataagtcttttcaacttatttcaatangtttcatgtaaaagcttatcaaaggtctggttagcttattttagtagacttcatagtcaagcttatgaataagctcttattaaagtatgtgcttaaatcagcttgtcacccaaatggtggctaattagctaatattcatttatttcatgctaccgcttcactcatgataatgtcatattggatactta

SEQ ID NO: 55837 - DNA, 311 bp, Glycine max
  unsure (1)..(311): unsure at all n locations
atagcaaaaccaaaatcaattagcatatcgtacaaatttcatgaaactaccttatagtttaaaaacagttttatcaggtcacttaagcttgctgaaaactcgtattcagcattctcaaagaagaagaaaaaatgcatcacgagaaattagccctacaatgtcacaaaaacctagacatatttcagacaatttatgttatcanttttagcagtctccggagaaacaaaatacacctgtgcagataacaaactattccagagaactcgatattgatataataactacacactaactatttcatcaaattcgcg

SEQ ID NO: 55838 - DNA, 300 bp, Glycine max
ctacaagccacattggggtaacactattgaatcgatctacatacaattattatagtaactattttctagaacatttaaggaataataacaaatacatttgcattcgtgaaagagagtctcccctggtattagacactagtagatctcaaccaggttgactctgaggcataaaagacgacctgtggggtctccttcttgcaaatgctaggatggaacctgaaacaagaaatgtctagtgacccaagctcatgtgtacatgcagagatattgatgtgcacttgcctgctgaaaagtgtctag

SEQ ID NO: 55839 - DNA, 445 bp, Glycine max
  unsure (1)..(445): unsure at all n locations
ctatatatctaatttattttttttctgttaaaantcattgtcatataattttatattacaatttaattctatattattaaaaaaataaatattattcattttaaaatggttaatttttaaaaataataattatgatacactacctaattaagagaggaagnatcttacccataatagattaaaaatatatatttgagaatttatatagaaaaagtattaatggagcattaacaatgcataattggatagatgaagtggttatttttaatttgcggacttataattntacantaaattaagtattctacacgaaaatntactccaatggtaaagttgttaaaaatgagtgattaacataattntacatataccacaatcattgaaaaatgttatttttgttataaaaattgtaagcaatatggttatataaacaatattatatcac

SEQ ID NO: 55840 - DNA, 394 bp, Glycine max
  unsure (1)..(394): unsure at all n locations
gcttgtaattgattacacacatactggaattgatttccagaggagttnttcaaaaatttttctcaccagtcacatcttttaccttggtccttgaatggtcatcaaaggcttatatatatgtgacttgagacacgaatttgccaagagtttttgaagaacaaaaggtcttatcctcttaacaagcaaaattgttttatcctcctacaaattccttggccaaacacttgtgattcaataaggaattatttgagtgctcanattggtcaatctatctctttcaagagagatttcttctcttcttctttattctgagaagggattaagagacttgtgtaatcgattacaggctttaaaatttgaattacaacgttctataactactggtaatcgatta

SEQ ID NO: 55841 - DNA, 476 bp, Glycine max
  unsure (1)..(476): unsure at all n locations
tgaacaccatggacagaccagaatatgtttggttatatacatgacaatgtatggtagatgatatcagattcaatcatagaaaacaaggtaattntatatatactaaataagaacttattacccgtaatcataatgtttattactatactaatcacaggtatccaacttattgaaaaagaaacaatccattaatgcttgactgaaattgaaaatatgctacaagccaacagaaaaagcctatgagattttccttccatgacatacacatacccaataggatatgcacccaacgaacaccataataaactcatccgcgatgaaatggcatatgacaaacaaatattggcagcagaattcaacagatcttaaccattgttgacaggtatataaaaanttgtacactttntatttagacccttctcaatcagaacagtgcatattactaattcttaatatgtcaatatataaatacagac

SEQ ID NO: 55842 - DNA, 258 bp, Glycine max
  unsure (1)..(258): unsure at all n locations
tcccaaactacttctgcagcctctttcatataaaatgccacttggtctgtgtagcagagtttcaaagttaggtcttcattgtntttgactctgctaacttccttcaagctcgagttcccttgctagagaattctcaagcattcgcagaatatatctttcgtgctcaaccatctgatcattgattttgcttgacatctgtcagntgaccatttncttgataattcaaggctttcctgttttgcctgttacatgaatgac

SEQ ID NO: 55843 - DNA, 423 bp, Glycine max
  unsure (1)..(423): unsure at all n locations
tcttacctcaccaatagtnnttggggttggccattcatgaatggttntcttcttttcttgaccaacctgtactccctgtgagctaacaacaaaaccaaggaaaactacatggtccaaacagaatgcacatttatccatgttagcatacaagctcaaacgcctaagggccactaaaagtctcctcaaatgcacaagatgttcatcatggaattcgttgtaaatcaagatatcatcaaaataaaccacaacaaattttcctagaaattcctttaacacatggttcattaatctcatgaaagtgctaggagcattggtcaacccaaaaggcataaccagccattcatacagctcatatttagttntgaaagttgttttccattcatccccctctctaatcctaatttgatggtacccacttttata

SEQ ID NO: 55844 - DNA, 106 bp, Glycine max
  unsure (1)..(106): unsure at all n locations
gtcaaacgacaattactnnttactcggatgctttattgagccngtttatatcgagacgctcgaaattgaaaacggaacctctaagaaaagtcaaacgacaataagt

SEQ ID NO: 55845 - DNA, 397 bp, Glycine max
  unsure (1)..(397): unsure at all n locations
gcgtctcgatatattacgggactctattagttattcgagtcaaaagntattggcatttgacatttcatagagcttccattttcaattccgagcgtctcgatatattaaagggctcaatcggacattcgagttaaaagttattgtcgtttgatttttctaagagcttccgttttcaattccgagcgtctcgatatcctatgggacacaatcggacatccgattcaaaagatattgtcgtttgaatttgctcagagattcagttttcaattacgagcgtctggatatattacggcactcaatcagacatccgaattaaatgttattgtcatttgactcttcatagagctctccgtttcaatttcgagcgtctcgatatatcacagggctcaatcggaca

SEQ ID NO: 55846 - DNA, 224 bp, Glycine max
  unsure (1)..(224): unsure at all n locations
atcatacctcatcgggcttaattctcttttcttcctttgtctaaattaaatcccttgaaaatttcaacaatggttttgtcaatagattttcacaaactcagacaaagtccatacgaataaggcacttgaaagactggggttggaagactgctttgaaagaatgatatgctntgagaccctttatcctatcaaaagagcactggtttntattatgaagctgacat

SEQ ID NO: 55847 - DNA, 340 bp, Glycine max
  unsure (1)..(340): unsure at all n locations
aacttcatgagatgctagcaactggttgttcccagttgtgatgatgattttgctgtccggaccaaaccaatcaggtcttccagcaattgcttgtaattgcttgtgtatgtcaacatcatctagaatcaagagaaccttctttcccatgagcctagactgtatgattgaaattccttgttgcttacttgttaagttgatgttcatctctcctagtatttctgaaagaaggattgtttggaggtgttctaacccgtgtttgtttgacttttccctcacattngcaagaaaacacanacaatcaaacttctcagcaattatcaactatgaagcacggacacgt

SEQ ID NO: 55848 - DNA, 218 bp, Glycine max
tgctcgaaattgggctgccccatgtctgatgcttcgcataaatgtagcatggaaaacaccttgcaatagtgtgtttatataggtaaatataaggggcatgaaattctttgcaaacggtgaatgaatattgaggtcgcttcctaaatgaatgtatgatagcacaaaattcccctttaaatgcaagtgtgtgcataatgcatatagcttgcccatatgca

SEQ ID NO: 55849 - DNA, 398 bp, Glycine max
  unsure (1)..(398): unsure at all n locations
acgaaccctagaattaatattttatttgattgattaatggcaaacggctccactgccattacccaaaaagtgtcaagtgattaaatcaaacatacactttgagggagtccccaaagagatttgtcaaagatagaatgaggttgcatgagttatcacgtcttgtggaaagagacaaccaatatgtgcttgtcacacaacgaanaaaaatcacaatcacaaaaagaggaaagaatgtcatgagcattgcacagttgtcatgattcanaaccttgtgcattgctagatacaaagcctatatttattgcatttcaagacgaagggtgcatgcctctgcattccaaagatcatgttcatatcacgctataaatgcataaatatctctttatataccaattttc

SEQ ID NO: 55850 - DNA, 330 bp, Glycine max
gaccttagagcacctgcagctgcaactaagaaggcgatattcttattccttttgtttaagagagaccaacgacttctccagctgttgtatccagaccaatgtcatagaagcttggctcttgtatgaagccctggcatcgtacttattgtcccaactaaaggatataataaatcctgcgcctatactagctcttacatcccttatgggtaacacaaacccacttggaactcccttcgctgcaccattggctgagaaagaatactgagtcttagccatgcatattggaagacctgaaaatccttgcttgctatacatcttaatctgcttctc

SEQ ID NO: 55851 - DNA, 346 bp, Glycine max
tccttgaacccaagctcctgatatgagcctgtagacgaaataatttatgaatattcagacagatatttgaataaagtcaaacaatgatgaaaccaaatgttaaattgagagggaatatatgacaaatttaattatattatctaaccattgaagagcctatcattttgaggaagagagaatgtttacttcatggattagcttgctcttactgctgcaaattaattatattatctaactaaattattaagcaagtaatatatacttaatatagattgcatttccagtagttttaatcaatttcagctggctgaagaaagcatgaccaacagcctttacccgtcatctt

SEQ ID NO: 55852 - DNA, 412 bp, Glycine max
  unsure (1)..(412): unsure at all n locations
tgatgtgaganagcgtggaagagncagncttcctactttttttgttgaccacagagnggtacctggagatatgtcgtgggggtcaggagaccttgtggacgtcaggtggggtgctattgcccaaaaccaagcttgaccaatcccgacccaacccgggcatagtcagtcaatgagaacctgtgacgtacctaaacaggcgagctcctggcagtcaaccaataaaagaacaaagtccacaaagcacggaggcttgtgtggcggctggccagctatgaatcttgagtggtatctggaatttggccctggtaatcgattaccaagggtgtgtaatcgattacagggcttaataatggagacaggatgttaaatgacctttgttaatcgattataaatggtgtggaatcgacacaca

SEQ ID NO: 55853 - DNA, 246 bp, Glycine max
  unsure (1)..(246): unsure at all n locations
aggcccacnaatacgagcactgctgctgccatatacatattttacttcaacaccttgaataaacatgcctgatgatagagataacacttgaaataaatccctgactaccatcaacaaactggggatgcattcaaactgggagcacagtctccaacaccatagatggggggactttcacaaatatctccacccgccggggaatgagggatcaccataggggcggtgcttatgttctttaaaaaaaaa

SEQ ID NO: 55854 - DNA, 359 bp, Glycine max
actagcttgaggatgtgattgaagcaccggtatgtttttattggcaaaacccaccaaaaaaagctggcatatagtaaagaaagattctatcgctgcagtgaatgaatttttcgagaaaggatctttattataggattttaatactactctcgtgactctcattcctaaatctattactgctaagactgtcaaggattacaggcctattgcagtttgctctactttttataaagtgatctaaaattttttgactacgaggctagggatagtgatacaggatattgttcatactatccaagcaacttttgtacccggtcaagtcattcacaatcatattctccttgcaactgagctgatga

SEQ ID NO: 55855 - DNA, 450 bp, Glycine max
  unsure (1)..(450): unsure at all n locations
tgtcttcaggaatacttgttcccaatctcttctctcactatnngagaagcatgcaatggtgaaatagatgtccttttgagaattatctaagccatcataccttaatgttaatatgtcaatgaatttttgcatttggaatattatggagtgttgtcaattcacttttccatgcctctttacttcttacttcttgaacgaagatttgaacccagaacttttaaagccaaaggaataccttcgcaataagaatatgcacttcctgatagatcttcatatccaagattaggttggttttctccanaaattgtcaaacagaataactgaagggagtaatgaanactcgattccttgaccttgtatacttcatcaacttggcttatactctgcttatttcacttgagcaatgactctacttncngtcccaggaaatcatatctttagtaaacattc

SEQ ID NO: 55856 - DNA, 487 bp, Glycine max
  unsure (1)..(487): unsure at all n locations
ntgggcctttgactttgtgcctttgaanaccngcccatacanactcagctatagctaatttttcaacaatttcttatattngacattattcacttactgcgaggtgtgacaacatgtttggtgagaggaaaaagttgtgctcgagggccttctccccatattagggaaacgaacttttntgggacaatctttgatcttcagaatgaaaaaattctgtaagccggaactaacaatgtagtgattcttaaaaataaggtgatcaacagacaaaaatggaattgtactactcggagtccatagccttcatatcaatgactgacggagtagatatcttattttagttcataaagtcactcatctatatcaagaaagaaaaaagtttattctactattatcatgaaagataaggtagatccatcctatttcatagatagaataactatttacttataattaataggaataaccttgaatagataatatattt

SEQ ID NO: 55857 - DNA, 220 bp, Glycine max
cacacccctatattagctaagctcacccccatgaccaaagaacatgaatatacaaataaaaatcctactacatagactacttcaaatgccctgaaatacatggctaaaaccctatactactataatggccaaaataccaggcccaaaagaagaaaacaacctattctactatttacaaagaggagtggacccaaccttggtccatgggctcaaaaatcta

SEQ ID NO: 55858 - DNA, 338 bp, Glycine max
  unsure (1)..(338): unsure at all n locations
tgagatgaggaagtgttgaagggtgaaactttctgcnttttctgttgaccacagagnggtacctggagatatgtcgcgggggtcaggagaccttggggacgtcaggtggggtgctattgcccaaaaccaagcttgaccaatcccgacccaacccgggcatagtcggtcagtgagaacctgtgatgtacctaaacaggcgagctcctggcagtcaacagataaaaggaaaacaagaccacaaagcacggaggcttgtggtggctggccagctgtgaattttgtgtaatatgtggatggaggcctctggtaatcgattaccaagggtgggtaatcgatta

SEQ ID NO: 55859 - DNA, 361 bp, Glycine max
  unsure (1)..(361): unsure at all n locations
catgcaagcttgcttgtggagcttctatggaggctggttctttgagctatatgaggaccctttatgttgattttgcaccatggagatgctgcggaagacacaggagaagaggagagaggaggcgccatccactatggaataagccttggaagaaggagcttcaccaccaacaatatgccttggataataagcttgaagaggatgctctaatggatganaaggaagagagaatgggggctccgatttgaggaccacacagggagagaagaggactttgaagatgtctcatatgatcttagtctacaagggcagcagagatacatctctattataaattagactgcttgtaacttttgaaaac

SEQ ID NO: 55860 - DNA, 399 bp, Glycine max
  unsure (1)..(399): unsure at all n locations
actcaagcttctagtccttgtggatcttcttccctctactgctagaactttttttgtatgtttagctngaacttcacctgtaacatcatcaggttctggttcacttaatatttctgcattgatatgcatcattggcttcttgcttggatcatgcttgtccttcatccatgtgttcagcttatcaaattggacatccttactaaaaactatttgattcgttcttggatttaagagtttgtatgaccctatgggattgtagccaacaaagatcatgtgttcactcttgtcatccaatttcgcccttgtttgatcaggaatatgtctgtaacatgttgaaccaaaaactctcatatgcttcacagatggtgttttccctgaccatacagcttctggtacttg

SEQ ID NO: 55861 - DNA, 309 bp, Glycine max
  unsure (1)..(309): unsure at all n locations
cgcagctgcagctatatggaagtganggaanctttttgactatctttcatacatnctaaggaggaaaatagatggtgacgcccttgcactctagcgtcatgttaaagaagcccgacggagatttgcgacataaattagatgccgatgagctgccattgcatttgataaaaagagaggaggaagcctggacttcattcaacgatcatcaagacaggaaacccgttgagccttgcacacaaagacattacaagtggggcggttctcttgggaatatcttgacaaaaacctactgtgtgttcggtgcatgaa

SEQ ID NO: 55862 - DNA, 378 bp, Glycine max
  unsure (1)..(378): unsure at all n locations
cggaggggttgatggngacccggtgctaaggggaacgatgtaatgtcttatgggagtacgtgagctcagttgaaggtgggcaactggngatggtgggttcatgtgtgatttgtggatgtgggagagttgatttgcaccatcgcccgatctccacctagtaccacatatgacgggtaccccataatcctacaagcttgaagtgagaaagtgtggaagagtcagtcttcctacttttatttgttgaccacaaagtggtacctggagatatgtcgcggnggtcaggagaccttggtgacgtcatgtggggtgctattgtcccaaaccaatcttgaccaattccgacccaacccgggcatagtcagtcagtgagaacttgtg

SEQ ID NO: 55863 - DNA, 431 bp, Glycine max
  unsure (1)..(431): unsure at all n locations
gcttatcgagacaccagctactacaccttcttttntttctctttttacctgaaattgaggaaattatataatttcatgcggagagcctctactgagcaagaaanactaaacaagaatatatttaccatcctaccaaaagaaccatagatnggagaaaatatatacattttggaaaatgtttctatacaaaagntaatcgtagatgatgactaacaagtagtaaacaagaacagtatgtaatactgactagtgaagtacataagtatgtggaaattcataccagtttgtctccaaaaccagtttttaaacttacaggcgctcaaaaatggctccacatcagctcgtcccattgacatttgtaaatttgacgcaacaattagaangtaanattgccaagattgaacactacatattgacccaaacatgtatct

SEQ ID NO: 55864 - DNA, 421 bp, Glycine max
  unsure (1)..(421): unsure at all n locations
cggtattgattctgtgatattcctctngcaccanaaagattagaattctgttagtagaggatagtataaataagtatgtaaataaaatcagaatcataaatgagaatatatttccttgccttattccttctccccttccttctatggaggccctggtcctcgaaaccagctaattagatctcccccctaacattggtgctctcgttccttcaccatgaccgaaccacctccttcttccgccgacaaattggaagagcttctcgtccgcctcacccaccaacaattatccctcaccagcaaaattgacgatctcatacatcacgtntcccctttgataccacccgccccgtccttctcctcacctttacctcgtcaattccccgttcctgtaacccaccatagaatgaaattagacgtacca

SEQ ID NO: 55865 - DNA, 138 bp, Glycine max
aatcaaaaatgcgaaaaggagacctaggctgcaattctccaatcccgtggtattggttttgaaaggggggaacagaaatttttggaatgtaaaaacgccccccctttcgtcattttataatttggtgcaggggtggct

SEQ ID NO: 55866 - DNA, 470 bp, Glycine max
  unsure (1)..(470): unsure at all n locations
ccatcacatgtggcactangtgttggtctgtcgatggttcacaacaagttntccacatccacaaagcgcgcataaacccaccatcccttgttgcccaccttcaactgagctcacgtactcccacgtagcccatattctcgtttctctcaacaccgggtccccatcaatcctcccaagcttccacaacatcaaagtaatacaacattcaaacagcacaagctatctcagccaagcaaaacagggcaaaggcagaaaactctgtccaaaacaccaactaaaacataacttttcttacttaaagaccccagtaacaattccttcgttccggttcgttaaccgttggatcgactccgaaaatttactggaagtctctagcacataagcctacatcgtgaccggtgggatcttctagcacacatccagaactcattctgcactactctttccacagncaatcacacacaagcatt

SEQ ID NO: 55867 - DNA, 439 bp, Glycine max
  unsure (1)..(439): unsure at all n locations
actaagctttaagcatgttactattagaagtgtttttttttattagattgccngaaaaaaagaacttcatagctattagcatatttttttaaaaacctatttcatatattgtttgaggcttgagcctccaagtcattggagtcggccctgtgacaaaaaagatttgagtaatttctatgagattataggttctagcctcacttcagtatcatacaccaagttaatcagaatctcctaattacattttaatttattctcactatcttattcaaaatacttcttttatgtcatttttaaacctaaaccagttttctatatatcacattntaccaaacacctaatttaatcaactaacttattattagctgtcaatttcttcttcctaactttctctatatacccttacagnggaattgtttaaactttaaaaaaaaacttt

SEQ ID NO: 55868 - DNA, 357 bp, Glycine max
  unsure (1)..(357): unsure at all n locations
ctgcggcatgcaagctagncgcacanctttctgcgtgatgactccttctcgacaaggggagaagaaaaggagaccttcaatcctataacgcaacgtggcggacaaatatgggcagttaacttgaatggccattattgtcattgcggaaagtattctgcgcttcactatccatgttcacacattattgcagctagaggttacgtgagcatgaactactaccaatatatagatgttgtgtacaccaatgagtacatcttataagcatactccgcacagtggtggcctcttgggaatgaagcggcaattccttcttctgatgaagcagtgacactaatccctgacccaactacaattcgt

SEQ ID NO: 55869 - DNA, 341 bp, Glycine max
tacaacttgcgtattaagaaacttgtcatcagtcgagatgttgaagttgatgagtacgcttcttggaattgggatgaagaaaaagtggagaagaacgttcttatacccgctcaactacctcaagaagaagctgaggaagaagacccaagtgaaccaccttcaccttcaccacaacaacaagatcaagaactatcatcaccagagtctactccaagacgagtaagatctttggtggacatatatgaaacctgtaacttggccatacttgaacctggaagctttgaagaagtgtcaaagcaggaagtatgggtcatggcaatggaagaagagatattgatgat

SEQ ID NO: 55870 - DNA, 381 bp, Glycine max
  unsure (1)..(381): unsure at all n locations
agcttgcttgtggagcttctatggaggctggttctttgagcttcaatgaggtcctttaatggtggttttccaccatggagatgcagcggaagacaaaggagaagaggggagaggaggcgccatccactatggaataagccatggaagaaagagctccaccaccaagatgagccttggataagaagcttggaaggatgcttcaatggaggaaaagaaagagggagagaaagagagaggggggagcacgaaattgaaggaagaaaaaaagggagagaagttgaactttgagttgtgtctcacaagactctcattcatcatagatacaacaagtgttacacatgcttctatttatagactangtagcttccttgagatgctttc

SEQ ID NO: 55871 - DNA, 459 bp, Glycine max
  unsure (1)..(459): unsure at all n locations
cagagagaataagaaggagggagatacccggttgtgtgttgtcgccctacagggcaaaatttcccactagctcaacaatatcaatactcagccaatatcagtccttctcattacccaccaccctaccagccaagaacacccaatcatacataagggtcgcccctaaatcggccacaaaacccgcctgctgcacattcgaggccaaacaccacccttaatacaaaccaaaacaccaaccagggaaggaattttccgganaaaaagcctctagaattcaccccaatttcggtgtcgtatgctaacttactcccatatctacttaataatgcaatggtagccataatctcaacaaagattcctcaacctccattntctcgaggatacaactcgaatacaacatgtgcttatcatggaggaagtccggagcattccattaagcatcgtatgaccctgaaacat

SEQ ID NO: 55872 - DNA, 390 bp, Glycine max
  unsure (1)..(390): unsure at all n locations
ctaagcttattaatggttccttactntgagagggaaatcttctacttaccacgcatcnngnnnatgcacaaacaggcagcatgggcgtgctggtacttgctggggatacaaagggcagccaagtgtctcaaagtgcagtgtgcgaaaacaagtggttgtggcatgaaaatcctgtcttgtcaaacgcctatatattacggaagcaacagtttgctagttagggataaggcatggttggcttgggcagagaacatggaagtgagacacacatgcctaaatggtcctgacagctacaactatggagcttatagatggactgttcaacttgtcacaaacgataatcgattggaaaagatacttttccctatcttcttgggcctaatgactctc

SEQ ID NO: 55873 - DNA, 437 bp, Glycine max
  unsure (1)..(437): unsure at all n locations
agctctgaatgaggctgattatgctgctgtttatgttcaacaagtattcggggagattagattatctcagactcatttgtcacaagatagtgacatggagctgatggtaaatatttatcacaacaaagtattgttatctcaacctaatttgctgcagcactccatttttatatattacaattattcatgtttggcattagcatgtaggtccctgcaactattgttccaccaatagcaaggaataagctaaccataacaagagccaaacacaggaaggttgttgataaagatgatgcacaatactgaagaagcgattcttgttgcattatgaaggttgctgaagacccagtatntgttacattttgaaggttgctgatgaagaaaactgaagaagcattttctgttgcatttgaactacgatgtgtagtgcatatttg

SEQ ID NO: 55874 - DNA, 329 bp, Glycine max
  unsure (1)..(329): unsure at all n locations
gaaaaaaggcattgaccaatctttttatgactaaccaaatacccaagacgggtccatttgaagccactaatgacgactggaattgattttttgccatgatgcccctcgtggtttgaccccaatgggattgaccggacgcttcttgccggcattggttttaaagccgatccttcctattaattggcgtatttgttcatgatcttcaacttgccangtttgagaaatctatatatggggcttatacggcgcacttgatggcccttatcgaatcgatgctatgcatggataaagtcatacatatcaagttgcacttttttcgcatttcaatc

SEQ ID NO: 55875 - DNA, 439 bp, Glycine max
  unsure (1)..(439): unsure at all n locations
actcagcttctggagccattcaaaacaatcaatttgatgccatctagacgaagaaatacgacttcattatgaagatgccaactttgctctaggtcatgtcctttggcctgaaaaatgcacgcgttacataccanagattaatggaccaaattttcaaacagcagatcgaacaaaatgtcaagatctatgtcgaagacaagggtgtcaaatcctatagcatagtccaacatgtggcagacctagaagaggtattcggagaaatttacaaatacaacatgtgccttaactcgaanaaatgcactttcagggtcggcggaggcagattcctcttcatgatcacacatctgggaataaaagtcaaccctgacaaatgcataggcatactggcgatgcatagtcctaccaacatccaagaagctcaaatgctgaatggtagact

SEQ ID NO: 55876 - DNA, 257 bp, Glycine max
  unsure (1)..(257): unsure at all n locations
acataaaaccctaaaaatctagagctacagtttaagtcttctcccttaagttaagacaaaaaaagagaacaaatcaggaacttacttgatggtgtatgattgatgcttcaaagtcgaaaatgcacaaagagagtacaaatgcanaatgtgcatattttggagagagagaatgcagaggcgaggtttctgtaatcttgcanatgtgagtgtaactgcttgtacactcacttaagcagttnttcgataccttcgctaac

SEQ ID NO: 55877 - DNA, 403 bp, Glycine max
  unsure (1)..(403): unsure at all n locations
aagatgggtgagtctgagttgtgggtgtctaacgagagggaagccactaaagagcttgaatgggagctgatagtgaacaaggaatatgctgtggagcgacatgaaaaaggctttcaaaaggacatcangcaggctgtgttctttgccaatgacattgacttgggtctttttgaccctttcaaggacgtgaaggacgatgatctgctcgatgaggaagatattgctgtccaggaagaaactgtttatgatgaggctatcgacgaggcacatgatagtggggccaatgtttaagctgctgttactttgttatcttctttttttcttcgctgtggatttttgctgcataagcgctgtaatgatgaacaatattattatttcttgtaatgctcatgctttcctttgt

SEQ ID NO: 55878 - DNA, 286 bp, Glycine max
  unsure (1)..(286): unsure at all n locations
ggatgaaagtaagagtggttttcgaaatctgcactttatgcaaaattttgctgttgaaatgtgcagcagaatttttgtatatgtgtagaaaaatgcttgtgtatggatggttgtggaaatggtagtacatatggagttctgaacgtttgctagcagatcccaacggtcaaaatatagatttgtgtactagagactntcagtaaaatttcgagtcgatccaacggttaacgaactggaacgaagaanatgttactggggtattngaatgtgaacagctgtgatattg

SEQ ID NO: 55879 - DNA, 482 bp, Glycine max
  unsure (1)..(482): unsure at all n locations
gacactatgaaactcagcttttatccaggctcatcttggtggagaagctccttcttccatggcttattccctagtggatggcgcctcctctcacctcttctcctttgtcttccgctgcatctccatggtggaaaatcaccattaaaggacctcattgaagctcaaagatccagcctccatagaagccccacaagcaagcttccatcaagtggtaatcagagcacaagggcttcaagtaggtgcttcttaaacctccattaattntatgctttaccttctcttccattgttgtttcttcatttttcttcacgtatctcctcacatgtcttgtgctaaatgtttttaacatgattctttagagtttccaccaattaaacttgctataaaagctagatttgttntctatggtcaaatttcttgtcttgttcttgaaccatgaatngtgttgagttaagttcctttgagtnntgcatgtatattta

SEQ ID NO: 55880 - DNA, 318 bp, Glycine max
  unsure (1)..(318): unsure at all n locations
tgcagcttacactcactaagcgtcaaggtctatatccatgaggtagctagacatggcactatacacatgcttcaacatatggactgtgaccactagacacaaaagaaatgaaacccaacattttaaagtattttgtgctaagtcaccctaaagtaagtcaaatcctttttgagaaagcccatttcatttcaacttcccccatatatgctctctcctcaccccncccccccaaacagntagaccgtaccatcataaatcacctcaacctttcattggcaaccttatgcanactcttcatattttcttcccctcagaaac

SEQ ID NO: 55881 - DNA, 310 bp, Glycine max
  unsure (1)..(310): unsure at all n locations
tatactgattgctctatcctgtactatttgcttagaacccttgctggagagaatgttgctcataatgctcatactctncatcacaaaaaagggatgatgatgcccttctcttgattggaataaactcctccagaacaggcccttccgttgatgttgtctgctctgaacggctcgagaaaatatcgccgtcggagcgccgcatacaaaacaagaatcttcgatgcgtgtcatattcgtattatgatatctaaagatggacttctactattataggcagacgagtaaatagattttagttttggaaatgaat

SEQ ID NO: 55882 - DNA, 422 bp, Glycine max
cgtgcttactttcaatatattgacgattcaactctgaagagaaacggatcatgggcaatacatttatcaaatctcaaggccagatttataggaagccctgttgctgagagacacattattggagtctaattgccttctgtttttgtttaatgcatttataagatttcatgtttatattgcttgataagcgattacttcacatttggataagggtagaaatgctacttgctacttggagaatttgcgttgtcatgctcatgtcatgcctagagggtagtgctattctcttctttattaaataaataatgttgcaagcttagcttttctctattcaccaataatctgattattgctgtattacttggaggaagttgcttatgcaccaataaacatactcatttataggagaattacaatggtaa

SEQ ID NO: 55883 - DNA, 377 bp, Glycine max
  unsure (1)..(377): unsure at all n locations
catgcacttaagcttgcagttatcttataactatagttcctcatttgtgttaaactttaaagagacctctggatgcccttctcatcatttcacccttaaatttgtcaataatataccatccatatattaggctgtgtcatatatgtgcatttggatcctcaccagcgaacaaaattatattctagagcaatgatatgtgtgtttgtgggatacaacaccactccaaagggatataaggtctatcatccatctacaaaaantatttttgatcaatggatgttacatttcatgagcatgaactatttttttccttgaaaacactttattcttcacctcaaacgggggtganttggagatgcanaatcatgatagactta

SEQ ID NO: 55884 - DNA, 464 bp, Glycine max
  unsure (1)..(464): unsure at all n locations
taattaggacanaacatggatatatatgttctttatgtatctttgaagntgntntccaatcagaatctgatgaaagttttaccttgatagtcgatgttaactttcaatgcaaacttttgttatggagatgaccgaggtaaactctaattttgattggaaaacagcactgagagtacctaaagaactatttataaatgtcctaaatattaatcaagcataatgtttttggtccaatacagattttctaggtgtagatagtcatgaaaaatgtgacttgacaagattggtaatcaaactttaaagagaattctgctataaacaattgatatggaaggacaccgtgtgagatgagaagagctaatctaactatttaattacacatgtgtggtgcagatagatttnnaggaactaacctttaccaaacccactttaatanaatggntagatagctcgtctcacattac

SEQ ID NO: 55885 - DNA, 365 bp, Glycine max
  unsure (1)..(365): unsure at all n locations
gcttaggatcaactcnttcttcttttcttcaaagttcttgtcttcacctctttcactttattgtccatttcttgcacaaaaatacatggttttcatgggatgatcatggaggctaaacacttaatcatcaggatcacttcagcaagatgaatttgagtttggttagtattctaatcttgtgaaggtcatctttttcttcaatcctattttgattttatgatatgatatactacgattgaaacggatangtatggatgatcataaacatgattgatctattttgttattcattctcatcttgtctggtttacatcctacaacccacaatttcatgaatcccctgtatttagcatgaagagaccaat

SEQ ID NO: 55886 - DNA, 449 bp, Glycine max
  unsure (1)..(449): unsure at all n locations
actgatggtgcctccttacactatcatgacattgtttcatanttttgcttaagggtgcgcttaaagccttccatgtggatgggcatagcagtattggtagtagtgagttttttttttttttgataaagaaaaaatttaggtgagttgagtcccaaggcttaccaaggtcagcatctcaaggctcaatgagctaacaaatgtacttataaattacccactaacaatgttcttatatcgacaacgacaatcaaatccactcattttgggatatgagatggtttcttatcaattggatcaacctttgttggcctaataacaatgagaagagaatggtctcttgcatttgttttgctcacaattagattagtcttaacgttgatgaaagtcttgtggtgaatctctggcctgcaggttatggtggcctactgcgagactcatttggtattgga

SEQ ID NO: 55887 - DNA, 285 bp, Glycine max
  unsure (1)..(285): unsure at all n locations
accttgttnttctgcaagtgttaattctgcagaaaacaaaagtgtgatatcttttcttctcttctccctttgccaaaagaataaaaggactaaccacctgagatatctgttgtttccccttacaaagattcaaaggactaatcgcctgagaatcctttgtcctaacacattggagggttcatcatttgtggcacaagtagagggtacatctacttgggttgttatactgagaacaagaaagggacatcttttgtggatcagttcaagtggagggtacatccactt

SEQ ID NO: 55888 - DNA, 136 bp, Glycine max
cgccgactggaaactatgtcgtatccacttaattgtcttgagctaacccctttcgctgctggtgtatgccgaaaggggagaccgtttacctctacaaatgtagcgcaatcttaatggcgataggcacccgatgcgg

SEQ ID NO: 55889 - DNA, 430 bp, Glycine max
cttgatctgactcgtatattttttttttataatgattttatcccatgtgtttactccaaagatcagtgcgaatcaaatcactcccacattttatctctatcatgcatcgcataagcatctatttatggcatcataatgaacatatcggtcctgcatttgtctgttgtcatattccagcagcgaactttgcatgaatcattgcatcatcatgcatacgcgttcaacatactttgtgttctacgaacttcataccttttattttcatgcatgatcctcgcaatttcctctacaaaacaaaaacaaaaagggaagcatgaagattcagatacattctttggtgcatatattcggtaccatgagccaaccatgttgggatcataaacccacttcacttaaaaacaaaatgagtgaacatggtacctaatgcatg

SEQ ID NO: 55890 - DNA, 380 bp, Glycine max
  unsure (1)..(380): unsure at all n locations
tgttctcaaacacacttttgagaatttggatgccaaggggcctgttgctattgcaccccattttactaatacacccctgcttttttgggatctttttnttgtaagttacggaaacttacgaatttcgtaacgatacttgttttctttccgtaatgttacggaaccttgcggattacataaccatcctcttttttacttacagaatgttacagaacctcactatttgtgcaatgatgctctcttttgatttccggtgtgtcacggaaccttacggatagtgcatcaatattttcttttgatttccgacacgtcacggaatatcataaattgcctatgatgggtgccagcaccttataatgaccaacacaagttgcatgcac

SEQ ID NO: 55891 - DNA, 355 bp, Glycine max
  unsure (1)..(355): unsure at all n locations
gtatccgtacttggaaggatctgattaccgccttcctttgcagtatcagnacaattctgatatggctcctgaccgtactcaactgcagaatatgtttaagaaagagggtgaaacctttaaagaatatgcgcagcgatggaggggattggcggcacaagtagctcctcccatggttgagagagagatgatcaccatgatggtagacactctgccagtgttctactatgagaagctagtgggttacatgccgtccagctttgcggatctggtgtttgccggggaaagaatcgaggtgggattgaagagaggaaagtttgattacgtttcctccacanacgtgaacgccaaaagaatc

SEQ ID NO: 55892 - DNA, 319 bp, Glycine max
atcttttatccaaaatcctgactaccatatatttgaccaggtgagaatgtaatccttaccctcggaagcaaaaaaagaatagaggggaaatttcccatcaaagaaaaagagaaggaaaatttccaatgaaagccaaataagaaaagaaggaaaattccccaatcaaagagtgggagaaagcaaaaaaagaaaagaaggaaaattccccaatcaaagagtgggagaaagcaaaagaaaagaaaggaaaattcccaatcaaagaatgagatgaaagtaaaaggaagaagaagaaggaaagaaagcttctgatcagggatcg

SEQ ID NO: 55893 - DNA, 472 bp, Glycine max
acctgcagcatgcaagcttcaagaataatggcctcagcaaactttttattttcagatggtatattcaatcaatagacctccaatctttaatggagatggttaccactactggaaaacccgaatgcaaatttttattgaagcaatagacttaaatatttgggaagccatagaaatagggccttatatacccaccacagtagaaagaaccacaatagatgggagcacaacaagtgaaagcataacaatagaaaaacatagagatagatggtctgaagaggatagaagacgagcacaatacaatttaaaagccaaaaatataattacatctgccctgagaatggatgaatatttcaaggtttcaaactgccagagtgctaaagagatgtgcgacactctacaattaacacatgagagtacaccagatgttaatagatctatgagtaacacatctactcatgaatatgaactattt

SEQ ID NO: 55894 - DNA, 406 bp, Glycine max
  unsure (1)..(406): unsure at all n locations
ctcactcaaggtaataagagtgtagangagnactttaaagagttggaggtgtccttgantaaaggcaatttagtgaagatcgagaggctactatggcatgtttcttatatgggttgaatagtgatataagggatgttatagagttgtagaattatgtggagttgaagaacttagtacatcaagttgctaaggtagaacaacaattcaagaggaaggacagagataagaataagtgaggtacttcttcaagcaattctattgctgcacctcaaagggctaaaattaagtccaatgagtcccctaaaaaagacaaggagtaatgaggtaaaatgcttcatgtgtttacggagaggtcacatagctatgtagtgtccaactaagaaaattatgttacttaaggatgatt

SEQ ID NO: 55895 - DNA, 474 bp, Glycine max
  unsure (1)..(474): unsure at all n locations
acctgcaagctgcagcttttgcatgatagtctaagtcacccatttcttgcaaattgttataatggncgcaagncttagcaagttacagatattagattgtgaatcttgtcaattaggcaaacatgttagatcatcatttccaaagcacgttgaaaaaagacataactcgatgttttctaccattcattcagatatttggggaccaagccgtgtaacatcttacagattcaaatgttttgatacctttattgatgaatattctcgatgtacttgggtttatttaatgaaagatagatctgaactcttgtctattttcgtgtcttttttccatgagattaagaatcaatttgtgatgatcattaaaattctcgattgacaacgcaaaggaatatttctcttcagaactttcttcttttttgctctcacatggaatccaatttcattcacatgccgcacaccacatcaaatggatag

SEQ ID NO: 55896 - DNA, 205 bp, Glycine max
cacaagacaacggaattgtgtgaccaactaattttttatcttgccacaactgattcattctgttgtttgggagttgttatcacaggcaaaccagccataattgattaatttcacattatttgaaattttccagtgctatttatttgtatttcaggttgagtttttgtccatagaaaacatcatgaattctgcagcatcattgtgc

SEQ ID NO: 55897 - DNA, 433 bp, Glycine max
  unsure (1)..(433): unsure at all n locations
acaaaaatagggttntgaaagcttatcatttcagtttcttaccatgtaaaatggatcattnttaaggtccaacgccttgaaatgatcacctttcaagtaaaaagaatcgcttgattcacgcttaaggaagaactacgtaggtctgatttcctctttgatggagggtacgtaagagcaagagccccgcttttgtcaacctcaaaaaataaaaagaagtaaaagtaaaggtaacacaatttccacaaaatgaggctgttgtcctttgagacaaacgtgagaggcgctaataccttcctcacacgtaaatacaactcctgaacttagaattttcatttttgaccgagttccttcggttttcccgacgttttccacaaataagcgttggtggcgactccgcgcatcttttctcctttggaaagcgcacccgtgagcc

SEQ ID NO: 55898 - DNA, 140 bp, Glycine max
acgccaagggagccaacctggtacaaacccaatgcaaagaaaaaaacgactggacgaccaaccccaaactcacaacgtcacgaccaattctatcatgaaacaaaaaaaacgaggacagtcaaatgccaaacaaagagaac

SEQ ID NO: 55899 - DNA, 469 bp, Glycine max
  unsure (1)..(469): unsure at all n locations
actcaagctagaattacgggatcattacatttctctaacatananatattctatcttttgttctccaatgancctatgcttcctgattgttctttcttagattctgacatatgacaatacatatgaatggatgcaattcgatcaaacctttattccttggattaagaatctatacattaacgtgaggaaactgtacccaacgaactttggcggctattcccaactgaactaacgaccctttcacacttccttttgtttccatattcattcttttgagcttcataagtgcatgcccttccttttctttccccttctcttcaacttttgtttctttacgtagattttatgtttaaaaatataatataatgcttgaagaatgataactntgatttgaaggtttggaatttgaatctcaattcgttgagtcagacaataattgatgtatgattgactacaggaatatatatgt

SEQ ID NO: 55900 - DNA, 391 bp, Glycine max
  unsure (1)..(391): unsure at all n locations
tgcggcatgcaagcttgtccatgtcaagagccaacaccaagttgatatgtntttattaaaacacttccaggcccaatttttggtaaattcattgccaagttgggaatgattaacatctattcgccaacttgagggggtatcacgattaagcagttggagttagttacaaaaagttatttgagtagttaagtggttatggcagttagatggctactagaagttatttgagtagttagttggttatgacagttagttagttactagaagttatttgagtaagctagttggttactcaagttagttattttctgtctttgtataaataaaccaactttgtaatactttgatgaatgaatcctcaaantgtttttcatctatctttcatttctga

SEQ ID NO: 55901 - DNA, 424 bp, Glycine max
tcagcttctttctcgccttgtagaacttctgtcttatcattctgcatgacgaaacatatgattaataaaatttcatatatttccacctctacattacaatggacacactttaagtgttttctactttctagcattgataaacaactaaataaggacaatggctacaaatcagatgagatctactagaacattttcacatcttggaagtttgaagccaattcctaattgttttccatatgcatcctattgcattatccatgtcagagcacaatcaagtcaagcacaattccaacttccatttttctttacccattgcttgttccatttgaattaactgctttttttcttttgcaactatttcagtttaagtaaacaaaaacagcttttaatcacctcataatgctgaaccattatgcatgatatg

SEQ ID NO: 55902 - DNA, 285 bp, Glycine max
tccactcagtctcccttcttcctaaaggagcatccctcagttagccttgcccggccaccggttggttgacacaagacagtctggcagtttccgcatacaacaacagtctgagagtggctaaagacagtggttctgcagtcatattcataccactcaagtattaaaacaaatccacaatcaaattcataacactcgagctattttatgtacacaatcaaaatcaataatatgaagggaaaaaaagacgatccaacttacattgtgaagcaaccctggcacttaaca

SEQ ID NO: 55903 - DNA, 257 bp, Glycine max
  unsure (1)..(257): unsure at all n locations
cgaccaagagncccaccaacccaacaaaggcangacncagccaanaacaaacacgcnccaaacccagcacccagcnagccacaaaggccagccctaaancaaccacaaagcccggcgaccgcacttccaatgacgaacaccacctttagcacgaaccaaaacatcaaccaaggaaggaattttgcagcaaagagcctgtagaactcaccccaattctggtgtcttatgctaacttgctcccttatctacttgataat

SEQ ID NO: 55904 - DNA, 312 bp, Glycine max
gatatcactgttgatattgcccaagatctcgtcgagcagctgatcaatatcttttagaaggacttaaaagactatgcgagtatacaattgcacaggtcagttatgagaattttggtacccacacttgtcctcctgcactacaaatagattggaaagtgaattcagttgctctgatttgatgttttttgtcccaggatatatcactggaggatcccatgtacaaaaacataacaagtgggcacatagtgaggctgccaatggtgctttggatgactgtttcaagttgttgttggagattttggccttgcacca

SEQ ID NO: 55905 - DNA, 406 bp, Glycine max
  unsure (1)..(406): unsure at all n locations
agcttgatcaaaacaattatctgaccatccttantctggagctgctgatgaatcctggataggatgctctagcttcgtgactggtgtaaatggctgggtctcctcacgaacaggtgcagaggatggctcatgtatctgatctgtggaggtaccctcctcctgagccatgtgtgcatctgtgtcaaaataaaaaggctcatgaggggtgagtgtttgaacccggcaagtgcaccggatcacgcaatttgtataaaacgataagaactgagtatcgaactctcggggaacttgtgttacttggtaaagctatattcaatgaataagtgtctagtatgaaaagagatgtgttgactatgaataggtatgtaaactaacctataagaggaaaatcacatgagtaatgatg

SEQ ID NO: 55906 - DNA, 424 bp, Glycine max
  unsure (1)..(424): unsure at all n locations
agaggatgcttcaatggagganaagaatgatagagagttattagttaggngggagcacgaaattgaaggaagaggaagagacagaagttgaactttgagttgtgtttcacaagactctcactcatcaaagttacaacaagtgttacacactcttctatttatagactaggtagcttctcttgagaagatttcttgagaaaacttccttgagaagcttctttgagaaaacttccttgagatgctagagcttatctacacacaccttgtgaagcttccttaagaagattcctaaagaagctagagcttagctacacatacctctctaatagctaagctcaccaccttgagatgagaagctagagcttagctacacaccctctataatagctaagctcacccccatgacaaaaaacatgagaataca

SEQ ID NO: 55907 - DNA, 189 bp, Glycine max
  unsure (1)..(189): unsure at all n locations
actttaaatagnaattttccgtttactggtaaatgttaaaaatttataaatatattataatacattttattctacacttgagtttaacgttatcgtaaaataaatgccgtaaaagtatgtctattatggaataatttaattagaagtctaaagnataaaatactgctatgcttttacgatggtattgat

SEQ ID NO: 55908 - DNA, 426 bp, Glycine max
tttactcagaaaacctataatgggcaaattcaatttaaatttatgtatgctctaagaaaatacaatttatgtaaagatgatacatggagatggatggtgacgttggtacaattgattttaccttttcagagtagatagcttggacacaagattaactatagcatttccagatacagggctgttgtatcctgtcaaaattagattacccataaattgtaagattacttgtatcagggatttgaagagaatgatagattcatcatacctatacatagatgggcaagaacagatgtagagttcaatgcattcgcaactttttgaatagttctggatgtgacacaacagctctctatatttcagcttcaaagagctacacaacagaaagtaagtaattgtatggagatatctacagcacgatatcacata

SEQ ID NO: 55909 - DNA, 412 bp, Glycine max
atggaagcttgttcattgaacttcaatgaagttcttcaatggtgacttccaccatggagatgcagcggaagacataggagaatatgtgagaggatgcgccttccactagggaataagccatagaagaacgagcttcaccaccaagatgagccttggataaaaagcttggagaggatgcttctatggaggaaatgacagagggagagacagagagagggggggagcaccaaattgaaggaagaaaatgggagagaagttgaactttgagttgtgtcttataagactctcattcattaaggtccaccagggtacacatgctctattttagactaagagcttctagaaaatttttgagaaatttcttggaacttcttgaaaacttcttgaaagctgactagctcaccacccttta

SEQ ID NO: 55910 - DNA, 415 bp, Glycine max
  unsure (1)..(415): unsure at all n locations
tctcgcannagcttacggaagaactggtacctatccatggtatatgtctccacagaggctattgtcttcctcgcccaatattatgaccagntgttgaggtgcttcacctttggggacttccaactatcacccacggtggaagagtttgaagaaatcctgggatgccctctgggaggaaggaaaccatacctcttctcgggattctatccctctttagctagaatttctaagatagtccaaatctcgacgcaggaattagaccacagaaagcaagtcgaaaatggggtggttggagtaccaacgaaatgtttggaagcaaaagcaagagtcttggcaggtaaaggcgaatgggccccaatcatggacatcctcacactttngatcttctgaggagtcctctttccaatatggatgg

SEQ ID NO: 55911 - DNA, 331 bp, Glycine max
atctgaagaagaatattatgatgaagaagaaaaaactattggcattcgtctacatggtattatgcacaaaagtataatagctacaagagatacactcgtcaccatgataatgtccttcgattgaacattgagtcacatgggctcccttttgtcaacttcatagtgtataatagctgcaaagaaagaccctgcacaaaatattacttatttatttattttgctaaaaagaaactagatccaatctttgctcttatctctctattgttaggccatgggatgtgcttaatgatttgagcactatctgcatgtttgtcggctttgtcactctata

SEQ ID NO: 55912 - DNA, 469 bp, Glycine max
  unsure (1)..(469): unsure at all n locations
ntctaacanaaaatttcatgcaggtggaccttcttctagtttatttgacttactgcaggctcatatccctcttccattctcacctagagcaattccaaacaaaaaaatggaagaagcgcaaaaggagatcttggagaccttcaggaaagtagaggtgaacatacctctgctagatgccatcaagcagattccaagatatgccaagtttctaaaggagttgtgcacccacaaaaggaagctcaaaggcaatgaaaggattagcatgggcagaaatgtgtcaacattgataggtaaatctgttcctcacattcctaagaaatgtaaggacccaggcactctttgtataccttgcattattgtgaataagaaatntgagaatgccatgctagatctaggagcatcagttaatgtcatgcctctgtccattttcaattctttatctcttggacccttgcaatctatagatgtg

SEQ ID NO: 55913 - DNA, 419 bp, Glycine max
  unsure (1)..(419): unsure at all n locations
ctttattaatanatatgtgaagggtagagggtgttacaatcctcttctacggtttcctaactcattaagcgagctgtatgcctcgctaagcagatgtcactcgctgagcgagtcatcagctacttgaactttctcctctttggtctaaaactgagttggattcaacattaattcacaaaatggaagtatctactctataaaattacactaaatagaaaaaaaaaatatgaacaagtcctaacaaaagaaccataaattggaggtaacgtgttatttccttgcaaatattcaatataaaattacttatgaatagcaactaacacttataaggttgcatctctcattntgagccanactttatgaagaatggagtttccagactaccaaantctttcaatggttgtcacttatatgaatat

SEQ ID NO: 55914 - DNA, 469 bp, Glycine max
  unsure (1)..(469): unsure at all n locations
atactgaactataacctataaagataccaagnncaacttttcttgtctagcttgtctctcttaatnngaggcacataagtaaaacacaaacatctaaatacttgaaattttttcaagaagggtttataaccataccaagcctaaaaaagagtctttccatctattgctttggtggaaagtctatttagcaaaaatattgcagtgtttatagctttcacccaatatgccttaggtaactctttctcatgaaacatacacttgaccattttcatgattgttcaattctttctttcactaaccctattttgttgatgggtgtaaggagctgttaattgctcaatgcctgcttcctcacaaagcatggggaattgtgttgaagtgtactccttaccattatcagaccttanatcttgaatcatgcagtcactntgcttttcaatctagtgcttaaatctccaaaatacacttg

SEQ ID NO: 55915 - DNA, 425 bp, Glycine max
  unsure (1)..(425): unsure at all n locations
ttcctcagggggagagataacattagcaatgtattaatagcattcaagatagaaaattttatgtactacatataatgaaatgacagacgttatttctgaattcagctagcactacaattcatccgtacgttaactaatatcttaattaatatcacacaggcaaggcacaataatcttttatatcttaattaatatttatttattctgaaagattcttttagttggatataaaaaaatgattnttttagtacaatgaaacaaacaagcacaaattgataaaaaaaaacctcccatatataattataataatattatattaaattagagcgttntaggagctactatttatattaacaataacactcgaaatatttttttagagacnattccgaagatttcttaactttctatatggatccatctat

SEQ ID NO: 55916 - DNA, 356 bp, Glycine max
catgattggacatgattgagacttgtttgattatattgtgcaaaactggatgagggaaagagtatttttctaaatctgcactctatgcagaattttgctgttgaaatgtgcagcagaactttgtataagtgcagaaaaatgcttgtgtatggctggttgtgaaaaaggtaatacatatggggttctggacatattctagcagatcccaacggtcaaaatgtagacctatgtactagagacttccagtaaatgtttcgagtctatccaacgggtaacgaattggaacgaaggaaatgttactgggactattgtatgtgaaaagctgtgattctgagttgtgttttgggcagagattt

SEQ ID NO: 55917 - DNA, 458 bp, Glycine max
  unsure (1)..(458): unsure at all n locations
gacctcagagncacctgaggcatgcaagctangngcnacattttatcagaccttctatccncaacagcaaaancagccacaacaaaataattatgacctctncagcaacaagtacaatccccgatggaggaatcatcccattcttagatggtcgaatccttcacaacaacaacaacaacaacaacagacttattttaaaattctactggcccaagcagaccatacgttccttcaccaatccagcaacaacaacaatagcaacagccccagaaacagcaaacaattgaggcccctccgcaaccttcccttgaagaacttgtgaggcacatgactatgcanaacatgcagtttcagcaagagaccagagcctccattcagagcttaactaatcaaatgggacaagtggctacacagttaaatcaacaaccagcccagaattctgatagataccttttcta

SEQ ID NO: 55918 - DNA, 427 bp, Glycine max
  unsure (1)..(427): unsure at all n locations
gtgctctgggaaacatgtgtcgncatagtgcctatntttatatttcactcgcaagnattaaaaataatggtatttgccctcggagtactttataaacataacgaanattaaaaaggaagaaacaatgatatttcgtttgatgaaagctacttcctgaacttttcatgatttatcctacctcagcttttttctcttcctgtttatattttttagtttgctgttaagcaattattcctttttcaatccctagatatatacaactttgtaaactagatttatactgcggctgttatctgtaaggaaaaataagtcttcctttctggatgacagagtacatattatattaaaatttctgatactcagtaaaaatgtgaaaaacaataagggtactctgctttttcttttctcctatttgaatctcttatta

SEQ ID NO: 55919 - DNA, 250 bp, Glycine max
  unsure (1)..(250): unsure at all n locations
atagaagcttcacaagcaagcttcccttcagtggtattagagcacaagagcctcaagtaggtgctccttaaacctccattaattttttgctttaccttctcttccattggtggttcttcattnttttctcgatgtatctcctcacatgtcttggtgtaaatgttgttaacatgattctntagagtttccatcgaataaacttgctataaaagctagatttgattntctatggggtcaaattcttgttctt

SEQ ID NO: 55920 - DNA, 392 bp, Glycine max
  unsure (1)..(392): unsure at all n locations
actaagcttagacaacttgttgtaatcaattacgaaaactctgtaatttattaaaataaagaaaattntgcttctgaagaattgtttctaacttcaaaactattcttcacactaaccatgatgatgcatgatgcaatacagacatcaaatgtactaagatgcaacaaccaagataacaaccaatacaaatgcctctcaagggagttaggcataaaagccaaaacttcaaaaattcttcaagctttattagcctttaggttgttcaccatgttgctccccctatttccaacaacgagaagccttaaatacttaaagttacaaagtagaagtcaatatttgaatntcatatatgctctctccttcaagctcattgatgatggctnttaacacct

SEQ ID NO: 55921 - DNA, 437 bp, Glycine max
  unsure (1)..(437): unsure at all n locations
gagcttgctgcctcaagtttattgtcttacttttatatagcatgaaaaagcccttcnataatatgtatgtatgtaaatacgtaacatgaaatgccttgcaaaatggtgaatgatatgccttgcaaaatgttgaataaaatgccttgcaaaatatgaatatatatagcatgaaaatgcctttcataatatgaatatatatagcatgaagtgccttacatagtgtttggatgggtagcgtaaaagtattttacaaaatatgtgtatttgtgagtatgtagcaaaagaagccttccaaaaaatgtgtgtatatatatacgatttagcaagaaaagggttgtcaaaaatatgtacatggatgtgtgtcataaatgcctctaccaaattttatatgtgcaatgctatgtgcataaatagccgacccaaatgatatttataag

SEQ ID NO: 55922 - DNA, 441 bp, Glycine max
  unsure (1)..(441): unsure at all n locations
cgccaagacaacgcacacgnccnctnnnnncattgttctttgtcattttgaatatatancattcggccaatcagaagaatcttgcgtgctttgtaaattntgagaactctctgcttcaaccattttcttttttagttcatcctacataaatacaccttataaatacaccttataaattattatcatacatcaatatcctgaatacttcaatatcactaaacaaaactcatctccacattagttactccccctcaccccataaccttctattagaaaattgagcaaaacaaagaaaaagtattgaaataaaaattaaaattcttacaattacaatagcagccttttcagaacaatgcttccatcttttcgagttcgagtgtcaatataaatttctgccctagaaggttgcactcccttagcctttgtagtctaacattagtt

SEQ ID NO: 55923 - DNA, 395 bp, Glycine max
  unsure (1)..(395): unsure at all n locations
agctncnanactnnatatcttattgaagcnctgataccacnngttatacaagnggccgcagatatcttaagaaagggggttgaattaagaatttgcacactatttccccaattaaaattctattttaatttcaatgcaagttaccagttcccttaagaatgaactcttaaataatgattcaaataaaacaatctgaatataaatgcaaagcactaataaataaaagagtttaagggaagagaaagtgcacactcagaattatattggttcggccacacccttgtgcctacgtccagtccccaagcaacccgcttgagagtttcactatctttgtanatccctttacaagttatgaacacacaaggataatccttcctttgtgttcagattcttta

SEQ ID NO: 55924 - DNA, 380 bp, Glycine max
  unsure (1)..(380): unsure at all n locations
agcttccgtatgaagnnnatggntgttggagcatttaacatttgcatcaaatgcatgtccttcttcatgctggaaaatcactttggttggcttctgtgttgactattgcagtaaaacaatacttgctttaagtcacagcaggtctgtcatagtagagcacgtcttttgatgttggttgggaactctcagatcttgaacttcatttatgcttcataggattcgaaaaatcttaagaaaatgtctttgcaaaatgaatcctagacacatgatattaaatgaagtcttgaatgtcatatcttaatgttgtaccagatcatggcatatctctactatccgttgaaaatacaaagacatatgcatgagtcatggtgtgatatcgc

SEQ ID NO: 55925 - DNA, 344 bp, Glycine max
  unsure (1)..(344): unsure at all n locations
ccccatcttttcggaaaatacatcccggagatgccctttttggacatgtcgtccctttgtacttatcanagtctggtacttttgaactgggaaggatgacgatgtcgggcacgagacatanatctcgcaaatccgagaatgggtaatggccaaggccctcgactgctcttaacctctcttcaagcgcctccatcttccccttatcttccgcgaagggaacagattcttttacgggtgtgtgggaaagccggatatggcggactatgttcggttggggtagtcatggngggacggcctttgatgggagcatggggcaaaagggtactccttcttattgcttgccg

SEQ ID NO: 55926 - DNA, 358 bp, Glycine max
ccccaactcgctcggccggcaatgcccactttggcaccggttccaacgtgataaggaactttcccccgaggacaacatttaccctgatcccaatgacatatgatgacctcttggcatccctcattgccaaccagatggttgtgatatctcccggaaagatctactatcctcctttcccaaagtggtacaatcctgacgcaacctgcgtataccttgcgaaaaccccgggccactccaccaaacagtgcctggcctttaaacataaggtccaaagtttgatagaagccggatggctgacgtttcaagaggaccagcccaacgtaaaaacaaactcgcttgcccatcatggagggggagc

SEQ ID NO: 55927 - DNA, 414 bp, Glycine max
  unsure (1)..(414): unsure at all n locations
tacatcatgtggtatcaagagcatcttcatctatgtgatgttctntcgctccctctatcctgatattcagagaattctctttaattacttgtttttcatattattctccatatatatcctccattgtcttgcggcttggcgctgttttgagtacattcaaaaaataaactgattatatcttagatctacacttngctcttgcatctctatggctcaaattctatagatttactcttgaatcatgtttttgtgttgattttatgctctatctaatttcagtcataattcttcttgtgctgaacctttaaatctaaattgattccaacatatcgattagataaaaatctaagtgaaatcacttaatccattgtgtcttaaaaccatgtttagtcaacataattgtcacattatgtt

SEQ ID NO: 55928 - DNA, 404 bp, Glycine max
  unsure (1)..(404): unsure at all n locations
gctgcggggcaacacaacagcatagccttgagagagagtaagatttgtgagaactatctgaatgaaaatgaagttttgtatgaagaatttanattagattctcactgcagggtgaggaggggaaaagataagtgagagaatgaagtttcttcaagatcttgtacctggatgcagcaaggtggcttctaagtttgaacccaganaattcactatgtcatattggttattgtgtttatgtatcacatccttttaacattggtatttttactntctatgctnttaggtcactggcaaggcagtaatgctagatgaaatcatcaactatgtacagtcacttcaacgacagggtgaggtatggatgaaaagcttatctccctattgcccacatgtgattcttaagtcat

SEQ ID NO: 55929 - DNA, 434 bp, Glycine max
  unsure (1)..(434): unsure at all n locations
aagctntgatataatatggggcatcttcctgtcgcaacttatccttcggcgggaggacgacggagggctcacgggtgcgtcttccaagggagaaaggcgtgcggagtcgccaccaacttttatttggggaaaacgtcggaaaaaccggaacgttnggtctatgaaaattaagtgtgaaaggttcgggagttgtttttatgcacgagtaatgtattagcaccccacgcatccgtcacanaggacaacaacctttaatcaaatgtgtaaggtatgacttcaaatttatgtattttccctttntntatgtttntaggctctttatgggtcattttatatntttttatctttttgtggtcgacaagggtgtttccctcgctcctacgtatcctcaattgcgatgaggaaatcagacctacgtagntctttcaaaacta

SEQ ID NO: 55930 - DNA, 355 bp, Glycine max
  unsure (1)..(355): unsure at all n locations
cttgagcgactgcggctgcagcttctaaataactatttatacaacatctanatttgttttccggtaagaaaaaaacctaaaacctattaaaatggcctggtgaaccttaattatattccttatcatatttacttttaaggtaggccatggacgatatccatagaaaaaatctaacccaccgtcggcaaaaaaaataatagtcaacattcactgagaaacctggatgaccacgacaaaaaaatcttttgtcgacgtcagcaaaaattcctatacttatgcagtgagaaataaccctactaatatatctaaaaaatctgagcgatatcgacaaaaatagctttgttgacatcataca

SEQ ID NO: 55931 - DNA, 387 bp, Glycine max
  unsure (1)..(387): unsure at all n locations
agaagtgagaaagtgtggaagagtcagtcttcctacttttattcgttgattcacagagtnggacctggagatatgtcgcggnggtcaggagaccttggggacgtcaggtggggtgctatttcccaaaactaagcttgaccaatcccgacccaacccgggcatagtcagtcagtgagaacctgtgacgtacctaaacaggcgagctcttggcagtcaaccgataaaagaacaaagaccacaaagcaaggaggcttgtgtggtggctggccaactatggatcttgagtgatattnggaatatgaccactggtaatcaattaccaagggtgtgtaatcaattacaaggcttaaaaatgaagacaggacagtaagatggtctcgggtaatc

SEQ ID NO: 55932 - DNA, 249 bp, Glycine max
aaacctttatatcattaaacttgtataagcaaccttacaatactaaagatcttcacaagaaactaaacgacttcttctgacttgttctcattaattaactgagcacttgttgcaactgagttctgagctctgttgatatctttacaataaaaccgatcaacttcactgggggtcaaagttctattcatgtggagcagagatatccttcctcagcatacatatatacaagaatacttgtggtgaagtggc

SEQ ID NO: 55933 - DNA, 462 bp, Glycine max
  unsure (1)..(462): unsure at all n locations
ctctcacttagaataacatgggagcaactgtcaactctatccagtcatgcacaggccactcgcccncccccccccccccatattgatcgacatgagtcccaaagaagttccaaatcgagtgaaataccccccaagtacaagattattcctcatgaagaactgtaggtacttactgacaagtttatactatnttcacacaattatgcaatatgaaacatgagctccaatagtacactgaccttggatagttaaccattttaaaaaattgtctttcttctccagcaatgcttatatattttgaaccaatccctttccttctgcagggatattcaaataagatcactacactgccatgtacatacacaacatgcattcatctcaatggcatcatcaacatcaacatcatctcatctcaatgtcatcaacatcacaagcaatcacattccacacatacacattggg

SEQ ID NO: 55934 - DNA, 283 bp, Glycine max
  unsure (1)..(283): unsure at all n locations
agcaaacatgaaaaaataattcatagttagaaaaaaatcaaccaagcactatatgtggggccaggtccagcacataagtgaaagaataatctccgttaacataggcataaaaccttacctctttctctttctttgatattcatgcgttctacattttctgcccaccaaaaacaagcataccatactgctctatcatcgtacaaagaggatttcatcagcatagaacaattactgcacatttctgcaggatgaagnngatcctgcgagcttattagacatacct

SEQ ID NO: 55935 - DNA, 168 bp, Glycine max
gcatcatgatcacaacaaccgagcccgccaactgtggactctcttaccaccacctgctcagcctaatcaacaggaaaaaaaaagtgcaaaacaatattaagttcatgactacaacacttactcacgttctaatggagacactcggtaagctccaatagcttgggaaga

SEQ ID NO: 55936 - DNA, 428 bp, Glycine max
  unsure (1)..(428): unsure at all n locations
atttggtcaaggagaagcaattgcagaatcatgttatgagcttgagtgcgtttgagagtatggaagagaaacaacactatcattgtcttatcaaagctctgattcagtttgggtagggttaaacaatccaatactcctttgcatgttcatcctaaattcatacctctttaatccaatgctagttgcagaataaatcaacaaacttgttgaaacctagaatataaataatggctttctagtgtcaatctctgcaaaacatggcatgtcccttgtaataccttgaaaattaaaactcatattgtagaaagttatgtgttgtgtgaattatagaaatataattaacattgaanattaatttcaatgaaagtttaagtcaagtagttaatttaaaaatcaattatatgcatgctatctcatgtgataattta

SEQ ID NO: 55937 - DNA, 458 bp, Glycine max
  unsure (1)..(458): unsure at all n locations
taatcttttctaatagatgaaaagaaagacgtgttatctcttctcttcttgngccnnngnnctttngaggtaagtacaagttgagctttctcttattgcatgaataataatgagccatgggtagattttatgaccttaggctcatgtttcttgatcttggataaattgtgaatactccaaaacacttggttgtattaattaattgattgagttttgatgtttggatttctcttggatntttcccttttcatgttcttgaaattagggatttagagatttgagattgaatatttaattgtatttaaaatcaattaggaacatgtaaagtgtaacacctcaatttatggactttaatcattaataaggtagagatatttttatggcatagcctntatgattaataggtaaaggatacccttacgcattattaataataatactttatatcagatggggag

SEQ ID NO: 55938 - DNA, 362 bp, Glycine max
agcttcgataatccattgtgagcgtctcgttatattaccggacccagaccgacaaccgagtgaaaagttatcggcgttagaatttatcagagcctcagtatgccatattgagcgtcttgatatattaccgccctccatccgacattcgagtgagaatagtcttggcgtttgaatttgacagagctatacactcaattcgagggttcgatatattcaggcccaatccacattcagtaaaagttatgccgttgaattgcccggcttcacatcatttgacggttgaatttgcggatccatcggacccgataaaagtatggccttgatagctcaacttcgatcaagcgaccttgaatctcggctca

SEQ ID NO: 55939 - DNA, 346 bp, Glycine max
gagacgctcgaactggaataccgaagctctgagcaaattcaaacgacaataactttttactctgatgtctgattcagccccgtaatatatcgaaacgctcgatattgaaagttgaagctgtgagcaacttcaactacaataactttttactcgggtgtctgattcagaccaataatatatcgaaacgctcaatattgaatggtgaagctttgagcaacttcaaacaacaataacttattactcggatgtctgattgagacccgtactatatccagacgctcgacattgaataccgaaactcttaaaaaaatcaaactacaataactttttactctgaagtcagatt

SEQ ID NO: 55940 - DNA, 446 bp, Glycine max
  unsure (1)..(446): unsure at all n locations
agctttatggtaatgttcttgttgnanaatatcctatattngtgggggtcgntagcaccctaagttcttgggcgggcctaaaaatatgctggctattntaggccacacctagatactaaacactttcataatcattcaacttgaaacgtccatacatgaacgatattcatttcaccaaggcaaagatcatagttattatttttattccataggtcanattcatcgcatccattcgtatgcgatcagtttattggtggtcgagcagcatcgatgagtttgggttactgattncttcggcanaagttntaatttntagaccaatattntgctagctttggaccaagctaaacttggttcctaacacacatcgagggaaatgtatcgatatcacagataaagctatntgttcattacanaaagcgtcacttatactaatggaaatgtat

SEQ ID NO: 55941 - DNA, 407 bp, Glycine max
  unsure (1)..(407): unsure at all n locations
tcattctacacctgannaagaggatgagatagttgcacaaatgatattgtcttctaacaaaaaatntcatgcagatggaccttcttctagtaattctgacttacaatagcctcatatccttcttccattcccacctagagcgattccaaacaaaaagatggaagaagtggaaaaggagatctttgagaccttcaggaaagtagaggtgaacatacctctattagatgccatcaagcagattccaagatatgccaagtttctaaaggagttgtgcacccacaaaaggaagctcanaggcaatgaacagattagcatggacagaaatgtgttagcattgataggtaaatctgttcctcacattcctgagaaatgtaaggacccaggtactttttgtataccttgcatta

SEQ ID NO: 55942 - DNA, 630 bp, Glycine max
  unsure (1)..(630): unsure at all n locations
ctcctactcgtccctctcaaccgctcacttccgtantnccaacatttttacatttcnatcccaatncaaaaancccnnnaagagagtttgaaaccatttgancatcgatgaccntcgnannanccgcgccacnatagaanacncaagcccncnnnaagagcgaaacnaacnttttattttgttgaacattatttatcccgcgaccagccgacgacaaagaacgagatatcggggaagaaccacctctttcgctacttcactgagaaagtcaaacaaaagtcgtcacattcctaacacacctgcaaccttctataatcccaacgctaataacggtaaaacacacaaatggtgatgacacataaaacatacggaataacgcactcgcgaaccctctaaattatatcatcgaagacgaaagccgactacattgaaaggcatacacatgtgcactaaaacatggaccaggtcagatgcccacatctcaccccaatttaaaagcgatagaatgtacacccgataaaacacgcgataccgtgcactgacacctcactgcgcggctccaaaacacacgcgttatcaaacacaacatcatccaccgccgataacatcaaaccacaccgtacccactcg

SEQ ID NO: 55943 - DNA, 272 bp, Glycine max
  unsure (1)..(272): unsure at all n locations
tacaaacatccaacccactctaattccaactaataatctccagagacacaaactcaaccagcatacctatcttatgaccatagttaaggnccctcgccaagcaattcaattccttattgtccactatagagattaatacagagattgtggcgaactaagggtcgcttagctgccaagtttccttcatatgtgtgatattcaaaaagttaacagaattccaaaaacaagctcattaaggggatattcagagctggaacttcagaaattgacac

SEQ ID NO: 55944 - DNA, 433 bp, Glycine max
  unsure (1)..(433): unsure at all n locations
agcttataagaacaatattgccttaacantttctataatgcangagaaatangacgcatcaacaagaatcaagccaaggctattgtgcaagccatcaatggggcaaaacacaccanatgattataatgatggatggctcaaattctcacanaggtaaaatcatcactgtcaaattgagctttcaaaactatcatgacatgtagaaaagaatcaaggatttcaagtcacaaaatgtcaagaacttttattntcanaacaattacccatttcttgaacatatcctataattcaaagaaaaacatgcaaagtcgtacgtgcacatgaaattgacccanaatattaaactgaaaatccgacgaaactaacaacattaacaatataacacaactaacatattaacanaaccaacaaaactagcataaccaaagaacac

SEQ ID NO: 55945 - DNA, 244 bp, Glycine max
  unsure (1)..(244): unsure at all n locations
tcaagtccttacttggacatccatacattgggcgattgacttacgatgagaagaatattattgctgatatgacacaagtgatggtgaaaccaagaaacattctgctaacattgaatgagcacaatgccaatagttgcaccacaatcaaacaaaattacaatgcaagaagngcatatcgttcttccaatagaggaagtgatactgatatgcaacatctaatgaagctttttgaacgcgatcaata

SEQ ID NO: 55946 - DNA, 179 bp, Glycine max
aaaaaagccccccccccaccaaaaaagagaggaagcggaaaaaaaacgacaaagaaaaaacaaagaagaaacaatacaaaggcagagagaaggataaaagaaaaaaggaggggaaagagaaaaagcaaaggcaaaagtggagggagaagaaaaaaaacaaagggaaaaaacgaaaaaaa

SEQ ID NO: 55947 - DNA, 289 bp, Glycine max
gctttgaaggagagttttggagtccatatctggtaaggatttttagaaaactataaagcaaaatgcgggaaatgattttatgaaaaatgctttagagcataaacttgaaaattcccacaaggataattatacggaccctaagaataataacacgtgtaatactttcatgatttccaagaaatttgaatgtgatgcagtgaaacataaggtagatcataagtatgagaaccatcaagtgaatggaaaatagagtgcatctggggctaaggtaaaggaaagacagaatggt

SEQ ID NO: 55948 - DNA, 269 bp, Glycine max
acacagcaaaatctctcaaatctctctggaacttggacctttctctctctaaaatgtctagacatgcaaagctctgaatcccagtccaaactccttatctaaaatctgatttcaggcttaaataggtgaccttgttcgtgctcgtgcgcttagcgcaattttggaccgcttagcgcacattaatgaatttcggattagcgcgtgcctttgtcgcttagcggatggactgaagcggtgcgcttaatgagatgaagcggtgcgcttagcga

SEQ ID NO: 55949 - DNA, 237 bp, Glycine max
cctaaacaaaaaataattggggaagcttcgccaagtatccccattgaaaaacctttattcaaacctttcaaagttagtgagaaggctaaacgaaaaattagggaacatagaaaaactaaatccttaattgaaggcgtaggtgacaatcatagtgaattactaaacaagattggtagtttacttaaggtcatttcagatactccccaagcctcggaaaatacttccaaaatggtaata

SEQ ID NO: 55950 - DNA, 276 bp, Glycine max
tgcagcttgtcacgaagtttctgcatttctccctataagaatgcaatttaataataagcgggaagccaagccaaatgtgggaaattaatataaaagaagaaatataagcaaaaagagtcatggaagtcaagaactcaaccactaaattcagatgaattggcagagtaaagcaaaaaaatattacctgcaagaatcgacgttcttcaagccactgtttgacaggcatcactttatcattagcatctttccattcatttgcaaccacaacagctactc

SEQ ID NO: 55951 - DNA, 174 bp, Glycine max
ttttaagttgtaatttttaaagtctgcaaatgcatcttctatctcttgcaaatgagacacgcgatttgtctctttcttacagataatgaacctgaatttgttacaattagtacccgatttttcttcctacaataagaacctgatttgtcctcaatagcacctaattgtacttag

SEQ ID NO: 55952 - DNA, 251 bp, Glycine max
ggaagggagagagaaattagggatgctaaaggaaaggggatggattaaagaggtaaggaatggtggggtaaaaaaaacaaggacagaggtgtagcaagtgtaggtgttatgagtaaaagtgggaagggtagcaagtttatttaaacatgaggtgtcctgtgtataaacatgtgaggaacaaaaaactatatttttaaaaaaaaaaaaaagatttttcccatttactatggagacattaaggaaccaacaaa

SEQ ID NO: 55953 - DNA, 161 bp, Glycine max
ttggggacgtcagggggggtgctattgcccaaaaccaagcttgaacaatcccgacccaacccgggcatagtcggtcagggagaacctgtgatgtacctaagcaggcgagctcctggcaggcaacagataaaaggaaaacaagaccacaaagcaaggaggct

SEQ ID NO: 55954 - DNA, 227 bp, Glycine max
attgccccttgaattggcgtccaggttcatcattctatttcgagtcattaaaaacaaggggtacggtggaaattaacctacttctacctagtggtgaatttaactgttatgatgagtaatgggtgattcatgagaaactaacctaatgttatcataatcatatctatgtacatatatataagtgttaccgatcatcttaaatttatgtatggcggtttgcatataat

SEQ ID NO: 55955 - DNA, 245 bp, Glycine max
ccaactctcttcgaaccgaaacatgttcaccggccctcggtgcgaaacgcttggactaggggagggaacccattctgatggaaggaactacaccaccggatgtgtgtccctgtgcaacaggctccaagacatcgaaacgaacgggtcttgttccggcaccggttgttgcgagacttcgatcccgcgcgggttgtcggggttctccctacggttcttcgagcgtgtacaaccacacaagcgtgatt

SEQ ID NO: 55956 - DNA, 272 bp, Glycine max
  unsure (1)..(272): unsure at all n locations
catgcaagctttgngggcttttgtgcctccttttccagccttgtcccgttgttttctctgaactgtgtttcatgattacctcaccttctgccgattgatttttttctcttcatttttgtggtctgtttcttctagcttcacttgacattgagtactgcccttgatgaggttttacattttctgtttgctacacaaggtttcctccgtgctttctttcttctccatttttggggtccgtctcttgcatcttcacttgcagtttttgctttgat

SEQ ID NO: 55957 - DNA, 280 bp, Glycine max
gcatgcaagcttggaggaataatttggtacccatcacatgtggtactaagtggcgggcgggcgatggtgcacaacaagtttttcacatccacaatgcgcgcataaacccaccatcccctgttgcccacctccaactgagctcacgtactcccacgtagcccatatcctcgtttctctcaacaccgggtccccatcaatcctctcaagcttccacaacatccaagcaaaacaacattcaaacagcataagctatcacagccaagcaaaagcagagcaaagg

SEQ ID NO: 55958 - DNA, 291 bp, Glycine max
agcttgtgtcgccgttgtaaggttttggaagaaaaaagcaaaatttttggttgttttccaaggctacacgaaaaataagacttgaaacactcaagtgtttctgctctcaggaaaataagcatttctcacacaccagatgacatatcgcagattgcaacactcagattgtggacatctgtcctatgaaccttcagaccaaatttcgagacaatccaacggttaacgaatgtaggaatacacttttaccgagacagctcagacaacttccttgagaaactttctcgtaaggct

SEQ ID NO: 55959 - DNA, 113 bp, Glycine max
tgccaccaaagggctggaggacataaaggatgggattaaatgaaatcaagcggaccctaaagacaaagaggtaccggttcagaaagaaataggacgatggcggtggccatgac

SEQ ID NO: 55960 - DNA, 242 bp, Glycine max
gaagactcgaggctctaaaaaaacatgaaccgctatgcatagttagacgaagaataaataagaaaaaaaaatacagcgagtaatataacagtaattctgaaaaaaaaagaagatataatatgattccagtttgctgcaataggacatttttttcccactggtgctgcaacaacataaaaacctgttgatacgttattttttataattataataaaataaaacggctgagattgttatactat

SEQ ID NO: 55961 - DNA, 270 bp, Glycine max
  unsure (1)..(270): unsure at all n locations
aaatagggggagaagngaagtttataaggttcagccccttaggcacttctctctctttcgaatttgcttaggaaaattgtttccgtgaagaaaatccaagccgaggcgcttccgtaacgtttccgtgagtgatttcgtgaaggttttcgaccgttcttcgacgttcttcattcgttcttcatcgttcttcagtcttcaacgggtaagtacctcaaaccaagcttttcgattcattctatgtacccgtggtggtccacattttgtttcatg

SEQ ID NO: 55962 - DNA, 226 bp, Glycine max
ttgtttggctgatttaaagcatttgaattacttggacttgagcgggaatagatttcttggagaaggtatgtcaattccttcttttcttgggacaatgacttccttgactcacctcaacctctctcatactggattccgtgggaagattcctcctcagattgggaatctctcaaatttggtgtatcttgacctgagttatgtttttgccaacggaacagtaccctct

SEQ ID NO: 55963 - DNA, 171 bp, Glycine max
tataatcgtgtgctcccattactacctttaattactaagtgtctatcttaacttcacgaagcgggaaagtctgagaagataaatagcttgggaagtctctatcctcaagcttgagtgagccaccatagagtgagtcaattttgtaaacacatccttgtaaccctactatca

SEQ ID NO: 55964 - DNA, 267 bp, Glycine max
agcttgaggaatcattattttatcactagagacatcactattactgctagactacacacatgaacccgcttaaaagtaaaggatgagtttatcacaattggggttagaatgaacatatgtagggatccttagaagattaaattggggtttgttttgggatgcttattgaattatatttcttcctttgcgattataattacgatattgttgtgtttgatggaccaattgatgtcctgatgtgaatcagttgataaaattgagtgctct

SEQ ID NO: 55965 - DNA, 266 bp, Glycine max
acaaagcaatgcatttccaattttaggttactacccttacccaccaacaaaagctatgttgaagatatacttttgtaactacataatattttattttttcagtttttacaataagatttagtaaataagttggtttcctatattttaagagtaagtcagttttaatggattagcttagtcaaaaagtggttcctatctttaaggagcaagttagctttaatattatggtttgctaatatcttgttatctaattaggttatctttta

SEQ ID NO: 55966 - DNA, 230 bp, Glycine max
ttcaagaaattttttttattactacagacatggctttttctgataaaatagacacatgaacccgattaaaggtaagggatgagtttataacaattggggggagaatgaacatacgtagggatccttagaggattaaatcggggcctggattgggatgcttatagaattatattgaattctttgggaggattattacgatattgttgtttttgatggaccaattgatgtcc

SEQ ID NO: 55967 - DNA, 158 bp, Glycine max
  unsure (1)..(158): unsure at all n locations
aagcccccctagcttggacaactgctgnttaggcttcttctggcaagttgtctggggtggaaatgcttttgatcttgcaagcaaaattagacgtgtcaagtggatgatgtccttatatatgacgattcagcccttttctgatcattggaagatgcatt

SEQ ID NO: 55968 - DNA, 262 bp, Glycine max
  unsure (1)..(262): unsure at all n locations
cagcaaccaaccggaggtttgccagggacnacaccccccgtgccgcacaggaaaaagaaaccccggcgcccacaaataagggcggaagagaaaaaaggaagggagggcacggacaagaccacgggggaggcaaaagatagctaggccccccgcggcaacgcaaagaggggggagaggctcaacaacccgaggagcccagtaaacaaaacaggaaggaaggagggcccacaccaaaaaaaacgacccccccaagaacagggga

SEQ ID NO: 55969 - DNA, 229 bp, Glycine max
  unsure (1)..(229): unsure at all n locations
agatgtttaaaggtanaagngaaggattgatattattaaggaagggttgttaattgtgggattttataatataanaattattttttatagtgagttagtaataatttggtatgaggatgttttgggttatggaatgtttgttgggatgtgatnaaaaggatgttttatgnaattaaattaggatttgtttaggttttttgggattaaaatattggagaaaaaataaatc

SEQ ID NO: 55970 - DNA, 265 bp, Glycine max
taatatttgaagattatccttgtggaaccttcacccaacgaagacactgacaaaaacttatcttctcctttttggacaaagaatggcaggctgggggcaagtaaattttcttcccatcagaccttggatgcaactgtgatcgtatgcccatataagctagatcttgacgggtattcaagccatccttcgtcttgccttgaatgttaaggagcagcccaatcacactgtcacaaacatttttctccacatgcataacatcaataca

SEQ ID NO: 55971 - DNA, 241 bp, Glycine max
caccccctttgttaccccggaagagttaagccaagcccctacttttgaggggcaactcccaccttatgaagactatcccgggcaagacgatggggaaggagatacctatcttggccccctgctccacctcaaagatccgtccccgcatgaactaccccagccgaacatagtccgccatatcccggcctcacccacacccgtaaaagaatctgttcccttcgcggaagataagggaaagatt

SEQ ID NO: 55972 - DNA, 268 bp, Glycine max
agcttccatcaaatttattcatctaataccctgatgttcaatggttaaaagactaatttattgtatggtgatatgcctttgtgctccattacagtacagatcacaaaagtatagtgtcttgaaatgaaaaatattttaaaggactttctcatgcatgtgccttgatttaaacgtactgcatttgagatagaactgttatatgtttagttcttttaatcatatcatacagaaattatttgagttaggatttaccactgcagcagcagac

SEQ ID NO: 55973 - DNA, 172 bp, Glycine max
gatgagaatgaaaaaaaatgggagggaggagaaatggaagaagaagaaggaggcaagaggggaaggggaatgaaggaggggaggagaataggaaaaaaaaaaagggaggggggtggaggagagaagagaagaaaaaagtagagataagttaacgctggataaaaaaaaagga

SEQ ID NO: 55974 - DNA, 275 bp, Glycine max
aaaatccctaacactttttagatttcgggataatgtgctgtttttataaattggggcccgcccccccgtagatacgtggagatattatgttatttttggggctaaaagagatatggtcatactgagttttgaggaaacgctggagggctggtaataccctgaggggggtatgtgtataaactttcttggtgggtgtaaagattaaaagcctgataatcacgcatagatttacggcgccttctgcgaacttcttcaattgcggccgaaaaacccgg

SEQ ID NO: 55975 - DNA, 220 bp, Glycine max
  unsure (1)..(220): unsure at all n locations
aagnccatagccatcaaagnctgaaaagagnccgacgaaccaagggacgtcaatatggccaccgctgatgccttggaacgagaaaccaagaaggcccaaaaggaaggacacgtgccagcaaagtttggaggggctctatagggcagcaataggaagctcaagctccgaagaggtgaacggaatcatcacgggtcaaaggcacgatcttgaaggacgagcc

SEQ ID NO: 55976 - DNA, 271 bp, Glycine max
caagccctacacgcagagcttgaaagagcccgagtagtcgatttagaagttcaagtccatagccatcaaagtctgaaaagagtatgatgaactaagggacgtcaatatggccaccgctgatgccttggaacgagaaaccaagaaggcccaaaaggaaggacacgtgccagcaaagttttgaggggctttatagggcagcaatagtaagctcaagctccgaagaggtgaaaggaatcatcacgggtcaaaggcatgatcttgaaggacgagc

SEQ ID NO: 55977 - DNA, 226 bp, Glycine max
gccccattctaacccatcttaaaaacccggtggtggtgctctgcctattggtggctttgttcccccaccacattaactaattgtaaaagaatatctttcatatttttcatattagccatcaactgagctagtgttgggttcccacgtgtagctctaagaacctcaacctctagcattccaccaccactaccaagtcttccccgaccataaccacgaccacatccac

SEQ ID NO: 55978 - DNA, 241 bp, Glycine max
aacttaacttttatattttaagaatttttttttatctaaaccccacctattctccaccggtgacaatcatgtttgagtcgggtaggatcagtatgacccggaaaacttctcccttttagtatttaatacagctatatactcagaactcaaatgcgcaaaacctctgattaagcttgaacaatcccaccggatgaaccacatgcttggcgattgcatatataaagactaaaacttacaggtt

SEQ ID NO: 55979 - DNA, 224 bp, Glycine max
tttgtcaccattttaattactggttagccataattgacaaattcattatgcagttttatcatttgggcctacttgactaattttgtgtttttaatttaatttcaggagaattataagcaattgggcatgaattcggaattgggcttggacttggacttgaagagagcaaacaattttattttatcaaatcttatcttatccagattttattccatctagatttt

SEQ ID NO: 55980 - DNA, 185 bp, Glycine max
ctcgtgcgcttaacgcagatctaaatcacttagcgcgcctaagtggattttggcttagcgtgcttgtttcgcttagcaaatgagctgaagcggtgcacttgatgacctggagtgtgacaccctctaccccgacatatatataaataaataaaatatataaaaatatattggtaaacaaaatcaca

SEQ ID NO: 55981 - DNA, 272 bp, Glycine max
  unsure (1)..(272): unsure at all n locations
caagcaccacacgcgagctttggaagggaacacacacgcgattataagcacgagcaaacacagatccaaggcagcatgcgtactaagaagcatgcgcccgacctcaacagtcacatgcaatgnncgagcaaccacaaagaaaaaacccaagcgaggacacatgacacgctcacttatgaagacgaggcagaaagggcccggggtnccctgtcgagcacaggccacgccccccgccacatcacgggtgaaaagaacgacgaccacagacgagg

SEQ ID NO: 55982 - DNA, 240 bp, Glycine max
taaaagaaatctgatgaaaatgggcttacaaaggttcaacttgaccctggaagaaaaatgaataaaagactctcacaaggcttatgctttagagcttaagctcgagttcagaagaaaaatgatttacaaggtttaagctttgcaacttaagctctatccttgaagaaaaatgaagaaaaggctttgacaagggttaaaccccatagcttaagcccgaccctggtagaaaaatgaagataa

SEQ ID NO: 55983 - DNA, 280 bp, Glycine max
ctgctttacttaatatgaaaaagaaagaaaaaaatcaccgaccttttatgtactactttcggatcattcggacgtattgtgtcttcgtcgtcttcgcgtcgcgacttaacggtagtttcattcaaactttgatcatcttgcccctagggccatctgcttgatgttcactcattgcacttcgatctttctttttaacagttaacacattagcttactactataagttaagattaccgcgtggtgatccgtatgcttaataaatacatgtctgttactgtat

SEQ ID NO: 55984 - DNA, 221 bp, Glycine max
catacacgcgagctcgaaacaaatcttctacacttggagtgaacacatgctattctgttgaacccttaccacccactctgtcaatatgcccagacttaggaaagccaacaggcttagccttctctaaggattctaaacaaagatcaatggcttcttctgcaatggacctatcaacaatacacgcttctggatgatatagattctttgtatacccttttaac

SEQ ID NO: 55985 - DNA, 221 bp, Glycine max
tgaaggggcctattcaaaactgaaaagccttggaggaaaagaagaatgcctttgttggtggggatgattttcttcatatttacctggagtaaatttttcagagaaaaatgagacacctttgatgtattcaaggagttgagtctaagactttaaagaaaaaaagaatggtgtattaataaaatcatgaatgaccatggtaaaaagtttgaaaaaaacaggtt

SEQ ID NO: 55986 - DNA, 214 bp, Glycine max
tgacaaacaagggggcaaacgacacttgaaacggcgcgagagtcaagaagcacactatcaaataagcctagaggggacgtgctacaatatggaacacacgcattgggacacgaaagaacatcgtgggaagcatgaaacgacaccgacccatgagcatattatcagcatcaccgttagcagcaacaccctatgaataaacccagattcatcagga

SEQ ID NO: 55987 - DNA, 212 bp, Glycine max
ctactaaaacagctacccttatgcattggtcggataaaaaagcttactcgcttattagaaatgggagggtgtaaaaggctcagtggcttgccacattttgtagaggaccttaattttttgaagaaaataaatctcgagagaagggaacaactaaggcagatacattcattcattgggccttataagaaaccttattggtttaaatttgagag

SEQ ID NO: 55988 - DNA, 267 bp, Glycine max
gcaaatatttggaaagttagtttacaagaaatataacaatcattacaaacaagggccaaacaacacttctcatggcacgagtgtcaacatgcactttataaaataatcatattggggtcgtgctattttatgacacatacgtatttgcacacataaaaattttgtgtgaagcattatacgacacctatccatgtacatattttttgacaaaccttttcatgctacatcctatatatatacacacatttttttggaaggcttcttttg

SEQ ID NO: 55989 - DNA, 289 bp, Glycine max
ttggatttccttttaatagggaatctatccttcctaaaatggagccaaacccaatcacccttattaaaaactagctcttttcttcctctattgcctttaagtgaatacacctttgtttgattctctatttggttcttaaccctctcatgcatcttctttacaaattctgacctagattccccttctttatgtataaaagaagtgtccagtgggaggggaatgaggtctaacggtgttaggggattgaacccatagacaacctcaaaaggggactgcttggtggttctat

SEQ ID NO: 55990 - DNA, 289 bp, Glycine max
ctcacactgtgtgtgttacttgctcgcactgtgctgcagaactgcggcggctctaagctcgggaaaacgactgtgtttgtggaacggcaatgatgaatggttatgccgcgcaacctggagaacgtgctgacttcttcgcgacaggcatgggctctggcttatagcttcaccgattattttcctcctatctcaccaaataccctgtccaataaagccctatactcgaggtgtccaaatgtcccgcagacttggactgggtcggcccgcaatcgttaccaagcgcctctgg

SEQ ID NO: 55991 - DNA, 254 bp, Glycine max
cttttagacttctcaccgatttggttcgtacgaatttatttttatctaaaaaaatctttggtccgtatagatgttccttttctttgcttgcttatgattttgggtgtttatacaccgatttggggttatatatatatatatatatatatatataacaacaaaaatccttttcctgtaaaagattttcttttctttcttttttatgatgaaatgcactaccttgctgatttgttgtatttcaatttttggggata

SEQ ID NO: 55992 - DNA, 66 bp, Glycine max
agacccgtccactcaatccctttgagcgatttattactgccgcgtttacacgtctgatgggaaacc

SEQ ID NO: 55993 - DNA, 327 bp, Glycine max
cccgggatcctttctgacgccttgcaggcctgcaagctttttggactataaacctgggaccaactcattttatttcattaaggaagtcatatctagtcaaggtctgagaaaccatacaagtttcctaacgatttctaattatgtgggccattaagtctatcatatgctgacaatagccgagaagcccatgaatctcttcgggggcggagtaggtgtctgccatcgccttggccttggctaacaatcggggaagttcttgactcccgttcaaggtaagagcaaaccgatccatccacatggttgcctcttggtgtaaagagtcgatca

SEQ ID NO: 55994 - DNA, 269 bp, Glycine max
agcttgcgttatatcttcgcaatctccattttcgatgccttttgagattctgaattttttgtatctggcctttattgtgtcccgaatatcgaatttcctggctattgtggagtttttgcaatggcggtattaacattggcatcagtttttgactttgtcagtttggtcgtgttcttctggtgttgcttcccacctatgtgtttattatacatgtccttgctattaccattcacaaattacagttttatcataccttgcttttctttgca

SEQ ID NO: 55995 - DNA, 273 bp, Glycine max
catgcaagcttgcagaatggctagacatgaaacatgtcaaggcttggtttggctcacggataaaagggatgccccacattatttccatgacacaaatgcaaaaatgacgatttggaaattttatgcaaaactggttatgcatgcacctatgcggacactcaagtgtcaaatttttatggtcatgtgatgctagggctcaggatacatttcctctattttagtcaacccaacgtttccaaaatatgttcttttatcaatttgtgcattaatccg

SEQ ID NO: 55996 - DNA, 275 bp, Glycine max
catgcaagcttataagaacattattgcctaaatcatttccaaatatgcatgtgaattaggaagcattaacaagaatcaagccaaggctattgtgcaagcaatcaatggggcaaaacacaccaaaagattatgatgatggatggctcaaattatcacaaaggtaaacttatcactttcaaattgagctttcaaaactatcatgacatgtagaggaaaaacaaggatttcaaatcacaaaatgtcaagagacttttattttcagaacaatttcccat

SEQ ID NO: 55997 - DNA, 195 bp, Glycine max
tgaataaatcaaaggttttgttgattgaggttgctcactaattaatctacgaatgtcttacaaactgatatacaaggcactctctagtcttttctctaaatatgctcaagctattctgagagttttttaaactttacaacaattagcaaaaagcttttaacataaagaatgaaagaataagagcacataagatgg

SEQ ID NO: 55998 - DNA, 268 bp, Glycine max
agcttggttttgggtaatatcgccccacctgacgtccccaaggtctcctgacccccgcgacatatctccaggtaccactctgtggtcaacaaacaaaagtaggaagactgactcttccacgctttctcacatcaagcttattggattatggggcacccgtcatatgtggtactaggtggcgatcgggagatgatgcaaatcaactatcccatttccacaagtcaggcataagcacaccatccctagttgcccacctttaacttgagct

SEQ ID NO: 55999 - DNA, 302 bp, Glycine max
agctgcttgaccctttttgttccccccaggagacttccgtgagcttaggcatgacacttggaatttttggagagctaagatctgggctaactactaaacgcttctaacactacaagccactggaaattgccttcttgctgatttttatttcctgaatcatatttataacaaggaaagattatgacaatgtgctgaaattgcactagtccgtaacaaactcaaaatggaaaataacagaattggttttatgcccctaacccattcttacaacaaacctataatctgtattatcctattatcta

SEQ ID NO: 56000 - DNA, 135 bp, Glycine max
taagaaggatggtgataaattagaatgatggaaggataaaataatttggatgtttaagtttttgggggcaagagtaaagaaatatatagaaatgattaaaaaggcatactttatataaaaatgaataatgatgca

SEQ ID NO: 56001 - DNA, 312 bp, Glycine max
ttgacgcattgaaagcactgcagctggctctttcatttttttttctgcacatgaaaaaatcaacttttcttggccatattaccaacaaaatttccgacacaatcttcgctcaggaggaaaatcggaaaatcgatatgaaattcggttcaacacctgcggtgagctttaagtttgcgaaactccccgacgaaacggaatccgcagaaagacgcgaagataatggcttcggtgttgccgaaattgaaccgtacagcgatttgaattggtcgaggcttttggagattgggaatcctagattcttctgcattgcaa

SEQ ID NO: 56002 - DNA, 289 bp, Glycine max
agcttttgggccgatttactatataacagcaccaatgttctagtttaactctctctcctctctctcttctatttttcgcttttagtttgagtctctcttctctttctcttttattttcattttttacaattccagttcagacttttagttttatcaataaaattttgttctctatttgattaatggaaggctaagtccacaacattgttttctcttgaggatcaagcacagttctctttgaggttctattattactgtttaattctgttcagtttttcctcttcactaa

SEQ ID NO: 56003 - DNA, 326 bp, Glycine max
cccgggatccttattacacttgcaggcctgcaagcttaatgaacacttttattctttgtcctaccaagtcattatttgctctgaataaaataaaggttttgttgattgaggttgctcactaattaaactacgaatgtcttacaaactgatatacaatccactctttagtcttttctctcaatatgttcaagctattttgagagttttttaaactttacaacaattagcaaaaagcttttaacataaagaatgaaagaataagagcacataagattggtgttttcttttttaaagcttctagtatttatagcctttatcttcaagtg

SEQ ID NO: 56004 - DNA, 117 bp, Glycine max
atatcgagatgctccaaattgaaaaatagaagctcctacgaaattcaaaccataataactttttactcggatgtccgattgagtcctgtaatatatcaagacgctcgaaattgaaaa

SEQ ID NO: 56005 - DNA, 269 bp, Glycine max
agctttaatatgattttctgagatatcaactccatcatgatgattctatccatcgctgaaaaaatcccatattgggtaaagtttaatgtaactactgatgcatgcctctcattctctgccagaggcttgtattataaaccatgaaggtgaatttgttatagcaacttcctctttctgccattgcttgatcttagcaaatgaagtggagtcagtctctctcttagcatgtgacacaatttaatttgatatatatatatatatatattaac

SEQ ID NO: 56006 - DNA, 268 bp, Glycine max
  unsure (1)..(268): unsure at all n locations
agcttcaggttgctttttgactccagattactgcaaagaaagacaaagttctgtatggtgatctgcaaaagaacatanaccacagactcttgcaacatgtgcagatttctgattcatggcaagctaagttactaggttgaccaaggcatcaagttttccctcaagctttttattttcagtagatgaagatgaatctgtggccacctcatggactcctctaaggacaatagcatcatttcttgcactgaattgttgggagttggaagtc

SEQ ID NO: 56007 - DNA, 216 bp, Glycine max
cggcctttaattgtttttgcactccctcttcattatccatttttctggatcgagtgttataggggtgcctttgcgctttcttagttatggtgagttccctaaagaaacaaacaatggtgagtatgccaccaaaacatgaatatgctaatgaatgatcagagcacttggatccacctcaaggcccctttttagataacgtgatgagtttcagaactt

SEQ ID NO: 56008 - DNA, 266 bp, Glycine max
agcttaagtcaagatatttagaaacatctaacacgtatttttatccccgctaagaagttgcccttattcttttgctgaggatatataccacgagctagatagtaaacccggatatgatggcccggccaccaaacacttaactctaaaataccaaatataaagagagacagaccaactaggaacactttcttagctatctcataactggtgtggcttgcaagagcaacccatactatagcacccaaacatctgtacgctagaaaatt

SEQ ID NO: 56009 - DNA, 226 bp, Glycine max
aacagacaaagaggatttgaaatatgaacacggcttaccatgagtatttgagcttcattaccttttgtagcacagggcacattgcacaagcactaaaatggaaggatattacaaacactgtggggaaaatatactctacgctttctctcgagatatgatccactagaaagagaaaattaaaaatcgctatgctatttgtattgttagcctttactttagaaaaaaa

SEQ ID NO: 56010 - DNA, 262 bp, Glycine max
tttgcatgcaagcttaacccctatttctttaacccaaaactctaaaaactaaaccctaaactctaaggcttagacaccaaaccctaaatttgaaaacccgaaacccttaacccaaccttttaaagcccttaaccctaaaatataaaaaataaaccctaaaccctaatggtttagacaccaaaccccaaacctcaaaaccctaaaccataaacccttaaccctaaattctaatccctaaaccctaaactcagaattctaatac

SEQ ID NO: 56011 - DNA, 294 bp, Glycine max
agcttgtgcgacctgttatcttatcgagctcaaaataggtcacgattagcttagttcattacaccccataccatgggtcagcctggaagaaagagaaacaaaccggtaagtaagaaaaaaggaaaaacagaaagtaaggggttccggaatgggaagtgaaagcataaaacagggtagagcaaaccattgcaggcacaatgatattgatggcaactggaaagagaggtgaatgatgatgcagcaacagtggttggaccaaaatggaggaaaaaagtgccaaaacaagagtaggac

SEQ ID NO: 56012 - DNA, 293 bp, Glycine max
agctttttatcccaagttcattcttggtggccaaactccttcttttatgggctaatccctaagggatggggccttcttttaactttttttctttggttttcgctgcatttacatgggggaaaatcaccattggaagacctaattgaaactcaaaaaatcatccttcatagaaacttcacaagcaagcttctgtcaagtggtattaaaacacaagaacttcaagtaggtgcttcttaaacctccattaattttcagctttaccttctcctccattgggtgttcttcatttttct

SEQ ID NO: 56013 - DNA, 290 bp, Glycine max
agcttgttggacttgttaactttcttcacagtagtttcttttattcttctcaccgatttgtttcgaacgaatttatttttatctaaaaaaatctttggtccgtatagatgttccttttctttgcttgcttatgattttgggtgtttatacaccgatttggggttatatatatatatatatatatatatataacaacaaaaatccttttcctgtaaaagtttttcttttctttcttttttatgatgaaatgcactaccttgctgatttgttgtatttcaatttttggggat

SEQ ID NO: 56014 - DNA, 245 bp, Glycine max
ttggaccaaaaaagcttggaaaaagaaaaaattgcatcagcccttggctgggatttatttggaaaacaaacaaagcctaatcactggggatttgagctcccaagaccggtgctacccatcatactctatttttgaattccaaaattcatattgtcatgatgtgcttatgaggaagacagtgttggactatattgctggggagttgagtaaaaagccgcactcggtcgtctttcttgaaaaagtgg

SEQ ID NO: 56015 - DNA, 189 bp, Glycine max
cctacaaaattttcttgcctattgagtatcatgatagtgccactaccaacgtgtcagatctatcttttttggacgcagatggaagagccttgtatttgctgacaaatcctttgtaaggagggagtgaagacgacataaccaagggcaacgaccataaatgaatatgatgatgaatgatcagaggactac

SEQ ID NO: 56016 - DNA, 244 bp, Glycine max
acaacattcctggcgacatctcaaaaggggtcaccactatacattatctcaaagatttatgcaaaacatggcttttgtatctatgaaggaacctaagaatttaaatgaagccctcatatatgaaaattggataatatctatgccggaagaactataccaatttgaaagaaataatgtgtgggagttagttgagaaacctgaacgctacccaatcattgggacaaaaagggtgtttagaaataaa

SEQ ID NO: 56017 - DNA, 267 bp, Glycine max
agcttagaacattgttttttgaattaaaaaaaatattaattatgaaaattatagaacacaacaatggtcatggatagttcaaattttagcattccaataaaaacataacacgctgttagcatttgtcatattgttattcttggatgggcctacaggttcaggttgttttgccgcaggatactatctcacacttctgtcagcataacgtggttgggaaaggtaaagcacaagctactgcgtggaaggttgtatgggttgccatcatgt

SEQ ID NO: 56018 - DNA, 262 bp, Glycine max
tgttgcatgcaagcttgaatttaattttggaagttttgaaattcccccactgtaactgtatctgtataaaaacaatattttaacatgacttgctatgtatgtgagagtatccattcctagtaaggggcagagaaaaagaaaacaaaacaaaaaatagatatgaagtattagatggtaaagatggcactgtatatagttttaatggttatttgaaattttaaacaccattaggcatgtgctgtgtgtgctactcatgattttg

SEQ ID NO: 56019 - DNA, 271 bp, Glycine max
agctttgagccaaattcttgactcaccgtaaaccttgacccaaggtgagaatgtcaatccttaccctcggaagcaaaaaaaagaagagaaggaaaatttccaatcaaaggaaaaaagagaggaaaggaaattcccaatcaaagagtgggagaaagcaaaaagaaaagaaagaaaattcctaatcaaagaatgggagaaagaaaaaaagagagaaggagaagaaggaaagaaagctcctgatcaaggatcgaaagaaaacagaagaaatgtg

SEQ ID NO: 56020 - DNA, 251 bp, Glycine max
agcatgcaagcctttctcaacgtttttagatgcaaacttaccaacattatttgtttcttatacgcctaaggttgggtcttcactagcttggttataagctcaaaacaaaagatgatttataaaggcttgaatacatgtaaaaccaagaaatgtgggaatttgaacttcttaaaggctaaaattatatacagcataataagaaaaagggttgagaaggggggatcttatctatccttttggaaaggtttgga

SEQ ID NO: 56021 - DNA, 227 bp, Glycine max
  unsure (1)..(227): unsure at all n locations
tttttattgaccgagnacctgtgggggggaagggaaaggacattcgtccccacaggggaccataaaatggtagaatgatcgtttaagacacatcgccgaatttagagggagggaaaatcacattcaaataagggcaaaaaagccggggatgaggcatatagctgcttttcggagaaagagtgaacgaatgcaaaatttgtggaaaataaagaaaccatgcgtgagag

SEQ ID NO: 56022 - DNA, 269 bp, Glycine max
cgtgtgcactaccccactactattgctgcaagcatcacaacatttttagaacgggcgggcaccgtcatagatatatgaccgcctggcagagatataaatcactgggcattatctgactacaagagtcgaggtatacaaggtggtatgagagctaagcatcaagtggggaaatttcaacacgatttaggcgaaagattgaaccacttattaaccaaaaggtgtctagaagggggatccaaagcttcctctataaatagtctgcatctcca

SEQ ID NO: 56023 - DNA, 322 bp, Glycine max
acccggggatccttatgacgccttgaggcatgcaagcttgcaggaatttatttttattgggaccaagccaccaaccatttaccaatggatggttaaaccattatggcttggttattcccatataattttggtggccttaaattaataataattcttggaatcttttttggcatggactaaagggctggcttggttataactaatttcccaagggggaacttactggggttgaaagaataaccctaacgccctgcaatcaaagtgaaaaacaataaatgtcacaaaacaaaccaataatgcttgcattgtttcttgaattttc

SEQ ID NO: 56024 - DNA, 287 bp, Glycine max
agcttctttatcttgtatctccatctaaaaggcattgttttgcattcctcaatgacttaatatttatttgtaattgcaaaatgacatcatgtccatatgtcagttgaaatggtgtaaaaccaatagatttacatcttgtattttggcatgcccagataacatttgataatgcttcatgccacttttgaggtttttcttccacatttttcttaatcaatgttgatcaagattttgttagttacttcagcttggcttttgcttggtccataataaggagaaggctgaat

SEQ ID NO: 56025 - DNA, 56 bp, Glycine max
cattatcttttaggaataactattttcgtcggtgacgtgagcctgattgtgttact

SEQ ID NO: 56026 - DNA, 274 bp, Glycine max
  unsure (1)..(274): unsure at all n locations
atgcaagcttgactttgcgttttgattttagccttagnttcactttagtgtattagtcaattcaattaagaaagagaaagtccaaagagaaacgtccggagggttttttgctttattttactaaaagatatttttttattattatattattattttacctgtttttggtttccaacgtagttacggtgtgaccgaatgatcggatttcattttaacagaaattaacagatattacaaatcaaacgatccgtggaaatatattttattttttttg

SEQ ID NO: 56027 - DNA, 87 bp, Glycine max
ttttgagggtataatcaacgtctataacatacttctatatatccagcacttaatatcagacactgttattacattatagaatagaaa

SEQ ID NO: 56028 - DNA, 219 bp, Glycine max
tttggtttttaaatttgatttatacctgaactatgacttcgttgaaccaacttaagcaaaatttgatgaaggtaaaaaggaattccaaatctgcccaatttatgccacagaaagctgtcaaattttgtgcaacacaaaattgtgcttgtgcagaaaatgttgtgtattattgattaaggaccttttctaggcgatcccaacggtcaaaatgtataccta

SEQ ID NO: 56029 - DNA, 262 bp, Glycine max
agctttctttgcttttgagagctagaacctcattgctagggagtattctactgagcactcttaatgtaaacctctaacaatctatttaatgttattttcaggtgttctttgcttctatttgcacttattttacatgcttgtggcttgatcatccatttgtatgtttaattaggcttttgagtgttggaaaatgatttaaaaccttaaaacttgatagagcaagctacaggcctgtgtatctaggaatagaatgcagtaatct

SEQ ID NO: 56030 - DNA, 220 bp, Glycine max
aggggtaaataacaccttattgaactggggataaaaacacacaacccccagggccacacttctttcatcactaacacccctggggctacccatggaggaccattgacggtcacaaaccacttttataacaactcctctaaccgtctcttaagctcggctagcactgtaggacacatcctataaggggctatggatatggaaccagcaccaagtaccaggt

SEQ ID NO: 56031 - DNA, 267 bp, Glycine max
agcttgtctcagcgttatgcgagacagaaaccaacatgttagctatcatcgccaaataccaagaagagttgggtctagccccggcccacgagcataaaatcgcggatgagtatgcccaaatatatgcggaaaaagaagctagaagaagggtgatcgactctttacaccaagaagcaaccatgtggatggatcggtttgctcttaccttgaacgggagtcaagaactcccccgattgttatccaaggccaaggcgatggcagacacct

SEQ ID NO: 56032 - DNA, 242 bp, Glycine max
aacccccccccctctacagagcgggaaattttaacccaagggggggccaaaaccgccgcaaaaaacgaaagagacagaggaggaaagaacggagcgagacccgaacacacacaaaggaagccaccaagggaacgccaagcaaaagacggcaaccccagagggggacgacgaccacacagcacgcaccgcaaaccccgccccacccaacacacaaataccgcgcaggacagaccccccccccc

SEQ ID NO: 56033 - DNA, 292 bp, Glycine max
  unsure (1)..(292): unsure at all n locations
ataaatgagataagagatgagagaatgcggaccttgctctatactggttcggcngaggccgtgcttacttccaatactcaagcaacccgcttgagattatcctttctctttggtaattcctttacaacttctgaaccacacagggacaactcatcccttgtgttgatgaattcttacaacttaagagaccctcagtcccttaatcaatctctgtgaatgagaagaaagaaagaagaactctctcttgaagaaaaggatattacaattgagagccatggagaaactcttaatg

SEQ ID NO: 56034 - DNA, 451 bp, Glycine max
  unsure (1)..(451): unsure at all n locations
caccctataattccnccaaatttgcgtctttttgctttgaactcttttttcctttgatgaatgatgctctcctacaacctaagacatggtagaacgagataaactgtacaggctcaaggttcaatcaaataatcatactttcagctcaaaatggatgcaagggataaatcaatcatgcacaatgtaagcgttttagctaagtggctatcttcaatcaaaacatggtcttcatcctcttcagactcaagtattcagtccatactcagagattcatgcaaaaaccattacttactactagtcgttctctcacaattaaagatcacactctcactgggttgcggctaatgcattccttcacaatcaacctgacaaaccaactaacattgtcaatcataatcctaattccatgttctttctcttctaataactgcatgctcattcaaggcatatg

SEQ ID NO: 56035 - DNA, 376 bp, Glycine max
attcaactttcttcttaattattatgaggccacttgatccaacacatacgctggctgcaacatgctcagcatactcgataaacactgatgggttggtcggtccacctgcaaatccttcaggctcatctgcagcagcctctgcaccggtgtctgcaccaggtggatgtacgtctgcaccaaatggatgaacgtctgcaccagcgtctgcaactaccataagctcatcaacagctaccacagggtcatcctcggcaacagggacagcaccctgttgcctacgtgccgatgtggtaggccttcaccgctggggagcatgatcagaatcatgacgatcctctatccccagagctctgccaataaccctacctatggcacg

SEQ ID NO: 56036 - DNA, 451 bp, Glycine max
  unsure (1)..(451): unsure at all n locations
catttgctattgaagaaaaaaaatttatatatgcaatgatattataatgttaacaaactcagcaaaatcatgttcggctgcaaaaagtaaaaacaaaaagaagttcaatccacatgtgttgaagtaaaggaagtacatcatattcatagaatatgttcacaaattcaagtgttgtttgtgatatttctgcacacaggtataaagcaacaaagagttgttaaattccatgcttcaatattcgattagatacaaaatagtgtacaaccagtagagtttatgtttgaactattctcacaatacgatttcaaagaaatggaatgagagaaaaacaaaacatagaacaaaatacaacatccaaatganaggaaatgaagaaagtgagagaacaaaggagtgaggaaggagaaacaaactcaatgtttggaggcacgattagtcctgaatggattga

SEQ ID NO: 56037 - DNA, 382 bp, Glycine max
  unsure (1)..(382): unsure at all n locations
gataggtctaccttcatctgttcttgcactccctcttcgttatccatcttactnttggatcgagtgttataggggtgcctttgcgctnttttagttatggtgagttccctaaagaaacaaatagtggtgagtatgctacccaaacatgaatatgctaatgaatgatcagagcacttggatccacctcaaggccttttttagataacatgatgagtttcagaacttctctttttataaaaaggaacaaagctttcatctagccaagatcatacaaaagtgttacaacagaacctaatggtttctaattatatgggccattaaatctatcatgtgttgacagtaattgattagcctgtgaatttcttctggggctgaacacact

SEQ ID NO: 56038 - DNA, 440 bp, Glycine max
  unsure (1)..(440): unsure at all n locations
gagtcacctcgcggcatgcaagcttgtgttgcanaagttgatggtattcatactaagatgggtttgcgcttagatgtcattactaggtggaattcaacttttctgatgcttaagagtggccttgtatatcgatgtgctttttgtagtctttcatttgatgataggagctattcaagttgtcctactaatatagaatgggagagaggacaaaanatgtgtgattttttgcatcctttctttcaaatcacagagttgatatatgattcctcttacccaacatctaatttgtatttcatgcaagtgtggaaaattgaatgtttgttgcttcaaaatttgagtaatgaagatgagttgattagaaccataactattgatatgaaaacaaagtttgataaatattggagtgattatagcaatgtgctttcctttgggtgcattct

SEQ ID NO: 56039 - DNA, 422 bp, Glycine max
  unsure (1)..(422): unsure at all n locations
agctntgaggatgaatattatggtaagttaatttctggaaatagtctaaatttaattaatctcaaacaaaagtctaatttctcatacctgtacggttatacattttatagaccgactcatttttttgtaaaagcaagcttcatgatgatgaatcaaataattttgatgatgtcaaaagttcaagtgattgattcangacttcaagatcaagtatgaagaatccaatccaaaattcaagattcaagagaagaaatcaagaagcaacaagtcaagatttcatataggataagtattaaaagaatttttcaaaaaccaaatagcacagttntattttacaaaagaattttctcanattttttaaagttaccagagtgattactctctggtaatcgattaccaattgagagtaatcgattatcagt

SEQ ID NO: 56040 - DNA, 170 bp, Glycine max
taatataagatataaaaattgttgcccttttatattaggaaaaaatgatagtataatgatttataaattacatatacgtacatatgaattattcagatatttgaattattcatattattataaatcatcgaaaaagttatcttttgctgatgataaaaaaggtactcact

SEQ ID NO: 56041 - DNA, 443 bp, Glycine max
  unsure (1)..(443): unsure at all n locations
agctngaccaatcctgacccaacccgggcatattcagttagtgagaacctatgacgtacctaagcaggcgagctcttggcagtccaccaataaaagaacaaagtccacgaagcaaggaggcttgtgtggcggctgaccagctatgtatcttgggtggtttctgaaaattaccctctggtaatcgattaccattcgtgggtaatcgattacaaggtttaaaaatggagacaggatgttaagtagcttctggtaatcgattaccaattgtgtgtaatcgattacacagtatgatagagcactggtaatcgattaccagttgtgtgtaatcgattacacagtgttacctgctactagtaatcgattaccatttatgtgtaatcgattacacaatgtaacttttagattccactgtgcanaggctgtgtaattcgtttttgggcact

SEQ ID NO: 56042 - DNA, 336 bp, Glycine max
tctcaggaggtgagctgagttattagaggtatgtgtgtttcttagctctagcttctcaaggaagcttctcaaggaagtttctcaaggaagctacctacgctataaatagaagcatgtgtaaaacttgttgtaactctgatgaatgagagtcttgagagacacacttcaaagttcaatttctctccctcttttcctccttcaatttcgtgctcccccctctctctctttcttttcctccattgaagcttcctctctaagcttcttttccaaggcactctcttggtggaaagctccttcttccatggcttattccctagtggatgacgcctcctctca

SEQ ID NO: 56043 - DNA, 379 bp, Glycine max
  unsure (1)..(379): unsure at all n locations
agcttgtgaacatgatctatctgacaaggcctgtgatgtgacagagctcaagatggagagacagaanaagaagctgcagatagaagagctggagaaaattgtgaggctgaaaaatgcagaggctgatatgttccaattgaaggctaatgaggctaaacgagaggccgagaggcttcagaggattgctcttgccaagcaagataaatcagaagaagaatttactagcaactacttgaaacaacgtttaaacgaggccgaggccgagaagcagtatctttatgagaagatcaaattgcaagagagttctcgcgcttcgcagagcagtagtggtggtgacccttctcagatgctgatctattccaaaatccacgatctactt

SEQ ID NO: 56044 - DNA, 437 bp, Glycine max
  unsure (1)..(437): unsure at all n locations
gcgtacccccaccattttcatagtataacactatttatgtgtctactattattatgatcatctctttctccgtcattgtaggtgccagttgagcgtattctttgaaagatccgtgccccctttttgcacatgttctgtagttgcatcctatccagagccatatcagaattgtactgacactgtctaacgaaggcaaccattaggtccttccaagaatgaactcgggaaggttccaagttagtgtaccaggtaacagttaccccagtaagactttcttggaagaaatgtatcagcagttcttcatcttttgtgtatgcccccatcttccgacaatacaactttggatggttcttgtngcaagtagtccccttatacttgtcaaagtttgacgccttgaacttgggaggggtgatgatattangtactangaacaactc

SEQ ID NO: 56045 - DNA, 416 bp, Glycine max
agcttgccgcccatctcttccaggcgagcattgttgcttcctccagaagcaacagccttctggaggaatcttctggagggcccaagtgggccttgttgctatttacaccccctgtttactaaatgcacccccctttctatttttttgtaattctttttccgtaacgttacgaaactttacgaatttcgtaactatactctatttccttccgcaaggttacaaatccttacggattatgtatttactcttttttagctttcgaagaagttacggaaactcacggattgcgcaaaaacacctcttttcgatttccgccacattacggaatttcacgaatcacgcaagcctgcttcctttcgatttctgagacgtctcgggacttcatttattgcacatcatcaagtaataatccccgg

SEQ ID NO: 56046 - DNA, 400 bp, Glycine max
  unsure (1)..(400): unsure at all n locations
tcatcttntcattctcttctccctttgccaaaaagaattcgccaaggactaaccgcctgaattctttttgtgtctctcttctcccttttccaaaagaacaaaggactaaccgcctgaattcttttgtgtctcccttctcccttgtcaaagaattcaaaacgacacagtctgagaattcttttgattcttccctttccctaatacaaaagtgttcaaaggactaaccacctgagaattcttttgtatccccattcacaaagcatcanaggtttaatagcctgagatatntgtctcaacacattggagggtacatcctttgtggtacaagtagagggtacatctactntggttngactgagaacaagagagggtacatctcttgtggatcagttctagtgga

SEQ ID NO: 56047 - DNA, 329 bp, Glycine max
  unsure (1)..(329): unsure at all n locations
attcaagaatcaagagaagacttaatcaagataagtatgaaaaggttttttcaaaaactgagtagcacatggatttttctcaaaacatgtttaccaaagagtttttactctctggtaatcgattaccaaatttttgtaatcgattaccagtagcaaaaatgtttttcanaaaactttcaactaaatttacaacgttccaattgatttcaaaaagctgtaatcgattacaatgatttggtaatcgattaccagtgtgtttgaacgttgaaattcaaattcaaatgtgaagagtcacatcctttcacataaaagctgtgtaatcgattaca

SEQ ID NO: 56048 - DNA, 426 bp, Glycine max
  unsure (1)..(426): unsure at all n locations
agcttatttcatcaattaaccntttcttttcttttttttcttatttcgtaaaggggactcttatatttcctttaccaattgctttctcctcttttcgtttcattctacatggctcaagctgcaggcacaacgaccaaatgcaatgtaatcatattgtatttttctcttaaggggcatgttattggagtggataaaaacttctatatattgtgcaaatatagtaatgcaatttaacttggtttcttacgcgtgtactttttgttcgtttatcttcatttctaccttcttcatttttttaagaaaatcgttctcgaaattgagatcataaaaagttcattgttaaatattttcatgtgtttttaaagaattatttaananatatcacacaaagctaaatttgattctaataattatttttaaatctat

SEQ ID NO: 56049 - DNA, 431 bp, Glycine max
  unsure (1)..(431): unsure at all n locations
ntaggtggagtcacctgtgcagttgtaccaagttgggaattcaatacaacgtgaagggttgtgattcatacaactttgcactatttctagaatgagatcatttgtgcaatagagaaagaatttcaaaagtgaagtagatgtgacataagtattaaacttctcaattttttttcatgttagtttaactttctttgggactttatcattttttatctatgatgcagtttagcccatgtcagtctcagctagtgcagcgccactattaggggattgactgtgtgaaaatggatttaagtattaaaattctccctgccaccaatgatgtacatggaggagtcattgtggacttaaaggagcctatggactctaaagatttgctacttggttagatcttcactttacattggaagcacanggaaacattatgatct

SEQ ID NO: 56050 - DNA, 410 bp, Glycine max
  unsure (1)..(410): unsure at all n locations
gcaagcttagaaacccaagctcttagcttcaatgctatgcaacatacttatgactaagatcctaaattttggttttggaagtaggaaggcatgaaaattaggacatgattgtgagagttttttttactcgaatttggttgccccatgaggagtactttgcacctaggtagcatggaaaatatctttcaatggtatgntaaatgtgtgtaaatataggtagcatggaaaacacctttcaatggtgtgtatatgtgtgaatatatggcataaaattccttgcaaagcgtgaatgagtagcagaaaaatgtctttcaacatatgcgtatttgaggataggtagcattacgagccttttataaaatatacccatatcaaaaagggcctatgacgcttcctaaatgaatacatga

SEQ ID NO: 56051 - DNA, 333 bp, Glycine max
  unsure (1)..(333): unsure at all n locations
ctcgcggagcattngcgcattcatcccgcgtttcattgttccctccttaaacctttcgtgggctcgcccaatccaagagcagttagagaaccatgcttccggcgctatggataatcaggctatcaccacaccattagctattctgggtcataatacagttccgacggactaagggtccaaaaaaatggttctggtgcagnggcatggcctgcacctgcatgaaacgtcatgggaagactgggcatgtcttaatgagctgcatcaccttgacgacaaagagctgttagaggaccgcgggaatgttacgaacaacaaccctgaaccgcaagcttc

SEQ ID NO: 56052 - DNA, 285 bp, Glycine max
gcttcttatgcaacaacaacaacaacgacgattatgacgacgacactttctttacaacaacaacaacgacgacaacaacattaacgatgatgacaacaacaaaaacagtgatgataacaacaatgacgatgacaaaaacaacaacaacaacaacgacgacgacataataatgataatcataataatcataataataatggtggtgatgtacaacttataggaaggtgagcttgatccgaagtgtatgcttgaaaccattgacaatggtttgggtaaaatgttggt

SEQ ID NO: 56053 - DNA, 397 bp, Glycine max
atcaagccaaggctattgcgcagactatcaatggggcacaacacaccaaatgattatgatgatggatggctcacatactcacaaaggtaaaatcatcactttcaaattgagctttcaaaactatcatgacatgtagagaagaatcaaggatttcaaatcacaaaatatcaagaacttttattttcaaaacaattacccatttcttgaacatatcctataattcaaagaataacatgcatagtcgtacgtgcacacaaaattgacccagaatattaaactaataatccgacgaaactaacaacattaacaaattaacacaactaacaaatgagcagaaccatcataactagcaaaaccaagaacactcccccccatacttaaacacacattgtctcaa

SEQ ID NO: 56054 - DNA, 458 bp, Glycine max
  unsure (1)..(458): unsure at all n locations
tgcaagctnggagggaaacgcacatgcatccactgtttctcatatgcagctttatgtgttcatccaatctcatcaagcaaagagagctttagttcatagaacttcttcttggcagcctcagcatcatcttgaattatgtcacacagtacctgaatcaagggagtagaggttcagaagtaagtaatttggtggtttatctacccaaagtccctttccccaatcacctatcatcatcaaaatataaatatatatacacttgcattgaggacacgcatgtagattgatctcattataaattttaatgatctacctcacaagttatatgacttttatccattaatcacacatgttacaatatgcaacaatgaaaaaaactgaccaggctggtcaatttgacccaaaaccaatcagctgagtgtccaattcatataatgcacaaaaccaatgttatatgatat

SEQ ID NO: 56055 - DNA, 375 bp, Glycine max
  unsure (1)..(375): unsure at all n locations
gctactttggaagacagtggcaggggggatataccctttctcagatttacnaccagatgtttctcatcaatgaacaacaagctgatctcatttctaagatggggtcttttgaccaagacaggtggagttggaatttcaagtggaggaggaatctgtttgattatgagagtgttcaagctgcgaattttatggaggaggtcatttccatgcacattcagagatctgtcaaagatgttatggtttggaaagctgatcctagtggggtgtataccactaagtctgcctataatctactgataactccctcttcaccagccttggataggagaacatcacagctactttggaatatgaagattcctccaaaacatgcag

SEQ ID NO: 56056 - DNA, 406 bp, Glycine max
  unsure (1)..(406): unsure at all n locations
cacgcatgcaagcttggaatggatcgccgaatacagtaacattaccagggcgtgagtttaccatctatatggtaaataaaacatactatacactttgttacaattgcaacatattacattttcattagtgcctctggtgaacaaaatatcttgttaattaaaagtacttaagggttaacctaaatatttcataaaaataatatcaagtttgtaacagaaattgggttgctttttcttgaaaaatgatattttactggtagattactccatgtagcagacaaccaaccctatgtctcaacagaatgcccttgttcattgtagttctagtaccagtctcttttctttttntctttttggcaaatgttgtttataagcgaggtatctaacacccttactaacagatgct

SEQ ID NO: 56057 - DNA, 430 bp, Glycine max
  unsure (1)..(430): unsure at all n locations
gctactgacttcataattcatctgaacatngngctaattttttatcatatgcatatctagttagataactttgaaactttgaaattcatggataccactgactttatctcttaggtcatcttctttggtatggcagtgcattatatctgaagagatagaaacttttattttctttcacttttgcctccaaataagattcaaacttttctttttctttctcattttctttaaaatataaagcaaaccaataattcaaactaacccccccaaaaaaattattgaccttcaatgtgcatcaatcactacccaaatccacaatgaaagttgggtaatgactttttgaaaatgccctttttttgaaaatgtgtcattttcactctattaaactttngtcttttctttcttaaacaaaaacaaaaaagagtgagag

SEQ ID NO: 56058 - DNA, 405 bp, Glycine max
acccggtgttgttatataagaggatatggtctacttgggagtacgtgacctcagttggaggtgggcaacaggggatggtgggtttatgtgtgctttgtggatgtggaaaacttgttgtgcaccatcgcccgaccgccacctagtaccacatgtgatgggtaccccataatccctacagcttgagatgaggaagtgtagaagggtgaacttcctgcttttattcgttgaccacagagtggtacctggagatatgtcgcgggggtcaggagaccttggggacgtcaggcggtgtgctattgcccaaaaccaagcttgaccaatcccgacccaacccgggcatagtcagtcagtgagaacctgtgatgtacctaaacaggcgagctcctgacagtcaacagataaaag

SEQ ID NO: 56059 - DNA, 462 bp, Glycine max
  unsure (1)..(462): unsure at all n locations
cagaactactcaacaagctagaatcttataatatattataatatattaatgtttgaaaaatcaatgtaaaaattctacaaaaaatagagattaaaaagaaacaatttagaagaattanaattattcttcacatacataatataagacttggtaaccggtatacgcactattttcctccagaactaattttcttaagtcaaacaccttaaacttgtaagttgaagttntttgtgtccatgtgtggaaaaggataaaatgtaaaattaagttatcagcttatattgccaacttaatatgtatcaataaaaaattaagttaactaacgttatatcttacaaaattctaattctcaaaataaaaagtgagtatatgtatgtatattaattagtngcataaatactactatgatttacanaataataatcaatctagtaagggacgtatatgtatgtatattaatta

SEQ ID NO: 56060 - DNA, 441 bp, Glycine max
  unsure (1)..(441): unsure at all n locations
agcttattgaagtgattgttactntctaccttctatgaggatataaacgtgcaatgatctcaaattcgtggagactataattacatattatatttaccgattcttttgaagatataaaaattctctctaaatattcaaaagggaatgtagtatataggctaaacataaaccacattggacacatgccaaagatattagaaatatgagcttattcctggccaagggaccaaccaagttgaaggcccatgttcagccaacttatttatttatttatgagattcattattcaagaaagattaaaattggaaagaatgtttaattnttcagacttttatctattcaattttttttgaaagaattcanatgtgtgctataatatatcanctgaaatttcacaacttttatgtagctgcaacagatgtgagcatgtgagattaactg

SEQ ID NO: 56061 - DNA, 273 bp, Glycine max
  unsure (1)..(273): unsure at all n locations
ctaagcttcctcttctcattctgctgtaatgatcttcaaaagctaggactctattgatgaagaatattcaaggcctacaagttctacatggagctacattacatggtatcaaaagcattttcatctaagtgatgtttttttgcttcctctatctttngnttgggcaatatactttagatccttgttcttcatcatcttcaccatgtatctcctccattggcttatggtttggtgcaatttagagtatattaaaaaaataaacccattaaatct

SEQ ID NO: 56062 - DNA, 376 bp, Glycine max
  unsure (1)..(376): unsure at all n locations
agctnggagcagtggaacacggngtggatttttgcagtttacgcaaggctaagcgataagatacttttcccactaattcgatgatctgataggggccataaaaacgctttcctagttttgaaacttatcagcgatcgaagtttggcggtaaagtcttagcttcacatagacccagtccccaattttgaagttgacttcttgacggtgaggatcagtagagttcttcattcgtgcctgagatcgttcgagtttttgacgaagggcatcaaacatatcttggcgagtggtaaggaggaagtccacagcctcgactgatgatgaaccaggaaggtagtccgggatatcgggtnggtggttcccgtacattacctcgtat

SEQ ID NO: 56063 - DNA, 211 bp, Glycine max
  unsure (1)..(211): unsure at all n locations
atgacaatacttacaaagntgagctgcccggtgagtataatgttagttccaccttcaatgtctctgatttatctctttttgatgcagatggagaatccaatttgaggacaaatccttctcaagagggagagaatgatgaggacatgaccaagagcaagggcaaggatccacttgaaggaattggagggcctatgacaagggctagagcaag

SEQ ID NO: 56064 - DNA, 411 bp, Glycine max
  unsure (1)..(411): unsure at all n locations
agcttacaaatatttgtcatgtaatactcttttctcgtaataattnttttaaaaaaaaaaatcaatacatccttttaattaaattctgctgcgaatgcatttagaaaatattacaaatgtatgtgtcttggggtagaagggtgttataaacagatcctaattaatctaaaatttggccatgaggtaaagtaaacctaaccttcaagaattccactaaggatcaaactcaggtaataccagaatgattcatgcttaacttcgacatattaaccatttgagctcaatcacttggttgaaatttgatgtgtatgttatgttaacttaattagatgccctctgatatatttatacactcgaatgataaaattgctaacaaggacaacaaaacagtcagaagtgtatataatacta

SEQ ID NO: 56065 - DNA, 463 bp, Glycine max
tctctctttcacctagtttttcattttttcgcatacacccaaatttgtcccagtaaaactacgatcccaaactcgttaaccgttggatcatcgtcaaagttgaacattaggttggaaattatattcacacatctccaccattgggatttgaaaaataaggcctacggagggagaattgctcatcgcacacagacagtgcaacgaaggttataatcccttcttcttctctctaacacttgaaaactctagcaagaggaaacgtttggggaatcttaggaaaccactagagatttctctcactatcaaactacactcatgagcccacttagaggtaagagatgagtttatcgcaattagggttagaatgaacatttgtagggatccgtagaggatcaaatttaggtttaatttgggatgtttattggattgtaattcttctagaaaatggttgaggagttttact

SEQ ID NO: 56066 - DNA, 410 bp, Glycine max
agccttctccccaattttctataaataggggtgatagtttttagaaaagggttcagccccttaggcacttctctctctttcgaatttgcttaggagaaatgtttccgtgaagaaaatccaagccgaggcgcttccgtaacgtttccgtgagtgatttcgcgaaggttttcatctgttcttcaccgttcttcatccggtcttcgttcttcaacaggtaagttttcgaatccgagactttcaattcatttcttgttttttctaagctttcatctttatttcgttcattttcgatttcttttcttccttctttaacgcgcttttaccatttatttaagccgttttctcacctaataaatgataaaatgaatttcaaccgatcatttgtgttggtatctcatttaatcactttt

SEQ ID NO: 56067 - DNA, 444 bp, Glycine max
  unsure (1)..(444): unsure at all n locations
tgatatactntagctcnttgcttattaagcttgtaatnnncataatctngaaaccttaattcctccaattgatgaagttgtagcttcctatgttcacctgctgcatttagatcaaaattcaaaatcttcaatgctcaataggctttgtgccccaactcaataggtaagtgacaagttttgccatagataaattggaagggagtcagtcctataggagtattgtatgcacacgtagctttatctaatntttgagactagtccttccttgactgagcaactattttctccagaatcttcttgacttccctattagaaactttagcttgcccaatggtctatggatggtaaggtgaggctaccttgtgtctaacactatagtgttggagaactttcttgagttggatgttatagatatgagatcctctatcacttataaagtaccct

SEQ ID NO: 56068 - DNA, 403 bp, Glycine max
  unsure (1)..(403): unsure at all n locations
agctngctctaaatttatattgatgtttgtatttatgggaggaggntatatgccatttttgctttaagagtagtgtcccactggtaaaattaactttccaaatgtttgccttcgcaggaatggccccgaggaagcttgcctcaaagaggtccaggaaggacaaggcggccgaaagaactagttccgctccggagtacgacagtcaccgctttaggagcgctgtacaccagcagcgcttcgaagccatcaagggatggtcgtttctccgggagcgacgcgtccagctcagggacgacgagtatactgattttcangaggaaatagggcgccggcgatgggcaccactggttactcctatggccaagtttgatccacaaatagtccttgagttttatgccaatgc

SEQ ID NO: 56069 - DNA, 344 bp, Glycine max
  unsure (1)..(344): unsure at all n locations
tgcactgaanacctctctaactctacgcccatctatcanaggacatccgcccaaccacaaagagcccncactcaaaacccagctcctacacaacctcgccccgccaacgggtccaatcctagcacgagtgccagtccggtgaggaaccctccagtaaagaagcttccagagttcgccccaattctgacgtcatacggngacttgttgccatctttgatcgccaaccaaatggcatttgtgacccccagaaggatttaccagtctcctttccctcgatggtacaacacttacacaacctacgcgcatcatgggggcaccccggngcattctatagaacaatgtgt

SEQ ID NO: 56070 - DNA, 398 bp, Glycine max
agcttcaacctagaggagacgatctcttccatgtgttggagaagatcaacgacaatgcctacaagattgacttgcctagtgagtataatgtaagtgccactttcaatgtgtctgatctatctctttttgatgcagatggaggagccttggatttgaggacaaatccttttcaaggagggagtgatgaggacataaccaagggcaaggaccatgaagcacttgaaggtcccatgaccagaggcagacttaaacaagcccaacacatcatagagacaaggctggtcatttgtatagctgtcattgatgatgattgaaggcccaagtggagaaagatgaaggcccagaggcagaggcactaccaagactactaattgttgctgaaggcccaaactaacttg

SEQ ID NO: 56071 - DNA, 256 bp, Glycine max
  unsure (1)..(256): unsure at all n locations
cgctcctgagtatgacagtcaccgctttaggagcgctgtacaccagtagcgcttcgaggccatcaagggatggtcgtttcgacgggagcgacgcgtccaactcagggacgacgagtatactgatttccatgaggagatagggcaccggcggtggacatcactnggtacccccatggccaagttcgatccagaaatagtccttgagttttatgccaatgcttggccaacagaggagggcgtgcgtgacatgaggtcc

SEQ ID NO: 56072 - DNA, 400 bp, Glycine max
  unsure (1)..(400): unsure at all n locations
catgcaagcttcttttcaagcaanncttttggtgttgtttcttcttcctcggcttattccctagaggatggtgcctcccctctcctcttctccttttccttccgttgcatctccatggtgtaaaatcaccattgaaggacctcattgaagctcaaagatccagcctctatagaagctccacaagaaagcttccctcattttgcccacactctttaaagatgctcactagcatgtgctacactatgatcaatgtcgaaggatgggaggtatatcaagaagaaatgaaatgcctttacaaaatatcatggacgttgaggtatctgattgctgagggatttattttgtacgtacctctcctttgtcttttggaaaagaaatatactactcggtgctgactatg

SEQ ID NO: 56073 - DNA, 284 bp, Glycine max
  unsure (1)..(284): unsure at all n locations
tggttaaaacggaagattttaataccgttaatgaacgatatgtagacgacagctananaacaagacaggatattttagtctcggattcgaaaacttacctgctgaagaacgaataacgaacgaataactaatgaagaacgacgaaaaaccttcacggattcgctcacagaaacatctcggaaacgttacggaggcacctcggcttggattttcttcactgaaacaatttttttcacccacaatagctgaaatgcatatctatgcggatctgggatccttaccct

SEQ ID NO: 56074 - DNA, 415 bp, Glycine max
  unsure (1)..(415): unsure at all n locations
ttaatgaaccttcgatctgatctccaaagttaaaagagactacatactgaatatacataatctagagtgaaacaaattccatgtggatacgatgttcggtcttaccgtgtaaatactacttgtgaaaattggngcacttgcctataggtcttaacactcttccgaattcctttgtaaagatagaatagtgaatcacattaagaataaagatgcttgaaatagactaaacaaacatcactctattcttagtaatgatgttattcagatgtcatttctcagttctttagaaaataaccatattctaattcatcacttcctagacaatgcatgagtatgggtgatcagaccataatcaacatcaataaatgacaataggaacattagatacaaaattgcattaaataaatagtaaata

SEQ ID NO: 56075 - DNA, 439 bp, Glycine max
  unsure (1)..(439): unsure at all n locations
tgcaagcttgcccaacaaataaggaaatnntcttaattctctgatacttaatttatcttgtttgccaacaataaaaactgtcaaagtacgaagatattgtagtctacagatttgtgttgccatctctggaaaattagtgtaactgatgtccaggtggcgtaaattaaccagatttcctatcggtcgtggcaactgaataagaaattcacaatttgataatatcaaagtttgcaaattgtaaagcataaatgtttcataggacaagctttcaatggaagtgtaagaaagatccagataccacaagtgcaacaaattgccaatggaatcaggtaactcaatgatatttntatatttagacaacgacagtatacgcaaacatctcagttttggaaaccaaccatgataagtgcataaattaaaatactggtttcaagggtac

SEQ ID NO: 56076 - DNA, 423 bp, Glycine max
  unsure (1)..(423): unsure at all n locations
gagaagctagagcttagctactctctcctctctagtaactaagctcacctccttgagatgagaagctagagctcatctacacaccccctataatagctaagctcacccccatgccaaaatacatgaaatacagaaaaagtccctactacaaagagtactcataatgccctgaaatacaaggctaaaaccatatattactagaatggccaaaatacaagcccaaaagaagaaaaatatattctaatatttacaaagaagagtggacccaaccttggcccatgggctcaaaaactctacccttaggttcatgagaaccccagggccttctttagcagctctagctcaatcctcttggagtcttctatccaatacccttggggggtaggattgcatcataaggagaaataactntattagaacaat

SEQ ID NO: 56077 - DNA, 376 bp, Glycine max
  unsure (1)..(376): unsure at all n locations
tgcaagcttctgtgagaatatcttcttggaatatggtctattccgngaaanttcnntttgggactcaatggcttcgactagtaaattatgcacatggccctagattagaaggaaaaggagaacgtgagaaaagaaataccaagcaagcagatcagaggaatcaagatgttcattgacaaagccaacacaaattttaaacacttacggatataggaagcaaaaaccaaagtgaaaggaatataaagtgatcatgttacaaacctcagaatgtcgaacagctgattgaataacataatttgcatgtggatcttgaagcaactgttcgaagtgaggagcagagagcagttcatgaatgactctagatcgattctcatca

SEQ ID NO: 56078 - DNA, 455 bp, Glycine max
  unsure (1)..(455): unsure at all n locations
ggtttttggctattatttaaaacaacaatccaacttctaccctgaatgttagatatttacgcagaggcaatgagtatcttggacaattatccgagaatatgatagaacaatcctaaaaatacctgatatatagagaacacctagttgagataataaaatnttgtacgtaataaaattcaaactccctatgttgtactgctaaatatntactccctctgttctatatcaatgaagtaatgactatttgtattatatagtaacacattctcatacctatgtaatgaagttcaactttcacttgcttgtatttctgtgtgctacatactttgtcgaatattgggtttacaagttgcttttttattcctgctaataaatgtaaagcgaacagttttacctttctgaaattcagaaaagttaagtaagaagattaaaaatgaaataagaatatctattca

SEQ ID NO: 56079 - DNA, 427 bp, Glycine max
  unsure (1)..(427): unsure at all n locations
tcacanatggtatggctcataatctctatccctatatggggagaagngttctatccaatgattntacataacttctttctattagataaaagttgaaactatgagcatacaatgcataaagcatagcacgaaaatgcgttgcgggtttcttgttgggatcacggacacacatgaaaatacattagggaagtagtaattaacaagcttatcaaggttgcttaatatctccaacagaattactgcagttaatccataatatttataattagctgacaggcggatcatgctgatatatatcaataagctaaagttgatagtgatactgttgtatatattaaactacattgagatttggcgaaagcacaaagctattaaacattgtcttgtgttgcattctcattcaagaaacanggttcaacttctgtac

SEQ ID NO: 56080 - DNA, 397 bp, Glycine max
  unsure (1)..(397): unsure at all n locations
agctgcctanatatttgctttgaagtttgtttttcaatttctcactaagtaaaatggatcatttttaagggccaacgccttaaaatgatcaccacttaagtaaaaagaatcacttgataagaaagaactacgtaggtctgatttcctcatcgcaaattgaggaatacgtaggagcaaagggaaacacccttgtcgaccacaaaaagagaaaaatatataaagggtataaaggatatagagacataaaaagggaacataaaaaatcaaagtcatgtttgcacattcgattaaaggctgccatcccttgggacggacgtgtggggtgctaataccttccccgtgcgtaaatacaacctcccgaacctttcattaatagatcgtagatcgcgtctttttc

SEQ ID NO: 56081 - DNA, 253 bp, Glycine max
tgttagagagaataagaagtgattaaagcttcaatctcattgcctctatgcgagggccatatatcactctatagacaatattgcataaatcccaatggtggaaatgtgtgaaaatgagtttcaaaggtggtgtctatagtttaggaagatccaatggttaacgtgtttaggatcgtagttttatgcagataagtttgggtgtatactgaaaaaagagaggattttggaagaggagagaaagagaacgaatttt

SEQ ID NO: 56082 - DNA, 438 bp, Glycine max
  unsure (1)..(438): unsure at all n locations
agctntgatcttccaccaccgccgccaccattatcttatacttatantttaatattattagtactttgattttcagccttgtattttggctatattattatgatatttgaacaatttactatttccttatttgcatggtatggttgaacaagtatgttatttgactatgtggatttcatagntaatctatttatgattgttgcttcatgattcttacttcataatttgattgatggtttgtcatgaatgttgcatgaatgtttagttatatttgcatacttaaattttgaaacgcactttggcttttttgtgatgccaaagggggagagaaatgagattaaatcaagaactcacatgagtaattaatttaattttaagataagcataaattcaaaaacaaagggagagaatntatgagagtgatcgactaggaaaaag

SEQ ID NO: 56083 - DNA, 433 bp, Glycine max
  unsure (1)..(433): unsure at all n locations
atgatgtgaacctgagtatgagcgaatcgtttgatatangctacggaggtttggatgacgccacttctagtaaaggaggataagttagggtagacgccacagggattaccttgataagtctgagattggttcaacaaggaactcaaagagaaactctcaccaaattttatcaaatgccaaaagttntttatttgaaaataaaaaccaatacttatagtgtatctcaacanaaagataaaaatagacatgggtcttctaaacagtttgggccaaaattacaataaataaaaattataactaanaacatatttaactngngccttgaaattagtttgggcctttagcaacaattaatagtcttgatagtgtttctgcctctgggccttcatccttctccacacggnggctttatccttctccacttgggtcttcg

SEQ ID NO: 56084 - DNA, 453 bp, Glycine max
  unsure (1)..(453): unsure at all n locations
agtcacctgaggcacgcaagcttgccatgccgtcctcgtttcggcctatttctcattttgtgctcatatctgncccttaacataaccagagccaccatcaaagcgacaccaaatatgcgtggctgcaccggaggagattccgcataagcactgctcataatttccagcgcttggaataatgttttgaatgactcctttgcagcctcaacatacaacgtagaagacggacaacttaccgatatgtcttcctcccctgatactataaccaactgccctttcactacaaactttaatttctggtgcaacattgacaggaccaccccagttgaatggatccaaggccggcctaacaagcaactataggcagggcatatgtccattatttggaaggttatctgatatacatggngcctaattntaattgggagatngatgtctccccttatatcccga

SEQ ID NO: 56085 - DNA, 451 bp, Glycine max
  unsure (1)..(451): unsure at all n locations
gagttacacgccgagcaaagtttctatccgtgcttgtgatggttttcacaacttgaaggtaaatttttattntattggtttgtgtttgattgggatgattatgcttaattatttggtgttgactttgggaacatttttaggagattaagaccgtggaactcgtgaaggcaactgggtgggcttatctatccttgtctggagctgatcctagataactacagtgttctttctgtatccagtttttgttggtttaagtttgtatccagtttttgttgtttggaggcctggatttttggtttcaacgaaattttgtgtgcatgttttggtagatttctagcatagagtaaaaattaaaagaatggtaagtaaggaattaaacaacaaanacaaatattgatcttagaagagnttgctggcgaattcatgtatctccctcccttaatacgacatg

SEQ ID NO: 56086 - DNA, 311 bp, Glycine max
  unsure (1)..(311): unsure at all n locations
aggatgttgtaatcgattacaggctgcctgttcatgtgtaatcgattacactggatggtaatcgattaccagagcctatcctaggctagtttctaagagaatatctatatntacgctcaaacacatcctatatgtctaattttcactactaacacactaaattcaatcattcaattactatatacacaagaaatcatatattctatcataaaaacaagaattcaaacaagatcaaccaatataatctacaatcaaaaggtaaaaagtaatcaaccaatcaatcaaccatcaatcaccaatcatcacccatc

SEQ ID NO: 56087 - DNA, 343 bp, Glycine max
  unsure (1)..(343): unsure at all n locations
gtatgccatttttgttntaagagtagtgtcccactggtaaaactaactttccaaattnttgccttcgcaggagatggccccgaggaagcttgcctcatagaggtccaggaaggacaaggcagccgaaggaactagttccgctccggagtatgacagtcaccgctttatgagcgctgtacaccagcagcgcttctaggccatcaagggatggtcgtttctccgggagcgacgcgtccagctcatggacgacgagtatactgatttccaagacgaaatacggcgccggcggtgggcatcactggttactcccatggccaagtttgatccagaaatagtccttgag

SEQ ID NO: 56088 - DNA, 381 bp, Glycine max
  unsure (1)..(381): unsure at all n locations
gcaacaatattcttgacacgccgaccaagttaaaacaatatcatccatcaattcaccatctagagagacttcagaatgtttgaacaccagagtcattagcattccataagaaacaccagaaggggatttgatggatgtacttgccttgatcacgtgattaatgatcaggtgaggcatgttaagggggaatcttcttccataaaaattaaatgaataacaggttatagtcatttacttcttgaaaggttccaactttaggcagcgcanagtgcatgcaaatctagtggacaatccttccaaaggatttcagagacttggacttgaaactatctctcgttttgagaactttatcttgacctttgttttctgagtccatggtct

SEQ ID NO: 56089 - DNA, 306 bp, Glycine max
acatcttaattgttattgttgtaggttggtcaaacctaccaagatatgtttgggaacaaagtggaataaagaatctctaaaattagtaccaatgaacatttttcatgaatgaagataaagaacattctttataaaaaaatatatataaactaacaagcataatgaaaaggtataagaaacatggagaaagttataagataagactcacataaatatgcatcaaacaatgagcataagtatcagaaccaataacaacagaatattcccaaacctattttatctctacaatcaatgtcaataacacag

SEQ ID NO: 56090 - DNA, 314 bp, Glycine max
cataacgagagcctaattctcaattatgggtgtgtgattgattgtaatgagatccaatagaaccctagatgtaacatattcactcaaggtatcgtaaaaaataacttaattacattaaaatggaaaaacatgaaacatatggatatatgcctaacatgatcacatagaattaacattgcaaattctctaagaaagtgaacgaagatcgcaggagataaagaaaccaaaatttcaatttagccttatgttaatttatatggcatgttattaatcaaaaactgtcataataattatagaatttaatgaatatacac

SEQ ID NO: 56091 - DNA, 95 bp, Glycine max
gagttctagagctctagagatcattataagagagtgtacactgtgacttggagaagctgggaccacctggttacgttccctctgctacttggccc

SEQ ID NO: 56092 - DNA, 297 bp, Glycine max
  unsure (1)..(297): unsure at all n locations
agctacaaccgattatgttaccgcgaattatgtcgagangacccgtgctaccatcgactcgctagccatgggtaggagctcgctacaagacaatgataaacatgcatgtaaacaccataccgttaataggaatagaagattaacatatgaattgacgaggagtgcgggctgaacactcatgcggttgttgagccattcgccatagcaacaaataggcatctgagtgtggttcaccctaattacaaacttttgttttctcactatcgcgacaccatgaatattaattcactcgcccgc

SEQ ID NO: 56093 - DNA, 431 bp, Glycine max
  unsure (1)..(431): unsure at all n locations
tgttcttaatgatacagacatcctttcttctcctttaagagcttctgcacagccatgttgaatcaagattgcttccatcttgattctccatatcccgaagtcattttcccctgaaaacttctcaatatcgtactttattgttcccatctttcttgatcttgatcttgttcccacagatggtgccactcgttggttctaagcaaaatttctgctgctcttanacctgcacaagataaaaaaacaagaaaaacagagcanacaaacacagcagagcaagaacccaaattgtgtggttcggcaatgtgcctacatccacgagaaagagtagctcatcatcatcacattgatcatganattacaagttcaatacaagcaaccagctagcttgatctctcttggtttctctttntcaaaacctctctcaatcacct

SEQ ID NO: 56094 - DNA, 257 bp, Glycine max
  unsure (1)..(257): unsure at all n locations
agctntattggtacgataacttgtcttgtgatatatagattaaaannattctaanatcacaactcaatcctctntcttggaatacttgtctttacaccaaatgaattgaccatcattaataagatgctntatgtgcgatgacatcaacattaatattatgttggctgtagaaaataacttaatcgaggcatacaccgcaacaatgaagagggtttgattatccttttagaactgcacagagatacatcgagatgatg

SEQ ID NO: 56095 - DNA, 250 bp, Glycine max
  unsure (1)..(250): unsure at all n locations
agagtccaagctatgtcctgagtttgagacaagggctaggngaaaaagctcctcttctcaagaactnttaggagttggaaaaaacctgaaagatctttaaaaggatatgaaggagcttaatgaacttcatgattatcanaagggaaatatgatatatggagagaatatgcacaagcacacaaagaatatgaagacctaanaataagtaaacataatatttgggtgaaatatgaagaacacaagaaatttg

SEQ ID NO: 56096 - DNA, 449 bp, Glycine max
gcaagcttgtatgttagacctcgatcggtcatcttttctggccgacgccgactgtcatttttttcgatcaatatcggtgaataatatttttttgccgaggtgggctaatgttttcctggccgaataaatgggaacatgccagtttcggccgaaacgaaacatcggttgagctcgcacgaaaaaacctagccgacctacattgtaagttttttatgcaacaccgaaaaaaacaaaatttcccctgccgtaagaaaaaacattatcggccagcgagcgcgggacttgaaattcaagctccaaaaactaacccaaggcaacaagggggttgaggagtatttcaaggaaatggatgtgctcatgattcaagcaaatattgaagaagatgaggaggtaactatggctcgatttcttaatggtttgacttatgatatccatgatattgttgagct

SEQ ID NO: 56097 - DNA, 472 bp, Glycine max
  unsure (1)..(472): unsure at all n locations
ctggaactacttcacatggacttgatggggcctatgcatgttgaaagccttggaggaaagaggtatgcctatgttgttgtggatgatttctccagatttacctgggtcaactttatcagagagaaatcagacacctttgaagtattcaaagagttgagtctaagacttcaaagagaaaaagactgtgtcatcaagagaattaggagtgaccatggcagagagtttgaaaacagcaagtttactgaattctgcacatctgaaggcatcactcatgagttctctgcagccattacaccacaacaaaatggcatagttgaaaggaaaaacaggactntgcaagaagctgctagggtcatgcttcatgccaaagaacttccctataatctctgggctgaagccatgaacacagcatgctatatccacaacagagtcacacttagaagagggactccaaccacactgtatgaaatct

SEQ ID NO: 56098 - DNA, 432 bp, Glycine max
  unsure (1)..(432): unsure at all n locations
tattcgtattgttattctcacccctttgtttgtaagangtctcacattttacttttgagagagaaatgactagtgtgttcattatccttgccttatgtcaatagttctgttaagtgatttttctatttctgacttctgattctcttgaattatattaaaaccctttgatttgtgctcgtgaagagtttatttaatttcatggtattttcttatcaaatcattgacagttacatgaatgtcaacaaagccatcaaaatcattgagattctttatttagcacctaaatgaaatgtgatgttcctaaaaaaattgatgccttcaattatatgctagacattagtcaccatgctttcaccagcctataggctatagctctctctctctctctctctgtgtctctctctctctatatatatatatatatatatatat

SEQ ID NO: 56099 - DNA, 367 bp, Glycine max
  unsure (1)..(367): unsure at all n locations
taaactcaggcgtcattcatcgatattaatgcattttatctactgatcggtagacaccatatagtataactaattacatatatgcagtacaaatacttaattatgtttctgctgaataaatttgtttgaaaattaagtctggagagtaataaatgaaggactaatatgaagatctaaagttctaaattagacacacctttaaattatatccttgaagcttatggaacatctatctcatatgatatgggtagttaatttcttttcgttgttatttatgcctgttattaaaaataattttggtttgaaagacaagcctctntagattaattaattataaccatattcaattaacgattagaaattcaaa

SEQ ID NO: 56100 - DNA, 136 bp, Glycine max
  unsure (1)..(136): unsure at all n locations
cacgaagctgtaataagganagactattgaactggggttctnnttttattctttctcgcacaaggacncccactctttcatttttccaactcccttccccccttcgagcggtgttgtgtgtgtgtgtgagagagag

SEQ ID NO: 56101 - DNA, 369 bp, Glycine max
tagaagcatgtgttcacttgttgtaactctgatgaatgacagtcttatgagacacacttcacagttccacttctctccctcttttattcctttaattgcgtgctccccccttctctctttcttttcctccattaaagcatcctctgtaagcttcttatccaaggcacgttcttggtggtgaagcttcttcttccatggcttattccctagtggatggtgcctcccctctcctcttctcctttgccttccgctgcatctccatggtggaagatcatcattgaagctcaaagatctaggcctcatagaagctccacgagcaagctttcatcaacatgactggaaaaggggggattttccttttgtatattt

SEQ ID NO: 56102 - DNA, 428 bp, Glycine max
  unsure (1)..(428): unsure at all n locations
agtcacctgaggcatgcaagcttcactttannaatttattcgggaccaacatgnttatatttgatgtataaattcacccttataaaagtattcactcttgaacaagagaatattaggaactactcactctctttcatgataagctatataacttctcctgtatcaagtatgtcacactaatttatttttaagttttttatttctccctatgggttanatttagtctatctcaatntaaatttgaattttgaattttaaaatttgatacattatatcaatttgatagacatacggatcacatgtatttatttaaataatttgttcacaatgtggtcatagctaaaaaattgcagagctaaaaacttctaactaaatgcttaggtgtaacataaattggaaaatcaaaatattgatacttactgggtata

SEQ ID NO: 56103 - DNA, 312 bp, Glycine max
  unsure (1)..(312): unsure at all n locations
ctatggttgctaatttgttaatctctctcacacccaagttttgaccaagtagtaaaagggtgaccaaagagttaactacaattccaattcttcgttaccagtcaaacaaactatggttttcttcgacagaccaaaatcantttatatgttggataaaactgttggtcacaaagctgattctctccaacaggatgaacaacactagggaagattgactttctcaccacaccactaggagagaagccaatcattgccagcaagttgcaagggacgtgtcatgctcactttactcctactattgacaaaaatcca

SEQ ID NO: 56104 - DNA, 413 bp, Glycine max
  unsure (1)..(413): unsure at all n locations
catgcaagcttggacaagctaaacatgcaaactagattctaaaatcaaaaactatttactgaaacataaatataaacctaaattataaaatgtactaaaagcaaaataataataaaagtgttcaaaagataggaaaatagaagtcctgtcatgggtcctatggtgggtcctgtggtgcaaaaggggaaaaatccatggttgtgacatcatcctcatcctcagagagctccagcacaggcgtgcctactggtgatgcctgtggggaagtcaactccagcacaggtgtggtcactggtgatggttgtggagtcgtgtcnggagtancctccacaacgtcctcctgagtagctgggtcagtctctaagatctctggctctggaatctctaagtcagcctctggatcaacatctgta

SEQ ID NO: 56105 - DNA, 385 bp, Glycine max
  unsure (1)..(385): unsure at all n locations
ctccttgagcttaaagattcagacatcctttcttctcctttaagagcttctgcacagccatgttgaatcaagattgcttccatcttgattctccatatcccgaagtcattttcccctgaaaacttctcaatatcgtactttattgttcccatctttcttgatcttgatcttgttcccacagatggtgccactcgttggttctaagcaaaatttctgctgctcttanacctgcacaagataaaaaaacaggaaaaacagagcanacaaacacagcagagcatgaacccaaatggtgtggtcggcaatgtgctacatcccgaganagagtactcatcatcatcacattgtcatganatacaagttcatacaagcacagctactttga

SEQ ID NO: 56106 - DNA, 436 bp, Glycine max
  unsure (1)..(436): unsure at all n locations
agcttaatcttggctattcgcanatccatgttactaaccattggcttagcaggcttcttgccagctaagccaacgttgtagacactgtaacctagcattttctattaagcggcattcctgtgtcgctatgcctagtgtcgttttttgtaaagcccgctaagcgaattttgtctcgctaagcagccagtgtcttttctagttttatttttcggtttttaaaatttgaataaccgcgtcctgattaattgtttggttctctatatgcagatggcctctaagaaacataagaatagtgattctagaccacatgatcataatgataataggagatttcaatcagaggaagcttggagaggatgcttcaatggaggaaaagaaagagggagagaaagagagaggngggagcacaaaattgaaggaagaaaaatggagagaa

SEQ ID NO: 56107 - DNA, 438 bp, Glycine max
  unsure (1)..(438): unsure at all n locations
tacatacattngaagtacaccatacaaaattttgctgtttcactcctattcatttatacgcatattggaaagctaattacatcctgtagatatttgcattcaaaaagggcattccacactatcatacattcatttaagaaaacaattattcatactntgctaggaatttcatgctccttatatttacctatgtatacacactattgcaaggtgttttccacgctacctctatgtaaagtatcaaacatggngcagcccaaattcgagcaaaaactctcacaagcaaatcctaattttcatggttttctaattctaaaaccaaattttggattcctagccataagcatgtntccttgcattgaagctacaaggttgggttcctaagcttggaattgcattggtgcacctatnttgaatctcctatgtcgtacctacata

SEQ ID NO: 56108 - DNA, 380 bp, Glycine max
agcttgtattataaaattacatagaaataagttatagatttatgctataagaattaagatataaccgatgcgagaggaagaaatctaagactaccatgattcttattcattctcatgacatatactgtaagtgtttttatttatttttcttgtaaatttaaatataatttttttcatataaatattagttggaatcatacgataattttagactacatgataaaataacgcaacgtgagagggtgggagaaatgaaaaaaaataatattataaaaaaatagaaatttattgaagagtgaaaaatattacatcaatatttattatattatttaacagctagagaaagaaaaaacaaagaaacaaatatcaatataataaaa

SEQ ID NO: 56109 - DNA, 379 bp, Glycine max
ccttaagatattgaactgtcaagttatgtctcgaagatttattctacaaatttaacccaaatgataatagtatcaaattatagatcaccaaagcaagagctgaaatttatagcatcaacctccatttacataaaaccctactattcattaatctattgaaataataatcttattttttatatatttgtgtctggttgggtaagttagtaattattacttgcagagcacagagtaatatgtcttttcacggttataattttagtagatataaagttcttaatcagtgctatttagtactatgattcagagtattaaagcgaaatgtataacagttgtgtgcctaactatcactcttttgcattctccaattttaacaact

SEQ ID NO: 56110 - DNA, 440 bp, Glycine max
  unsure (1)..(440): unsure at all n locations
agcttgaacaaagcattatgacatcatgcattttatgtgtatcaacaccacanaatgcctgcattacctttcacttacccttgtctcaattttggtgtggtattgaccatcactcaaaatgatgctttattcaccctcgatccgcaagatgacaagatgcaaatgcatgcatgctttggatgtttaattgcaacaattaaacaagtgttattgtgttcaattttactttaacgcttacgacaccccgttgatcgggccaaatggcttcagatttagtgggcaaggtctagagtgtatgttcttaagaagtaaaagacataacacaggaagttaagatgcaaatcattaatccaatgtttattaatgttgcgaacatggttnacaaaagaatttaagactttagaacacccaatgagttcttagagaataatcatgtattg

SEQ ID NO: 56111 - DNA, 437 bp, Glycine max
ttaacagattacactgctgtttgagacaatgatagattttttcatgagtctctgctttactcgattaccagatggattaattgattacttctctcttgtttaagttgttcagagacaaacaagaacacgctaatcaattacctaggtcatctatttgattacattgttcttgagtgattttccagatgttggatgaacactttaatcaattacttggataatctaatcgattacttcattgaaataatcgattacaaacgattataattgttttctctatatataaccagcttgtgttcacatcaaaaacatgatgagatcatctgagaatactacatgcatctcgaaaatacttcttagtctcagaatgagcatgattttgtacttttattggcgaacaagagatagaaagaataaactttatagtaactcacaac

SEQ ID NO: 56112 - DNA, 225 bp, Glycine max
  unsure (1)..(225): unsure at all n locations
agcctaccatcctcagtctgatggccntattgaatggaccatgtagtcgctggaggagcctttgagggcgtgtgtcttatagcaatagaggagttgggagagttttctatcgttgatagaggtcacttataacaatagttttcactctaccattggcatggctccctatgaagctttgtatggtagaaggtgtaggacacctctatgttggctaaagcccggaga

SEQ ID NO: 56113 - DNA, 415 bp, Glycine max
agcttgtgtctttataggaactaattttaatattactcagttcctcccgatgtaccatacaataattcttatgtaagaattctaatttctagcgttgcttatttgctgttacttggagtgcgtcattacaactaggacagattttggcaggtctagtgtgaatccacactaccctccttccttttttcttttagaaaaacattgtatatgtaaactttaatttaaagcaaaaatctattttcttatatttaataacataattatgtttttattccccacacccggcaatcaacagactaatctcttgaatgtacgttaatttttctatatgaagacatctcttgaaacattactgaatattgcaacttgctttctcttgttgaaaagctaaatatcatgaaaaaatgtcacttat

SEQ ID NO: 56114 - DNA, 315 bp, Glycine max
atattaaccatattcaattgttcatgcaaagacgtgaaccttcaaataatatctctttccataaccacgtggtacagcatgcaaggatgactaccaaccaagtactatcaacatatcatcaaaagttacgataaaaagatcaagtagataattgaagccagaccatcggtacattattagtattatcatatgaaaggaaaatcattttcacacatactacttactgtgtttgaattcaagtcttgaacgaggatatttcttatttatcatgtcaaaatcatatataaatgtgaaagttacaaatacttgtttcaa

SEQ ID NO: 56115 - DNA, 424 bp, Glycine max
  unsure (1)..(424): unsure at all n locations
agcttgacatcaatgcttaacctctatggacttanacttaatgaccctgttntttttcaatagtagaggttcttgaccaaatcgaaccccacggacaacaattgcttctaggatagagacactgaagaagttgctggacaacacgatcaacaaatgacctatagtacggttcgtgaccattttgaacccctatgacaacaatttacttctaggacaaagacaagcaagaagttgctggacaacaggatcaacaaatgacctaaagtaggattcttgaccagatcgaaccctgnggatagctatattaatcaacagaccacacaacagataaatagaacgacatgagataatggagctacacaacaaatggttaagagagacaaactataagaaaccttatacaggaccagaacatgcacaattc

SEQ ID NO: 56116 - DNA, 400 bp, Glycine max
  unsure (1)..(400): unsure at all n locations
tactaagcttgctgattacatcttctctntctaagcagattcttctcgatatcatcaaaatcttcatgatctacagacaggtacgtactattgcattacttgtcttaactttgtaaatagcgatcaaagggttcccatggaccctaagagaataaaggacattcctgattggcccactccaccaagtataagggaaatctgtggctgccatgacttaacaaacttttgcaaaaggtatgtcccatatttttctatacttgtagcaccactcattgagttggtgaggaaccatgctccctcatgggaagatgtccatgataagggttttcaaactttactctattataacatatgcaacaccaataatacatatgtttttattctttatataggtgtcgag

SEQ ID NO: 56117 - DNA, 392 bp, Glycine max
tgcaagcttgtcatttgtgtggagcctactacaactgtcttcttgggagctatttgattctattttcgtgaatcatgaagaacaagttgaagcattccaaaactgcaacactgagtgcaagatctatgagtgaaaaatctatgttttagcttgaaccctcatagtgagagtgacctatttctaatttatgcttacaaagcttgtaataatcttagatagaagtgtgagattaagttcttgagtgaaatccctcttgtgaggtgaaaatttgtattatgtgcactcaaacacaaatctatttctctgtaaaattttagcgttggctggcaaaagtgaaacctagtggtgtagctagtctagtcaaggctaagactgaaatctagtggggaact

SEQ ID NO: 56118 - DNA, 461 bp, Glycine max
  unsure (1)..(461): unsure at all n locations
ttattaacgtctatgtcattaatgagcttaccattatttgactagaggatttctctaaattatccttatcctttctaaactntagcttaaaaatttaagagcttaaccatgcttaagtatcgtatggtaacatctcattgtctaccatttcaataatctaaaacactacccaattgtacaacaaagcaataacactatctaccacacacatatggaaaattgggatgttacaagtgatgttcttcacagcaagtgttggacatcgattcaacaagtaaaatgtccagtttatagctttagcacaaaaggatataggaacttttttaaacaaaaagcatacagtacaccatggtcatcattgctctatntttgcgttctactacatattggtggggtgatatgtagtggaaagtttctctttattcctctttttcacaaatgatttgagttggagagttaac

SEQ ID NO: 56119 - DNA, 376 bp, Glycine max
aagatttggaaccagctttgcttacgtatcttgcttcttctttctcaaatttcaatcaatcacttccttgttttgactactctgagtacggatgataatggaaaatgagtaccatgccgctgccattgagagcagtatagcattagtgaatataaatattctaaaaccttgcatgtgcaccatattattaactacatatgattggtctttaagctaacattagaaaatgagccatcagagttctttaatttctaggagcctttccctgaattatcctataggaacttcaactaacatggtatggtatgatatgatatggatggtagataataatggttgtttaagcatatggtcaagaacttaattttagggtcat

SEQ ID NO: 56120 - DNA, 390 bp, Glycine max
ctaaccttcaacactcttgcttaatttgttgttcattatcggcacatcacgtcaagaattttaattgagacatgaaacattaatactacatacttattatactctctggaagaataaaactactaattttacattagttaatgtgttaaattagtcatcataatatcaagtgtcacgccattgatcaatgtgtcacgaacatatacgggtagatgatatataatcggtgagaacaaatgatgcataaagacacatacggcgatacacgtgatgtttataatataagtaaaaattcaatcgccaaaatctcaagatgatattaatagtttgaagatgaaatatgtaattttgctttaattgtggctcgagatttcgtgatgcttttttaat

SEQ ID NO: 56121 - DNA, 449 bp, Glycine max
  unsure (1)..(449): unsure at all n locations
agctnggcaatgtgtacattggattattggatttccaatatcaaaatattctactttgaataaagatgatattagatattgagactcaagttaaattgataaccaatatacaatatacaataccttctagtatgtcatcaacaaaaattgttgtggaattggtaaataggtcatcttcctcagaatcaaaatatttttagaaattatttctgcattatgaaaaaaaaattgtgtgtaacatggataaactaatcaggtgacaaaaagcataccaaagctcttaattatttttaatcttgtaccttgtatccgctccaactgaggaaaagatctgatatattatgcattgttatcttcatcaagatcagtatttcatcttaaaaattggtatttggtgttccttcaaaagatcacaatgttgatgttgaacagttcatatttgacaaatc

SEQ ID NO: 56122 - DNA, 349 bp, Glycine max
  unsure (1)..(349): unsure at all n locations
agaagaaatcacatgttgtcatcacattatttgnggatattgtgaatgtatgtatacacgatattgatgatgtcaaaagaacaatcaaacacggctcattctgcttcaagattaatacaagattttttaacatacacagtcttgattcaatatttcttcaagatcatgccttgcctcaaaatgtagagatttcaagacatcctaggctcatgtaatcgattaccaatacatgtaatcgattaccaatgcacatgatagtgtgtaaaccattactcatcatttgttattcattaccatacactctgatcgttgggaattcaaatataactgtgtcatcgattacactaac

SEQ ID NO: 56123 - DNA, 471 bp, Glycine max
  unsure (1)..(471): unsure at all n locations
agtcacctgcggcatgcaagcttgctgtcacgatatatgcactgtgctatgttatgattcattntaatgcagctaaaagaatcctgagatatgtcaagggtactattggttatggagtgaagtttcagccagtaaaagatttcagtctttatggatattcagatagtgattgggctgggagtaatgatgacatgaaaagcacttcaggctactgtttcacattttgtntatggagtttttcatggtgttcaaagaagcaagatgtcatagcacaatctaccgctgaagccaaatacgtagcagctggtgcagctgcaaatcaagccaattggcttaaaaaacttatggctgatctacacatggagcaaaaggagagtacacaggttcttggtgataatcaagctgtaatttcaatttctaagaaccctgtgtttcatgggaaaacaaaacattttaagaataaattgtatt

SEQ ID NO: 56124 - DNA, 251 bp, Glycine max
gctccgatagcttactaaattggcaccttcacagcaaacagatgctcagagaggaatggtgtgacttttcaaaaaggccaccaagcctacttacaagcatgcccagataatacttaccataaaaacatcattattgcggaaaggacactcttctggcacctctatcaacgccaaagcttaagcccttctgagcacctccacacctgatgcaaatgggataaaaaaccagggatggtttatatgagttaaaa

SEQ ID NO: 56125 - DNA, 467 bp, Glycine max
  unsure (1)..(467): unsure at all n locations
agtcccctgatgcatgcaagcttaaagtatgcccgagtcattcatccctattagatgttgttgaagtattggcgatcagaattgccattccttggattatagggttgaaccaagctcatgcttttacaaaaaggttcatcaagtcaagttgaaatatggaagtaaccgtcttgcaaaattggggcaaaagatgaatcgagtcacatcactgcttcgtctactgccaaacatatttaggattattgatgtccttgttacttccagtttcaccttgacaaagatgtcatggaccatgttgaaaatctaaattgattcaaccccatatcttgcgtaaaaattcgcaatacttcaattgtacatcgttcgcatgcatccatgcttttcattggttgcattgctcgttgcattctttccttgaaaataaaataaaatgaacttaatcattgttatgaanaagaaagggacac

SEQ ID NO: 56126 - DNA, 330 bp, Glycine max
  unsure (1)..(330): unsure at all n locations
cctggagatatgtcgcgggggtcaggagaccttgnggacgtcaagtggggtgctattgcccaaaaccaagcttgaccaatcccgacccaacccgggcatagtcagtcagtgagaacctgtgatgtacctaaacaggcgagctcctggcagtcaacagataanaggaacaaagaccacaaagcaaggaggcttgtgtggtggctggccagctatgaatcttgtgtgatatatgggttatggcctctggtaatcgattaccaagggtgggtaattgattacaaggcttaaaaatgaagacaggagactaagatggtctctggtaatcgatta

SEQ ID NO: 56127 - DNA, 435 bp, Glycine max
  unsure (1)..(435): unsure at all n locations
agctnggacacgtcattttanaacatttcatttttatctaaaaaggagttggtcaaaggactacctaagatttgttagaaaacccatcttttctgtgaagcatgtcagcaagggaaacatatcaaaacctcttttaaatcgagagattttgtttccacttctagactgttacaactattgcacttggatctanttggaccaattaaaacgttaagtctaggaggaaagaaatatggctntgtcatagttgatgactattctagatatacatgggtatacttctttgcacataaacatgagttttttaaggtctttgaattattcattaaaagagttcaaaatgaanaaaggctnttgtatctcttctatcacaagtgaccatgagactgagttngagaatgtcaagttcaaatcattctatgaaaataatggtat

SEQ ID NO: 56128 - DNA, 435 bp, Glycine max
  unsure (1)..(435): unsure at all n locations
agcttctcatctctataatggtactaaacattcttggcaacaaattgnggagcttcatatcagcaatcatattaaatatatttgcaaattccaccttagtgggtggctttaagcccctgtttctaaatattgcaagagcaattgcaagtttctctgtttcaatttagcattggtcttgtgagaattagtcttcgtttatagaaatttctaanaccttgcaattgcataaaaaaagacaaagggctcttggacagtgtccttaaagtatgaaactttnttcatattttagaagtgtttgatttgatatagaatttaaaaatacatgtaatgttttttttttaacaagaaataagaaatgagtttaattaacatatgttttgaaaaggaaaacaattttattcatcacaagtttttgcagtcacaagtgaccaaacc

SEQ ID NO: 56129 - DNA, 472 bp, Glycine max
  unsure (1)..(472): unsure at all n locations
atatacacaatcatggcccttatatgtccttattcatacatttcattctaaatttcagagattgatgcaaagactattactcagagctagtcgttcactcacagtttaagatcacactctcatcggttatggttcaagcttttctttctcaaacaacctgtctattgcctaacaattctaattgcaagttcacattcttttttctttgtctaacatacatacttgctcaaacttatganaagaaacacaaacttcatcacaatcatgcattcaatccaaaatcaaatcataacaccaattttcacaaaaagataaaagtgtttcactacataatcatcanagtcaagtcaaactggtctatgcttcanaacaagaatactagctatccacaaacaaaacaacagtgaatataaacattanacaaaataactaanaaccaatgtactganactataatcatttatataataat

SEQ ID NO: 56130 - DNA, 444 bp, Glycine max
  unsure (1)..(444): unsure at all n locations
agcttcagcatcttatattgatngctaaaaatttgttgttaagacaacataggagacctgtgcagcatagtcaaacagcttcaatagaaactaaatgacttggagaattctatgccagttcaaccttctgaacaacaagtgaaggacctcaagaaaacccaagctgacctttgggaaaaagctactatgcacgagtctattgtgaggcagaaatcaagatgtagacggatcaaagagggggacagcaacacatcctattttcatagagttattaatttgaggaggaagagaaatgctttgagggggttgcagattggtgacacctgggtggaaaatcctaacattataaaggctgatacctttcatcattttcagaacaggttcaatgagcctcacttgaccagacctaacttggatggggtttcatttanaagtctgacttat

SEQ ID NO: 56131 - DNA, 440 bp, Glycine max
  unsure (1)..(440): unsure at all n locations
agcttcaacggggacttacttctactggagatttgttttactcgagaatgatgttgactgtctgcagaggaccaacttcatttgaggatatcaaggcagttgctggtgtncaatatcctacatatatagaagtatgtttggccatatgtttttttacaagatgatagagaattcattgatgcaatcaaagaagcaaaagactgcggctcagcacaatatctaaggtagctgtttgtattattacttttgaaaggcacaatgaacaaacctaaagaagtttgggcccaaacttggcattggttagttgacgacattgtgtataataatcgaaaatcaacaagcactccacgttagtttacatttatcttgccacaaaaatacttgatcataaccataatgtaactttttttaaatgtcttagattacattttgatgatgac

SEQ ID NO: 56132 - DNA, 422 bp, Glycine max
  unsure (1)..(422): unsure at all n locations
agcttcgatgggaagttatataccaatcacgttctcttttatggtcttgaaagaggagntagccacttgctcaaggtccaaaagaaacttgtctcagtgtttatgcaagatagagaccaacatgttagccatcgtcagcaagtaccaagaagaattaaatctagccacagcccacgagcataaagtggcagacgagtatgcccaagtgtacgcagaanaggaggctagaggaagggtgattgactcgttacatcaagaggcaacaatgtggatggactgatttgctcttaccttgaacgggagtcaagaacttccccgattgctagctaaggtcaaagcgatggcggacacctactccggccccgaggagatccacagacttctcggctattgtcagcatatgatagatttaatggcccata

SEQ ID NO: 56133 - DNA, 398 bp, Glycine max
aaaccctttagatgaagcagcaactaaaggattttggtagtctacctcgatcacattccttgagatgtgacaatacaagtgtaatcagctagacccaatatcttgtcgtgcgttctagagctaagcataaagaaataagactccatttcattagagatcatgtgcttaaaggtgattgtgttatagagcttgtagacactcctaaccaactagctaaaatctttaccaaaccgtcgctcagggataggttctatgtaatgtcattcattacaataacaactcataataaataatatactttacacattccataaaataagaatctacaagatttaatggttcgaaatacttcatatattataaataaatgagaccttacatgtcttaaaagagttcac

SEQ ID NO: 56134 - DNA, 420 bp, Glycine max
  unsure (1)..(420): unsure at all n locations
agcttatatttataaaagttgcattatatacttattggtttntccatgtccaaaggaaccagtaagcatgggcccattaactagcccattaaagcattcaagctaaccaaactcctggcataaattacattgaatccgagttatgaagtgatcttcattgtcttgttttatgtcccccacagttcataatcctccctgaagccttggagtccaaggaaatgtttatggtattattttttttttcctaggggatttctattctcacccccccgagaaatgtaaattgaccttgttatcctcctcccttcctatacccctaactttgtttcttattcnctcaccatcctctntcatgacacccncacctccttttctcctttttttttatcacaaccaaccccaatctggctctattaatct

SEQ ID NO: 56135 - DNA, 348 bp, Glycine max
  unsure (1)..(348): unsure at all n locations
cggaagggggacattctcttggtggaatgcatggacgagttgtaccacaactatgagaggtgaaggaagagaaaccagtgtttctaatagtcactaacgaaacacttcaagtaggcaaccaaagattgcttaacctcttctgtttgcctatctatttgggtgtggcacacagtgtaaactggaagggtttatgaagacttcataattcatagtcattttttgttgatgatgaggtgtaaaatttataaacattagttgattacgatggctgttattgctntaatacattgtgtatgatatcatacatacatccatcctacactaggagatgtaattgctttgattcat

SEQ ID NO: 56136 - DNA, 318 bp, Glycine max
  unsure (1)..(318): unsure at all n locations
ggatcttaagcactgggctgcactgttgaccttaaggtgaaattgaggaaaagaagagggggagccaatgaagaaaaagaggaagaagggacttgagatgctcacaaacttattcttaagtacacaaggtaccagctttattataacangagctccttgaaacttttaaaaacttctgaaactcttatcaaggtcctatttggggtgtctctttgggacactcattggaggcttttatcatacttaggggtggccttttttgataatctaagaggctaacctttcattctatggccccaacaagacaaagacactaaa

SEQ ID NO: 56137 - DNA, 454 bp, Glycine max
  unsure (1)..(454): unsure at all n locations
cctgcggcatgcaagctntgttcctttttattaaacgagaagttcttatactcatcacgttatctattaatcttgaggtggatccaagtgctccgatcattcattagcatattcatgttttggtggcatactcaccattgtttgtttctttagggaactcacaataactaagaaagtgcagaggcacccctataacactcgatccanaaaaatggataatgaagagggagtgcaagaacagatgaaggccgacctatcgacctttaaagatcaaatggcttctatcacggaggccatgctaaagcttcagaaaactatagaggataatgccacggcgaccgcctccaatacagctagggaagcggaaccggtgctacagcccacaataaacttatgccgagatagaaacacgatggtgttcgggcggaggtatagtcctcaagcttacccttat

SEQ ID NO: 56138 - DNA, 221 bp, Glycine max
  unsure (1)..(221): unsure at all n locations
tgttcttgcactccctcttcattatccattnttctggatggagtgttataagggtgcctctgcgctttcttagttattgtgagttccctaaagaaacaaacaatggtgagtatgccaccaaaacatgaatatgctaatgaatgatcggagcacttggatccacctcaagaattttagattacgtgatgagtttcaaaaacttttcgtttataaaaaggaac

SEQ ID NO: 56139 - DNA, 383 bp, Glycine max
  unsure (1)..(383): unsure at all n locations
tgtgctccacacgtgctttgccatgctcttaaaaaggcctaccatcaactcaaaatataaatattttttaaatgtcgacttggttaaaacttgctttcaaatgcgcatggagatagcaaattagcaactacaaattaactactgttatttgagatttatcctgcaaattatatctgaaattactacttttggtaactattgttcattttgaggtaaataaattatacttattttgggtatttatagaaaaaagagtttacacatgtatcacatgctggcatgatactactaattaatactagtaagtgtcacttgggatgatctcttaaccccttcttatacacaattccagtanggaatcgggaccaaaaacaatgcttttt

SEQ ID NO: 56140 - DNA, 446 bp, Glycine max
  unsure (1)..(446): unsure at all n locations
tgcaagcttaacanaaggcatgcgaagngggtggaattcctagagcaatttttttttgtttcaaacataaaaaaggaaaaggtaatattgtagccgatgctctttctcggcgtcatgcattactttctatgcttgaaacaaaattgattggtcttgaatgtttgaaaagcatgtatgaaaatgatgaaacttttggagaaatttttaaaaattgtgaaaatttttcagaaaatggtttctttagacatgaaggctttcttttcaaagaaaacaaattgtgtgtgcctaaatgttctactanaaatttgcttatttgtgaagcacatgaaggaggtttaatggggcgatttggggtccaaaagactctataaacattacaagaacatttntattggcctcatatgaaaaagaatgtgcacgaaatttgtgaacattgcattgtatgt

SEQ ID NO: 56141 - DNA, 300 bp, Glycine max
tgtatgaccgaatgaaggcgcacatcgccaagaagaatgaatgctatgccatgcaagccccaatgaaaacgaaggaagtggtacttgaacccagtgatgatcttggacatcttaggacaaatgttttccaataatgagggaatgatgagaatcatgataccagccagatactgtctagacgcccaactggagaaagactaaggctcgagaggagaacgacaaatccccctagtgacaaggatctcggcccaagtggaccatgaggaatgcccaaacgcgtacacactatatctactattt

SEQ ID NO: 56142 - DNA, 457 bp, Glycine max
tagacctcctcaacctcagcatcataatcaatacagcagagcaattatgacctttccagcaacagatacaaccctggatggaggaatcaccctaacctcagatggtccagccctcagcaacaacaacaacagcctgctccttccttccaaaatgctgctggcccaagcagaccatacattcctccaccaatccaacaacagcaacaaccccagaaacagccaacagttgaggcccctccacaaccttccctcgaagaacttgtgaggcaaatgactatgcagaacatgcagtttcagcaagagaccagagcctccattcaaagcttaaccaatcagatgggaacaattagctactcaatgaatcaacaacagtcccagaattctgacaagctgccttctcaaagctgtccaaaaccccaaaatgtcagtgccatttcattgaggtcgggaaagcagt

SEQ ID NO: 56143 - DNA, 433 bp, Glycine max
  unsure (1)..(433): unsure at all n locations
agcttgcattcctnttattntctcactgcctttaattattccagantttgtgtgccgttttcatcatcattattctgttgaaaatgactggagatacagctgtgaacaaaattgatttggctttggactttcgaagcctcctttctttgtgacttttcatttgggcaacagtgggattatttgacaaaggaggaacttcgnagtcctcttctactgcttcccatacatcgttagcatcaagatatgcttccattttgacagcccacatttgatagtttagtccatcaaatacgggtacataaatggtagtaaaggagatttcagattccatcttatgtgtggtggctatnntggtagtgtaggtgtttgtgggttatatcacanatcccgtaagaaccttattgtctagataccaattgaggattaaagataa

SEQ ID NO: 56144 - DNA, 346 bp, Glycine max
  unsure (1)..(346): unsure at all n locations
aggccacacctcatctttncataacaattttntgttcaaatagtgtctattcacccaccaaatttctcatatatatccttaatttcctctctaacaaacaaactatttaacttgtgaaagaanngtttgtggttatgtaatgttgtaggttttgatgatgccaaatagcaaacgatagaatggcgaaagcaaaataacgtgaaaaatcttgaacatgaataagtcaagcaattagaagattcaagacttaggtttaattgttaaaagattttccaatatgcacatttggccatttgattaattaaaatcaagtcttncaagttattttaaagaagtaaaattattt

SEQ ID NO: 56145 - DNA, 441 bp, Glycine max
  unsure (1)..(441): unsure at all n locations
agcttaacataatgtttaaccaccatggacattatcattcaaatcacaaatgcttaacaaccatacagacagaagcaacaaagtttaaccatcaaaagcataagctaaacataaggctaaccactcaaaacagaagcaaacatgtttaaccacctaaaaagacagaagccaaccaataacaaatgcttaaccaccataaaagcagaagcaacaaagcttaatcatcaagagcagaagctaaacatgatgtttaaccactcaagacaaaagcaacacatgcttaaccatcctataagataggaaaaacaacaacttaatgcttaacatctaacaaaacaaaagctagaggttaagaattgaaatagggtcaaaagcttgacctanagaactggactagtatggcaatattggtatcaggaggctataatagagagagaaaga

SEQ ID NO: 56146 - DNA, 505 bp, Glycine max
  unsure (1)..(505): unsure at all n locations
cgcacctataacactcagcttaagtacatgagtctanattcaactctaccgcatgtaccataattatgtcttggaaacctcacaggccatgatcgctccccaatatgcaagttcacatcatttacattatcaatgccaagatttctgatcaattctaatggtatgggctgctcaccacataaaataaggtgaatttaattagttatacttttgacaaagatgctctcatgtgtaaaactaaaacactaatctaattaaatacctcatgatacgatggattaggcttgatagagagggtgaactgattccctgacacttctttgttcattcttggagtttcagaatccaagaggaanaaaaagtgaaattaaattgacaaacatgtacacaataaataaaaaaatactaataaacacaaatacattagtatgagttggtagtcagcaaactatccaagacattttccctctgaacnnttttggaatctatcactgccccttttggt

SEQ ID NO: 56147 - DNA, 471 bp, Glycine max
  unsure (1)..(471): unsure at all n locations
ctaagctgtgctaacactnttctntactnganaataatcggattgttctatatgtatgaggacttggaattaggataaaatctaagtatctgaatagcatcaccacattaacaaataatataaatgtcatgttatggagagcccgataaaaacaaaacaaattaatgaagcctacactaaaaaaaaagtcatgcatgattgcatgttataactatnttgttataattatcttgataccatttaccaactgtcgctgttgtgcctaacaaccaagtgtcaattagtggctgtgaagatcaaccacacaacgaattaatgactaagaccttgcaacaagaaaaccaactgaaatgtttaaaaatgtgctcattngatcttttaattagcgtttacaatttccattntcctacattatgaaatctgtactttagaagaaacaatacaccaatacaaagaanagtaaatcatgct

SEQ ID NO: 56148 - DNA, 411 bp, Glycine max
  unsure (1)..(411): unsure at all n locations
agcttagccctagatgggatggaccttttagtgtcttttaggatcaataacaatgcctataggttggacctcccagaagagtatggagtcagcaccaattataacatttctgatttaattccttttgcaggtggagctgatattgatgaggaggaactaacagatttgaggtcaaatcctcttcaatgggaaggggatgatgcaatccaccctatgaagggaccagtcactatagcaatgagcacgaggctccaagaagattgcgctatagctgctgaagaacgccctacggttctcatgaacctcatggtatatatctgagcccatgggccaacgttgggtccaattatctttgtgcatataagactangatgtcattatgtttggtccctgtatttacggctccataat

SEQ ID NO: 56149 - DNA, 190 bp, Glycine max
gctggtatctccttcttactacaacaagattcaccgagttttgtcttctctgttgctgacctactggcgaagctccatcctctatatttattcgatgcatacatgtagatgggctaataccaggaatgaccgccagggtccatccgatatccttcctatgcttcttgagaactgacaacaacttctcctc

SEQ ID NO: 56150 - DNA, 459 bp, Glycine max
  unsure (1)..(459): unsure at all n locations
tcagagtcacctgcggcatgcaagcttgcttcttctntcctccacattacgcctgcttatttgntctacattagacaaatatactctaacaagttctctcctatactgacaatcaaggcaacgaaaaggcctgtcagctttttccctgcacacaacaaaaatggttacacacatatgaaccaaaagctccaaaacaaacagggtcagcaacacaagttagaaaggggtaaatgttaagaaaactacatttattttaaaaaccacaagacagtacagcctcagagcatgacaaacaaccagatgaatcaacaaacattagccaacgtactttgcacttctgctattagctntctacccagatggtgcagaacaattcatagacataaagacatgaaaatcattctctattgacccatttgaatgataaaccttntctagcaaaataatgactttctcaca

SEQ ID NO: 56151 - DNA, 345 bp, Glycine max
  unsure (1)..(345): unsure at all n locations
tgctntgcctggtgctgaagcgcaactttactcgccacctttgtcagagaggacttatantttaaaaagtcatccatcacccactcatagccagcaatggctatggtggacgacaacaacccaatgctntggctacgttgcacgtggggagacgccctagcatctccaccaccattatcgctcctaacacccccaacagcagaagaggggaggatcatagtaatcgggacaggctccccggcagcaacggaagggcacgcccctccgtgaggcgagaagtgccccactagttcgacgtgagaccctcaccctctcttaagaggaggactcgctatcagaggcacc

SEQ ID NO: 56152 - DNA, 432 bp, Glycine max
  unsure (1)..(432): unsure at all n locations
agcttctatttatgtggcagggcgtgtntctcttactntcttgnnnccaacgcgagctcagaccactgttcttccttcccgcgatgcttcttttcatgtccgcctgagtgggcttatatcctaaaccatacttcccacgattcccttgggtttttatcagactagttatgccgccattgtctntgcctaaacccatcccgggttcataaccgttccccaacataactcgggccatcattaccgccgcctcggacagacaaggttgcccaaagagggagtccacggaggaaatgctgaccacctcaaaagactggaaagcggtttctaacgattcttctgcggcttccacataaggcatggaggatgggcagcttaccaagatatcttcctcgcctgacacgatgaccaagtgcccctccactacgaatttca

SEQ ID NO: 56153 - DNA, 420 bp, Glycine max
  unsure (1)..(420): unsure at all n locations
atatataagtatacatgaattcatatatattatctaagaatacaacacacagtctactataaatctatggtcaatttcaaatataatattaattgtaaaggataaaaaaaccctataaaacatgaataggagaaaatacaaaatcaatatctcactccctcttacgctaaatctctacttacttaatttcatcaattcacgctcattagacaaaggttcaatntataggattcacactccacacacgaacacatcaatttcataggaatttcttaatgggacatcaactggttgatcaaaagtatataattcacacttattattcacggttataattatagggatacataaaattacattaccccccaaactaattccatgaacctttaaaaccaactttcttttatttatgcgccagga

SEQ ID NO: 56154 - DNA, 366 bp, Glycine max
  unsure (1)..(366): unsure at all n locations
agctntttggtacaaagaagaagttataattttctagagattcaaggcttgtaaaggattgtatgaataagtgttcaagattattgaaatgcaaaacaaagtcttgcttttatagactcttcatgtctggtcaagaagaccatttagaagagttataacttttagaaaaacttaaaaccaatttgaaaaagtcaaaaaccttttcgaagagttacatcttttgatttatgagaaacaatcactggtaatcgattaccaaattagtgtaatcgattacacaaggcttttaagtgaaaggatgtgactcttcacatttgaatttgaatttcaacgttcaagggcactggtaatcgattaccaaaacat

SEQ ID NO: 56155 - DNA, 198 bp, Glycine max
  unsure (1)..(198): unsure at all n locations
atcccatgcttctttggccgtcgttgcgtnggatatcttctanatgtatctncatccaccgattgataaatgagaaagagagctttcttgtctctctttcttgactccttcaacgtctcctttacaccttggcttagcgaggcttcatcttgctcctcgaagccattctctacgatatcccacacatcttgagctcct

SEQ ID NO: 56156 - DNA, 86 bp, Glycine max
  unsure (1)..(86): unsure at all n locations
catgcagctgcactgatgaggaagcaatcgcagtattgaacaactttcttaactattcgccgctcagatttgactgnntctttcgc

SEQ ID NO: 56157 - DNA, 320 bp, Glycine max
  unsure (1)..(320): unsure at all n locations
agcttggataggatgcttcaatggaggaaaagtaatatggagagaaagagagaggggggagcacgaaattgaaggaagaaaaagggagagaagntgaactttgaagtgtgtgtcactagactctcattcatcaaaagtacaacaagngttacacatacttttatttatagactaggtagcttccctgagaaacttttctgagaaaaatttcctgcgaggcttttttgagaaacttccttgagaactagagctaactaacacacccctctataacttagttaccttttggaagctccttacaagattcctataattttacc

SEQ ID NO: 56158 - DNA, 275 bp, Glycine max
  unsure (1)..(275): unsure at all n locations
agcttcattgcataattgtctcatagttgagttgtgattaagatngnacgaccaagngaaggtgcaaattgaacaagaatgaaagctatgccaagcaagccaacaagaacaggaaggaagtggtacttgaacccggtgatgatcctgaacatttgagggcaaatgcttttcaagaaggagggaatgatgagaaatcttgaactgcccaaatataggctaaaggcccaagtggagaaggatgaaggcacacgtggagaaggacaaagccttcgagt

SEQ ID NO: 56159 - DNA, 113 bp, Glycine max
  unsure (1)..(113): unsure at all n locations
aatagatgggatcggcgccatagagcccaaagctgcaaacgaacatcngttcatcctagttgtgatcgattacttcaccaaggcgactgaagctgcctctgacgccagtgtca

SEQ ID NO: 56160 - DNA, 310 bp, Glycine max
  unsure (1)..(310): unsure at all n locations
agcttgaganacgtgttgtctcgtcgctactatgtctgtacacacaagcgcatcaattgcaaanactctttacagataactgcgattgtatgcatatgataaaagagaggggatttattgctatatacgttctccacacaacgcaccaatactgatatgacattatctacatgtactatcatagcacacatcattcacatgacggaaggagaatatttcatacctattatttaatatgcaatttacatccgcggatgaaagagaactataaaactgctatgaaggagatgagtaacaaagcagaactgtc

SEQ ID NO: 56161 - DNA, 147 bp, Glycine max
  unsure (1)..(147): unsure at all n locations
ttagagcacctgcagctgcaagctcgagagaagaattgttgaagggagaaatcncctgcttttattggtgaccacagagtggtacctggagatatgtcgcggnggtcaggagaccttgtggacgtcaggtcgcttcgctatcgccca

SEQ ID NO: 56162 - DNA, 189 bp, Glycine max
  unsure (1)..(189): unsure at all n locations
ctaagcttttggagtgaacatggaccaactattttattnaataaggaaggcgtttctagncaagggcttagagaccatacaagtttcctaacgatttctaattatgtgggccattaagtctatcatatgctgacaatagccgagaagcccatgaatctctttgggggcggagtaggtgtctgccatcgc

SEQ ID NO: 56163 - DNA, 424 bp, Glycine max
  unsure (1)..(424): unsure at all n locations
agctntataagcgcgggttcgggttatcaaatgtctagcgttcgcgatatgcgaagatgatattccgagtactttggatttggtacgaccatgccctcctgatttccagctgggaaattggcgagtggaggaacgccccggcatttacgcaacaagcataatgtaaacctttacggttttaaaagctctatagttgggcctacgctttagagtttttccttttgttaaggctttgtgtcttttgtttttgaatttataatacaaggatctttcttcatctgttcctggtctctacccattctcattcacttgcatgtttacttctttttctgaaacggcagatccgatgacgagtcccccgaaggtactaatacctgcgacccgtctatcgacttcgagcaagaaatgaatcaaacggaagatg

SEQ ID NO: 56164 - DNA, 378 bp, Glycine max
  unsure (1)..(378): unsure at all n locations
tctagncaaggtctgagagaccatacaagtttcctagcgatttctaattatgtgggccattaagtctatcatatgttgacaatagccgagaagcccatgaatctcttcgggggcggagtaggtgtccgccatcgccttggccttggctaacaagcggngaagttcttgactcccgttcaaggtaagagcaaaccgatccatccacatggttgcctcttggtgtaaagagtcgatcacccttcctctagcctctttttccgcgtatacttgggcatactcgtccgcgatcctatgctcgtgagccgtggctagacctaactcttcttggtacttggcgatgatagctagcatgtnggtcttcgtctcgcataaacgctg

SEQ ID NO: 56165 - DNA, 127 bp, Glycine max
tgactggtctccctattgattttacttagcgagaagaacccgacatacccatgttgtggtgtgttctgttatgaatttctaagcgccccacggtgattttttactgacatggtaccacattgcatat

SEQ ID NO: 56166 - DNA, 473 bp, Glycine max
  unsure (1)..(473): unsure at all n locations
ttgatattaacctcatggtagcatgacctagcttcttaagttctacccaatgatgctctntgactaagagtaagcatgaaacctttcaactggatagatcaataagtttaatcttatagagatttcctagtgtcttagtggagaagagtaaagacttgtccttgttctggacgatacacacatccttgttaaaggtgacattgtatccaatgtcacataattgacttatgctcaacagattatgctttgaccctttaacatgtaaaacattatcaataggaagatagggaggaatacaaaccttacctacactggttattagacctttcttattcccttagaaagtgaccaccctatctggcatagggcatagggatgggaacatagacttttcacctgtcatgtgtcgtgagcatccactatctatgaaccatgcccggtgttttctcctacttcaaggggggcacaccact

SEQ ID NO: 56167 - DNA, 260 bp, Glycine max
agcttttactttctgctgtgcgatactggtgaaaaattgtggcacagtaaaacttgaataatcctccacggatactcttcttggctcttcagccatgattgggtcttcaacaagttctatatgagaatgccctgcaataggaaaactagaagatgcctcggaagatcgaggctattcttctagagttgtcgatgcttctaaatcctgcaaaaaagttctgattctctctgaactacgccttctacaagtggtgttaatct

SEQ ID NO: 56168 - DNA, 319 bp, Glycine max
  unsure (1)..(319): unsure at all n locations
cataacccctcaatctcgaaggcaaagcttggagagactaaaaggtgtaaatgactcantatttatataatcgaaggatacacaatccctcagtctcaaaggcaaagcctatagagacgaaaaggtgcaaatgacttggtatatatacaaccggagggtatatagcccctcagtcatgaaggcaaagtctgaagagattaaagtgttaagaattggtatttagacaactggaaggtacacagcccatcagtcttgaaggggaagtttgaagagactacagtgtatatgacttggtatttatacaactgaaaggtacata

SEQ ID NO: 56169 - DNA, 268 bp, Glycine max
  unsure (1)..(268): unsure at all n locations
agcttgcactttgagaggncncccccaancnggccaataggacttggccctcacccaccaacgtgctccaaaaaattcttgttcgagagcgcaaagtgggactgggccgcttaatgttcacctcaaagtctacttaaataactcgccctgctcttgagaggagtatcttttttgtgggagagggaccgaaaccctacgaatgtcgtacgaaacatgatgtctttccgtaatgttacggaaccttgcggattacataaccatccccttt

SEQ ID NO: 56170 - DNA, 191 bp, Glycine max
  unsure (1)..(191): unsure at all n locations
tgatcaccatgatggtagacactcttgccagtgtctactatgagaagctagtgggttacatgccgtccagctatgcggatctggtgtttgccggngaaagaatcgaggtgggattgaagagaaggaaagttgattacgtttcctccacaaacgtgaacgccaaaagaatcggngcaacaggggcaaaaagg

SEQ ID NO: 56171 - DNA, 256 bp, Glycine max
agcttttagaatggctagacatgatacatgtcagggtttggtttggctcaaggataaaagggatgccccacattatttccatgacacaaatgcaaaaatgatgatttggaaattttatgcaaaactggtcatgcatgcacctatgtggacactcaagtgtcaaatttttatggtcatgtgatgctagggctcaggattcatttcctctattttaaatcaacccaatgtttccaaaatatgttcttttatcaatttg

SEQ ID NO: 56172 - DNA, 458 bp, Glycine max
  unsure (1)..(458): unsure at all n locations
tcttagtttcagatgaatgcagctgagttgtagctacctcatgcactcctctaatgactatagcatcatttttggcgctaaactgctgggagttggaagccatcttctcaattaaatntctggcttcagcaggagtcatgtctccaagggctccaccactggcagcatctatcatacttctctccatattactgagtccttcataaaaatattggagaagcagctattctgaaatctgatggtgagggcaactggcacatagttttttaaatctctcccagtattcatataggctctctccactgagttgtctaatacctaagatatccttcctgatggctggggtcctaaaagcagggaaattttttttctaagaatactctcttcaggtcatcccagctcgtgatggaccttggagcaaggtaatacagccagtcctttgcactccctctaagaat

SEQ ID NO: 56173 - DNA, 252 bp, Glycine max
agcttttttttgggggcacctaaattaggagaacttgggaagccacttaacaagtgcaacattacagtccaaaccatatgaacctgacccatcatgagcactatgcaaacactatggacatgggtgggttccacttaagagaagagaagattaaatggtgaaccccacctcctcatctcatcatcactcacagtcaccgattgcttcctgcacaaggccgactcattgcggtgcaacgtttccaccgtgcat

SEQ ID NO: 56174 - DNA, 437 bp, Glycine max
  unsure (1)..(437): unsure at all n locations
ctaaccttagatcttggtcagaactcaattcagcagaagctccatgctagttagttttatcataggagtcagaagacgtggacaactttggcttgatgccctggcatagctcttatctggtggtgcccaacttcatacactacaaaaccaagtcaacaaagaataagcaaaccttttgccaaaatgaattgataattccataatatntacccaaccaagttgcaagttccttcaaaatttccaaactcaaccatgtaatttggtacaacatattacaaagaaattcagccgtgattaacagaagggaactnttgaacccatttgattcactaaagcaatacttttaactacaatggntaanatcacatgatacattatatcaacttaaaagaacaacagaagatttcattcataacatatcaattcaatataacaat

SEQ ID NO: 56175 - DNA, 256 bp, Glycine max
agcttgccgttggagctgccccattaactgccctaactcttttagactggtgattcctaggctcttgaccttgacttgatagaacctctttttaagcgaaggcatttgacttgatcccatgttttactaaagtgaaacaaaatctagcgcgaatcaaaactctgacatctatcatgggtggaatggatgaatgcatgaagaaatgcatatgacacaaatgcaatttatgaatacgggagcccggaaaattgtctcc

SEQ ID NO: 56176 - DNA, 300 bp, Glycine max
  unsure (1)..(300): unsure at all n locations
ggggcatttttgtggattacattgtttggtggctatgcttcatgatgtatttttgggccatactgatgtacattgtatatgggttaaatggtggacatgcctgtgaatgatatgctagntctcaaatgctactattcaaaanaaaatttcaagttgaatcaatttgaaaaaaaaaaagaaaaaggctttggattttttcatgtgaaacaattttttcaccaaaaacagctgaaatgcatagtcagggggatcatggatatttagaacaacccccttctggctatttataggaaaaagggg

SEQ ID NO: 56177 - DNA, 261 bp, Glycine max
ttctttttctacccagctcgcccaggcgagcaaggttgcttcctccagaagcaacagctttctggaggaatcttctggagtgcccaagagggcctggttgctatttgcacccccatttttactaaatacaccccctgccttttttggagattcttttttttgttaagttacggaaacttacgaatttcgtaacgatacttgttttctttccgtaatgttacggaaccttgcggattacataaccatcccctttttttactt

SEQ ID NO: 56178 - DNA, 71 bp, Glycine max
ggtccactccggtatcgaccgatttataacttttgtcatgagctgacctaaggtacataacccctcaatct

SEQ ID NO: 56179 - DNA, 197 bp, Glycine max
  unsure (1)..(197): unsure at all n locations
ccgatccantagagctgaacggttggcaggcattttttaatgagttttccncaaagntggccaatagtacttggctctcaacacccacgtgcccaatattctctgtctcgagtgcatgtcgcatatgccttcatgtagctttcagagcacatagttagcttgttctctattgagacatttgagcagagggggggggg

SEQ ID NO: 56180 - DNA, 391 bp, Glycine max
  unsure (1)..(391): unsure at all n locations
ccatctccctaagagtcctctcacgatgtgganngtgagccatgttctcagtatgaaaattagtagtcgaatgctctaaatcataatattcaaaatcaccggcnacagaatgctcaaaatgcacagaatgatcangatgcacactatgcctaactaatctataaaaggttctatctatttcangatcaaagggttgtaaatcacctggattacccttagtcatgcattatacgcagcanataatgtgtttctcaacaaacacctaanaagagggtaaaactacatctatactcaaacaatatccaaatgagctgaaattntgtgaggaacaccctacaatcatganaagatagcacaaaaaaattcaaacaaaaattcanagtctaactat

SEQ ID NO: 56181 - DNA, 202 bp, Glycine max
aaaatggagagagagaaaaagtaaagaagaagggaagaaaagaatcaagggaaccgagggagaaatagaagagaagagtgggggaaaccacaaccatagggacaacggaaacgaaaaaaccacacggaaaagagagcatggaggatacaaccaagtgaggtgacagaaagaaagcggtgaaatgaagaagaagatgtgccaa

SEQ ID NO: 56182 - DNA, 305 bp, Glycine max
  unsure (1)..(305): unsure at all n locations
actaagcttgaagagcgcggcccactggatccnctgnactatgccgatgtctangatgtggatgttggaggccgtttcngtggcttcgaggatggcttggttggcggttangtgggcgaacttggagtaagggcaggcgtcgttaagggcctttgtagagagtgttaactcctcccaactactgggctccatcttttctttgtctccccacatcttacggctcagggcctgccagaagtaaaagcccacccgctcggtggggtttccgtgctgggagacggatttccgcaaacggcttagggatt

SEQ ID NO: 56183 - DNA, 252 bp, Glycine max
ttctttttaattcaatcctcaaattgcaatgccacaatctcccaccaaaacatttcaataaacgaaattacaaacacatcccacaattgcagcctaacacatacaagcaccttaaacatgttcacaatttcctcgtcacaacatacaccttgtttcatccctaatgcaatcgtagctcaatatacaaaattatagtcctgttcggataaaatttttcataaacacttatataggagagaaataataagaagg

SEQ ID NO: 56184 - DNA, 442 bp, Glycine max
  unsure (1)..(442): unsure at all n locations
taagcttggatagagcttgcaagagtaaaagtcaaatgttacaatgtatatacttgaaactntgacaagttaatggaatcttggtggatgccaagaattggacatagcctcgggtttgagacaaaccagtataattcgttgtgtgcttctctctttttctttaactggcaaagggtttgaaatatgttttagattttatatcttggtttgttttacaaagaaaaatgtttntaccatcttgtaacatagtctgatctctaagtattntatggtatatntacattagacaataaacgtgctatcagtcttaaaaaagcttcaaatttctaaaaacacaattcaaccccctttcttgtgttatttgctttctacaaagcattttttccatgaatccttatnaatatctnggacttaatggatntagccctatctttttgattta

SEQ ID NO: 56185 - DNA, 255 bp, Glycine max
  unsure (1)..(255): unsure at all n locations
tttctttatttagggaaatctgnaacatagattcaattaattgtaggactagggtcagatatagtcataaacaaattgtcttttggttctttggtagtagatcactgcttttggaatgttttttttttttgtcagcaaaaataatatatattgatatatgagggagtaccagaggtaccataaatataagagtatgtaagtaaggctggtaaatcctcatatcaggctgaatacaaactaataggagcttactac

SEQ ID NO: 56186 - DNA, 268 bp, Glycine max
  unsure (1)..(268): unsure at all n locations
ggcttttcatttcttgcttttttagannaggccggagatgccaaagattattaatgaatcccgaagattcgagtgaagaatcaagagaagactctagatacgcccgaacctcaagaaaagcatcaaggtaagttaaaaagaatttttcaaagaaaagattgaacaacacaaaattgtccaagagaatttttcaagaaatatcttttaccaaagtttttactctctagtaatcgattaccataaggtagtaatcgattaccagaaaccc

SEQ ID NO: 56187 - DNA, 434 bp, Glycine max
  unsure (1)..(434): unsure at all n locations
tgtctcgctaagtgggagtccactntntgcgcttatcgtgtctgttcgtgcttagcgtgacntcctctatgctaattctcgcttaatgcactaattcttgctcaatgcaattacctctcgggttggaattgtgcttagtgcgctcctcgcgattagaaagacattagttgttattatgttcaaaatcccaacggtcagaatgtggagaattgtcttangaaccttcagacaaaatntagagataatccaatggttaacgaatccaggatcacgattntacagaaataggttttggtaaaatttgaaatctcataatttcaacttagctcagccaaactccacataactcaacatccacattaagaagatcacacatgactaattcaagccatacctaaactcattcangtcaaccatatatttgaataacatga

SEQ ID NO: 56188 - DNA, 257 bp, Glycine max
agcttgcattcaagcttttttggggccatttcctgcgaaggcaaacatttggaaagttagttttaccaagaaatgctacccttaaaacaaaaatggcatacaacctcctccaataaatacaaacatcaatgtaaatttagagcaagcttatgcgcatatttccttacgaacattcacttgcacaagacattcttataaatcagaaaaatgcacccatgtacaatcaaggcacatccattacccagattatttatatg

SEQ ID NO: 56189 - DNA, 257 bp, Glycine max
agctttttttctccaagcctcttaacctcatggcagggcacatacctatgaactaaaaccctaattttgggtttgggaagaaggaaggcttaaaattaaggacatggatgggaagaattttttttaactcgaatttgggttgcccccatgaggagtactttgcacctaggtagcatggaaaatatctttcaatggtatgtaaattgtgtgtaaatataggtagcatggaaaacaccttacaatggagtgtatatgtg

SEQ ID NO: 56190 - DNA, 261 bp, Glycine max
agcttttttttcttgaatcttcttcatcaatggagtcatttacttcttgaagatcaattgcagcggaatggaaatggaagaaagatgattggagacgccactttaaggagaagatgagtcaagaagaagctcaccaccataggaagccatgaataagagcttgaaggtaggagaagatgagtggagggagagggagagaaggagcacgaaattttgtgcctcaaatgaagtctgaactttgaagtgtaattctcaaatgat

SEQ ID NO: 56191 - DNA, 251 bp, Glycine max
agcttttttgtcttccaattagacactaccaaaattgtctaatttgtatgtggcgaaccactccctattggtctcatatggcaaaaacatccaaaatcaaaaattcatgcatctgtaagaagactgcatgaaactaggagaacattttcctcactataataattagaatagttactctctaccacatttgtacaacatgattcatcttcaccaaaaagcttcaactgtgaactattctttctgatatgccc

SEQ ID NO: 56192 - DNA, 259 bp, Glycine max
  unsure (1)..(259): unsure at all n locations
acacaagatggaccaaaaaacatatactgtcatcaaataccccatagtcacgtctatatacatatatatgtacgactaatagtgttttaatatgtatgtgtgggtatntataaaanaataaaaaagttgaagataaaagatatgtatgtgtggctaatattatttaagggtatatatgtttgatttagcanagaaaatanaatgannagaacagaaacgaagaaagacnaaagagtacacaatggtaatcatacttgga

SEQ ID NO: 56193 - DNA, 251 bp, Glycine max
  unsure (1)..(251): unsure at all n locations
agcntttgcatatatacctaggnnnngnaagcttattattgttagggtcccctccgcaatggctggctaaacaccctagttggggatttctaatgaacagctgatataaatacctaatatctaattgattatgttttctgtgttcaatgcttctttcaatgcttaatgtttgtatgcttttggtctgataatccatttgtgtgcatagttaggtgactttagcattagcaaatgtattattgccttagaac

SEQ ID NO: 56194 - DNA, 424 bp, Glycine max
  unsure (1)..(424): unsure at all n locations
tactaagcttttagtttagatgaatgcagatgggttgtagctacctcatgctctctttaatgactatggcatcatntctggcactaaactgctgggagttggaggccatcttctcaattaaatntctggcttcagcaggagtcatgtctacaagggctccaccactggcagcatctatcatacttctctccatattactaagtccttcataaaaatattggtaggttaagaaaaataagtgaataaaacttgaaaaataaaaaacttttgatagaatcgctttttttggacgatggagacctcagccggcctatggccggctccacggcgtaggaaaattttttctaccccaaatgcatatataataatngcgattcttgataccggagcanaagatatggccgtttgaagttttgacaaacac

SEQ ID NO: 56195 - DNA, 259 bp, Glycine max
agcttttcatatagtgacttttttttatcaacaaatattatattttgttattatctttcttcttcttttttcttctcttttaatcatcaaatacaccttctatctcaaagagtgagagttagttgaggcagaagtataggagcattaggataatgaaaacaactgcaaaaaaagaaagtaaaaagagactgaatgtgttgtttgagtagttaaagattcttataaatactatttgcatcaaaagaattacaactaaaaa

SEQ ID NO: 56196 - DNA, 221 bp, Glycine max
aagaaaaagaacgaacgccccacgagaaagtagccctacaagggcacaaaaacctagacacacccccagacaagggatggtagcatttagagcagtctccggagaaacaaaatacacctgtgcaaataacaaactaattccagagaacccgaggtgaagataataactacacactaactattcaaccaaaatcgcgaatagaggagtgcggaggggaaaac

SEQ ID NO: 56197 - DNA, 66 bp, Glycine max
  unsure (1)..(66): unsure at all n locations
ctcgcggagccattgcgcattcatcccgtgtttcatttttcccttctaanacctttcgtgggctcg

SEQ ID NO: 56198 - DNA, 102 bp, Glycine max
tctattgcgtcctctagggcttgagtaccaatcataaaataccatatttatgaaatcacgaaaagcttttgtaagataatcttggccaaacctgtgcatcat

SEQ ID NO: 56199 - DNA, 413 bp, Glycine max
  unsure (1)..(413): unsure at all n locations
cgtaccccaccatttttcacagtaaaacactgtttatgtgtctactattatngngatcatctctntctccatcattggaggtgccacttgagctgccaggtctcttcacctttgggcgtattctttgaaagattcgtgcncctttttgcacatgttctgtagttgcatcctattcagagtcatatcagagttgtactaatactgcctaacgaaggcaaccattaggtccttcgaagaatggactcgggaaggtttcaagttagtgtaccaggtaacagctaccccagtaagactttcttggaagaaatgtatcaacagttcctcattttttgcgtatacccncatcttccgacaatacatctttagatggttcttggggcangtagtccncttatacttgtcaaagtccgaca

SEQ ID NO: 56200 - DNA, 211 bp, Glycine max
tgaagaagaacttcccgcgaatcctgagatttaacacagcatttggagggatgaaactcaaagaatcagttattatcgggagtgaatttactaacactaagtaaattattggtaagggagggaactagcagtaaatttgtaagggagaaagtagtgtttggaaaatagggggacctaaacatatttgagcctatggaagaaattcttggac

SEQ ID NO: 56201 - DNA, 230 bp, Glycine max
agaggaatgtgaagggaaaaattgtatattgataccacatattggacccggagactaagaccgcgggtcatgagaccctggggacgacaggtggggtgcgaatgcccataaccaagcttgaccaatcccgacccaacccgggcatagacggacagtgagaacctgagatgtacctacacaggcgagctcctgggaggcaacagataaaaggaaaacaagaacccacagca

SEQ ID NO: 56202 - DNA, 255 bp, Glycine max
attggtttaaagatacaatctctctatatgagaatgcttcagaaacattaagaaagctagcagatgagcctaatacaaattgttatacctggcacggatacgacataaacaagtattcattttacacaaaagcataagatgaaattttggaatgacgccaatccctgtgtagctttcatcccttactctgggttcattgatgaaaattgggagctatactattgcaaattactgtatttgtttaaattgaaatgg

SEQ ID NO: 56203 - DNA, 161 bp, Glycine max
ccaaacactcatctgtttgacttttccaacatttcctttcaatagacttacaaaattatcataacatgtatgaaaaccaaattaatttggagggggatcatagcattcttgacattagcaatctactcaaatatagcttttgtcctgtatctgtctaatga

SEQ ID NO: 56204 - DNA, 294 bp, Glycine max
  unsure (1)..(294): unsure at all n locations
ccggagtacgacagtcaccgctttatgagcattgtgcaccagcagcgcttcgaagccatcaagggatggtcgtttcttcgggagcgacgcgttcagctcatggacgacgagtatactgatttccatgaggaaatagggcgccggcggtgggcaccactggttacttccatggccaagttcgatccagaaatagtccttgagttntatgccaatgcttggccaacagaggagggcgtgcgtgacatgagatcctgtgttatgggtcagtggatcccgttcgatgccgacgctatc

SEQ ID NO: 56205 - DNA, 259 bp, Glycine max
  unsure (1)..(259): unsure at all n locations
agcttttttttttacctttttcatcaaangccatgttacaaccctttaccgaccaataaacatgatgctcaatctccaccgaaaggtggcatgccttaccaaaaaacaccctatagggagacatccccaaaggtgtttggtaagcggtcctgtgggcccataaagcatcctcaagtaacttgctccaatccttcttgttaggacgcactaccttctacaacacttgcttgatttctatattaaaaacctctgcttgccc

SEQ ID NO: 56206 - DNA, 149 bp, Glycine max
  unsure (1)..(149): unsure at all n locations
atactaagccttgcttctacggcagttgtctcagagaagcttctctggtttttttctaagaaagcttctaagggagctacttagtcgtttaatcnatttatatggaacacctggttgtaccttgatgaatgagaatcttgtgagacaca

SEQ ID NO: 56207 - DNA, 249 bp, Glycine max
  unsure (1)..(249): unsure at all n locations
agctttttttttgtaataatggnctaatgcatgtatatgtagacgaaggaagaacataagagacaagacatgaagttttagttatgcatgtgcatgccacaaggcacaagaacaagaatctttgctatagataattgtagcatctagctatagtatcttagagagacactcaggagagagagagagagagagagagagagagaagatgttgtagatttgagtatgagagagaaggaaaagacatggcga

SEQ ID NO: 56208 - DNA, 342 bp, Glycine max
  unsure (1)..(342): unsure at all n locations
ctaagctgcattcctttattagggaatctatccttcctaagatggttctcttctcagtcccnctcattaagaaactagctcctttcttctctattgtctttagangaataccacctttgtttggggtctctattttgggtcttaacccttctcatgccacttctttacaaactcttacctagattccccttctttatgtataaaaaaagtgtcaagtgggaggggaatgaggtctaanggttgtaggggattgaacccataggcaacctcaaaaggggatggcttggtggttctatgagcccccttgttgtaggcaaattctacatgaggaagatactcatc

SEQ ID NO: 56209 - DNA, 369 bp, Glycine max
aattttattgtgggaatatccaggtggttgaatattttacacacattgtttcatttgaacaagtaaattcaaacttcttaatacaatcatccaactgatgctcggaaggacaatcaaccaaactcccccaagcatctatgacataatcccatgcatttttttggccaattagggatttacattttgccttgatattcttatcgatgtgaaacctacacaacaagttggggcactcaaggaatacagatttcactgcattcatcaatgttaggtctttgtcggtaacaataactccatgaagggcatcacatcttacagaaagacctcgaaactgttctagagcccagatcatattatttacatgctctc

SEQ ID NO: 56210 - DNA, 243 bp, Glycine max
agcttttagtggaagcgcacaagggtgaaacttcttgcttttattcccccaccacagagtggtacctggagatatgtcgcgggggtcaggagaccttggggacgtcaggtggggtgctattgaccaaaaccaagcttgaccaatcccgacccaacccgggcatagttagtcaatgagaacctgtgatgtacctaagcaggcgagctcctggtcagtaacatataaaaggaacaaagaccacaa

SEQ ID NO: 56211 - DNA, 462 bp, Glycine max
  unsure (1)..(462): unsure at all n locations
tactaagctgaccatcccgacacaccccgggcatagtcagccagtgtgtatctgtgacgtacctaagcaagcgagctcctggcagtcaaccaataaaggaacaaaagtccacgaagcaaggaggcttgtgtggcggctggccagctatctatcttgggtatttatctgaaaaattccccctggtaatcgattaccatttgtgtgtaatcaattacagggtttaaaaattgaaacaggacgttcagtagcctctggtaatcgattaccaattgtgtgtaatcgattacacagtgttatatgctactggtaatcgattaccacgtgtgtgtaatcgattacatagtgttacctgctactagtaatcgattaccacttatgtgntatcgaattaccacaaccttcgcacattggaacctataagtacactatgtatcgattcacataaatggtatcgatccttct

SEQ ID NO: 56212 - DNA, 260 bp, Glycine max
agcttttattttatggtttttaccgacgaatggatcaaagtgggtctaaaaagagacaaatccgatcatcatgctttgataaatgccaaaaaaaactagggcaaatgaagagggtgagaatgagggagaagcccatgttgtgactgccattcctatacagccaagtttcccaccaacccaacaatgtcattactcagccaataaccaaccttctccttacccactgcccagttatccacaaaggccatccctaaaacaac

SEQ ID NO: 56213 - DNA, 231 bp, Glycine max
gattattactgtccctgtgtgtcaatgaaatcattctccgctagtgatctatgcatgtttattttctactgccagaagtgattgatgaatatggtttatgagtcttaatttcacttttcaaaatgtattccttagttgcatcagtaaattaagtctctctgtgtgtggttacctcatgatgtggtactgggcaatatcaaagttccaaattgtctcattgggcattataca

SEQ ID NO: 56214 - DNA, 244 bp, Glycine max
tttctttttccctattttgctataaatagggggagaagtgaagaagaaaagggttcagccccttaggcacttctctctctctcgaaatagctgaggaaaattagttccgcgaagaaaatccaagccgagacacttcggtaacggttccgtaacgttttcgtgagtaattacgcgaagattctcggccgttcttcaagagtcatctttcgctcttcgatcacttgattgttttcccggttaatac

SEQ ID NO: 56215 - DNA, 393 bp, Glycine max
  unsure (1)..(393): unsure at all n locations
ataccaatctattgtgtcatttctccgaagcatttctataagacgaatatctagtggttctccatctacttganagaactatctcatagaaaaacatcagatgcaagaaagttatgcacgccaacatatctgcacatgatagatatgcanagagtataatatagtgagtgtcccgatgagttcataacaagctcataatggatgtctcaactatgctttcaagtgagatgcttaagataatatgaaagaatcccatatgttgatgaagctaatgcttcttgatgaagatagtgcttgcctttgaagatctcaatcttaccatgttgtgaagacatcaagaaagccttactctagagatatatcacatgctacattgagtagacaacatcataa

SEQ ID NO: 56216 - DNA, 254 bp, Glycine max
ttttttttcacccatttcacccaggctagctcagctcgcccaggcgagctaggttgcttcaccgccttctggagaacttcctggaaggcccaaattggtctagttgctatttgcacccccttttttactaaatacaccccttgcctttttttgctgattctttttccgtaacgttacggaaacttacgaattacgtaacgatacttgtttcccttccttaatggtacggaaccttacacatgacgtaatcttcc

SEQ ID NO: 56217 - DNA, 246 bp, Glycine max
aaaaaaaaaaccgaaaaaaaagaaaagtagaaagggatttagttggtaaaagagaaaggaaaggaaggatgaaagaaaagggctcacccccccgagagggggagagaggaaaagtagtatatagaaggagacatattagggagagggtaaagaatttaatgaattaaagggtaggtggggtaaaatagggtaaattaagggaatattaaaattaagtaggaaagattgttggaggtaaaatggatg

SEQ ID NO: 56218 - DNA, 208 bp, Glycine max
  unsure (1)..(208): unsure at all n locations
gacacttaaactaagctttctaatgttagagaatgaggagagattattttcttgtcganagnaaggcggatctnaaatacacagcggtaagtcaatgagctcggaagtatgatacaatcacacaatagatttttattcctggtttcgctactacttcatgcttaccatcatgtatcctattgagctgtggtccttgcgtattcatatc

SEQ ID NO: 56219 - DNA, 245 bp, Glycine max
ttcttttttgggaagagagagaccaatcacgagcacatagcatggtcttgaaagaggagttagccacttgctcaagggccaaaagaaacttgtctcagtgtttatgcaagatatagaccaacatgttagccatcgtcagcaagtaccaagaagaattaaatctagccacagcccacgagcataaagtggcagacgagtatgcccaagtgttcgcagaaaaggaggctagatgaagggtgattgac

SEQ ID NO: 56220 - DNA, 261 bp, Glycine max
tcagcttgcaaaccttttttttttgaaattacgcaggagcgtaagttcactgagaaccacgggcaaactacagtactaccagggtagtcttccccaaggactatagccatggagcccaagggaaaacttgtttaacaaccaagcgtgttcattcccgactgccttgagtgacccccccaatggttgattactcggccgtaggatttaatcacctgatatatctattttgcattacccctcgtcctgggtagcgagaaagaa

SEQ ID NO: 56221 - DNA, 138 bp, Glycine max
tttcttttaacacctactatatggtgattccaccaaagcttgttatcgataggttgcgacaatccttcattaccttatttacacataatgagagattggttggcacgctaccatattgacacggtaccttacaaataa

SEQ ID NO: 56222 - DNA, 352 bp, Glycine max
  unsure (1)..(352): unsure at all n locations
atcttcatagagttaactgattcatgatgttggtttgtatattntcaggaagaacatcctctgagaagataaaatgcttagttgcaccaaacatgctggctagattcagaatgacactctgatacgagtaacttgggggcaggacaggctgtggaagagaaggacacatgntggaaggaatttgttgtcattgtaaactggtgcatatagggtcaacacagcctggcaaaatatgaatctgcacaaagagggaaacannaaaggtggtttcaataatctatcaaacctaaaaaagtaaagagaacagacttggcatatgaacaatagatagagtcacaaatttatgagctca

SEQ ID NO: 56223 - DNA, 68 bp, Glycine max
  unsure (1)..(68): unsure at all n locations
atccttaaaatgaacctgcaggcttccaacctctttttgaagggaacctaagnaataaaaaggggggg

SEQ ID NO: 56224 - DNA, 440 bp, Glycine max
  unsure (1)..(440): unsure at all n locations
gtttgatgatatctttgatgtatgaccaaaagctcanaagtcaagaacacttcatgttaacaaagatgatgacttcaagaatcaaagaatgagttcaagaatgaatccagaacccttcaagggtccaaaggaaatttgatttccagaatccagaatccattttccagaatccggttcccaaaatccagatccagattccagaatccagagaagactcaatcanngatagtattaaaaagttttttcaaaaactgagtagcacatgaatttttctcaaaccttttacccaagagttttactctctggtaattgataccagattattgtaatcgatactagtagcaaatgttttcaaaagcttcaactgattacatgtcccatgattcaaatgtgtatcgatacatgattggtatcgatccagtggttcacgtgaatcaatc

SEQ ID NO: 56225 - DNA, 230 bp, Glycine max
agctttcttttttatttgtgatccaatatgatgtatgctagtttatagatatccccgccgctatttatattaataatttatgtaaatgatattgcagagagttatagtatgattccaaaaattattaagtgttggagaatattatgttaaatttcatgaacatgtgtatgttgcaccttatgaatatcattgagaatgttatgagatggctgatgtgatgttatgagatg

SEQ ID NO: 56226 - DNA, 214 bp, Glycine max
aacacgcctaccatcaatggtggctgaatgtccatgatgacaacacttcatatggctccgaagagaacatcatggcacaatgtatataccataagatcagtgggagtaagagatgctttcttgtgttataatgtggtgacgactacgcttgctactatacgataggagttgctatatgaggtgaaacaatatctcttgaagaactatcatctga

SEQ ID NO: 56227 - DNA, 254 bp, Glycine max
agctttttattttgcacctataaaaaaagaagagcgaagaaggagaagacacacataaattccaacagaatacaatttcttatagaagacaaaggctagaagaaagaaaagcatgcaataagagtcattccttccctccattccctttcttatcttttttccctttactaaatattcccatcttgcagttgtaaagtctccatcacaatgagaggctaacccccctttggtgggaacttggcaaccaaatactc

SEQ ID NO: 56228 - DNA, 390 bp, Glycine max
  unsure (1)..(390): unsure at all n locations
atagcgattgatggaatctaagctttatcttctacgatatggtgatagaatctcttgaacaggcaacgagtgcatttagtgatgcaaaaagtactacggagaaaagcctggctgcaattgatgaaggtaacttgaacaaactaagtgagaagcttcttatgagcaaatctgggaagggtatctctgctcccaatattaaagccaaaagaaataatgctataagctgtttgtctgatgaggttaatggngatccgatggctcttactgctgattatcgtcgaccagtccatcacccacctaagaatagcaaacgaactcttaataggtcatactcttaatatatggaagatatatgagcgctgtggttgtggtatcttataccttatatat

SEQ ID NO: 56229 - DNA, 229 bp, Glycine max
agcttttaatttgttccttcacaaataatcattacacagcagaaaactaacaaaaccacccatcatatctcccaaaaccccatacccacgaaatttaagagagaaagaagtccacccaaacctgaaattttgaagtcccactcgtagccacgcacttcacgactccaaaaatgctctcctttcacgattaggggctgaaacgggcactaaaggttgaagctcgggatgg

SEQ ID NO: 56230 - DNA, 276 bp, Glycine max
  unsure (1)..(276): unsure at all n locations
gagaaaaaaaggaanggatggaaaggataganggagggaaaaataaaaagaaaaaaagaaaagggggaaagaaaaaggggaagggaggaaaaaaaatggaaagaaaaagaagagggaagagagggggaagggaggaagaaaaaggagaaggaaaaaggaaaagaaggaaaaaggagagaggaaggaggagaaaagggggaaaaggaaaggaagaaagaaaaaaaagggggaagaaaaaaaaagagaagagaagagaaagaagagggaagaaaaaaa

SEQ ID NO: 56231 - DNA, 288 bp, Glycine max
accctctagaggcgaactgtttgcatgcacccgctgttttctaacgttttaaggcgcaccccatattccgtggtcatatgcccaacttgagcccatatttttgaagttgtttatggttttaacccactaactcctcttgatcttttgcctatgcctaatgtttctgtttttaagcataaagaaggtcaagcaaaggcggactatgtgaagaagcttcatgagagagtcaaagatcaaattgagaggaaaaattaaagctatgctttacaagccaacaaagggagaaag

SEQ ID NO: 56232 - DNA, 302 bp, Glycine max
cgattaattccgaattattgtgagcgcgaaattgaaacaaagctctgagaaattcaatcgacattactcttactcggagctgaatgaatccgaatataccagagctctaattgaaacagagctcatgcagtgcaaccacataactttacttgtggcgattagtccgtattatgagacgccagatgaaacaaagcctgggatatccccacatactttactcgaggctaataaaccgttttatggatgctgattgaacgagctatgcattgaacccatactttactcgttcgttagccgatttt

SEQ ID NO: 56233 - DNA, 508 bp, Glycine max
  unsure (1)..(508): unsure at all n locations
ctaagcttctggtgcctttcagatcatcaattttttgctctcttatacgaagagaaaacgacattcattactgaagatgccaacttttgctactaggtcatgtcctttggcctgaanaatgcaagcgttacataccaaagattaatggaccaaattntcaaacagcagatcgaacaaaatgtcaagatctatgtcgaagacaaggttgtcaaatcctatagcatagtccaacatgtggcagacctagaagaggtattcggagaaatatacaaatacaacatgtgccttaactcgaaaaaatgcactttcanggtcggcggaggcagattcctcttcatgatcacacatctgggaataatagtcaaccttgacaaatgcatangcatactggcgatgcatagtcctaccaacatccaagaagctcanatgctgaatggtagactagcatctttcttgtacgaagccattctaagagttgctcangaaaacaaagtcattcttatgggat

SEQ ID NO: 56234 - DNA, 253 bp, Glycine max
  unsure (1)..(253): unsure at all n locations
ttcttttataagtttttatcaggngcagccatctccctaagagtcctctcacgaggtggaggttgagccatgttctcagtatgaaaattagtagtggaatgctcaaaatcagaatattcaaaatcaccctcaacagaatgctcacaatgcacagaatgactaagttgcacactatgcctaactaatctacgaaaggttctatctatttcaggatcaaagggttgtaaatcacctggattgcccctagtcatgc

SEQ ID NO: 56235 - DNA, 283 bp, Glycine max
  unsure (1)..(283): unsure at all n locations
tggacttaccttgaattaatttctttgatatctcctttgagccttgtttccctttccttggtttgaagctcactacaagccttaagtgaaaaaccatgatatcaccatatccttaaggaattntggagctntggaattgttatgggaataagtgtgggggggttcttgtttcattggataacttgttctgttggctatacttcatgatgtattttgggccatacttgatgtacattgtatattggttaaatgttggacactgctgaatgatatgctggttctc

SEQ ID NO: 56236 - DNA, 304 bp, Glycine max
  unsure (1)..(304): unsure at all n locations
gtagccctcagacaatttagtatagttgtagtanacattataaagaaaacctgtagagataatgcatcacaatagcacggtgactcaatcattgccaacaatggcttccacctatatattntatatcattaccaacatatatatatatatatagaatattattgcctcgatgacacacacgtgtgtgagaacacgaaaacaattaataataaccattagatatgatcatgattaaaaacaataggcagataaaagtaagatactctaaaattaaaaataaaatctaatatagtcactaaatcgc

SEQ ID NO: 56237 - DNA, 419 bp, Glycine max
  unsure (1)..(419): unsure at all n locations
gcacggaaaatggtattatgaaatggagatgcccgaattttctccatnttcttgtttaccatgcattaggtaccatgttcaattattatgttttttaagtgaaacgggtgtatgatcccaacatggttggctcgtggtgcctaacacatgaaacttagaatgtagtgtgaagtttcacgcttccccctttttgtatttgttttgtacaggaaaacgcaaggatgagcaaacatgaaaacaaatggtatgcaattttgcagatcaaacagtgtgttgaacgcatatgcatgatgatgccatgactcatgcaaaatgtgaggctggaatatgataacgaactaatgcaagatatgttcattatgatgttatgaagagatgcttatgcgatgcatgatatgaatgcattttacggacacgag

SEQ ID NO: 56238 - DNA, 150 bp, Glycine max
ctctgaactgtgactacgtaatttccccaccttctaccgtaagctttaattcttcaattttgtggatcagatttttccaacttcacttgccggtgagtttaccccttactgaggaataccattatctgtaagctaaaagaggttacctcc

SEQ ID NO: 56239 - DNA, 252 bp, Glycine max
  unsure (1)..(252): unsure at all n locations
tgaatatcaagtcttttaagtgaaagtatatatcatatatgccatacttacagatagatgaagttctttagattcacagaatgcgcgcaactttggctgctgccatcctgggtgcaattccacttggttaacagcaggaaccactcttgctatatctaacaaaatctgaagcttctttgaagagaaattgctcactcctatggctctagcctngtctgagtcatagaatgccttcattgctctccatgtatt

SEQ ID NO: 56240 - DNA, 273 bp, Glycine max
ttattaaccaataaataatttttaatttttattgaaagatgtaagttttttataaaaaatatgcaatccactctaaaaatatgacaaaaattgaactaaaaaataaggacgttgaaacaatgtggacagaatgaatataaaatgaatgaaaaaatggctgttctggaactgttctcacatgatgaaaaatatgatgacatgagaatggctaaatgatcatttgtagaaaatattatatatttgaaactttagccacatatatttgaaatttta

SEQ ID NO: 56241 - DNA, 258 bp, Glycine max
agcttttagatctcattatcgacgtcatgccaactgaatttgagcagcgcatagctcctgatggaggagaagaccactggatcatccaagatgtgccccatgtacttatctgtagataggatgctgaagaaccttcgcatatattcggcagaagtcatcactaagatgcgtccaaatttgaaaatagaaggtgcgtctttttcacatcaataactttgaggaatgacattcatggcctttttcttttgttcaataaaa

SEQ ID NO: 56242 - DNA, 423 bp, Glycine max
  unsure (1)..(423): unsure at all n locations
tactaagctttaagtgtagacatggtgacgtatgacaagtaatttcttactcatatcagctctttcaataagtagtttctccaagagtggcttctcatttattaaggaacacaaattaagtcttttcgtgttttcccctaaaatctagcaccaacagttcccttaactgctttagctttcctacctctttaatgaccactccatcatcatctataatcactggaggtatctcttgtagggatgtcatgcctccaatatccttccattgaattgaagatatatagccactcagaagatgacgtagctntttaagcttattaatctaataaaaattgaccgaatgggtgagcttcctatacttccactaaaatcatcgngtgcaatttcaggcatcgaacagattgatcacgcccgtcaatatac

SEQ ID NO: 56243 - DNA, 253 bp, Glycine max
agcttttagtttactagttttgtgagtcattagtagtacagctgttggcacgcctattattttgcttacaatgctttaaactctaggctgaaacacttgactcaagtaacttagtgaatttgggataaatgcaaatcccaaacatccactctctgagatatattagcaccagagaagtttaaacctttcaaaatactcaaaccccttaccattagcgcactctcgatgccttatttgaggcttatcttccaca

SEQ ID NO: 56244 - DNA, 172 bp, Glycine max
atggcacaacttctactccatgaatgcactacctttctaatagcgagctcaaactatgcttatactgtatcaccattaaatgaaggggacgcactatactgtctacaggaacatatacttgaatggctcgcaaacaatagcccgtaataccctcataattcgaaagcacaat

SEQ ID NO: 56245 - DNA, 256 bp, Glycine max
  unsure (1)..(256): unsure at all n locations
agctttatattttttcaatatnctnnggcttatcaagctattgctagctctacccaaatcaaaaagatgtattgtttgtgtttgcacgatgactaactatgtaagcatcttatagacaaatatgcgatctcaacacttagtataatcttcgaagatatttaaagtgttttgagagtttttctaaactttacaagaatttaaatgaatgtgtgtaaggttcataacccattttttcaaagcttatgatatatatatg

SEQ ID NO: 56246 - DNA, 405 bp, Glycine max
  unsure (1)..(405): unsure at all n locations
ctaagctanatgagttgttcatccaatatatccttgtgccactgataanagcatgaaactctntaataattgattggtcctctcaactgctattcttcgatgcaaaatcatcttgcaagagcattngatttattcaaaagatctagataggaaacccaaattaatttgcatgcaaaaaatatttataaactcacatggatctccattgacaattatataaacttttaagtaattaaacatgctcaagagaatttcatatgcacaaactaccagaactttataagtaaattgaagaanacaggtatgcaccaagaattagtgtctagccaaaaaacatgcaacaaatatatcaagaatcaactactacctttctaanagcttcatggcagtcttttcattcaatat

SEQ ID NO: 56247 - DNA, 255 bp, Glycine max
agcttgtacttttaaaattatgggtaagggacaatttagagtttagatcgctgaactgggatcatccatttctattatccagtataattagttcatgaggttgcggtagaactggcttaccttgctgtttacatttgaggttagacaaagacaatgacagataggggttttaaggtttgcttggtgttgaaagaaggaaggggaggagaggtcatgggtttgaatccccaatcaaaaaactaacaactaacaatt

SEQ ID NO: 56248 - DNA, 368 bp, Glycine max
  unsure (1)..(368): unsure at all n locations
tccttctgaatgaagctntccttaatctgatctcttctctgtagcacatagcttcattcggagctcanggccatattctaattattcctagtcatggaaacttgggctagcttcaagttcctcctagttgatatcctcagtctaaaaagtacacctgaggtagtgcgatcccatggaagaactacattcttgttcacatcagggtatgccttcctttcattggggctaaattgaagcccatgagggtatgccttcctttcattgggtctgtgctaaaaatcaaactgttgggattaagagaaacaatgtgtctaatagggaattccctaagtattggttctctttcccatatgcactaagtgtatatt

SEQ ID NO: 56249 - DNA, 252 bp, Glycine max
ttctttcatgaatacttgttacccaatctcttccttcactattgaagaagcatgcaatgggtaaaaagaagtccttttgagaattatctaagccatcataccttaattttaatatggcatgaatttttggatttggaatatttcggagttttggcaattcacttttccatgcctctttacttcttacttcttgaacgaagatttgaacccagaacttttaaagccaaaggaataccttcggaataagaaatt

SEQ ID NO: 56250 - DNA, 413 bp, Glycine max
  unsure (1)..(413): unsure at all n locations
agccttaatatatgacattattcacttactgcaaggtgtgacaacatgtttggtgagaggaaaaagttgtgctcgaggtccttcttccaatataagggaaacgaacttttttgggacaatctttgatctcgagaatgaaaaaatttgtaaggcctggaactaagaatgtagtgattctaagaaataagttgataaaaggacaaaaatggaattgtactactcggagtcaataagccttcatattcaatgactgacggagtagatatcttaatttagttcattaaagtcacctcatctatatcaagaaagagaaaaagtttatctctactaattatacaatgaaagattaaggtangatccaatacatattatcaataagatangatataatcttatcttacttataatatcta

SEQ ID NO: 56251 - DNA, 252 bp, Glycine max
ttctttttaacatttctccaatgagcacaagttgataataattattatttcattcaactaaaatatcctggtatctatttaaaatatgttgcagtgttaatcgaaaactgatgatgaataattgtttcaactactagttctttttttgttttttcaactaaactaaaaacattttttataaaataaaactcgaaaatagttaagaaaattttaattttcaaaaactcagaataaaatgaatgggaaagttaa

SEQ ID NO: 56252 - DNA, 349 bp, Glycine max
  unsure (1)..(349): unsure at all n locations
tcttgttctaagagaactgaaacaagatgtaatcttgctctttccactattcactctaatanttggggtccaagccatgtcacatcttttggtttcagatattttgttaccttcatcgatgaatactctagatgtacttgggtttatttaatgaaagaatgatctagactctacctatatgcatgtctgtctttaatgaaattaagacccaatctggataagtaattaagattctcatcagtgacaatgccaaagaatatatcttctctaatcttgcttcgctgttaaccacacaaggcatattacatcagtccgcatgtccacacacaccacgggaaaatggtatagc

SEQ ID NO: 56253 - DNA, 368 bp, Glycine max
actcactatatagaacagagatattatattcaaccttacttaggtcaagcattctacctaagaaatattataagtaaaacgttcaatggatcttgggactgtgatgtcagaaactcatcctcaactaataatactctggcaatacatatataggattggagaaacatttctgaatatgctggcaaatttggcgtatccaaacatcttctagggtaataggaaagacaaataaaaagcatcaataacaaaagcaataaaagccacacacacactaatgtgtatgataataaaaaaagccagaattcatttagataaaacaaattggtttagaaatacattatattaacaactcataaccaaatcaaata

SEQ ID NO: 56254 - DNA, 331 bp, Glycine max
  unsure (1)..(331): unsure at all n locations
tgaaatcaaagatatgcaaggtttgccctcgataagcttttccattcctaaatttaatcttggtagttgtcataccctagtttcctccggggatgatcatttgctaaagatttgattcttgccagccaaattgagctgcttaacaacagttgtcacacaatccgtaaggtttttcgatgctttggaagagaatgcagaaaatacccaaaagggaaggcaaaatggtcatttggtgacttttttatgcccctggctcgcccgggctagcctttggctcgcatgggccaccagaaagcttanggatgaagtaactagctcgcttgggcgagct

SEQ ID NO: 56255 - DNA, 120 bp, Glycine max
cagtcaggttggtaggccggacaaaggagcccacatacccagaccaagccaaagagatggaacctagcaaatggcatgcagcccatgcaacaccaagcaatctagggcggaacaggccag

SEQ ID NO: 56256 - DNA, 331 bp, Glycine max
tatgacactaagctcgtcggccggagaattatgactatgctcttgtgtggtggctgcagctccatattgtgagggcatgaaatgaagagctcatggtggatacatggacggatatgaagaagagcatgatgaagcggcatgatcctgctaattactcaagggactttgaaactaagctatcaagactaactcatggcaacatagcggttgaggatgtccagaacaacagcaactacggcttatgccactacgtgtggtcgggttcatggaacaacatccggcattatgttctatcgagcaccatacttctatacaatgattaagatggaga

SEQ ID NO: 56257 - DNA, 274 bp, Glycine max
aacaaaggacctttcaacgacgttttttttaactttttccaagaagtcaatggcggtcgctcatgatgtataacacagctaccttttcataattatcgaacccggccagtgcgccggatcggataagtacgataaaacggtagaaaccggtcatggaactcttggggaacacggggtactaggtcaagctatattcacggaaaaagcgtctagtatgaaaagagatgtgtcaactttgggacaggtcgtgttcacaagctatttaaaaggaaaa

SEQ ID NO: 56258 - DNA, 355 bp, Glycine max
  unsure (1)..(355): unsure at all n locations
ctaagctttgtctgagcatgagacttctgagtttatctggngtactcgtattgggacagttcttcccaaacttatgtgaaattctcttcctaaggtaactngttcgagcttctcatcattttggcagaggatgtttagtgggacatcaacatcaacaacattaagacgtggttcccgagaggagatttttttcaagaaagcaactagttctttctttgatggagatgaaatgtaaactgtaaagaanaactgcactctgagttgcaagtgactgcaccttgtataatataccattaaaaacgttttgaaatattaatagcatgaagttatttaagattatgaaaatctttgacta

SEQ ID NO: 56259 - DNA, 299 bp, Glycine max
  unsure (1)..(299): unsure at all n locations
aaacatgaagatgtgagatggttggtttcctaccattgaacagttcatatggagttgtctttaaaataggccttattaaagccctattcatgatatagcatgcaatattaacgacttcaccccaaaatattntggaagaggagtataacttaataagggtctagcaatttcttcaaagacctatttttctttcaacactccattttgtgatgggtctaggtgcgacaagtatgtcaatgcatgttatcacaaataatcaaattcttatttcaactccccttatgacctctagaaaatag

SEQ ID NO: 56260 - DNA, 255 bp, Glycine max
  unsure (1)..(255): unsure at all n locations
agcttttatgttagacctcgatcggtcatctttcctggccgacgccgactgtcatttttttcgatcaatatcggngaataatatttttttgccgaggtgggctaatgttttcctggccgaataaatgggaacatgccagtttcggccgaaacgaaacatcggttgagctcgcacgaaaaaacctagccgacctacattgtaagttttttatgcaacaccgaaaaaaacaaaatttcccctgccgtaagaaaaaac

SEQ ID NO: 56261 - DNA, 145 bp, Glycine max
tactaagcttaacatcagaccacttccagtgtgctggaactacttcactatgtacttgttggtgcctatgcaagttgaaagccttggaggaaagaggtatgcctatggtggtgtggatgaattcttccgaattacctgggtcaac

SEQ ID NO: 56262 - DNA, 226 bp, Glycine max
agcttttagtttaatggacttaccttgaattaattcctttgatagcccttttgagccttgtttccctttccttgttttgaagctcactacaagccttaagtgaaaaaccatgatattaccatatccttaaggaattttggagctttggaattgttttgggaataagtgtggggggtttttgatatattgaacttcgttttttcaaatacatcatggtcttaattat

SEQ ID NO: 56263 - DNA, 350 bp, Glycine max
  unsure (1)..(350): unsure at all n locations
gatctagctgagaggatgcttatggagaaagaaagagagaggttgtgctctttatgaagaataaagaggagagagggacttgagtgatctcatagacttcattctcaaagtacaacaagtgttacacatgcctctatttatagactaggtagcttccttgagaagcttcttaaaaaacttcgttgagaagcttcgttgagaaaacctccttgagatgctagagcttagctacacacacccatctaanaactaagctcacctncttgagaaacttccttgagaagctagagcttagctacacacacccctctaataactaagctcacctttcttagaagagaagctagagc

SEQ ID NO: 56264 - DNA, 246 bp, Glycine max
agctttttattttgacactttagcaggataatgaatagtgggttggctgctgtacagatgattatagatcccagaccaagacgatatacttcacacataatatgctcaatactaatgagttatttaaaattacccttttattcatagtcttaaactacaattgccatacttaaaacaaaaagaggaagatgattgaatcattgagaaaccgattacccataacacatagggtgtgggtgtcaagaa

SEQ ID NO: 56265 - DNA, 214 bp, Glycine max
ctcagcctcattaccagaagctggagatccttgggttttcattatggataggtggtgatgctggttatcttataaccattgccatgtgcctcacttttggatggctgtttcatagtctacaatgcatgacccctgccaagatcaatttattgggccttatagtgaacgagttcatcattagaaaacatgtattaagcgatgtttactgagttat

SEQ ID NO: 56266 - DNA, 254 bp, Glycine max
agctttttggtctcacagacagcgattgggcaggagttggatttcttctgcaattgctttttggtccactttttctttatgcaaatatgttcaacggaaattcggtttgctggaaagcgcaccggatcgtcaagtatttaaaattaaaacggatgaatctaagtatccaacttagggaactagtcttagatagggttaaattcagaaataaggcatttgtgaaataaacatcgataatggatgatttggaacat

SEQ ID NO: 56267 - DNA, 259 bp, Glycine max
  unsure (1)..(259): unsure at all n locations
agcntgtctttttgaattgaancnagccctgnagnttcactttagttattaatcaattcgattaagaatgagaaatcccaaagagaaaacgtccacttgattttccgctttattttactaaaagatgtcttttttgattattatattattttttacctctttttgatttccaacgtggttacgggacgaccgaacggtcggaatctattttaaccgaagttaatggataatacaattccttcgttttgtgttttttttt

SEQ ID NO: 56268 - DNA, 252 bp, Glycine max
ttcttttagtctctcagaagaagacggtgggcagaaagaggatatttttgctctccaaactccatgctcccaacaaatgaatacaaatttgcgtttgggtcttcacattagatgacggctctataatcatggaatttgaagtcctcctgtaaggaagaagttacatccagcccttgttttatcttcaagtttgtctcaccatccaagttcatggtctcaacatagcaaactgcatcctcataactggaggaa

SEQ ID NO: 56269 - DNA, 251 bp, Glycine max
ttcttttttatttactcgagacagactatatatgcacaactgaaaaaatagactttaattctaaatagcaataaaaagatatataataaacctgtttctgaaaaagcttcctcaaaagggaggctacttcaatctagtaccgtagttgacttactaagtactaaacaacaaattaatgagactgctgactactgatttcatagaaagatttaggaacatgaggagtaagaaatgtatggtaaagcttctag

SEQ ID NO: 56270 - DNA, 489 bp, Glycine max
  unsure (1)..(489): unsure at all n locations
actatgacactaagcgtgtatgatatgtacattgtctagatttctataagttattatgaacgacctggctagggaaatattttcagaaagacttctaacaaaataagaagaagaatagttttcgtaattaccttataaaccagctaatgatagaagctctttcatattagttcttttcaaaagatatttttagattatgtataaactagcattaacttatagaaaagtttatttaatttnttttctttttggtctctttntttagtagtacttctaaatacatttatccagatagacccttaatattaatatatatcaacaatacttagaatcttatgagactgagcaggattattggaggcaagtagtatntggactctacggttctctntttgatctctcgcaatctgagctaacatgaccgtggagtaatattccgaatggacttgtaatgccttagttaacatcgaacgatcctgccacaaatta

SEQ ID NO: 56271 - DNA, 180 bp, Glycine max
aggagacaaaaagaaggaggaagaatgtgaaaggaaaagaggaggaaaggtagagaaaaaagggggagagagagaagagagaagggggagaaagagggggaaggaagagaaaaagagaagagagagaaaaagggagagagaggaagagagaggaaaaagaaaaaggggagaaaaagggaa

SEQ ID NO: 56272 - DNA, 457 bp, Glycine max
  unsure (1)..(457): unsure at all n locations
ttgatgtggatggataggtatcactntcactttgtttggatgtctagnagctccaagactgctagccaaagcaaaggcaatggcggacgtgtactcagctcccgaggaagatcatgggcttttcgattattgtcagcatatgatcgagttgatgtcccatataattaggaactgctgatgcatctgtatataggctttgactttgacaagataaacaatattgtctcttaaggaaaatgagatatgattcaaacctatgtctctgctaaaatatttgtgtgggtccaatacttagataacttgtcattgtcatgcattcatgtttatttcattgtcgcattactcatttgcatttgttcttttagcagttatagtcgagtgaacaccataaccaataaagacatacacactttacgacacccctatcgaacccgttccaaatactaaatcatggatg

SEQ ID NO: 56273 - DNA, 439 bp, Glycine max
  unsure (1)..(439): unsure at all n locations
agcaccagtcccnaacccgagggtgggctccagtgttatattcctatttacccatttgctagctgttaatgtcgaattatagtcttggtccccttcatctggcaatttcctttcatttcttctaaatttaattcgatggccctcgagatttaaaagaaacatctcttacttgatttcaaaatagatcttctatttaacttataactcactcaactctatcattacccatattcaacatgcagaactaccaacatgcaaagagatctaattccgcanaggccaggatcaacaggaaacgtatcatgcagcagaaacgacatcctcagactcagtcaccttcacagccaactatggactgcacttcanaatatgcagaatatgatagtangacatatgatataccatgttccacaagaaatgaattgattatatacttaat

SEQ ID NO: 56274 - DNA, 365 bp, Glycine max
  unsure (1)..(365): unsure at all n locations
gcttgcttctcanaantataaaactactcctaattctaaactatttatgngccctataanacaagggttagaaaatcctacatgactagggtaccctccctacactatgaagccctaaatacaaggcccaaatataatgaagccctaatctaatatgtacaaagataagtgggttcatacttaacccaagggcacaaaatctaccctaaggctcatgagaaccctatgaccttcttctgcatctctaacccaatcttcttatagtcttctattcaatggccttgagggggaggattgcatcacttgtggtctagattntctagaccaacttcttaagaatttgtcagtatgatcatagtcatcat

SEQ ID NO: 56275 - DNA, 116 bp, Glycine max
gagggcccaaacgggcccggcggagaaagaacccccagggagaaaaaggacacccccaccgccaggaacgagaaccaggaccgggaagaaacagaaaacaaaagaagagcggaacg

SEQ ID NO: 56276 - DNA, 252 bp, Glycine max
agcttttacttatggcgaggaagactcacaaaaaagcctaaaggtgcgcttagcgagaaatccagcgctaagcgcatgatcacccgttaagcccaaaaggggtgtgtttaacgcgaagttagcgcgaaaataaaactacattagacttttaaagagggaggaagtagaaggaaaaaacataatgaggctcagaactctcgctctctattgaagaactctcgctttctattgaagatatccaaagtcagagca

SEQ ID NO: 56277 - DNA, 454 bp, Glycine max
  unsure (1)..(454): unsure at all n locations
gcagcttcatttctgaactctactgcaccctctctgtgattgttactgacaacctcttcacagctattctcttgtctgttaggggaggataccctaaaaaccaacattggaaataacaccatggaacttccttaacttaaaccaaaatatgcccactaacatttaccataaacatgtccaataccttataacccacaccaaatcaaccttggccaatcttgttctcattcgagaatcatttcgtgcagcttcatttgagccaaatcaaattgcaggactcacatnncgtagatcatcacaactcacagcatagaaaacagtatcataagcaccaactaagtcagggaacaatcacttgatgaaaagaagatactgaatctgacaaagtgtatactctgctgcctctactagaacaactcacatgaagtcatacacgacatggacacatgacata

SEQ ID NO: 56278 - DNA, 251 bp, Glycine max
agctttttacttccttgacatttactggaggggggagtttctcaatgacatcaatctttgctttgtctaccttaattcctctcacagaaattttatgccccaacacaatgccttcttaaaccataaaatgacatttctcccagttaagcaccaagtgggactcttcacatctctgcaacaccctttccatattcgataaacaacaatcaaaagacaagccaaagacagagaaatcatccataaaaacttcg

SEQ ID NO: 56279 - DNA, 130 bp, Glycine max
ctttaaaatcatactaatatgttgattttaattagttgatagtgaaaaaggtttgatgcctaacccttaaattttaattattttgggccacaaaaccaaatggacccccttccttttccttggcaaaata

SEQ ID NO: 56280 - DNA, 244 bp, Glycine max
agctttttatttataccttaccaacactggagctatgactggaatacctatggcccatcaacaaattttcaacagccttcttccccactcttctttacctaactgttcggcgaccacgcacacctttttgtccttgtgatcccactccctgatttttaatcctctgacctgcattcccagcaactttagcaccacggcggccaatattttagttggttttaaaaaaaatattaccccgtccttt

SEQ ID NO: 56281 - DNA, 321 bp, Glycine max
ccttctaattcttagaaaggaggaatgagtagtgatcaatccttatgttgtcaaagaaaacatgggtactgaaaatatttattggttatcgattaatctgtatgtttggtttttgttccctactaaacaatgatatggtaacaaatatcttttactttgttgcgtcctttactagagaggatagtaggatacattatcctccgctggttttgtgcgtttcctcactgtccgacaacctcttttgaacacactctctcttattggttgaaatttattatgaatcacacttttgtgggtgcaacatcttcatttatgattttc

SEQ ID NO: 56282 - DNA, 255 bp, Glycine max
agcttgtaatcttttacacacatactgtaatcgattaccagaggagattttcagaaaatattctcaacagtcacatcttttcttttggttcttgaatgaccatcaaaggcttatatatatatatgtgacttgagacacgaatttgctaagattttttcagaatagaaaggtcttatcttcttaaaaagcaaaatcgttttatcctcttacaaattccttggtcaaaacacttgtgattcaataaggaattatttg

SEQ ID NO: 56283 - DNA, 284 bp, Glycine max
  unsure (1)..(284): unsure at all n locations
gggagaaggtggctatggacccgtatacaagggggataagattactgatattcctaacctggatttntcctaanaaccttattaaaatagtagaagaatatttttcanggccaaccggtagatgggaaagaagtaactgggaaaaggctttccaagaagtctggaccaaggttggaagaattccaaaatgaagtggcattgatttcccaactaccgcacccgaatctctgtaagcttcttggttgctgcattgaaggagaagaaaaaatattgatttatgaata

SEQ ID NO: 56284 - DNA, 258 bp, Glycine max
agcttttattttgctgaagaagctgctgctcatgttcaacaagatccggtggagattaatttatctcagcctcatttgtcacaagatagtgacatggagttgatggtaaatatttttcacaacaaagtatttttatctcaacctaatttgttgcagcactccatttttatatattacaattattcatgtttggcatttgcatgtaggtccctgcaactattgttccaccaatagcaaggaataagctaaccataacaa

SEQ ID NO: 56285 - DNA, 250 bp, Glycine max
ttctttttcacaagcacctgaaagtaaagcacacatacgaaatacacagcataaatgcatcacaaatatgaatgaggatacgacaacggaataaaacgaatgacaaactaagttttagccagaaagtctcccaatataaaactatatcgggcctaaataaagtcaatgaaacccacttagcgggggaacaaaacgccttatcatatcaaaataattggtcacttacaaagaattaaatccaaaacctcat

SEQ ID NO: 56286 - DNA, 453 bp, Glycine max
  unsure (1)..(453): unsure at all n locations
gaaattagactctaagcttggcaaggacattgaaccctgtctnaaaggatcnttctttctccaagnnaaatacacacatacacgaaattatagaattatggttgatatgcaagatgattttcacccatcttgtgctgattattatcttgcttatatcatttcttattgtgaactgtacttggttaattagctgtttatgtccctgaaaatattctcaaatgcgacgacagatgaaggagtcattgtcaacacatgagttttgtttattgtgggattacggacacaaaacatcatttgtttggtcggtcccttgcgtntaatactacaatattaaatataacacaagtcattgcttgtagtgtgcgcgttcacaacattatgatgatgattcttctattcacgtgtgtgtcattagtgtccaatatttattatgtatactttaacccatagtac

SEQ ID NO: 56287 - DNA, 255 bp, Glycine max
ttctttttttacgtatcgaacggaattcgaagattcttcatctgcacaaatacaggttcaagacgattatatttcttttctatgaggggggtcgaaccttattccttcaatttcgctacttcccctttaaatcaattctaactggccttaattacattatttcataatttcaacagaaactaaaatgcttaaggatgattaaaatcaagaaacacagtgacaacaaaattccttccattatccacttctacgact

SEQ ID NO: 56288 - DNA, 409 bp, Glycine max
tgcttctacgaacggagaagagagacacagtttgatttcttgcgattagaccttgttgaattctctctggcgcagggaagagagaatgaataagatgaataacacaagttttttatcacagaactcttcttggaagagaaagtgttgaacaaacacttttataaagatgaagagaaatgaatcagaaattctgtagaaagaagtgaaagagatcgaaagagataattgattgaaactcatgtcatggtcacatatttataatctcttgatgactcagagtcaaagcttgtaactcttggcaatatacttaataactaatcacttataaagctatgactttggaaaaaatcttcagaaacaagtcacttgaagaattgtgacttctggaaatgtattcttcgaaaatagt

SEQ ID NO: 56289 - DNA, 266 bp, Glycine max
ggtagggaagctttctttatcattaagcagcgatgaaggagaaacaaatgcaagagatgcccccaacacaacaatagagggggcatgccgcaccatatagaggaatgaataaacaaagaatgacagataggttagaagcggttatggagaacatgcgcctaggggccataatactcactattaattacatagaaaaactcataatagttatatcgatttgtgggaaatattggatcaacaaaagaagctttttcgtgggtagagaa

SEQ ID NO: 56290 - DNA, 174 bp, Glycine max
gcacactcgagaagaagtggatgaaactttcgctatgctcatatggatagggtgaacccttcatgctgatgatgactttggacagaatccatatgggggtttaatacttaacaggccaactattatcgagagactcacgcctgaacaggggtcttctgaatatgatgcgttggc

SEQ ID NO: 56291 - DNA, 166 bp, Glycine max
ggagacgaatgagacagggtctgtagatgtttgagatgagtacagttcaagattgttaatgtggtttatgaaagaataagaagattcaaaataagaaagttgatttctgattcagagaaaaactagagacttctagggaatatgaaaaattttcaaaaactaactt

SEQ ID NO: 56292 - DNA, 335 bp, Glycine max
  unsure (1)..(335): unsure at all n locations
atggtttttggattctcgaaagtttttgtatttaacactttggttgacaacttttgtttctttatgtngtaagtgaatcattagaatccgctgcatctgtgatatacaactacatcacaaggttgcactgaatgacttggttttggtgtgctaaacgtgaagttaccatatttctttgatatcattttctttccacgttggatgggtttgatatcccttttttcagtttggactggtatgtaagcatnggtttgttatttctttgggtagaatgcttctacgttgatgcaaagctcattggagctcgtaggcctacgatcttcttcatcaatggg

SEQ ID NO: 56293 - DNA, 307 bp, Glycine max
  unsure (1)..(307): unsure at all n locations
atttaccacagaattcagacttaaccttccaactctcaaagcctcactctttttccactcataacatcacattctcactttctaaccctaggttaactctaccattcatctctaacagttntccataagcaatttcagcatataaacatcacaaacatcatcacatagaccctaaaacagaatgggtatgtctaactcatccaaacatggcaatttcaacaagctttcaacaaaagtcttcacaaataatcatcacacagcagaaacctagcaagactacccatcatatcttcccaaaccccatacc

SEQ ID NO: 56294 - DNA, 222 bp, Glycine max
  unsure (1)..(222): unsure at all n locations
gtatgccaagtcaatttcttgaggtatctcggagaggatcttttccgggcatatatgcgcanaatctcttgaactatgaagatgttgtccatcatctttctgttcttaatgaaaccagtttgagtttctccaataatagtctcaagcactagggctatgcgattgaccaaatatttagacaccatcttgataacaaattacagcaagatatgggtctaaaat

SEQ ID NO: 56295 - DNA, 254 bp, Glycine max
agcttttttttagactgtatattgatttctttagtatgcacaccatgtgttcatttccttcaactgagaaccccattggttggtccatacaaacattctcctctaaatctccattcagaaaggcggttttcacatctatttgatgtagctccaagtcataatgggctactattgtcatgataatcctgaaagaatcctttcgtgagaccagtaaaatgtctctttataatcaatgtcatctttctgagtaaatt

SEQ ID NO: 56296 - DNA, 343 bp, Glycine max
taaaaaataatataaaatctttacttttcattaaaaaaaataaaaaatattttttaagaatatttttttaaaattataaaaggtatagatatatagttcttaaagataatttatgacttatattctaacatttaattaatttatcacacacctaataagagttgcagggttaccaggatcgaggtctgagcagatgaaaaaatgttacaaaatgttcgtattcacaatttctcatgcttatctaaaggtattatagatcgtgtgagttactaatcataaatatttgaaatcaaaagatattattcaaatagtgtatgtatttatacgaatcattgcttttttt

SEQ ID NO: 56297 - DNA, 255 bp, Glycine max
agcttgcttctacattctctccctctccctccactcatcttctcttatcttcgagctcttatatctatttatctttctcaaacactcatctctctgacttttccaacatttcctttcaatagacttacaaaattatcataacatgtatgaaaaccaaattaatttggaggtggatcattgcattcttgacattagcaatctactcaaatatagcttttgtcctgtatctgtctaatgagtttataaaaaatctta

SEQ ID NO: 56298 - DNA, 334 bp, Glycine max
  unsure (1)..(334): unsure at all n locations
ngcctcanagaggtccaggaaggacaaggcggccgaaggatctatttccttcccggagtacgacagtcaccgctttatgagcattgtgcaccagcagcgctttcaagccatcaagggatggtcgtttcttccggagcgacgcgtncagctcanggacgacgagtatactgatttccaggaggaaatanggcgccggcggtgggcaccactggttacttccatggccaagttcgatccagaaatagtccttgagttttatgccaatgcttggccaacagaggagggcgtgcgtgacatgagatcctgngttaggggtcagtggatcccgttcgat

SEQ ID NO: 56299 - DNA, 256 bp, Glycine max
agctttttgttgatgtgattctggcctaaattgcagtgagattagtttttctttcagctcaggagaggatgtcacaccttcagagaagctccacaagtgtgtcaaccgtactgctgttgattgcattgcagtgctggatgtttagtcccaaaagggtgtgacccaattctctcaacgcaggcaagctcctgtctgagaccaaagtgcaacctgacaaagaaagaacttgcagattaatctgtttagcatgtgccag

SEQ ID NO: 56300 - DNA, 252 bp, Glycine max
agcgttttattttgggatgaggaacaagccgtaggggcatagctggcaggacccggagtaaataaatagaagtttaagtacatatgcatcgagggatgaaaagagtatgatgaactaagggacgttagtattgccaccgatgaagccttggaacgagaaagcaagaaggcccgaatggaagagcacgaccaaagcaatgttctgaggggctttatgaggcagcagtagtgagcataagctgcgatgagggga

SEQ ID NO: 56301 - DNA, 259 bp, Glycine max
  unsure (1)..(259): unsure at all n locations
ttgtctttcaagcttttagggntcaccccaaattccgttgtcatatgctaaacttgatcccatatctacttgataattcaatggtagccataaccctagccaaggttcatcaacctccatttctccgagaatacgactcgaacgcaatgtgtgcttgtcacggagaagccccggggcgttccattgagcattgtagggctctgaagtgtagggtgcgaggtctaattgatgctggctgaaatttgaggagaatcgcgtg

SEQ ID NO: 56302 - DNA, 463 bp, Glycine max
  unsure (1)..(463): unsure at all n locations
cgtagctgaagttctgggaggtgctattattggtaggctttatcaaaagacacattcccctgccttcattactggaagtcaangtactcatctctctcttattntgatgaaacattgtaatctttatttttatgtgtttacaacgtacattacagtttcatgataagtattttatgttacgacctctactagttagctaacaagcgtaatgtactataattttttgtaattcactttttttgttgggtccattgtgttttattctaaatacctattcttatttataacatatatggtagtagttgtaacataaaaagttgtattgaatcttagattatgcttcttccnccaccaattattctctttagttagaaaaaaaagtataggtgttcttctcaatctatattataatttcgcggggacatactgtnntttatacaaaatatctatgtatatatcatag

SEQ ID NO: 56303 - DNA, 252 bp, Glycine max
ttgctttaaaatatcatctgattgattcgatggagctcttgttttttcaaaaaaaaaattgagacacaattcagctttcttcttgtttttccccctatgttttacattacaattacacaaaactatcttgcatcactagaatcgtataaaaggcaactagaatgtgctggtagctacaaatatgaataatttgaaagattgtttattcacttttattcacttagtgatgacaatgatctctcgctcttgttt

SEQ ID NO: 56304 - DNA, 426 bp, Glycine max
  unsure (1)..(426): unsure at all n locations
tataaaactcagcttatcatccannattgggttggtttgcttcatgtttcatattataagtgattccaatccttcaaacctcctagcccaattattccactcatttgcatgctccttaagagcaaaaatntcttcttttctttntaaatgtgatggtgtgacaattcttccaaagcaacccactctaccaaatttttcttttccaagcaacaatttaaatgcttgttcagcagaagtagttgaatcttgaagccttttctaattaataaaaaaagatcaatgtcagatataatcaacactaagcatatactttatgagtaaagatgaacttgcaatagcaacttgtgtttcttcatccacttcttttcctttcggtcgggctttgcgagtcgcaataaacattattgctcaagtgacttcctctcc

SEQ ID NO: 56305 - DNA, 398 bp, Glycine max
tctcagcatccttcgaacccagctggaaagggttttaagtattaacttagtatgtgcaaatcaatttacagatactacaatacatccgcatgataaaaatgatgcaagtggacatacttcagcaagtgttgtgggttcaagcccactcaatggcctacgctctgaagatgatggtgatctgtgcatgaaatattggctaatcctgattggaaaatatcatgattgccatgagaccactaaactatacaaaactggagcaaaattatttgaagaggagtaatacgtttataacaagtcattcaaaagaatattgtgaaactatgactaacctaatatatgctgcacttctattgctgatgatgaatggatcacctgatttgatgttattggctcttgag

SEQ ID NO: 56306 - DNA, 144 bp, Glycine max
aaatttaagagaaggagaaagtacatgaataacatagaagtatactaggaggacaataacatctttaaaagaatgacaaacgtgggcttagccaaacatattaataatgatcaggaagatagatgattgatcaaatcgggcagg

SEQ ID NO: 56307 - DNA, 296 bp, Glycine max
tgcatgcattctttctgtcggtctctcgcaaagaatgactcgtcatactcacggaaacagtaataaacaatgacaactatagaaagaatatgtcagagactattgagagtgcagagttcttcttgttgtgtggctctatcgacgagttacaccctggaatagataaatgtgagcaagatttgagtaccatcattaatctagattagatgcattagaatcccttcagagtattgagaacaaaaagacatgatatgtatgtaggacacctacaatcgcataagcatctcgaccaagct

SEQ ID NO: 56308 - DNA, 310 bp, Glycine max
  unsure (1)..(310): unsure at all n locations
tccctcctctatcttatgaccaagagaatttggtttctgagaaaccgaaatggtgaagtggacaagaatcaagtaaatctcgaagtttgatgtcgaaataacattcaaaactctacagccaagtgttttgttgactctgaataatattgaaattcccagaacacaaccatggcatgtgatatagataaatacaatgtaaagaaaacaacagctgcatggtgactggtgagaatattatgttccttatatggacatccgtacacaacaangacaaccactgttgaggagagtncacactctgcacgcgtta

SEQ ID NO: 56309 - DNA, 356 bp, Glycine max
  unsure (1)..(356): unsure at all n locations
tgagatgangaagngtanatttgtgaaacttcttgctcttattcgttgaccacagagtggtacctggagatatgtcgcggnggtcaagagaccttggggacgtcaggtggggtgctattgcccaaaaccaagcttgaccaatcccgaaccaacccgggcatagtcagtcagtgagaacctgtgatgtacttaaacaggcgagctcctggcagtcaacagataaaaggaacaaagaccacaaagcaaggaggcttgtgtggtggctggccagctatgaactttgattgatatatgggttatggcctctggtaatcaattatcaagggtgggcaatcgattacaaggcttaaaaatga

SEQ ID NO: 56310 - DNA, 301 bp, Glycine max
  unsure (1)..(301): unsure at all n locations
ttttggagctttggaattggtttgggaaataagtgtgggggggttttggttcattggacaaacttgtttggtggctatgcttcatgatgtattntgggccatacttgatgtacattgtgtattggttaaatggtggacatgctgaatgaaatgggtgttctcaaggctaaagagtaaaaaaaaaaaaaaatcgaaaaaaaatcgaaaaagaaaagaaagcataagtgagtaatagatctaatggccagatgagaaccttgtcactcttagtaaatttacttactctttatttctatttttc

SEQ ID NO: 56311 - DNA, 226 bp, Glycine max
ctcacacaactctcttaaagaagctacctatgctataactacaagcatttgtaacacctgttgcaactacaatgaatgacagtcttatgacacatctctccaagttcagcttatctccttctactccctcaattccaagcttcccgctattactatctctctacctctctcatcctacattgaagcatcctctccaagcttctgatgcatagcacattcttggcgg

SEQ ID NO: 56312 - DNA, 451 bp, Glycine max
  unsure (1)..(451): unsure at all n locations
gcttgtaatcgattacacacatactgtaatcgattaccagaggagtttntcagaatatattctcaacagtcacatcttttacttggttcttgaatggtcatcaaaggcttatatatatgtgacttgagacacaaatttgccaagagtttttgaagaacaaaaaggtcttatcctcttaacaagaaaaattgttntatcctcttacaaattcctttggcccaaacacttgtgattcaataaggaattatttgagtgctcanattgttcaatctatctctctcaagagagatttcttcttctcttcttctttattctgaaaagggattaagagaccgatggtctcttggtgtgataggattctaaacacaaaggaaggatcttccttgtgtgtttagaacttgtaaaagggaattacaagatagtggaactctcaagcgggttgcttgggact

SEQ ID NO: 56313 - DNA, 485 bp, Glycine max
  unsure (1)..(485): unsure at all n locations
gaccatgtatttacagggattattgctntgagttcagcaagttatcataaaattgattactatgatgataacttatacgagtttcttgaggggatgtttccgtgatcctggctaattttattgtggtaacaaaaggattcatcaaaagagttaataaaaactcctattgagttcttgtattagagatactctaatattaaaactancctaaaataaccatgtagtatttaacttaaacttatcatattttgtatattaaattctcaaattaagtaatgccacatgaatatctttttacatttacaagaacaagttgatatgagatctaattagaacaagttgcagaatttatagaacacatttacaaacatacatatttgatatgagatcttaatgacaagaataaaagctactaattaaagtaagaatttgcacatgaagatattcctcatgaatctaacgatacatcttttctagtcgcttct

SEQ ID NO: 56314 - DNA, 284 bp, Glycine max
  unsure (1)..(284): unsure at all n locations
ttaagatgatccatntaaaattctaacatcaaaaccctgcataactatcttgtttttcaaagaactacgtatgtctgagctcctcatcgcaatngaggatacgtangagcaagagtcccgctcttgtcgacccgctgatgataaattatacatctaagagggacaataaacattatttatagtcatgagtttgcacatttgattaaaggctgtcgtcccttgtaacagacgcatagggtgctaataccttccctgtgcgtaaacaactcctgaaccttttattt

SEQ ID NO: 56315 - DNA, 428 bp, Glycine max
  unsure (1)..(428): unsure at all n locations
tctcaatactatgaaattgttcaccttcatgtcttttgtgagaatatcttcatttgcatttcagtactgcagtacttcaagtcaagctgtgttttgctcactctnttcacgaagaaagtgaaatcttgtctctatgtttttttaccttccgngtgctactggattcatgttcagctgataatgaatctgttgtccacatacaatttgattgccctctgaatctccatctttaattcttcaagtaaagagtgtagccacattgcttggtatgcagcatagcatgttgcaatgtactcagcctcgcaggaagataatgccactacaagttgtttcttcgatcaccagcttattggtgcacctacgaacttgaagagatatccagtagtgcttttcctttccaccttgtctccacaccagtctgagtatga

SEQ ID NO: 56316 - DNA, 174 bp, Glycine max
  unsure (1)..(174): unsure at all n locations
gagacaacagctgttgctgttctattgtggagaaacatgacacgtgctcctctttggtggcactatcataagaactattgtgatggtcggtgaaagtgttggtggtggtgttggtgtanggagaanactctataatatgtggaacgaaaactgaagagggtgaacctgcctcat

SEQ ID NO: 56317 - DNA, 444 bp, Glycine max
  unsure (1)..(444): unsure at all n locations
ctgcggcatgcaagcttaagaaaaagatggcctcagcaaattccttatttccagaagggaattctatcaatagacctccaatctttaatggagagggttaccactactggaaaacccgaatgcaaattnttatcgaggcaatagatctaaatatctgggaagccatagaaatagggccttatatacccaccacagtagaaagagtttcaatagatggtagttcatcaagtgaaagcataaccatagaaaaacctagagatagatggtctgaagaggatagaaaacgagtacaatacaacctanaagccaaaaacataataacatctgccctaggaatggatgaatatttcagggtttcaaattgtaagagtgctaaggaaatgtgggacactcttcgattaacacatgaaggaactacagatgttaaaagatctaggataaatg

SEQ ID NO: 56318 - DNA, 438 bp, Glycine max
  unsure (1)..(438): unsure at all n locations
aggtctcanattcgagtcctaactcttaagtatataatgcattaaataattaaaagaaaaattntatcattcataataatcctactcaactaaaaaaaatactcataatcttaacaaaatgtaatgtagcaagtcataccattgaaattaaagtccaaacaatataccatgtctccttgaaattaaatagactgagccaattgcagtattgtacattntctattctatagattttntatctttgtttctcaatgataaacaatgataaaaatatagacttttcacctttatcgttatcacacgtatattgttgaagaactcaagggactgttgcgcttaaaattcaaaacacaaatacaattctaatatcacacaaattcatttttaatcaatttaacaaatccccaaggaaataatagtcaaacatagcgacaaatc

SEQ ID NO: 56319 - DNA, 238 bp, Glycine max
tactaaaaccgtaattaaaatttcactactaagacctacaagtagtaccaaatgcagcgaatgcaagaccattctaatggcccctttcaccatgcataaactgaaccaacaatgaagataagcacgaatatgaaaactatactaaatacaaatactgttaattcacttagataaagaagaatggttaagatggtatgctccctcattctgttgagttaaagcatactaacataacaag

SEQ ID NO: 56320 - DNA, 353 bp, Glycine max
  unsure (1)..(353): unsure at all n locations
ttctcaaggaagtttctcaaggaagcttctcaagcaactttcttaaagaagctacctangctataaataaaagcanttgtaacacttgttgtaactctaatgaatgagagtcttatgagacataactcanagttcaacttctctccttttactccttcaatttcgagcttccccctatttctttctctctttctttcttttcctccattgaagcatcctctccaagcttcttatccaaagcacattcttggtggcgaagctncttcttccatggcttattccctagtggatggcacctcctctcacttcttctcctttgtcttccgctgcatcttcatggtggaaaatcacca

SEQ ID NO: 56321 - DNA, 269 bp, Glycine max
  unsure (1)..(269): unsure at all n locations
agctnttatccatggcctactatggtggtgagcttcttctagactcatcttcntcttgaagagggcgctcctctctctcttnctttctccattccgctgccattcatcttccaagaagcaaaggaatccattgatgaagaagatcctatgcctacaagctccaatggagcttgcatcacattattaccatagcattaggaggcttcatttagatttgcttggcagctgggcattcgtaatcctcatgcaccaccttgaggtgggggggg

SEQ ID NO: 56322 - DNA, 457 bp, Glycine max
  unsure (1)..(457): unsure at all n locations
agctntntctgaaattcttcactggtaatcgatttcaagtttctggtaatcgattacacaattatattttgaagggtcatgactnttcaaagtgttntctgaagtgtncgtgctggtaatcgattacaaacatctggtaatcgatttcatgattcanaaccctntataaaagttgtttttcaaatttgtcttctagtaatcaattacactgccttgtaatcgattaccagagccttgatctcttggaaacacttgttttgaggcaaaagcttgatcttgaattaatcttgaagcaaccatgtattaatcttgaagcaatgcttaacctttgaatgtttgttgaagtaatcttgacagcaaccttgtttgattatttttcggcatcaccaaaaccatgtattcatacattcacagctaagagaaaggcttagaagtcaagattacctcagagtagcta

SEQ ID NO: 56323 - DNA, 291 bp, Glycine max
  unsure (1)..(291): unsure at all n locations
atcatgaagccaccggntatgctgntagccgattatctgttgtttctgcaacattccgtaacaaatcctaagaaaagcgaatagatcataaatcacctacaaattcaaattccactacgtttgtttgatcaatcattatagatctaggtattcctaaaactcttcttgataatctaacgtaatgtatttctggtggttattggtattttatagatgatgcaatcctcccaaggaggggacccatcactagagccatggctaggagactccacgaagattgggtcanggatg

SEQ ID NO: 56324 - DNA, 483 bp, Glycine max
  unsure (1)..(483): unsure at all n locations
agctngagatgaggaagtgttgaagggtgaaactttctgctnttattgttgaccacagagtggtacctggagatatgtncgcggggtcaggagaccttgnggacgtcaggtggggtgctattgcccaaaaccaagcttgaccaatcccgacccaacccgggcatagtcggtcagtgagaacctgtgatgtacctaagcaggcgagctcctggcagtcaacagataaaaggaaaacaagaccacaaagcaaggaggcttgtggtggctggccagctgtgaaacttgattgatatgtgagatatggtctctggtaatcgattaccaagggtgggtaatcgattacaaggcttaaaaatgaagacagggggctaagatggtctctggtaatcgattaccaggggatgtaatcgattaccaggcttgaaaacgaggtcaggaagctaacgaagcctctggtaatcgataccaagtggtgtaatcgat

SEQ ID NO: 56325 - DNA, 392 bp, Glycine max
  unsure (1)..(392): unsure at all n locations
atatgtaagttatatgtttggttttccctcttattgccttattaccatcctttttgcattatctcatattggtttttttttggttcttcattctgtatcagatttgacagtgactggaaaaagattgaagcatttgttgtatcaaagacagacatccaggtaatttcaaatgcaagttgtaactggttatttaccttagcttgtgtttctgggctggtatccataaatgttgtggattgaattaggcatgttatagtttttgaagtgtgtttgattatgttacactaaggattttggcactttccaaataaagaattggttattggacatgaaatgccaaanaaaaaagaagatttgaggacatgaaccagttccatttgtcaaatctccta

SEQ ID NO: 56326 - DNA, 434 bp, Glycine max
  unsure (1)..(434): unsure at all n locations
agctntntgtcttttcggatccgatttataatattatataaccacttatcaacatgatgattattaaaactctttgtaataaaaagagagaaactttggatgattgaactctttagataaagtaatactttatccataaagttataaaaatggggctttccttatcctattattgctacggaaagtgtctttatcctcaaatagtaactttggtgatgaatgtccaaatatatcttcatctctaggataaaacactagcacanactacttctttagttggtagaaagaagagaatgcgaccagtaatgacatcaagtagatcattgattttgtctggaccttcacaattgcagtttttgcttttttcaatttcatctccccaaatgagtctatgaatgcttgaagttcaacanaagggtaacaaataaaacaca

SEQ ID NO: 56327 - DNA, 467 bp, Glycine max
  unsure (1)..(467): unsure at all n locations
gtaaagtatgatantgcttgctcttgcaccatagctagntggtattggtatgttntgatacacatcanaactccacggagaagagtttaatatatacctagatccatggagttcgatcaaacaaacacagttgttttccttcacaactttgcatgaaaggttttttatgcgagaccaacaccgtttttaaagatttctttggtatttcaatccgatcagattatggaagtttaatataacttaagttcccatttctcttcatttcattgatattttgactttaccaaatagatcctttgagtgttaaatatatcattgtgattcattttagaacagttctttgatatatcattgctattgcattgccatgaccttacttttttctattgaattaattgttttacaaataaaacaaagcagggcaacaacataattaaacatatgtctcatgtctaaacatgcctaat

SEQ ID NO: 56328 - DNA, 118 bp, Glycine max
  unsure (1)..(118): unsure at all n locations
agctttgantgagagatatgtgcctcctctatttcacattcttagaggagaatacaacagaattatgaacatttatattctgtgccgagccactaccaaagcatccataatagttttg

SEQ ID NO: 56329 - DNA, 269 bp, Glycine max
  unsure (1)..(269): unsure at all n locations
atataattattcaattaaatactgatttgagagagaatcaccaggatatttcatttatttgtttgatagaacataaaatagacgttgttttataaagtaaataaataaataaatatggagcanataatacgctgaataccctangtataaatagttatgttaagtcaggtgcctctttntggcctcattgtcgttnttccccttctcctcttanaaccctttcttttttccgcagcccaccanacctgtctcagaanaacgacgatctc

SEQ ID NO: 56330 - DNA, 387 bp, Glycine max
  unsure (1)..(387): unsure at all n locations
atcctcagagtcacctgttgctgcagctaggattcttttatttggaatctctccttactaagaaggagccaaacccacatcccctcattaagaattatctcctttcttcctctattgcccttagttgaatacacctctgattggttctctatttgggtcttaaccatttcatgcaactnctttacaaactctgacctacattccccttctttatgtataaaagaagtgtcaagtgggaggggaatgacgtctacggtgttaatggattgacccctcacaacctcaaaggggattgcttggtgttctatgaaccccctattgttgcaaattctaatgagaagatactatcccagactatggtgctttaaagaccctaaagagggataa

SEQ ID NO: 56331 - DNA, 341 bp, Glycine max
  unsure (1)..(341): unsure at all n locations
cacctcaacagcatgagccaaaactaggaaatgatcactcatctgaagccaccatctctggagctgttgcttgtaaaanaagaagattagaggcaagatccaatgaggctgctcatcatggaccaatgccagcatcagctgatgcaccatttccaggagtggatccatcttcagctcagcacgcaacagactcttccattcctggtttagagatacatgagggccagaccataccagttctacctttggacacttctcctccaactactccagtatggcatctaatagatgagaagaatgttagatacaggacaatcaggaccagtcacaggaatttaatt

SEQ ID NO: 56332 - DNA, 476 bp, Glycine max
  unsure (1)..(476): unsure at all n locations
tgcaacgctttaaggaagntttctcaagaaagcttcttatggaagctacctagtctatatttagaagcatgtgtaacacttgttgtaaccttgatgaatgagagtcttgtgagacatacttcaaagttccacttctctccctcttttattccttcaatttagtgctcccccctctctctttctctccctctgtcttttcctgcatggaagcattcatcccaagcttcntatccaaggctcatcttggtggtgaagctctntcttccatggcttattccctagtggatggcgcctcctctcacctcttctcctttgtcttccgctgcatctccatggtggaaaatcaccattaaaggacctcattgaagctcaaagatctagcctgcatagaagcctcacaagcaagcttccatcattttatatctcaatctcaactggctctcatatagaatgatntgaacccacccctataatat

SEQ ID NO: 56333 - DNA, 301 bp, Glycine max
  unsure (1)..(301): unsure at all n locations
gcttcattctcgtggcgatagaatatntcaccatatgggtcanagtgacttcttataccaatgtcacgaggagtgtggtggtcagattcataaagaaggaactgatttgtcgatacggactccctatgaagatcattactgacaatggcaccaatctgaacaacaaaatgatgcaagaaatgtgcggggatatcaagatccagcatcataactccattcactatcgaccaaagatgaatggngctgtggaggatgcanataanaatattaataagattattcagaagatgacggtgtgata

SEQ ID NO: 56334 - DNA, 457 bp, Glycine max
  unsure (1)..(457): unsure at all n locations
cttctggtcctcctcatagttgttgcatgagaaaacatgctctattntcatctcccactccaagtaggcctctggatcattctttcctttaaatggaagaatggtgagtttaataccatcaattcggttttgtctaggaacaccatcattccctcttcntcctctttcttcttcattatgatctctattctncatttgatccaacctctcatggagcgcatcatctcgttggttcattaacctctccaaatggtgcatcaaagcttggcattggaattgcgaaagccccactccatcattaggattagtacctgacatctcaaacaaacaaatcaaacgtaacaagacaattataagtgctggttgaatacctcacccactcaagtgtatcacacaattatggcttttctctaatgaaacactcttgccttttaccactctaattccccttgagttc

SEQ ID NO: 56335 - DNA, 527 bp, Glycine max
  unsure (1)..(527): unsure at all n locations
ggatccttaagcaccgcggctgcagctaacatagggtctcatgcaaattctttttattaccaacatgcttcttgatcaatcttattaaaaccttgttaatggcttcaactnggccattggcttgtgcatagtaaggagtagaagtgaataacttaacattccttgattcagcatatcaaaccatctttcggccagtaaacatagttccattatctattgtgatagtctcaggaattccaaacctatgtatgatgtgctcgttggtgaaatcaataatttcactttgttccacgttttttagaggaatcactttcacccacttggtaaaatagtctattgcaattagtatatatttgtgtcctttcgaagaaggagggtgaatttggccaatcaaatccattgcccatcctaaaaaaggccaagactntaaaattgaatgcaattcactagctganacttgttgatangaaccatgttttngcattcatcttaagaatttgcataatcaatacaatctttaaaatggg

SEQ ID NO: 56336 - DNA, 446 bp, Glycine max
  unsure (1)..(446): unsure at all n locations
tggaggaaaganagagagagagaatgatagaggagggagcatgatattgaaggaggaanagaggaaaagaagttgaactttgagttgtgtctcacaagactctcattcatcanagttacaaaaagtgttacacatgcttctatttatagactaggtagcttccttgagaagctntcttagaanacttcctcgagaagcttctttgagaaaacttccttgagaagctagagcttagctacacacacccctctaataactaagctcacctccttgagaagcttccttgagaagattcctagagaagctagagcgtagctacacacacctctctaataactaagctcacctctttaagatgagaagctagagcttagctacacataacccttataatagctaaactcacccncatgccaaaatacatgaaaatacaaaaaagtccctac

SEQ ID NO: 56337 - DNA, 503 bp, Glycine max
  unsure (1)..(503): unsure at all n locations
agcttcangctattcaattgcttcanatngttgctcagaagggcaaaggtctatgtgttggtcggcagaggagcataaaccacagagtctggcgactggtgcagatttcttattcatggccagttgggttactaggttaaccaaggcatctagtttaccttcaagcttcttagtctcagctgatgaagatgaattcgtggctacttcatgcactcctctaatgacaatagcatcatttttggcactaaattgctgggagttggaagccatcttctcaattaaatttctggcttcaacaggggtcatgtctccaagggctccaccactggcagcatctatcatacttctctccatgttactgagtccttcataaaaatattggagaagaagatgctaataaatctagtggtgagggcaactggcatatangtttttaaatctctcccagtattcatataggctctctccactgagttgcctaatgcctgaatatcctttctgat

SEQ ID NO: 56338 - DNA, 451 bp, Glycine max
  unsure (1)..(451): unsure at all n locations
gtcatatctagtcaatgtctaagagaccatacaagtttcctaacgatttctaattatgtgggccattaagtctatcatatgctgacaatagccgagaagcccatgaatctcttcgggggcggagtaggtgtctgccatcgccttggccttagctaacaatcggggaagttcttgactcccgttcaaggtaagagcaaaccgatccatccacatggttgcctcttggtgtaaagagtcgatcaccctccctctagcctctntttccgcatatacttgagcgtactcatccgcgattctatgctcgtgggccgtggctagacctaactcttcttcgtacttggcgatgatagctaacatgttggtctctgtctcgcataaacgctgagacaagcttcttttggaccttgaacaagcaatcaactcctctttcagaaccatgctatgtgctcgc

SEQ ID NO: 56339 - DNA, 415 bp, Glycine max
cgcttggattaaactagtctatacctacaagggttgttaaagttaagcctagtccaacaagagggatctgaggatgaagcttgagttaaattagtctaacgagggatcgaagtttagtactttacgttatagcatagaacacaagaacatgattaattagagaaatatccttatatgcatcaacttgcttgtttgaaagacccaccgctttctaccctatgctgtcaacttttacttactcgcatttactattttcaccatagaattagattatttctgtctttaatcatcaaatatcaatgtgtgttccatcaattatcaaggattccaaaatatggagtgcttgagtacattaatttgtttcccagtggaagtatgacaaacatatgacaaagtccttctttaatttggactt

SEQ ID NO: 56340 - DNA, 301 bp, Glycine max
  unsure (1)..(301): unsure at all n locations
aattcaaacagccataacttttgacacgagtgtatgtatgaagcccatgatatatcgagacgctaaaaaatgaacaacgaaagctcttgagaaattcaaatggtcataactcttcacttggatgtccaattcaggcgcacaatatatcgggactctcgaaatgaaaatggaagctcttggcacattcaaacggccataacttttaacttaggtgtatgtgtgaggcctangatatattgagacgctgaanaatgaacaatggaagctctcgagaaattcaaatggtcataacttttcacat

SEQ ID NO: 56341 - DNA, 284 bp, Glycine max
  unsure (1)..(284): unsure at all n locations
agcttcggattatagtgatgaggtacaagccctatatgcagagctngaaagagcccgggtagtcgaagagaagttcaagttcatagccatcatagtatgaaaagagtatgatgaactaagggacgtcaatatggccacagctgaagccttggaatgagaaaccaagaaggcctgaaaggaagaacacgaccaanacaaagttttgatgggctntatanggcagcaatagtgaactcaagctccgaagaggtgaaaggaatcatcacgggtcaaaggcatgatct

SEQ ID NO: 56342 - DNA, 332 bp, Glycine max
  unsure (1)..(332): unsure at all n locations
attaacttctgaccatcccaaagataagcataacatcatcaacaccgtcaagcatggtaagccggctaaacaactgtaaatttcttagcttttacttttagctaattgcttctctccacaccaaatggttgttgtaactgcaattatcatgcctgtggtacaatntattgccgcattcctcaatgacaaggtgatattcaacttctcttttcctcatattattttttccctgattctttttacttgatacataacacttaccattaccacattntctaggaaggactatataaaaataccagcattctatcatgaacagtgggcaccgcact

SEQ ID NO: 56343 - DNA, 349 bp, Glycine max
  unsure (1)..(349): unsure at all n locations
agctnggatttctctttagtagggaatctatccttcctaagatggagccttacccaatcaccctcattaagaactagctctnttcttcctctattgcctttagttgaatacacctgtgtttggttctctatttggatcttaaccctctcatgcaacttctttataaactctgacctagattccccttctttatgtataaaagacgtgtccagtgggagaggaataaagtctaacggtgttaggggattgaacccatagacaacctcanaaggggactacttggtggttctatgaaccctcctgttgtatgcaaattctacatgagaaagatactcatcccaagacttat

SEQ ID NO: 56344 - DNA, 369 bp, Glycine max
  unsure (1)..(369): unsure at all n locations
cgtagaatggctagacatgatacatgtcannnggttggntcggttcaaggataatatggatgccccacattatttccatgacacagatgcaaaaatgatgatttggaaactctatgcaaaactggtcatgcatgcacctatgtggacactcaagtgtcaaatatttatggtcatgtgatgctatggctcacgattcattatctctattatagtcaacccaacgtttccaaaatatgttctgttatcaatttgtgcattcatccgagtccattttgggcgtctgggaaaatcttcacagcattcacccttcaggtgtatacacattttttcaaaactagttatgatcagtgaatttttttcaaagaaaag

SEQ ID NO: 56345 - DNA, 380 bp, Glycine max
  unsure (1)..(380): unsure at all n locations
agcttgatgtatcatanggaatcactagagacattactatcactgctagactacacacatgagcccgcttagaggtaagggatgagtttatcacaattggggttagaatgaacatatgtatggatccttagaggattaaattggggtttgttatgggatgcttattgaattatatttcttcctttgcgattataattacgattattgtgtgtttgatggaccaattgatgttctgatgtgaatcagntgataaaattgagtgctcttgatgttttcgtgtatttggcctatgattgtgattccttgattttgatatgattatgtgaaattatttgaagggttctacttctcatgttgtgagaaacatatttgtataaatt

SEQ ID NO: 56346 - DNA, 349 bp, Glycine max
  unsure (1)..(349): unsure at all n locations
actagacttactggtttaccatagaagtataatattgctggcctaaccatccattatcaatgttattccaacaatgccttatttctgaataaaactctatctaataagcaggtgcctgcagctgatactcagatcattccgtgtgaatttttaatacttgacgacccgacgaatcggatctttctttgaaatatttgtgttaaggaaaataggaccaaaaagtaactgctggggaaattcaacacagtatacatggcgccgctgccggcgaaattaatgccttatatttctctctttgattcatcgattctntttgctcatatattagttattgcacattgtattattc

SEQ ID NO: 56347 - DNA, 386 bp, Glycine max
  unsure (1)..(386): unsure at all n locations
ggatccttaagcacctgangctgcagctaagcttanagggccgagagagactagtttataatcgaaggcatgatattggaagacaagttgaaggcttgtcanaggtcaaagagaagtttgtccgaccaattgagcaagacggaagaaaccatgtgggccatcattgaccaatacaaggagaagctaagtcttgcagcaacccatgcataaaggctagaggatgagtatgcaaaggtgtcngtcatgtaagcagaaagagaagtgagagaaagagtaatcgattcattacacagagaagcaatgatgtggatgggtaggttcactttcaccttgaatgggagtcaagagctttcgagactgctagctgtcgcaatgtgcccttttgc

SEQ ID NO: 56348 - DNA, 532 bp, Glycine max
  unsure (1)..(532): unsure at all n locations
atganncccctnnaannncccctttgatacccagtcattacccatgctataacgtgacactgtctactactctagactatgcgcttctgtactgacgctcgtgctgtgatcggaactgttgaccgagtgagatcgcgtgtgaggtctttgcgttgagtggacactattatctggacggacaccggattggaagggttattgacatgggccgaatatcttgggtggtgcggagaatattgcgtactgttgcgatgtggggcgccgggatataggccatgtgcgatctgaggtcttatcgtgggtatatacttacttcttattaggaacacttgctctgaatctcctattgctgctgctgccaagagtgttattatttaactttcccttctcaagacacctcgatactctcgccttatattccttgttgtgaaatagagggcatgtacccagcttttctcttagatacactgctgcgtgacacgatctaattatatatcttttcttgaagggggcgcctcggcagcatgttctt

SEQ ID NO: 56349 - DNA, 423 bp, Glycine max
  unsure (1)..(423): unsure at all n locations
agcttatagttattggagggagaataaaacaatccaaaatcaattgtacctttcaagtaacgaagaattctttttgcagctnttagatgaggagaggtaggagcctccgtaaagcgacacacaactcccaccgcatatagaatatcgggccttgtattggttagataccttanactccccacaagactcttgaagatcgtggagtctaccttctctccttcatcaaaatttgataacttcaagccaccttccataggtgtgttcacgggattgcaatcaagcatattaaatttcttcaacacttcttttgtgtagctntcttgtgagacanagataccattcttcgtttcttcacttccattcccaagtaatatgacatgagtctccgatctgtcatatcaaattcacgagacatgggactcc

SEQ ID NO: 56350 - DNA, 418 bp, Glycine max
  unsure (1)..(418): unsure at all n locations
catcaaagtagtgattctctattcgaaaggaagagagatcccatatgcggagtgttctgacagtgacggtgtcgtcgtgcttgcggcgtgaggtagtgggagaaaacggngtcatctcgatctccaacgacttcaatgctttttcttactcttcttcattattcttcttctgttggtgctccttactaataatcgcacgagatgcacaccttgacggtggaaccaatgagaagtagattggggtttaggctcaacagagaaaggggtaacagattgggaaaagaaagaaatagaaaattttttaacatgcaaaaaatcattgtttactttnttatataaaaaagaaatcatgtgcaatcccacttaaataaagattacacgtgacaccacacgtgatatgcctgcataatctattaac

SEQ ID NO: 56351 - DNA, 350 bp, Glycine max
  unsure (1)..(350): unsure at all n locations
agcttgcangccttgtttctctctcacaatcttctctcanngagaacatcctgctagaattggaaatntgactcatctgcaggtcatagatctctcacacaactctgtgtctggaaccattccattcagcattgttgggtgctttcagctgtatgctctgatactcaacaacaacaatctgtctggtgtaattcaaccggagtttgatgccttggatatctcgaggatactggatataaccaacaacaagtcttccggggctataccactcacttttgctggatgcaaatctgtggagattgtatactataatatcaatgagccttctggatctgtgatgatgccaaacc

SEQ ID NO: 56352 - DNA, 329 bp, Glycine max
  unsure (1)..(329): unsure at all n locations
ctaagcttgccgaaaggccaatcatagctgctacatactataagcacatttgggaaatgaaatcaaaaacaagatagagatgctgtggcagagatttaagcaaaagtgagaatgatgtagtaagtagtaacaaacatctctcaaaaccataaaatgaatatatcaaaatatgatgctctatgctgactatgcatatcatgtcataaatgacattctccaacttaagaagggaaccctntaaatcatgactttagcagccaagaaatctatctaggatatgattcaaagtgactataaataaatcagtccaaaaacactagaataccttc

SEQ ID NO: 56353 - DNA, 267 bp, Glycine max
  unsure (1)..(267): unsure at all n locations
agctntntggagtagatacatgggaccaactcattttatttcannaaaaaggaagtcgtatctagtcaaggtctgagagaccatacaagtttcctaacgatttctaattatgtgggccattaagtctatcatatgctgacaatagccgagaagcccatgaatctctttcggggtggagtaagtgtctgccattgccttggccctggctaaacaagcgggaaagttcttgactcccgttcaaggaagagcaaacccgtccatccacat

SEQ ID NO: 56354 - DNA, 321 bp, Glycine max
  unsure (1)..(321): unsure at all n locations
cgtgagcncgctgcaacatccaatntcgagcgtctcgatatattacgggactcaatcagacatctgagtcaaaagatattgtcgtttgaatatgctcagagcatcaacatttaatttcgagcgtctcgatatattactggactcaatcaaacatccgagtaaaaagttattgtcgtttgaatctgcttagagggtcaactttcaatatcgaacgtcttgttattgtgcgggactaattcagacatgcgagtaagaagttattggcggttgaattggctgagagcttcaacattcaatggcgagcgcctcgatatattacgg

SEQ ID NO: 56355 - DNA, 303 bp, Glycine max
acgacaatatctttttactcggatgtcttattgagtcccgtcatatatcgagacgctcttatattgaatgtgatgctctgagcaaattcaaacgacaataactttttacttggatgtctgattgaggcctgtcatatatctagatgctcgaaactgaatgttgatcctctaaggtaattcaaactacaatatctttctactcggatgtctgattgagtcccgacatatatcgagacgctcgagattgaatgttgaagctctgagccaattcagacgacaatatctttttactcggatgtctga

SEQ ID NO: 56356 - DNA, 490 bp, Glycine max
  unsure (1)..(490): unsure at all n locations
gcttcaagtttttagttgtctgtccaatatttttttccacttttagtatttttttcctataaaataggtcaaacgtagttaggataatataactacacttacttntcttgatgttagtgatattaatatagtcagtttctttggttcattgctttattatttgtatggattttacatgaaatacatgagctatatgagtagggttcttttttctcaataaaataaagggagagaaatgtaatttttaattgagaaaagtgtaggtacgtctactattaacctaaggagatcaaggttaatgtaactatcccaacacatnttattaatgttacattggaataatttcaataaaggaatacaaattaatcttaaaatatcatcaattaaatgtattggaatttacatgattctattacattttattaatgcatgttattctgaacaatttcatacaataacgattaaagtgtattataaaaaacactagtca

SEQ ID NO: 56357 - DNA, 446 bp, Glycine max
  unsure (1)..(446): unsure at all n locations
ctaagctttagtttaatcaattntnttccttatttactcaattaaagaattattttatattgcacattatcttatntgattaatattcagatttcttcaattaaaaatatataaatttattaatataaaaatataaaaaaatgtattaaatataaaattaaattcatgggaatacattcttgatgaagtacaaaatttataaaaacacaaacttgatgcatttatatgaaaatatagtgtacatcaaacaaaattctggtctgattnttataatatgtaacattntattgtatgttaatattgttaactattatatatatatatatatatatatatatatatatatatatatatatatatattaaaatgtaataaataaatacattaaaaaattataatatataaaaaattattaattataaaattaattccaatgcgagacacga

SEQ ID NO: 56358 - DNA, 497 bp, Glycine max
  unsure (1)..(497): unsure at all n locations
gcaagcttnggagtataaaagttccaactcagacatctagaataaataatgttagtcaaatttaatggactgaagataagactcaaaatattactacttaccagatgtcattataattagcaagaacataaattgttaccagatatatatcaatataaagttattaagaaaagacatatgatgagtctaggagaaagtacatttgaacttattgacaaaagcaatatcaatatcctgaattaacaacctagcttgctctgcatagtcctgcatcaacataagttaaccaaaaaaatatggctgaaaactgcaactaccaaagggattattgacagtttggtaagagaagcaccttcaatttatgataaagaggttcattgcgtcgtgcatgagtaaatttcagcaactcatcaatgaattctaaattaactttcttgacattagagtcccgatgaacaaccataactcaatttgtgtacgcagtccttataccttct

SEQ ID NO: 56359 - DNA, 113 bp, Glycine max
ctcattgtacaacagaatttagagtttgaatttaataagttcactaactctgggttttatgaaccgggagggggtggagatatattttatgccggcctggatattaatttttt

SEQ ID NO: 56360 - DNA, 420 bp, Glycine max
  unsure (1)..(420): unsure at all n locations
agtagaaacatgggaccaactcattttatttcanaaaggaagtcgtatctagtcaaggtctgagagaccatacaagtttcctaacgatttctaattatgtgggccattaagtctatcatatgctgacaatagccgagaagcccatgaatctcttcgggggtggagtaggtgtctgccatcgccttggccttggctaacaatcggngaagntcttgactcccgttcaaggaagagcaaaccggtccatccacatggttgcctcttggtgtaaagagtcgatcacccttcctctagcctctttttccgcgtatacttgggcatattcgtccgcaatcctatgctcgtgggccgcggctagacctaactcttcttggtacttggcgatgatagctagcatggtggtctccgtctcgcataaac

SEQ ID NO: 56361 - DNA, 472 bp, Glycine max
  unsure (1)..(472): unsure at all n locations
aagattcctaaagaagctagagcttagctacacatacctctctaatagctaagctcacacccnctataatagctaagctcacccccatgacaaaaaacatgaaaatacaaaaaaaagtgcttactacaaagactactcaaaatggcccgaaatacaaggctaaaaccttatactactagaatggccaaaatacaaggccaaaacgaagggaaaacctattctaatatttacaaagataagagggctcatacttagcccatgggctcgaaatctaccctaaggctcatgagaaccctagggccttcccttggatctctagcccaatctacttggagtcttctacctaatgcccttgcgggataggattgcatcattccctccagcttggagaggatttgacctcaaatgccgaggttcttcatactctgggctacttccctcaacacctgtaaaaagaacaaaaacatatgta

SEQ ID NO: 56362 - DNA, 400 bp, Glycine max
agctagattctacaacaatcctaagggaaaattttctaaaattattacacacaaatgtgaagtatggtgagctattggaggctcccaacttacttccaatgaaaggcctttttgttacaaaatttgaaagcaatgaaagtaagtaaattgtcaattacaaaattacaaaaaggtcctcaagttttggtggttgttctctctctggtgaatcactcaatttggagtgcttcttagtccaatagctcttaaggtggttggccccttgcttcttgactcatattcttcaagggatggcaccaatcctcctttcaattccctatgtggcaactcacaaacaaggaaacaaagagacaagcattaaccaaagacaaaaaaaaaatgaaatgaaagcttaaccaat

SEQ ID NO: 56363 - DNA, 443 bp, Glycine max
  unsure (1)..(443): unsure at all n locations
cccatcacatgtggtactaggtggcggtcgggcgatggtgcacaacaagttttccatatccacaatgcgcgcataaacccaccatcccttgttgcccacctccaactgagctcacgtactcccacgtagcccatatcctcgtttctctcaacaccgggtccccatcaatcctccgaagcttcccccaacatcaaagcanaactgcattcaaaccgcacaagctatcacatccaagcaaaacagagcaaaggcagaaaactctgccaaaacaccaaccaaatcacagcttttctcacttaaagaccccagtaacaattccttcgatccaattcgttaaccggtggatcgactcgaannatttactggaaatctttcgtacttaaacctggcattttgaccgtgggatctactagcaaacatncagaactcattctacattactc

SEQ ID NO: 56364 - DNA, 177 bp, Glycine max
gatcttgagtatattcattctgcgcgatgtttagtgagttggtagaaaactctatctctcacgtttggccttcaacagaaagtgaatcgtatgtgataatgatatttgaggtggagtgttatatttttgtggtgcagtatcttcttatgcacccacgtgtgatgcttaatctacact

SEQ ID NO: 56365 - DNA, 222 bp, Glycine max
gatgtctcctctacctctagaacctcacaatcactcacagactcatctcatgctgccaggattgcttcctcttctcgcacagttctgtgccaatctgctcacagacaaagctctcaaaactctgtacaacttggacctttctgtgtctagaaatcactaaacatgcatgagcttcgagaatctcccaaactcctctctcatatctgatggcatgcttaaata

SEQ ID NO: 56366 - DNA, 409 bp, Glycine max
  unsure (1)..(409): unsure at all n locations
tataaaactcaactgaagcaactggtgcgttggtaacttggaacccagctgttcttgaatcagaaatctgtacctgtcgcaagggtttgtggttngtgctcctctgctgaccaccatacagacctttgcccttccatgcagcaacctggagcaattgagcagcctaaagcttatgcagcaaatatatacaatagacctcctcaacctcagcagcaaaatcaaccacagcagagcaattatgacctttccagcaacagatacaaccctggatggaggaatcaccctaacctcagatggtccagccctcagcaacaacaacagcagcctgctccttccttccaaaatgctgctggcccaagcagaccatacattcctncaccaatccaacaatagcaacaaccccagaaac

SEQ ID NO: 56367 - DNA, 478 bp, Glycine max
  unsure (1)..(478): unsure at all n locations
agcttcaacatcagaccacttccagggtgctggtactacttcacatggacttgatggngcctatgcaagttgaaagccttggaggaaagaggtatgcctatgttgttgtggatgatttctccagatttacctgngtcaactntatcagagaaaaatcagacacctttgaagtatccaaggagttgagtctaagacttcaaagagaaaaagactgtgtcatcaagagaatcaggagtgaccatggcagagagtttgaaaacagcaggtttactgaattctgcacatctgaaggcatcactcatgagttctctgcagccattacaccacaacagaatggcatagttgagaggaanaacaggactntgcaagaggctgctagggtcatgcttcatgccaaagaacttccctataatctctgggctgaagccatgaacacagcatgctacatccacaacagagtcacactgagaagagggac

SEQ ID NO: 56368 - DNA, 430 bp, Glycine max
  unsure (1)..(430): unsure at all n locations
tgtgatcgattacacaccatactgtttcaattaccagaggagtatttcagactatattctcaattgtcacatcttntcagttggttcttgaatggctatcacaggcctatatttatgtgacttgagacacgaatgttctaagagttnttcagaacaaataggtcttatcctcttacaaaccacaatcattttatcctcttacaaattccttggccaaaacacttgtgattcaataacgaattatttgagtgctcacattgttcaatctatctctctagagagagatttcttcttctcttcttctttattctgaanagggattaagagaccgacggtctcttgttgtgaaagaattctaaacacaaaggaaggattgtccttgtgtgtttagaaattgtanaaggaatttacaagatagtggaactttcag

SEQ ID NO: 56369 - DNA, 406 bp, Glycine max
  unsure (1)..(406): unsure at all n locations
agctntgagcctaaatcttgactcaccatanactttgacccagggtgagaatgtcaatccttaccctcagaagcaaaanaagaagagaaggaaaatttccaatcaaaggagaaaggagaaggaaaatttccaatcaaagaggaagcaaaaaaaggaaagaaggaaaatttccaatcaaaggaaaaagagaggaaaggaaattcccaatcaaagagtgggagaaagcaaaaagaaaagaaagacaattcccaatcaaagaatgggagaaagaaaaaaagagaaggagaagaaggaaagaaagctcatgatcaaggatcgaaagaaaacaaaagaaatgtgcagagaggtctttggaccacacaatatctgaacaatacggaattgtcaccaaatgaacaaaagaaag

SEQ ID NO: 56370 - DNA, 438 bp, Glycine max
  unsure (1)..(438): unsure at all n locations
ngagatgaggaagtgtngaagggtgaaacttnctgctnttatttgtgaccacagagtggtacctggagatatgtcgtgggggtcaagagaccttggggacctcaggtggggtgctattggccaaaaccaagcttgaccaatcccgacccaacccgggcataatcggtcagtgagaacctgtgatgtacctaaacaggcgagctcctggcngtctacagataaaaggaacanagaccacacagcaaggaggcttgtggtggctggccagctgcgaattttgtgtaatatgtggattatggcctctggtaatcgattaccaagggtgggtaatcgattacaaggcttaaaattgaagacaggaggctaagatggtctctggtaatcgattaccaaggggtgtaatcgattaccaggcttaataacgaagtcaggaaactt

SEQ ID NO: 56371 - DNA, 442 bp, Glycine max
  unsure (1)..(442): unsure at all n locations
agctagtgtatctgttcttctcacataaaaactttagcaagaagaacatatctctgccgatgttgctgccatgcatcagtgtagagtcttccaaacaatccctgagatcaccattcgttgtacacacaatcaacataagacgataatgtcatgctgactatgtctatccgcttcatcacctagaatgaatatcttttaaataattagatatataaattattaaaaattgtgataactaaatatttataatattcgaattatatttaaaagttataataaataacttatgttgtgatgcattattactntttattattgatgatatctttaaaaagatattcaaattctagttgacactaagaatattaaaaattatagattgaaagagataaaagttacggtcaatcaanatttatctatatatataggtatatatatatat

SEQ ID NO: 56372 - DNA, 217 bp, Glycine max
caagacttcatgatcaagcatcgcgaatacactccatgatttggagaccacctcaacatgcgctaagtactgacttcgtatacgataaatattaaaagaatttctcagagaccacatagctcagttttggtttacaaaagaatcttctcaaattttctatgttaccagagtgactactctctggtaatcgatcaccacttgggattaatcgattacc

SEQ ID NO: 56373 - DNA, 533 bp, Glycine max
  unsure (1)..(533): unsure at all n locations
cccatgaccaatcatagcgctcttncntctgatacctgcattacggacctatgatactcagcttatctcaagtgatttgaagattcagtgtctagctcacactgtgtgatccctcccattcttcttggtctccccgaccatggacttgttggggaagggaggtattaaaagattcttacgccatttgattgacttttacttatttgttagggagctatcagtttattaacagtgagttcgcatcaactgtagggtagtaccatgactaacttgtagtagttaataactgtcanggttagtttacacgtgagtctctcaatataaagagataacaattgtggttgtgattngtctactcttttcagatcaattataaacactaatttactttctctcaaattctatcagtaggggataaccattgtgacactacatcctcaagaatgtgtcatagttgatccaaatcatccaccaaccaatcaaacctaagaatgaccanacaaattcgacctacctctttttttangatgagg

SEQ ID NO: 56374 - DNA, 449 bp, Glycine max
  unsure (1)..(449): unsure at all n locations
ggtataggtagttatagattctcacctccgtagtacatgtattatcttcttagatgcagggccaaacacacattaacagtgccgcataataataaaggaattagatntatcagcagctatgagtactacatactttcaagtttcaaacatacccaacagcgacattgtttaacagataagagacttccaagcaagaataatttcttataaatccaaccatgtggttctncatcacgtacatgcataatatacagctgaagtgacacanatatgacttctgaatatcatttggaatttggaatagaacataacacctgccatgatttcagttcacaaattaagatatgggaaatttgcgttcgttattttaagtcaagttgtatgcattggacatggaactagtataacaatgatgcagtgcacgacacatatgtggtcaactagaatga

SEQ ID NO: 56375 - DNA, 479 bp, Glycine max
  unsure (1)..(479): unsure at all n locations
acaccttgaacaggcaactaactcctctttcanaaccatgctatgtgctcgcgactggtccctttcctcccttcgcaacttgagttcattattgctaccccatagggctccgcgaaattggttccggccatactcttccttgcgagccctcttggtctctcgttcaagggctcttgcggtaattgcattctcttcccgtaaccccgcacactcctntcgaacgtgtgtagcagccaacttgaacttctccttggcgagttttgcctttcctaactcgctnttgagagcttggacttcctcgtcctcttccggtgcttcaaaattctcttcgctgacgactnttaacttggcgagccaatctaaacctcgtatgcgaactttcagccattcgtggtacccaccaatgatgccattacgaatgcctctaagctcttgatcttntcttaacggnngttccccatgccttatggatctttgat

SEQ ID NO: 56376 - DNA, 68 bp, Glycine max
  unsure (1)..(68): unsure at all n locations
agctcgtgcnnatanatcactcctacatttcatctctagcatgcattttctttctttacccactcctc

SEQ ID NO: 56377 - DNA, 524 bp, Glycine max
  unsure (1)..(524): unsure at all n locations
ctctgcnccatgcaagctatatcagcaattcttccaaggaatcaatatttgcactacaagaaaaccagatttctgtttcaggtactgacaaggcatcaccaactaagtcttgtaattntctgattttaccatcaatggtgaaaatttgttcttcaattgcagctttctgttccaatttatccttcaaactagaaatttcagtatgcagcttttcattctcaagttcagcttctcttgtctgtgctgatggtttcctttccatgttcagctnttctacaagcttttccagcaattcttccaaggaatcaatatttgcactaccggaaaccatattttctgtttcagattccgacaaggcatcaccaaccaagtctcgcaactttctgatcttgccttcaatagtgaaaatttgttcttcaattgcagttttgtgttccaatntatccttcaaactagttatttcatcatgcagcttttcattcttcaagtcagcctcccttgtctgcantgatagtttctcatac

SEQ ID NO: 56378 - DNA, 325 bp, Glycine max
  unsure (1)..(325): unsure at all n locations
acagagatgccagtctaccattcaactnttagacttccttgatgttggtaagggtgtgcatctctagtatagttatgcanttgtcggggctgacttctattccctgatgcgtgatcacgaaacctatgaccttgccttcgtcaaccccaaaagtacattttttgggttgaggcacatgttatatttgtggatttcttcgaacacctcttctangtctgccacatgtanggctatgccataggacttggcaaccatgtcgtcaacatagacctcgacatttcgtctaatctattgtttgaagatctgatccatccgtctttggtat

SEQ ID NO: 56379 - DNA, 452 bp, Glycine max
gcacgtcttgagcacatccaagcaataatcactttttttctcggatgtctgattgagtctttgaatatatcgagacgctcgaagaggaacaccgaatctctgagcaaattcaaacgacaataactttttactcggatgtcagattgagtccagaaatttgtcgagatgcttgaaattgaagaccaaagctctgagcaaattcaaacgacaataactttttactcggatgtgtgactgagtcccgtaatatatcgagacgctcggaattgattatcgaagctctgagcaaattcaaacgacaataacgttttactcggatgtctgattgagacccgtagtatatcgagacgcttgaaattgaataccgtagctctgagcgaatcaaacgactatatcttttactcagatgtctgaaggagtccgtacatgttgagacgctcgtaattgatacc

SEQ ID NO: 56380 - DNA, 286 bp, Glycine max
  unsure (1)..(286): unsure at all n locations
catccgagtaaaaaagtgattgtcgtttgaatttgctcatagcttcaacattcaattntgagcgtcttgatatattacgatactcaatcggacatccgagtaaaaagttattgtcgcttgaatttgttcagagcttcggcattcaagtccgagcctctcgatatactacgggactcaatcagacctccgagtaaagggttattgtcgtttgaatttgctcagagcttcgacattcaagtccgagcgtctcgatatattacgggactcaatcagacatccgagttaa

SEQ ID NO: 56381 - DNA, 411 bp, Glycine max
  unsure (1)..(411): unsure at all n locations
tgcaagctntgatcttccaccgccgccgccaccatcatcttagacttatatttaatattattctttgattntcagccttgtantttggctatattattatactatttgaacaatttactatttccctatcttgcatggtatgtttgaacaaatattaagtatgttatttgactatgtggagtttatagtttatctatgcatggttgtttgcttcatgatttcatggttcttggttcttgcttcatgaattggntgataattntttatgaacattgtatggatgtttaaattaaatttatttgatacgcactttgngcttttgttgatgctaaagggggagagaaatgggattaaatcaagaaatcacatgagtaatcaacttatttttaagataagcataaattcaaaaac

SEQ ID NO: 56382 - DNA, 467 bp, Glycine max
tgagaggaacgaagagaatggctacgtgggaatgcgtgagctcagttgaaaggtgggcaactggggatgatgtgtttatgtttgacttgtggaagtgggagagttgatttgcaccatcgcccgatcgccacctagtaccacatatgacgagtgccccataatccaacaagcttgatgtgagaaagcgtggaagagtcagtcttcctacttttgtttgttgaccacagagtggtacctggagatatgtcgcgggggtcaggagaccttggggacgtcaggtggggtgctgttgcccaaaaccaagcttgaccaatcccgacccaacccgggcatagtcagtcagtgagaacatgtgacgtacctaaacaggcgagctcctggcagtcaaccaacaaaagaacaaagtccacaaagcaaggaggcttgtgtggcggctgaccatctatgtatcttgggtctggtaatcg

SEQ ID NO: 56383 - DNA, 285 bp, Glycine max
  unsure (1)..(285): unsure at all n locations
acgcttaattatcgaataacaataaatctanatctatcatggactaaaaggttgaggaagaagatcaccaacttccaacaagatgtcgaatcaatatatgaagcataagagcaatacaaaggttacttggaagaatgtcaacaacatgggttgagtgaaccattgacaatccattttttctttgaaggattgaatcatcaaagtgtgtcaacacaaaactaacaacaaccctaaggctcccaacaatgaatgtcataattagaaaacctaatggggggggggggg

SEQ ID NO: 56384 - DNA, 561 bp, Glycine max
  unsure (1)..(561): unsure at all n locations
tgggatgtgnnnttgatacgccaatcttntangcgacactatagaatactgatgcctctcgcgtatcagtcaagtgtatggaccatgttgtagccaaagtgctcatcgataatggttccaatttaaacgttatgcctaaaagcacttttgagaaattaccattcaatgccttccacttaaagcccaattcaatggtggttcgtgccttcgaccgcacccgccgagagggtatgggagagatcgatctcccaatacaaataaggccttacacctgtcaagtcacctttcaaataatggatattaaccccccctacaactgtcttgtggggcgcccgtggatccactcagtgggagttgttccctctacactccaccaaaagttgaaattcgtaatggaaaggcattttgtcatcgtgtcatgcgaggaagacctctnggtgagttgcccgtcctctatgccttatgtggaagccgcagaagaatcattagaaaccgctcttcagtcttttgaagtggtaaagcatttcttcgtggactcattctcttggcaagcttgcctgn

SEQ ID NO: 56385 - DNA, 307 bp, Glycine max
gagctatcatcttgtggtaatcagagcacaagagtcttcagttgccgtactgggaattggaaggaggactggtgccatcccttgaagaaattgagtcaagaagcaaggggccaaccaccttatgagctattgtactaacaagcactccctattgtgtgaatcaccaaagagagaaaaaccacctaaattgaggacctttctgcaagtttgaaatagacaatttactttactgtcattgctttcaaatatttgaacaaacaggcctttcattggaagaaagtgggagcctccaatacggcaccctact

SEQ ID NO: 56386 - DNA, 475 bp, Glycine max
  unsure (1)..(475): unsure at all n locations
ctggcattctagaanaacccatattcattataactctacctcattaccagccgatataagtccttctgattcaatatgtgcattctctactttatggcctgagatgaagctcacacattggacctcttgctagtcattattgataaaaagcttacacacttgtgcttgagtgaaacagaagccgtgagatttcggtttagcatctttccatgaactctgtctactgcctagctacatttaagtagtgttgcttgctaacatgttctcttctctaaaaaactgcatgccttgtgaatagcaattgataaaggccttatgtttcatttatgttcatgcgataaatattcttggatacaacacacttgttgacataatcactgcatgtttttatcacttggggacagtgagctattcttatttgcttacgacaagaacactgtcagttacggagttgttagtccgtataccacaactt

SEQ ID NO: 56387 - DNA, 444 bp, Glycine max
  unsure (1)..(444): unsure at all n locations
agcttgtgattcattaatacaccattaatgattgttngattcttatttcttatatgtaagntatatgcttgtggtaggaacctataagtctatgtatgcttgttgtatgggtgttggcgattccttgttgtcataccctaatttcgtccggggaccatcagttgttgggatgcgaccctcgtttgaccacttcgaggtatttggcacccatcgttagggcatttgtgaagttcaatgacatgccggaagccaaaagaaaagcgttgtagcacaatctgtgaagttccgtgacatgccgaaaattaaaagggaagtgttagtgcgcaatctgtaaagttccgtaacgttccggaaggcaaaaaaaggatgaatacataattcgtaaggttcacaacatacngaaagaaacaagtatcgtacgaaattcgtagtttccgaacttac

SEQ ID NO: 56388 - DNA, 430 bp, Glycine max
  unsure (1)..(430): unsure at all n locations
ttcgtattcctactcactccaacaagtaagtattcaatccttgagttttttgctttccattagagtattatgttcatcttttggagctctaagttgtaagaatgtgctcatatttatggggcagttttggggttttttatgcttgatttgctacagttgaggggttgtacgggatggccttangcctatgtggtattctgaaacaatggggcatgccacattgcccccattctcttgcaatttatgcctaaacacgcgcccaccaagtgctcggtgaaatgccccaatgacatatgaatgtagttttgtaagattgggtttgtgggactggtttatgtacatagggacatcatagaggattcgaaatagatgcccacatgcagttctaagcttaagaacccaagcttttaggttcaatgcaaggaaacat

SEQ ID NO: 56389 - DNA, 433 bp, Glycine max
  unsure (1)..(433): unsure at all n locations
agcttgcatattatattctccttgcctggcactttanaacctgtctggtgggtcatatagatgtcttcctctaaatccccatgcaagaatgcagttataacatctaactgctccaagtgaagattctctgcagctactatgctcagaataactctgatggtagtcatctttacaactggagagaagatctctgtgaaatcaattcctttgttgctgctgaagacccttacaccacaagtctcgccttgtatcttcttctaccgtcagattcttcctttagcctatagacccacctattctgtaatgccttctttccttctggcaaaatagttaaagaccacgtcttattcttttgaagggatgtcatctcatctttcatcgctagctcccactcaatagtggcattcccctgtgtagcctcattggacaatct

SEQ ID NO: 56390 - DNA, 456 bp, Glycine max
  unsure (1)..(456): unsure at all n locations
tcagaccactatcagtgtgctggaactacttcacatttacttgatggcgcccatgcaagttgaaagccttggaggaaagaggtatgcctatgttgatgcggatgatttctccagatttacctgggtcaactttatcagagagaaatcagacacctttgaagtattcaaggagttgagtctaagacttcaaagagaanaagactgtgtcatccacagaatcacgagtgaccatggcagacagtttgaaaacagcacgcagaatggcatagttgaaaggaaaaacaggactttgcaagaagctgctagggtcatgcttcatgccaaagaacttccctataatctctgggctgaagccatgaacacagcatgctacatccacaacagagtcacacttataagagggactccaaccacactgtatgaaatctggagagggaggaagccaactgtcaagca

SEQ ID NO: 56391 - DNA, 451 bp, Glycine max
  unsure (1)..(451): unsure at all n locations
agctngactcttttacgcacgactcacanatattggtgcggntataattgcagcactcagttggcatttacaaacacatgccatattcattgccctgctgagaaccaaagtgcgtgcgttgcagatgattctgtagcagtagtacagagccgccaagtttattattttgaagcatatcagaatttatgtttgcatgacacggtaaattggattattaacttcatcctaaaacagaccattgcacaatttttttaatgaaatttatggaaaaatcacactatataacattatcacattntaaagtattttatttatgtattgtgcgatagctaattttttgttctccccatatactcacattctatgtttgaccccaaattctcatatccgatgtcttaaataagccccggtgcatgttccacccaccataagagttggacaacttcgagct

SEQ ID NO: 56392 - DNA, 471 bp, Glycine max
  unsure (1)..(471): unsure at all n locations
ctagcttcacataacggtcagatgcaccaagaagatctttcttctttaacttaattgcttgcagaacctttacatgtaaaataccaacaggcctcttcaaggctctaagattcccaataacattcacaagagaaaaccagaaaagagttaaggtaatataccattatattttgacaaacatctatagaaatgaaagaacatactttgacatatctaacacttgaactgtcaacgttttgggccatagatacatgtttgcaacctgatctttaataagctcctgaaaataagcgatgaatacttcaataaaccaaaaccaaaacaagcgtagtacaataacaataacatggatatgttacaaaagcataaaccgcgagtgcacaccataaaccaaagaatacattacatatgtgctatacnataaaggaccaccagntgtctgtgtacactntaatcttgaataataaaact

SEQ ID NO: 56393 - DNA, 459 bp, Glycine max
  unsure (1)..(459): unsure at all n locations
agctngttcttganttttccttagttctntaactttctttgaacaatatacttggccttcatttaactgtctttgcgcttggcggccacgctcaacaaagtattttcgacacctactgtacgttgatttgaccaatgctgttatgggaatgtttcgacaatccttcaaaaccttattgatacattctgaaaggttggttggcatgtggccatatcgacgttcttctctatcataagccatcgtccatttttcctttgaaattcgatcaacccatgtggctatggctggactcagttcacgaaatttttgtacattctgatcaaaaatgtgcttgcaaggagtgtaggctgcataaaaatcagtattgaatacaattttaagtatatatgaaacttaaataaacgtcaccatcagataggaaatcttacccaatttttcacattttcttttgttggcatt

SEQ ID NO: 56394 - DNA, 490 bp, Glycine max
  unsure (1)..(490): unsure at all n locations
cttagatactcagctggagctggagaaaactggaagatgttgtggtctttacatgtccaacttccttgagtgacatttgtattggttgcatcttagtccatatcatatctttggtgcatcatgcatcatcataagtaagtgagaagaaaaatttccaagttagaaaagtttcttcagaagataaaactctatgttttaatcgattacaaccttatcgtaatcgattacacaagttgtcttaatcttgtagagttatgtctcgcatcggtttaatcgattacaaccttatcataatcaattacacaattgtttttgtgacaatgactgatttattcaggagcctctgctntaatcgattatcgggtgatataatcgattaattctctttctataagtgtttcagaagtgaacaaaaatactttaatcaattacttttagtatctaatcgattacattgttcttgagttgtttccaggttttgggaagaaca

SEQ ID NO: 56395 - DNA, 388 bp, Glycine max
  unsure (1)..(388): unsure at all n locations
ttagagcgaccgttgctgcagcttataacctttatttgagatctcttttttcttcttgaagattagcaaagaacgttatttgagtatggtgattatgcgaccatcagtatgccaattacaagatgatcacctcttcaatttcttaataactcacttatgaatgtcttgctgtatacaatgtgagaatcaacgnggtgatggaggaaaattaaatcagagacgtatgttttttactgtggttatggccaatcaactaaaatccttatttgcgacacaagccgctaaaatgagcatgcccaacgcgaggcactccaaggtcacttctattaatataataaagaacagcgacagccagctagatgcatggatattgatcattatacacatg

SEQ ID NO: 56396 - DNA, 379 bp, Glycine max
  unsure (1)..(379): unsure at all n locations
gtattcccttctaccttggcttcatttgctagattcaatgctttctgtctcataaatgaatagcattcaatattctctttacatgcacaaagggattaacatacagttatataccaatttcatagttggatgaatccatgtgtctgaatcgcataatacaagaattttatctgcacacaacccatagtgctccaataatagaacatgtcaatcggtaattagtcacacaatcaaccacacgagccanatattatacaagaggaatgctaattacactacaaattctctaacacataaacacactcattatcaacttatcatgatctctgctcttggattaaaatttattagaaactgcanaatcatcagcagaaactca

SEQ ID NO: 56397 - DNA, 287 bp, Glycine max
  unsure (1)..(287): unsure at all n locations
agctntcttgagaaaacttccttganaagcttatttgaganaacttccttgagaagctagagcttagctacacatacccctctaataactaagctcacctccttgagaagcttccttgagaagattcctaaagaagctagagcttagctacacacacctctctaatagctaagctcacctccttgatatgagaagctagaacttagctacacacccccctataatagctaagctcacccccatgacaaaatacaaaaaaagtccctactacaaagactatctcaaat

SEQ ID NO: 56398 - DNA, 413 bp, Glycine max
  unsure (1)..(413): unsure at all n locations
taatntacaaccagaatggtgaagctgttaataaagatgaaggtgatatgttttttctctatggatatggaggtacaggaaaaacatacatttggaaaacacttgcaagttcactgagagctgacaataaaattgtaataatgatagcctctagcggcatagcttctctgctattgcctggaggtagaactgcacattcaaaatttaaaattccagttccagtttttgaagactcaacttgcaatatccatcaaggaactcaattagctgaactattaaatcagacaagtctaatcatttgggatgaagcacccacgactcacaaattctggtttgaggcacttgatcacagtcttagagatatcatcaaacacaactcanaggacagtaaaatctttggaggtaaagtcatg

SEQ ID NO: 56399 - DNA, 439 bp, Glycine max
tcctgcgaaggcaaactattggaacagttagttttaccaagaaatgctacccttattacaaaaatggcatacaaccccctccaataaatacaaacatcaatgtaaatttagagcaagcttatgcgcatacttctttacaaacgttcacttgcacaagacattcttataactaagagaaatgcacccatatacaatcaacgcaccttcgatacctagattatttacatgtacttccaaggtgtatttgttacctacatcacacacatttcctttgctaaattcacatacatgcatactctaagcactttggctatcaaaaattgcatacgtgcacatcttggtatttctaatacctatacatacacaaacttcatgatgaatcttgactatctacacaataaggtgctacatttcatggcttttttcaagtggttttact

SEQ ID NO: 56400 - DNA, 420 bp, Glycine max
  unsure (1)..(420): unsure at all n locations
acaagctgaaattaatcacatacacaagcaaggtatcctaactacatgcaagagataagaatgaaaaatagaataaggaaagaaaagttgggttgcctcccagtaagcactcttttaacgtcactagcttgacgcatcatcctgttatccaggatccaacaaagttcccacttcaaggaccttcttctcaggtctctnttcctccatcacatacactttcagacaaacattttggctaggtgggtctttgtcctcatggaacaaatcaaagttgatcttctgatcttctatgcctatctgcagcattntctttcccatgtctaccatgcagcttgcagtagacatgaatgggcaaccaagaatgagaggaatgtcagcatcctcttctatatctatgacaacgacaatcagtggaaatat

SEQ ID NO: 56401 - DNA, 489 bp, Glycine max
  unsure (1)..(489): unsure at all n locations
agcttgcacactcagagggacatttcacctatatctttatgaagaaatatcatgtacatctctcctttacacaaaaataacaccatctaagcaaacttaactgagtagagacttgtactctccttcttccataccaatctgtcctcctcactcagaatcaaattaatacttccaaagtcatggccttttatctaagcaaattattatatttatttcttctactgatatagagatttctccattcccatctccacaatcaatttccctccctctggtcacctaaatttggcattctagattgtatggctactacaatgttgtataatctagtatacttcctaaatatgaaaataaaccacttccacccaaaggtcttcagaaaataaaagtatctgccaaccnctacccaccttctaaacaaatttgaacacctctccttgaaatagcatactatntcttccctctcatnagtactctttgatattctgg

SEQ ID NO: 56402 - DNA, 337 bp, Glycine max
  unsure (1)..(337): unsure at all n locations
ataaagagggagagaaagagagagggggaaataagtcaagatgaaagaaagaanataagagaggaagaaagaagcaaaataatgaaagaaatgaaaagagaaaaacatgcctcctatagtagtcatgactcttgcaagagtttaagtgaagaacttagcaactattatagagggcgccatagttcacatactanacatcacttccaaagaagggaaagggatagaaggcctcaagaggttaacattagtcgtccatatttccatggaaaagataatgttgaggcctacttagattgggaaatgaaggttgaacaactctttgcttgccatcatatta

SEQ ID NO: 56403 - DNA, 471 bp, Glycine max
  unsure (1)..(471): unsure at all n locations
gcaaccttcatgatgcatcaagaatgattcaaggagttttgatgataacaaagatgatgactaatagctcanaagtctagatcacttcatgataacaaagatgatgacattcaagaatgagttcaagaatgagtcaagaacacttcaaagatcaagaggaaatttgatttcgagaatcaagaatcaagaatcaagaatcaagattcaagagtaatcaagatcaagattcaagactcatagattcaagaatcaagagaagacttaatcaagataagtattaaaaagtttttcaaaatattgagtagcacaagaagttttcacanaattattaccaaagagttttactctctggtaatcgattaccaaattatagtaatcgactaccacgtggtttaaaacgttaatattttcaaatgaagatcacatntgtgatgtgtattgatacaccttttggtatcgataccatgactg

SEQ ID NO: 56404 - DNA, 430 bp, Glycine max
gatgctgcagattctgccttggcaaccctcgaatgaatataagctgagactgaagttagtaatgaacattctttgtgtcacgacatgatagttgattttgggatataatctctgttgaacactttttgctgagtgatgattatttgttgaggaagcattgaataatcgagcaatctttttgtatctttctttcaagataatagatggctatatgttattcatttgagcgataagctcttacctgaccctggttccttgccttgtagttaacaagtctgaaaactttggaacaagtgatatgactaatggttgagatcatcaggagttaattaattagtctatcatagaatttgtcgtattgaacgtcctgccttctttagctagccttatcattagcaaggaagcgttttttgattattacatataacgc

SEQ ID NO: 56405 - DNA, 395 bp, Glycine max
  unsure (1)..(395): unsure at all n locations
gagccanaatcctgactcaccatanactcttgacccagggtgagaatgtcattccttaccctcggaagcaaaaaaggaatagaggggaaatttccaatcaaagaaaaagagaaggaaaatttccaatgaaagcaaaaaagataagaaggaaaattccccaatccaagagtgggagaaagcacaaaacgaaaagaatgagaattccccaatcaaagagtgggagcaagcaaaaagaaaagaaaggaaaattcccaatcaaagaatgggagaaagttaaaaaggaagaagaagaaagaaagctcctgatcaaggatcgaaagaaaacagaagaaatgtgcatagaggtctttggaccggacaatatctgtacaatacagaattgccaccaaatgaac

SEQ ID NO: 56406 - DNA, 323 bp, Glycine max
tctgacattcaccacatattctgtcttcttctatttttagaatgggaatgcctctaacagcacctttgtgaatgatattcttcatgcctcgtaagcgcagatggccaaatctatgatgccatattctgactccatcttatttggaggatagacatgtggaggagtaactagtttcttgaggtgtccatacgtaacaagtgttctttgatctgctgcccttcattagaacttcactcttattattagtcaccaagcattctgactgtgtgagagttacattgaatccttcatcacacagctaactgatgctgatcaagtttgca

SEQ ID NO: 56407 - DNA, 475 bp, Glycine max
  unsure (1)..(475): unsure at all n locations
agcttgtatttctatcgggtgcagcanaatgaactcaccaggccttcatgaatacctaacactcttctgaagtccttcaatccatccgcaaaatagaatttgttaccgtctcttctaacctttataaaatgtttttcttcattgtaatcaaacgttacatacagtgggtaagtaagaccccagtgtctgtgatatgctaatggtatttgaatgaaagtttggaaatatacatcaattacatggttaaccccacaatagtagatataattcttgtgttcatttcatacaataaaatgaataagatagtcaatatgaaaacacatattctatcaacgtggaaaacanattgaaatttgtatataactgggttgccgaagaaactgtgtgtttgctaaatgacganatgtgtcatagtaaaactttnggcagacatgaagcaaataagttgttcgatatatatggagaataacaattc

SEQ ID NO: 56408 - DNA, 552 bp, Glycine max
  unsure (1)..(552): unsure at all n locations
aggctgcttttatgatagctcttgatnaccccgctcgatacctactaagccctgttctgatggcttcttggaccgttataaagctcgattagtatcccttggtaataaacaagaatatggggttgattatgaggagacatttgctcctgttgccaagatgactaccgtttgtaccatcctcaccattgctgctttcaaatcttgccccctgcatcanatggatgtgaagaatgcctttcttcacggtgatctcaaagaagaaatctacatgaagcttccatctgaaatgactacttcctctcctaatgaagtttgtaaactacaacattctttgtatgggcttaaacaggctcctcgggcttggtttgagaagtttcgtactacacttcttaatttcaacttcacacaaagtcaatatgattattctttcttcttccacaagtctccctcgggtatagntctcatcttgggttatgtggatgatctaatcattaccggaactgataacgggttgattactaagcttcaacttgtgctacatgcaacattccg

SEQ ID NO: 56409 - DNA, 525 bp, Glycine max
  unsure (1)..(525): unsure at all n locations
tgccatgttttttgaagcattgataaccgctgatacctgtataacctgcagatgcatactgggcgaggtaatcatgtgagagggtttttacgtggaaataagtcatactggacgatctggagctctacacagcagaccgaactcccttgagtatgtgttgacgagagaaaaatgtgcctcctatgttcctgctgagacttgcaacagtgtatgtgtggagcctttgcccgtgtttatagggcgcacatagagtacattctatatttcgatctcgcagaatgtatatgtatttaatgccttgatactgttagattatattttcatattcgcacggacaagagaatgttgaggccgtattatagtgggacaggattgttgtacgcatatatgattgcatgaagtgatcaatataaatagattcgtgattacctatctgtaaaggtctacctatatagagactaatttgtgcggactatgatcctggnatcccacaataaacctgaatgttctagagttcctatgtac

SEQ ID NO: 56410 - DNA, 473 bp, Glycine max
  unsure (1)..(473): unsure at all n locations
agcntttcttatcacanaaatgacatgctaatccctccgatttagaatgatctcatgtacactnttaatgtanaatatttatgcacatgcgtatgtgtagaatatcccactatttatgtcaacgtacaaggacatacaacacattccaactgccatacatatatattttagaaaagaacacacattctcatgctctatgcactgcgtcaaaactcacacctaatcacatcctaaatattttgctatcacaaactacctacacatattngaaacatatatcatacaggctttcattgtgtcactcacatttatntatatgcatatgggagagctaattacgtcatgcacatactngcattaaaaaggaattcatgccatcatacattcatttaaacgcgatctaatattcattatgaagatctcatcacacttgtaaggaattctgcctatgtcacataataccacgatgaaag

SEQ ID NO: 56411 - DNA, 380 bp, Glycine max
  unsure (1)..(380): unsure at all n locations
caagactcttagatctattataaaagatatgttgttactgaatctaattgggaatgaaatcataatttaagatccacanattttagtttctctctctattatcttgtctctgctaatcacactgaggaggtccatcgagttattgaggttccagtgaatgctaaatctgccacttgcgcatgacacctcagtttgctatcaacgctacaatcatcattttctttatgaatgagtataattaatacgtacagggttatcaagtagggccaagtggtaatcaaactacatagaccccaagtcttggatgtgactcctactagtggtgcttcattggtagattgactcaaaatatcactataatctcgtgttgagtgttgagt

SEQ ID NO: 56412 - DNA, 454 bp, Glycine max
  unsure (1)..(454): unsure at all n locations
ncaagcttgacttgacagtacacactgctgtcttcttcaacanaataaaatagggaaatctactctaaagatacatctaataatacccataattataataattaggattaggtaaaataaaataaaaaacattattaggtgctcttgaactattatatttcgattagttttcacgtgatatataattaagagttatngattctttttttagtaacttaaaaaaatttcttctgtaaaaaaataacttaaattttttaaatgtgtcatataaaaagattgattcatatcatgaatacgtgggtggataaagatcacctaataaatttttctattcaagagtagtgagataatttaatttacgtgacctataacgtcttagttataagttntgtacttaactataccaccagaaatgaatcttattctcccaagtgagtattattcaacatatgat

SEQ ID NO: 56413 - DNA, 485 bp, Glycine max
  unsure (1)..(485): unsure at all n locations
tctagaatgagaatggagacaagggacccactntctctcgcataacatgggatgggtcgaaatattcgaccattccaacgttgcccacatcttctatgtaggaaagcttctcggcataccccagagacatgngttgatggtgactcaatgtgctgttatgacagaaattctctccaagtccctcactttctttctctctcagaagaaagaagaaattgagaagaagtgtgttttgttcttcaaacacagagagagagaaagagaaacatttgtttcttttaaggagaccccaaaacaccaatgtactctcatacactgtatcatcccctggaacattatgaatcactagcaaatcacacaacatttaattgcaacaactcattntctaaaaatagtattatctttttttaatgtttcttaaaaatatttaccttanatattagactaaatttatgtaggtaattcacatgatacttatacttatg

SEQ ID NO: 56414 - DNA, 399 bp, Glycine max
agctatatatctggcaacacagaatctaggtattcaatacccctcaatgtattggattgtcaaggtttaagaagtgaaatcgagaatgatgtatatttggagctaactctcacctcccacaagtctataacatcaacttaaacttgctcaaactggatttacacctaaaattccaccgaattaaaatttgacttctcaacacccaaactttaccctaaaaagggctctctgttcactttggtcattggtctatctctcttgcacagcccaagctttctcattagtgctaaatgaaatatctagctaggaataactcactctaacctctcaataccactaaatccagatttggccttctactctcaaacctcactctttttcactcataacacatattct

SEQ ID NO: 56415 - DNA, 442 bp, Glycine max
tcatgttcctttttcgaaagatgttctggctaagaacgttgtcatcgtagcagttccaggcgtcctcagaggtgaatctgtcagtgtcatagtgaggctagggcctggaagttgtggctttccttttcctagaagccatctgcacaaaagaaacatagaaaccaagttaaaacaggttttatttgaaatgacaagctaaaaaataaaactgaaattcagaatgggcgcttagagtgacaaatgcgcgccttattaaaaattactcaagcacttagcgtgatagccacacacttagcgagttgacacaaatcagaattatcagcagaaaccaaattgcgcttagcacagctagacacgcttagcgcgacaatagtaatggacataaatggcttagcgagaaggctcgctaagcccaattccaacaattacagaaacagagagt

SEQ ID NO: 56416 - DNA, 339 bp, Glycine max
  unsure (1)..(339): unsure at all n locations
agcttgtgttntctctcgacatacaccattggatggtgtgtgtgagggcaaatcagtttgtgaatgattccatgggtttgaaaaaatgaggtaagagctctaaattcacctccccaatctatttgaacacttttttttatttgagtatcaaactgaagttcagtcatggttttaaatgtttggatcaagtggcctcggaataattaagaaaggggagggtgattgaattaattatgaacgtgtcttgactaattaaaaaattatccttcttaatattactagattcaattaggctttactactaagttatgcgaaaggtaataacagaaacaataactc

SEQ ID NO: 56417 - DNA, 520 bp, Glycine max
  unsure (1)..(520): unsure at all n locations
gggttgtgcctganacgctgaaccctgaacctgaatcaccgagcccaacnaacaaaaaggaactttattttgtcanaaatgttccgattatnttttttataagaaaactatcattgaagtcgcttttaaaaaccagtggcatctctctcctcctaattgcattttctccctcactagttaatggtagacaaaatataaaaaaaagatccgccgatgactctttttctctttaattcttacttttaaactgcaactgtcgagatacttttaatacatcaaacacaattgagtattatcttagtcacaatagcattctcatggatgagtctcacctcaatacccatagaaatattcttagcctaaaaagaacatcaaacaaagtcttttcaattagaaattaggcacaacttcccttactcgtttattatgatagaaggttttgatgatcagtacataatactattctggtccggaaagaaacatttgatccattaaaatctattttttcttattaatatag

SEQ ID NO: 56418 - DNA, 234 bp, Glycine max
agctagaggaaatggtatagagatggctatggttacatattcaactgtaaaaaggaaacatgtaaggacatgcgattaaatatattatcccacgcgtaatagggacgattcatcgtctggacaaaagacaagaagagacatacgaggaattctctgaaatgaacacacaagacgatgctctgtagttccatatgatcatgttctatacaggtattttctggagaactaggcact

SEQ ID NO: 56419 - DNA, 394 bp, Glycine max
agctatatgtttgttcttgatcctagcgccacttcttggaaagaaggtctctcatctctttgtaacccctgagttcttcaagtgcatccgctgtctttcgaggcatgaagaatacagaagcagtggcaactcctccctcaagttcagcctttggtgaatgggactgaataacaacttcggatccttggcgcacatggcatgcgctagtccttgaagcattgtgcacaatgaacaaccaactatcagccatcttgtgagtttttcctcattggcagtgatgttgaagtgaactctgcatcactctttcgatccgcattctgactgtttatgcataaaataagcacagaaaggggaaaacatatcatgattagatactaaagtacacatcataaat

SEQ ID NO: 56420 - DNA, 339 bp, Glycine max
  unsure (1)..(339): unsure at all n locations
tcatacaattaatatanaacctatattctaatgtcacatcctatcagagcgntgtgttcccgtgtcctctagcatgagattcttcatagtcattcacctattcatctgctcccccgaacacaaagttcaagatcatcacaggatccaaacataaacaacacacaaggagtgagttatcacattcctaactaatggagaanaacaagataacatgtaggtataaatatcatataaacaaaatacaacttacttaagcatcactcacgttatttcgccactttgtcgcacaacattacatggcaacactacacatttaattcatcttcaccacattcacgt

SEQ ID NO: 56421 - DNA, 447 bp, Glycine max
  unsure (1)..(447): unsure at all n locations
gcgcatatgaattgtatgctccagctttatggggagtgttaaaagtttgtgtatttntgtgtattgtatctgttgtagttcagctttattgaggggacagctgtattgtgttagtgtaaacagctgtctcccttccttttgtactctatatatatatatgtttaatagaaagcaatcatagtgtgatgagtgtgtgagatttcacacanaattcaaacttcangtatttctaaggactnttaatgcaacacttgcaaatgtgtccttacaaaatttcatgtaatcatacaaattatagttagcccaatttgtatggtttaatgtctatttgaatatgcttgttatgcattatataaaatcacccaagctgaatgtgtcaccctttttaccatgtaattattgaggacattgatcatgcttctgtgtcgtctcctttcattgataaat

SEQ ID NO: 56422 - DNA, 375 bp, Glycine max
agctgaacttttagagagtattctgagacaatatgaactagcgctgtaatgctattactccattgtatgaaagaatcttgatcgaattgagtgaatcttatatctaccaacctagcatagtgcgattgtgtccagtttactggggtaacactctctgagtgattagaatacattctcttttaaatatatattggttgcgaaagtcgggagtgacttactgacaaagaatacttgaatcttactcttatggagagatcaagcgtagtgcctatacagacgtatagagtacttgttgtatgtagaagtgacatagagaatacttggttgtcatcaaatatttgattagtggaacccttcatgttagaatgagaactg

SEQ ID NO: 56423 - DNA, 449 bp, Glycine max
  unsure (1)..(449): unsure at all n locations
ctgtcatgagctcctcacattcaagattcggttgttttgaataatcaaaggtgtgcgtcaagtatgtggaatgaataagattganggaatttagtctcaagcaacttcaagagattttttttttggggatccaacaagaagaaatggttttgaaagaaaaaatagagaagcaattaaatggtcgaaagcattactattactattgtcaataaagaagacccgtgtaatatataccaaggtattattccatacntaattaaactagtattccagcctatatgattacatagagtaaatgtttatttttgtataattaattcataatcaataaatatttttagtatataaattatattataattaaagggtatttaaaaaatattaaaatttccccgcatatatatatatatatatatatatatatatatatattaatatttcctttagag

SEQ ID NO: 56424 - DNA, 196 bp, Glycine max
  unsure (1)..(196): unsure at all n locations
ctgaaggacgccatgacgcaatctatagttaatcgtctatacctagagcaattttgtgtattcgttataagctgcacgaangacacatctagtatgagaacacattgtatttgtttaatgaactgattctagaacttgaaaatatcgatgtcactgctgatgatgaggatcaggctatgatatatctgtgctcctt

SEQ ID NO: 56425 - DNA, 455 bp, Glycine max
  unsure (1)..(455): unsure at all n locations
atacccgactctcgataaagnttatgtgctnntggattatngccaacacatggtcgagttgatgtcctacataattaggaatcactgagggtgttgtatttatgctttgactntggcaagataaacaatgttgtttcttaatgaaaatgagttntgattcaaccctatgtcgttgctgaaatntttgcatgggttcaatatttcggcaactatatcttatcatgcattcatgttttgttcgttgtcgcattactcattgcattttttttagcagtcgtaggcaaaaagtaaacacaataaccaaaaagaacaaacacgctttacgacacccctatcaaacacgtgccaaaaccaaaatcataagtgaaatagaggaagtgcaagagcagatgaaagctgacatggaggccatgaaggatcaaatgacctccatgatggagcccanaatgagtatg

SEQ ID NO: 56426 - DNA, 355 bp, Glycine max
gtttatcattgttagttaaatcaaatatcacaaacaaactaattatatttatgtaaaatagttaaattaaaaattttaagattcagattattatacaaaataaatatattattacacaaaattcagattttaaaatatatattcacccaaaaaatatcttaaataagttaaataatataacaaaaatactaaatgtaataatatcatcttcttaataacgaaaataaattatcaaataatattagataaattaatttaataaataaataattttaataatatataaacattcttataaaaaaaaaggaagaagggaagtcggggtgccacaacccgacttccgtgaaaagcatga

SEQ ID NO: 56427 - DNA, 367 bp, Glycine max
  unsure (1)..(367): unsure at all n locations
tttaccttctcctccattgctgtttcttcattatttttctccatgtatttcctcacatgtcttgtgttgaatgattttaacatgattctttataatttccaccaattaagattgctatagaagctagattngattttctatggtccaaatttcttgttcttgttcttgaaccatgaattgcgttgagtttaggttcctttgagttatgtcttgctattttttatggctgaaacctaaatcataaaattcttacaaaaacattaaagtagaagataacctcaaaaatctagagtgacaagttcacctattgttgttttgtcatagaagtcacgtctagtcatgaaacttgtcacataagattccttat

SEQ ID NO: 56428 - DNA, 85 bp, Glycine max
cgttaacggcccattactgcttaataattaccccccctgcactatccatactgtgtataataacatctgcgcatggacctttaac

SEQ ID NO: 56429 - DNA, 428 bp, Glycine max
  unsure (1)..(428): unsure at all n locations
agctngcctatttaacctgaaattgagagaaaattgattataaacacacaaaatanaaatactaagtatttattacctatacttaacagaanatacttataaccttacaaaataaccattaaatgggagagtttgatacaatntatataagttttatacacaaaagttagtcattttcaccaactaacagttgccccaaaattacagtttttgtttgtcctcaagcaaaaagagaacaactcacttgtcctcaagtgacaatgacatgcagtgattatgtacgaaggtgtatgctacanagtgactaattgcatgataagagaatggagtaaaatgccctcaacacttgtctttcacaacagttatctaaagacaagaatanaatgtaacctgaacagatagatgaagttaggcataagacagatatt

SEQ ID NO: 56430 - DNA, 214 bp, Glycine max
atataattcattactcaaggcaagggtgtttggttttgtctctatcgggtacccacattgacgtctagcgagaagtgtgctgtagctaatttcgccacgcatacacaaaagaggtacgttgggatattcaccacaactcacaataatctctccgacgttactaactgcttggtaccaaacgatgtcagatgggtcaagagtcatgattcggtga

SEQ ID NO: 56431 - DNA, 414 bp, Glycine max
  unsure (1)..(414): unsure at all n locations
agcttatgcctaatgttggatgctttataggggttatgttgttgntccangtcacctacctttttacatgagcgtgtctatgatgagttcttggagaaatcaaagaaacaggctttgagacatgttgttggtgatccgttcaagaaaggtgttgaacaaggccatgtaattttatttttaaagtaaccactgtgttattgcatgtacttgacaagtttattttttctttttgtttcctccttaacaatcatgacttcatgggaaaagttaaagttgtgagtgcatgttaacatcggtttttgggaaaactgatgttgtttgtaaacatcaatgtcgggttttagtaaaaaatcgtgctgttttatagattatatcaatgtgtttactggctttttagctaccccacattaacct

SEQ ID NO: 56432 - DNA, 166 bp, Glycine max
atccctaaaacaaccacaaagtctgtttaccgcacttccaatgacgaacatcacctttagcacaatccaaaaacaccaaccaagaaatgaattttgcagcgagaaagcctgtagaattcaccccaattccagtgtcctatgctgacttgctcccatatctacttga

SEQ ID NO: 56433 - DNA, 446 bp, Glycine max
  unsure (1)..(446): unsure at all n locations
agcttaagcttgatccatcatacaattgttaactttatcangtatntaaagcctacacaaatgctgagttgcaatgaagttgtaattgcaagttgagagacagactaagtaagagtgagttaatgatatacaaatgctaatatatcaattatggtcaataattcatctttagtcctttaaaagtgaaaatactataatatagtagatgtatcttgttgtcccttaaattatacaaatcaaacagattctaattgtcttattcttgctggtttctaaactttatttaggtttgtggttgcattcagagaggaatntaataagttgtactttccgactttgggtgacatcaaggaaagggtaagaattaagctaggattgcctatcttgagcattanttaactttntatgcactttaagtatattccttggttaattccactttaagt

SEQ ID NO: 56434 - DNA, 421 bp, Glycine max
  unsure (1)..(421): unsure at all n locations
agctcgtagaggaagcttgcagaggaagatagatatatagataaagagataacaaatattgaaggaattgaatagcatgaacagtgaattatctcgcatagtcagttattacaactaattatatagttagttgtcagagtaactaactcataactaactaggctaactctagttacatagagactaaccaactaagctaactctagttatataatgattcattctaagaacaagcatccctaatttgtgttactttatctcatacctgatatacacatgcggaattttcaaatgctttcttgatttgcagcagtcatacaaaagtganaaaataagtcaataaaaagtatagaaataaaagtattccatgagaagaaacatatcataccttttcttttctaagtcgtgtctacactcaatg

SEQ ID NO: 56435 - DNA, 471 bp, Glycine max
  unsure (1)..(471): unsure at all n locations
tggactagcgaactataccgatgagtccaccttatctgatgaagagcccctccaaagcccttcggtcctagaacctatgaattccactatcaaattttagtttcttgaaacctaacacaagaaaaactttgatatttaggttcaagtacaacatcagttctcataaaactgatgttaacgcacgacactcaacattgattctacataagaccgatgttgagtacaatactttacatcagttcttttaaaattgattntaacaacttccagttattttaaaaaataccactgtgtatttgttaacatcaattttcatataaaccgatgttaactgagcgatataatatacatattttttagtagtgcaaaaacaatttaaaaacaaataanagaaaaaaaagtagttaagaaatcggttcctcaaaaaccaatttcttaactatntttttaaaagaacatttataaatcaat

SEQ ID NO: 56436 - DNA, 427 bp, Glycine max
  unsure (1)..(427): unsure at all n locations
agcttatcattattganaatgatggctcctaatctcaagaatcttagagtcttagatngtgagtcttgccaactaggaaaacatgttaggtcatcatttcctcaaactgtacaaagatgtaactctgctttctctaccattcactctgatatttggggaccaagtagggttacatcttttgattttcggtattttgtaaccttcattgatgaattcttcacatgtacttgggtttatataatgaaagacagatctgaacttttgcctatattcatgttgttctttaatgagaatgagaatcaatttggcaaatcaattaagattttcaaaagtgataatgctaaagagtatntctctcatgatctctcttcctttttatcttcaaaaggtattttgcatcaatctacatgtcctcatacacctcaac

SEQ ID NO: 56437 - DNA, 248 bp, Glycine max
taaaacttgcctattattaaacgccgatactgatattagatattatacaacaatccatgtcgtagttagagggatattatttaaataattgaatagaatcatctttaataatacattatgacatcattttcttcaagaactgatgtataatgcgagaatactatgtcggaattagacaaccgtcttcaaaaggaatactataggacaatgtcatgggctctctctcactcatacttattatcaccttc

SEQ ID NO: 56438 - DNA, 287 bp, Glycine max
  unsure (1)..(287): unsure at all n locations
ttgcatgcaagcgtttcgatcagtctatgtaccctnggcggttcacagtgtngttcgtgtatttctattctcatttcatctacttgttataccccctttagacgtgcttaagccattttacttatgtcatttctcgcttaactgaaaaacaaaagaaatttccaccgaacgtttgaattgtattatgcgttaacttcgtgtaaaataaattcgtccgtctggtcgtgccctaatcacgtttgatattaaaaggaggaaaatatgatttagtgtccataatattcttt

SEQ ID NO: 56439 - DNA, 470 bp, Glycine max
  unsure (1)..(470): unsure at all n locations
ctactgatgtggcatggcggagccccttctgctagtctgtcctaccacaggcttaggcctttgttcttgctatccgagatactattccttatgtcagcttgcggaggtcaatagcctaaccaaaacttgccgcggcttcctctggtgcttaccaagctggctctgtagctggtgatgttgcccaaacccattctaagctcgtagccgtaccccaacattaccctggccaccatcattgtcgtatcagacaacaaaagctgtccagacagggaatctacgaatgcaatgcttactaccttcaacgataggaaatccatttccaatgacttctgcgcggcttcacatatgggcgtgacgaaaggaacttacccagacgtgtttctcacccgatctattacgcaatgtcctncactattaacttcaactattggtggtagcgatacggaacgactcccactgagtggaacccg

SEQ ID NO: 56440 - DNA, 294 bp, Glycine max
  unsure (1)..(294): unsure at all n locations
tttcatgcaagcttctagccanatggacttaccttgaaataattctcttgatagcccttttgaccttggtgcctttcttgattgaagctcactacgagccttaggtgagacaccaggatatcaccatatccttaacgaatnttggagctttggaattggtttgggaataagtgcgaggggttgatgcttcataggacaatatgatctgttggctatgctacatgatggattttggaccctacctgatgcacattgcatattggctcaatcggtgacatgcagaatgagctgctg

SEQ ID NO: 56441 - DNA, 449 bp, Glycine max
  unsure (1)..(449): unsure at all n locations
tatgcacggaatatgtaattatgaaatagactttctcgaagatacaccatttcctagttaaccatgcattaagtaccatgttcaattattttgtttttaagtgaaacgggtttatgatcccaacatggttggctcgtggtgcctaacacatgaaactaagaatgtagtgtgaatgttcacgctccccccttttttgtttttgttttgtagaggaaaacgcaaggatgagcaaacatgaaaacaaatggtatgcaattttgcagaccaaaaagtntgttgaacgcatatgcatgatgatgccatgaccatgcaaaatgtgaggctggaatatgataacggacaaatgcacgatatgtccattatgatgttatgaagagatgcttatgcgatgcatgatatgaatgcattttacggacacgagagcccggaaaattatctcttcttacttg

SEQ ID NO: 56442 - DNA, 54 bp, Glycine max
tgtgtctatctggactagtgtcaagctgggctgtgactcctttaattatatggg

SEQ ID NO: 56443 - DNA, 421 bp, Glycine max
  unsure (1)..(421): unsure at all n locations
atagatccttcacagagatacaacanatatattatacaatggtgaaggttccaattttaaccttctaatatatcctttgtttatatatagtcgagacacaattggtccccataacaatatgcaacacaaacattgcttatgactnatttaacttaaaacttgtcattctaacaatctaactcactaattacaaactctgattaatataaagtaaaaattacaaacataaaaactagctaaatgttgcagaagatgcaacaactagaaatgatactatccacaatgcttcccttgactactttaagcttcctactatgcctgttccacaggtgcactgcaaagctttctttgcgaatttgctccattttattgatcaaccatttggaactaatctcatctctaaacaaactcctaatccctc

SEQ ID NO: 56444 - DNA, 429 bp, Glycine max
  unsure (1)..(429): unsure at all n locations
aacctacctatntcctcagaagatgaanatttgatcacaatagtgtactttctgattgagaggcatatntgccttctactacaagatttctatacgagaaaaactagataagtggactgctttattttatcataatgaccagttggtgaaagatgcatttaattccctaacatacatttttctctctctaaagacaaaacacagattttacatgttctcaatagatgctgttgggagcacgcctataaataccaaagtcctctatgaccaagatagaattgcagaatcttgtaatcttctagctaccttatgctcaaaattcttcgagtgttgtaagttgtatggatatcaaagttctaggaattacactttgtacatctttcttatacatatgatatannatcaataatctttttattttctttatct

SEQ ID NO: 56445 - DNA, 411 bp, Glycine max
  unsure (1)..(411): unsure at all n locations
gtcttcctctaccccttttaattgcagaggagtatcttccatttttctcattggagcctctattgacgttcttctcanatgacaaaaccaccttcagtgagtttctgtcatcctatcctcaataggtgggtagtgctactccgaaaattacattngtaatgtcaaaaggctgtagcacagagcaccatatggtaagtgttatcaataacatcacagaatgaaagaagttgttacactccttatgtggtcattctaacataaaagcatcatagttgaagtacattgaaattactccctgaanaacaaaatatatttgaaaatgtgtactgagcaaacaaaatattccttgaacctgattagtaatggcaattctttccattatttatggatcctcacagagaccctcccctt

SEQ ID NO: 56446 - DNA, 461 bp, Glycine max
  unsure (1)..(461): unsure at all n locations
ctgcaagcttangttgctcattgactccagatttctgtatataaacagagatctgtatggtgatctgcagaagaacatacaccacagactcttgcaacaggagcaaatttctgattcatggcaagctgggttactatgttgaccaaggcatcaagttttccttcaagctttttattttcaatagataaggatgaatctgtagccacctcatggactcctctaagaacaatagcatcatttcttgcactgaattgttgggagttggaagccatcttctcaatcaaattcctagcttcagcaggggtcatatcaccaagagctccaccactggcaaaatcaatgatactcctatcatgttgctaagtccctcatagaaatattgaagaaggagttgctcacaaatctggtggtggagacagcttgcacacaatntcttgaatctttccagtactcgtacaagc

SEQ ID NO: 56447 - DNA, 349 bp, Glycine max
ttccttgagaagattcttggagaagctagaggttagctacacatactactcttatagctaagctcacctccttgagatgagaaactagaactccactacacacacgccgtataatagctaagctcaccccatgccaaaatacgtgaagatacacatgaagtgcctaatacaaagactactcatgataccctgatatacaatgcttgaaccctatattacaagaatggccaaaatacaaggcccacaagaaggaaaaacctattttgatatttacaaagaagaatggacccaaccttgacccatgggatcagaaatctaccctgaggttcatgagaaccctaaggtcttc

SEQ ID NO: 56448 - DNA, 477 bp, Glycine max
  unsure (1)..(477): unsure at all n locations
tgcaagcttgttcaatggtaatagaggcaattagaatgttagacatgcatgtgtactntgtgagaagttaaccaactaattcatttgttgtgactctgttaaaaaaaataaaaattgtgaagaacggcttctctgccaacacaaccaactttagtcaattagggtgtgttgtttggagaaaaagaggataaaagaaagtagaaagaggacaagagtgatgagacatgtttgtctactgtacggtgtgcttccaaaatttttaaaagaaggcattagctaacgttttattttttaatttaattatagttattntaaactgctttttttttttatcanaatctgatattttaagccttaatttcccatggngtaagttttaanaaattacctaagagtgtgtgtggatatgaagaaaatttacattctaagaatntcaatacttcattgaattatttattttcaaatttatgtttgata

SEQ ID NO: 56449 - DNA, 473 bp, Glycine max
  unsure (1)..(473): unsure at all n locations
acacctctctaatagctaagttcacctccttgagatgagaagctagagcttatctacacacccnctataatagctaagctcacccatatgacaaaaaacaagaaaatacaaaaaaagtccctactacaaagactactcaaaatgccccgaaatacaaggctaaaaccctatactactagaatggccaaaatacaaggcccaaacgaaggaaaaacctattctaatatttacaaagataagcgagctcatacttagcccatgggctcgaaatctaccctaaggctcatgagaaccctagggccttcccttggatctctagcccaatctacttggagtcttctatccaatgcccttgcggngtaggattgcatcaccctcatatatttttcccaaggccaccaagtgtgtagaatgatcacgttgcacatacaatcccataatcggtataacaatagcaacatcttcttcccctg

SEQ ID NO: 56450 - DNA, 450 bp, Glycine max
  unsure (1)..(450): unsure at all n locations
gtgctagctacacccacaagagagtgtgttggataagattcttagagagagaacttcaatgattgaagagaatgagagagagagagagagagagagaaagtgacatggaaaattgaaggaagaaagggagagaagttgaactttgaagtgtgtctcacaagactctcattcatcaaaattaccacaagtgttacacatgcttctatttatagcctaggtangcttcttgagaagttagagcttagctacacacacccctctaatagttaagctcaactctttgagaagctagagcttagctagacacccnctctaatagctaagctcacctccttaagatgataagttagctacacacaaccctctaatatctaagctcaccccatgccacaatacatgaaaatacaaaaaagtccctactacanagactactcaaaatgccctaaatac

SEQ ID NO: 56451 - DNA, 424 bp, Glycine max
  unsure (1)..(424): unsure at all n locations
agcccatgtgcttgattcaatattgattcaagacttcaagatcaagcatcaagaatccaatccaagattcaagagaagaaatcaagaagcaacaagtcaagacttcatataggataaatattaaaagaatttttcaaaaaccaaatagcacagntttggtttacaaaagaattttctcaaattttctatggtaccagagtgattactctctggtaatcgattaccaattggcattaatcgattaccagtgaccagtttggttttcaaaatgttttcaaatgatttataattntccaaaatgattntcaaatagtgtaatcgattactatattagtaatcgattacaagtgaatctgaacgttggaattcaaatccaattgtgaagagtcacaacttttcatataatacattgtgtaatcgatta

SEQ ID NO: 56452 - DNA, 459 bp, Glycine max
  unsure (1)..(459): unsure at all n locations
agcttgatattgaacaacaganactcacgagaatctaaaatggtcataacatgtcacacggaagtccgattcaggtgcataatatatcgagacgctcgaaatagaacatcggaagctctcgagaaattccaatggtcataacttttcacacgaaactctgaatcaggcgcataatatatcgagaagctngaaattgaacaacggaagctctcgagaaactcaaatggtcataacttatcacacggatgtccgattcaggcgcataatatatcgagacgctcgaaattgaacaacgtatggtgtcgagaaattcaaatggtcataacttgtcacacggatgtccgattcaggcgcataatatatccagatgctcgaaatngaacatcggaagctctcgagaaattccaatggtcataacttttcacacagaagtccgattctagcgcatcacatatcgag

SEQ ID NO: 56453 - DNA, 321 bp, Glycine max
  unsure (1)..(321): unsure at all n locations
cgaatggtcataactnttcactcggatgtccgattcgcgggcataactcatctagatgctcgaaattgaacatcggaagctctcgagaaattcgaatggtcataacttttcacacggatgtcccaatttaggacataatatatcgagacactcgaaattgcacaacggaagcactcgagaaattcgaatggtcataacttttcacacggatgntccgaattgggacataatatatcgagacgctcgaaattgcgctacggaagcactcgagaaattcgaatggtcataacttttcacacggatgtctgattcgcggacata

SEQ ID NO: 56454 - DNA, 442 bp, Glycine max
  unsure (1)..(442): unsure at all n locations
agctngngctcttgcctcacatcaccgccttttggtttcatttctagctatcttatacttatcccaagtttcagaatttctacatctagaccactccttgaaacactccttttttactctaactntgctctgaacattntcattccaccaccacgattctttacccctaggtccaaaacctctagattcacccaacgtctctttagccactttaataatctcttatctcccannatttgacatccgcgtgaaaagttatgaccattcgaatttctcgagtacttccattgtgcaatttcgagcctctcgatatattacgtcccaaattcggacatccgtgtgaaaagttatgaccattcgaatntctcgagagctctccgttgtcaatttcgagcgtctagatgaagtatgtacgcgaatctgacatccgtgtgaaaagtat

SEQ ID NO: 56455 - DNA, 417 bp, Glycine max
  unsure (1)..(417): unsure at all n locations
tctcgatatattatgaaccttaatcggacttccgtgtgataagttatgaccatttgaatntcttgagggctttcgttgtgcaatttcgagcgtctcggtatattatgcgcctgaatcggacttccgtgtgacaagatatgacccattgagtttctcgagagcttccgttgttcaatttcgagcgtcatgatatattatgcacactgaatggacttccgtgtgacaagttatgaccatttgaatttctcgagagcattcgttgttcaatttcgagcgtctcgatatattatgcgcctgaatcggacgtccgtgtgacaagttatgaccatttgaatttctcgagagcatccggtgttcaattcagagcatctcgatatatgatgcgccagaattggacttncgtgtgacaagttatta

SEQ ID NO: 56456 - DNA, 264 bp, Glycine max
  unsure (1)..(264): unsure at all n locations
agctttgcgtggtaggatgtctatacagataaagaccagctnataaacatgcacgaagaactctctgtgtgagtagcaacataagagagagcgtcaagctgatgcactacggagagcaaggcatgaagatgtgcgtgatgcgatatatttacaagagataatgatgaatctcgactcgccttatgggcctcctctatgaacaatttacttattgtttgaaatgaagtgttgggagatgagaaccatattctcaatcatattcct

SEQ ID NO: 56457 - DNA, 353 bp, Glycine max
  unsure (1)..(353): unsure at all n locations
agctnggcactcggatgctgcgatggttagtgttagtgatgctcttgcgatcattagatcgaaagtttatctgtctcccaagctttggtattngagggttaatgtgatagaggcacangacctgatgccaactgataagggtagataccctgaggtatttgtgaaggctattctggggaatcaggccttgaggactataatctctcaaagtatgagtataaatccaatgtggaatgaggatttgatgtttgtggtggcagaacagttngaggagccgctgattntgagtgtggaggatagagttgcgcctaacaacgatgaaatgtggggaagtgtccattcctttgctgtat

SEQ ID NO: 56458 - DNA, 489 bp, Glycine max
  unsure (1)..(489): unsure at all n locations
tactcagctgaagaaatatttgatgatgccaaggaatntaagaattatttttatgatgccaaggaatttcaaagatcattccagatgaatttcaaggatgaagaaagcaagatgtcaagccaagcaaagatcttaagataagaattaagatagactcttagaanagtttttgaaaagcacaaatgattggccaagtgagtttctatcttaacaaaaacttttccaagcattntactctctggtaatcgattaccagaggttgtaatcgattaccagtggccacaaagctttctggaaatgttatcaaagttattttcaaagttttcaaagctataatcgattaccaaaactatgtaatcgattaccaatgctttaaaacgggtaaaaatgattntgtcatgtgtaatcgattactagagcttntgaacgttggacatttgaattntgaacaaaaataattgtgtaatcgattacgccaatgctgtaatc

SEQ ID NO: 56459 - DNA, 412 bp, Glycine max
  unsure (1)..(412): unsure at all n locations
agctnggtcattttaataaacaagtgaggtctgttgatgctgtgcactcctaacggaccgtctagcctattttctacccacccttatttataagtttgtttttaatcctatttataagttagtttactaaacatacccaaatatatgattgaactaattacaatatttgattcaaatttaaagtgaaaaaacgaattaactgaatcaaactaaattaattcgattcaaactctcaaataaatcctcttcaattaatgcaactaaaaagtgatccgtgttgttaccttctaccanacatcccaattctggaaatgtggccgttacgaatgtgatctcagtgatttgtattatataatggagccgagaccacaagctacgggtttaactatgcaagtcgctagagtccgaataa

SEQ ID NO: 56460 - DNA, 451 bp, Glycine max
  unsure (1)..(451): unsure at all n locations
cgatatgagctcactctgacgatgtagataaaaatggaagatttggcactgttaagctattgataaaaccttttatttattaataaacctggtccttaaagattcacaaaattgaaacatagacatctcaccatatcatgaagactaagtgagattagaaaccaagcagagcggctccaattgacgttggaaattaagataacattgcataggaatcaatctaagtcgttgcttaatttcattaatagaacccgttgacagcatgttccactcataatacaaaatggaacccattccctaattcaaacggcagtttatgaaccattatgtgacgtgagtctgctttatcgatttccttgctgctttacataggtaagctccatttcttacgctnttcacgcatgcctacagtttaaacaaaattaggcaaagggaatgaatgaatcaagtg

SEQ ID NO: 56461 - DNA, 387 bp, Glycine max
  unsure (1)..(387): unsure at all n locations
agctagtaatctttggttcgttgaagatatcttatcactntctntgcagtngtccaatgttctattcataaattactttgatatctctcaagcattcaaaccacaaaagctatgtcaggtcttggtcacacctacacatacataaattatcctacaacggaagcatatggaatgcttctcatttgttcacttctaagctcattattatgacattgattcaaaattgaatctattactattcacaataggtgccatgttgggtgaacaatctttcatctgaaaaatttctagaactttattaatataggctttttgagacaacctgagaatccctcgagataggtntctatggatctctatgctaatcacatattgtgactcacacat

SEQ ID NO: 56462 - DNA, 300 bp, Glycine max
  unsure (1)..(300): unsure at all n locations
ttagttgcaatccaaanattatntatatacttctcaattttttctctcagaacttanatcattattgtatatggtggtagagatttaactcttgctttctcacagggacttttaaattattacatctttaattataactttttataaggacatacagcanagggtacctctcataggtaatactatatagtttcatccanagaacgatgtcctctcataagacaaggtcctcttatgagaactctatggatgtaccacatctttagtacctttagagaatgatatgttctctcacaaaac

SEQ ID NO: 56463 - DNA, 345 bp, Glycine max
  unsure (1)..(345): unsure at all n locations
agcttagtanagctaggcactaacagaatntgctcatatgcatcaacattcaatttcgagcttctcgatatattacgggactcaatcatacatccgagtaanaagttattgtcgcttgaattggcttagagcttcaacattcaatttcgagcatctcgatatgtgacgggactgaatcagacatccgagtacaaagtcattgtcgtttgaatttgctcagagttacaacattcaattcgagcgtctcgatatgtacgggactcaatcagacatccgagaaaaagatatagtcgtttgaattggctcacagctcaacagttcatttgagcgtcctgattatgacgg

SEQ ID NO: 56464 - DNA, 459 bp, Glycine max
  unsure (1)..(459): unsure at all n locations
tctcggctcatgcggagaacgcctctagttcatcacccgtgcagcctaaggcacccacccagagggaagctccccaagttccaactccgaacgcgactcgaccggccggtaattccaacacgacaaggaacttccctccgaggccgttgccggaattcaccccgctcccaatgacgtacgaagatcttctaccatccctcatcgccaatcatttggccgtggtaactcccggaagggtcctcgaaccccctttcccgaagtggtatgaccctaatgcaacttgcaagtaccatgggggtgtcccggtgcattccgtcgaanaatgcttggcccttanatacaaggtccaacatttaatggatgctggatggctgactttccaagaggatcggcccaatgtgagaaccaacccgctcgccaatcatggaggaggagcagttaatgcagttgaatccgata

SEQ ID NO: 56465 - DNA, 455 bp, Glycine max
agtgtgtgagaaaacaccccagagcctcatgtgttaggacttgtacttggggacaccatgagactatcaaacccttctatgatgtgacagcaaactcctttggaagctttcccttatcacaatctctaatcacccacatgaaataacttccactatctcccaaaccccaagccaagtcctcaagttgctcctcattaagccctgccatgctcccaaaagagacatacacaactgacccttttggtttttcatcaagccatttgatgcaagcttctgagtttggattatacatgttaacaccatagtccttgtcatcttggagtcttttgtccaagtagatagatggcaggcatggtcctattggctttaatggcctaatcttcaccagccaatccacaacctacaataagattcatttcatatgtcgatcctcaattatatccaaccaaataact

SEQ ID NO: 56466 - DNA, 380 bp, Glycine max
  unsure (1)..(380): unsure at all n locations
tcgaaatcacagagcatatacagattaggactgcatacttggatgacattattaggactcatgtacagataatacaggtcaagatgatgataatgcctgngatcaagatggcaaacaagaatggcctttggaaacacttctaaactcaactctttcccatcttggttctcttcaaagaatagatatctccaatgcctaanaccaaatatcacttcaactttcggcagtgtaaagatactacctggtagctgaatcagccttttgcattgctccagggacaagagttcaagtccaacaagatttccaattgaaaatggcaatgtgcctatggctgtgttgctaaacatatttctcttattntctccatcttaaccaatact

SEQ ID NO: 56467 - DNA, 456 bp, Glycine max
  unsure (1)..(456): unsure at all n locations
aattgattaataatataaagatctatattctatccatacatacaaaagaaaaattaagctataaaagatgtatgagtcaaagataacgtgggtcaataaatattatattatactagtggaatgttctttgttcacatttcttattctttctgaaacagaaataaaatagcaagggaggaaggtgaatataaatatgacagaatgtacaattatatctatattcctatatatagcaataaaaggtcagtagtgcacattatcaaaacgatattgccatctcttttcattattactactaacttattagatttcttctaattaagtagaagaattatgaattttgtaaaagggtctatagtcatatcacaattgaattatntacaatatatattatatgatgctattaggagtagagataagtcggattattcaacaaaaactgatgacatgacatac

SEQ ID NO: 56468 - DNA, 461 bp, Glycine max
  unsure (1)..(461): unsure at all n locations
gcatctatgattgctaannattaattgatcatatggttaaaccttataattgataaaccgttntctctaattatgtttnttttcctccattgtctttgactaaacacccgaattcaatgaaagcaaaatcagtttaattgcttcttcattgacactcttaattctcatacgaacaagtcacccattggttggatatgaagagatgtaaattgaagtgccaaattgaattggtccatgctgattaataaagttntactatcttgatttttctgccaaatgtcaatattagattttcactgaaaatctatagctagaattttaaattttgttaatgtttntaaagaatgagtaatatgaaaccaaaaaagntataattcattctggttcctctttttccaaactattaaatcgaatcaattataacttttttataaactatgaaatggaatcaattactagta

SEQ ID NO: 56469 - DNA, 383 bp, Glycine max
  unsure (1)..(383): unsure at all n locations
cgtgagcaacctctagtctccatgttgctcatgtngctccctctatctcaacataccccatttctagtgtgattnttcgtatttcaattggtatcagagcatggcctattttaatgagtattcttacaaatatagaggaaagatcctaaagtcaaataaatatggaagaaggatactccataaacaagccacaattattcaaaggcgtcaaatatgactatgggaaggacatatgatagctcatttctagtccattcatatagaaccttgggacatcgtagaacttgacaactacgtaccattggatgatcaactgaatgaagttccataacctnttagcaaatgctcaaagacaatagttatagtgaactttaaagctcaaa

SEQ ID NO: 56470 - DNA, 494 bp, Glycine max
  unsure (1)..(494): unsure at all n locations
gctgcatgtccaattccatttgatgaagccaatntgtggaaaggccaaagtggacctgatctaaaacagataattcaacaacaatttagaaacatcaggtattacttcaaactagtggaagtggactgagctctgtctagctaaatattatccattaataacttgcagggctttgttgtggcttaatctcttgtaagcatgcatcatactgctaaaaaatgacaattgattaccaatgattcgtagtaatgcttacaaaaccatttttgtggaaggaatcatagtatatataggttggattctatctaaaatcccatcattgatatttttagtcctacagtatggnttttcttttcattttgagatttccacatactgatggatgctaaatnnnggttggttatctggactctttgattgctgatctaatctgaacataagacaactaaatgaccactccttttacttgntctccatttattattctattactg

SEQ ID NO: 56471 - DNA, 420 bp, Glycine max
  unsure (1)..(420): unsure at all n locations
agtaacgacaaaatanaatgccaatatcatttacattatttccacgctctgaaataaaccagaactaataataaaataaaaaggagcgacactaactcttcggaatcctggttccatgctaccagagataacaacaacaacaggtgttccactaccggtaacacacattaaccctttccacattacaagagtgaatgatgcaattaagcctgagacatgctgcaagagtaactagattcttagacatgatttgttaattaattaattaattcttatgttgaattgatgatagtgaaaaggaaggagaagagtggagcatactaccaacactgatgagttccgttagattttgtctgaattgcattggtttgataagttttgagacccaatccattgtggtatgttatcttgtctatgcat

SEQ ID NO: 56472 - DNA, 409 bp, Glycine max
tgaaacttcctgcttttattctttgaccacagagtggacttgtatatatgtcgcgggggtcaagagaccttgttgacgtcaggtggggtgctagttcccaaaaccaagcttgaccaatcccgacccaacccgggcatagtcggtcagtgagaacctgtgatgtacctaagcaggcgagctcctggcagtcaacagataaaaggaacaaagaccacaaagcaaggaggcttgtggtggctggccagctgtgaatcttgtgtgatatatgggttatggcctctggtaatcgattaccaagggtgggtaatcgattaccaagggtgggtaatcgattacaaggcttaaaaatgaagacaggaggctaagatggtctctggtaatcgattactaaggggtgtaatctattacc

SEQ ID NO: 56473 - DNA, 458 bp, Glycine max
  unsure (1)..(458): unsure at all n locations
agctntgagatggaaacaaggtgaacagagaaatgaggaacatacaaaacattctctataagaaaattacctaactgaatgtcaccaacaaaagatgcagtaacaaaactattgttaggaagtcgaacatgaataggtttgatcttcttaagagatgaaaaagaagatttatcacgacatatgtggtttgtggcaccactatccagaatccaaagagaagagacaatacctgactgattaaccactaaatgttgaatgtgattaacataagtagaagagtccttggttggctgaagaagggctatgatggcattgtactgatctttggacaaacaaaactggtctcggttggaactatcctccaaggtaccatgttgtgaagctgcatcaaaatatgcttcaaccaagctagtagaagatttgaaatntgaagaacctnctttaccacgacttctata

SEQ ID NO: 56474 - DNA, 391 bp, Glycine max
tgtgcaccagcaccatcttactggctcatcactttgcttgtgcttgttgcttcactccttccatactatcgctacgcttcgatccaaatgccgtttttccccacgttccatcaaatgatacagtggatacgaaatgatggccaaacaactgatccagaatatgttaatattgtgagacaaagatcaataagacacacaacggttgggttcacggctcggtttgaagcatcacatagttcaggagcatccaagagtattcaagtctgaaaacaatgttagcaattaagcaatgctttttctgtttctttgttgtatttaaagttctttggtctgaacatacgcgtaaatttggtataggtaatcaatcacgtacttcggattgtatatattt

SEQ ID NO: 56475 - DNA, 474 bp, Glycine max
  unsure (1)..(474): unsure at all n locations
agcttgaattggagttntgtaggtctgaagatcattgttgcagacatactaactaagccattgaagtctatcaaagttaaaagaattgagagacaagttangagtgacatccttgactaatctgaattaagganggatgttgatgtatgctgtaattcagttagttagttagtagttaggagttaattagttggacagctatgagggtntgtgtagttacatatgcagtgtgtataanaataatagtgatcatgaatgagaaatatgagagtgcaaaagtttaattcagaattttaagttccctctattttctcaatcaattatttcatcttctcttattctctaacatagagtgagtgagtgcataatgtgagtgtgtgtgaagagcttcttttgtccaacaataattgcaattccatggatgctctttctgaaacctttcatactaagcttcatactgaagtgccacttcac

SEQ ID NO: 56476 - DNA, 441 bp, Glycine max
  unsure (1)..(441): unsure at all n locations
tgtcgtgctatcaccattctggtctatacccatttcaggctcatacttatcccttaacatgactcangccaccatcanggaggcacctgataaacgtggttgcaccggaggagcctccacataagcattgttcacaatttctagtgcttgaaaatatgtttccaatgactcttccgcaacttccatatagggtgtagaggatggacaactcactagtatatcttcttcacccgacactataaccagttgtccttcccccacaaacttcaatttctagtgcaacattgacgggaccaccccaacaaaatgaattcaaggccggcctagtaggcaactataggcaaggtttatgtccattactangaaagttatatggcacgtgtgtggcccaatntgaattgggagatcgatctctcctctcacgtcacgtcgactaccatc

SEQ ID NO: 56477 - DNA, 466 bp, Glycine max
  unsure (1)..(466): unsure at all n locations
agctnntttcaatcttctgtataggtgatgagcttttagaaaacggcgatgtctagtgtacactgtttttctaccatgtttcagttgtatgtagcttgtgtcttcttcacagatggngcatgcatgatgacccttaacactgtaatcgctgagattcccatatgctggaaagtcattaatggttcaaaacaacattgcacgcatttgaanagtctccttgcgaaacccatcaaacactatcagctggatgacagaccattccatcagattntctcccatttgcatgccaggtaagatcttttgcgtcgtcctcattagcaaataaacgcttgaaccttggaatgatgggaagataccacaacaccttcgctggagggcccttctttgagttttcattagaactgcagtcctcatcatccttcaccttgtaccgtgacgccccacacctanggcatttagacatttc

SEQ ID NO: 56478 - DNA, 449 bp, Glycine max
  unsure (1)..(449): unsure at all n locations
tctaatcctgagggttatggtgcttncttggngatttcaatatcattagaagccaggatgaaagaacaggctcatctcanaggagtgtgggcacatataatggttttggtttcaatgattggatatcagacatggaaattcaggaaattaaaagctttggtagcagatttacttggtgtaggccaaatggatatgtgaggagtangctcgatagatgcttggtttcagaacagtggctacttaaatggcctgattcttcacaacaagtactccacatggattattcttatcactgtccaattattttgaaaacagatctggtggattggggccctaagccatttagggtgatggactgttggcttaaaaataaagagtatcaaagactggttaaagaagtgtggtgtggtgaccaacaacttggatgggggagtattgtgcttaaaaac

SEQ ID NO: 56479 - DNA, 345 bp, Glycine max
tagaccggatcttaagtgactcgggcatgcagctgaattggcattggaggtcgactttacttatactcttcacatgcatgtgagtcctagtatatatatttcctccccacccttattctatatgaacattaataaactgcgctgcatttctatagcaaggagataacatgatctggggttgatttgagaaactacctgctgattgccactagattgatctgttcgtgcgcttattctttttcttacatggcaacagttggatcatacaatacttgacatctactctttataaatagacagtatgaaagcatggtctataactgtgaggacagtgcttaactactc

SEQ ID NO: 56480 - DNA, 416 bp, Glycine max
  unsure (1)..(416): unsure at all n locations
tattcttntaatgaatttaaccaatataanattgtttaacatattgtgtatgttattaacacttctattaagattatatattttcttaattaatcatatgagaatctttaattagaaactactttgtgcgatgcacatattagagtgatacaaatgttagtttcagagcagtaaagataatacatatttttaaataagaatgtagaacaaaaactataaaaaattgttttaacaacaatacaatctaaaaataaagaaatattttcttgaataaacatccataaaatcttagaatttttagacatgttctcatttcaatgataaaaaaagaagacctgttctcattantttctaaccaaatttttagaccatactggaatgcattataaaaaaagtaatgtgaataaatacatgtc

SEQ ID NO: 56481 - DNA, 234 bp, Glycine max
taaataggtgccataagtgttgttagaacaatatatcgaggctgaataaaccgacagtttctctacgatcaatgctctcttataaccctaattcttgaaatccccaacaaaaccataatttctttgattagccaggccacattacaagccgataaaagtccctagtgatccaccaagtgtaagctggataactttaactgagatgaagtgtcaaactgggaacattaattgcat

SEQ ID NO: 56482 - DNA, 466 bp, Glycine max
  unsure (1)..(466): unsure at all n locations
gtttaagtganaggatgtgactcttcacanttgaatttgaatttcatcgttcatngacactggtaatcgattaccaaaacattgtaatcgattacagccctttgaaaataattggaacgttgtaaattcagtttgaaaactttttcaaactcattntgctactagtaatcgattacaacaatatggtattgataccagagagaaaaactctttggaaaaggttttggcaaaaattcatgtgttattcaaagttttgaaaaactttntaatacttatcttgattgagtcttttctttattcttgaatcttgagtcttgaatcttgatcttgattcttgagatcttgaaccttgaatcttgattcttgattcttgattctaggctctcttcttgagtcttgaattcttcttgaatcttttcttgaactcttgactcgttcttgattcacttgagatgttctttgattc

SEQ ID NO: 56483 - DNA, 323 bp, Glycine max
atccttaagtcacctgttgcatgcagcttctcacgtgataatacattcttgcttatattgacgatgaagtgtgggcgtgatctgtttggtgtccccacatgcactaaactatgcaatgcatgttatctgggtgtttttatagacagtacctacacaattaatcaggtgcagacctcccctacttgactttgttggagtgacaccacccgcgatgacattttctgctaggtttgtatatctggaggctcgacgcgttaaaatattgatggtgcttggaacattttgagtcttttttaaacacgaacgcctcctttcgttattgc

SEQ ID NO: 56484 - DNA, 471 bp, Glycine max
  unsure (1)..(471): unsure at all n locations
cactatacatactcaagcttncagtcattgattttgatattgacaaagaaagagcattgaattttatcgacagatnggatgnggtcagataattcgcttgtttgcctgatttcctttgaaatgaatggaaaggagcaataatacatgtagacatagcagtgggttttctttctgtgcatgtgccacattcttgctgcaagcgttgaatgccattgttttgcggcaccttnggtactttcgattcccattggcttcattgagggtgctttgtttcggtgaagttccacttccaggtgaagtagataactttatatagcaccaaggtaactgttgagacgatagccatctatgcttgtttcaatntgactgcaaactgcaaatcccacttattataggagcggagtggactatgtcattctcgagtgtatatataacgaggtaatgacgatatagagcccattattttgcaca

SEQ ID NO: 56485 - DNA, 290 bp, Glycine max
  unsure (1)..(290): unsure at all n locations
agctntatttctagaatgtttagctgcttgaatgtgtntcagaaataagatgttggtcgaactcccctggttgataaaagttttccgtactatgaaattagtgatttcaacaattattacgatcgggtcatcctacactggtttattactttaaagttagctgatgtgaaggtgattggtggcattctatgagctttatgcagggagactatgtaatatgattgaccaatctaaagatgtctcttgttggcaatatcgatgcaccttctcttgcgaatcgtctgcaatta

SEQ ID NO: 56486 - DNA, 276 bp, Glycine max
  unsure (1)..(276): unsure at all n locations
ggccacccagctcgcccaggcgagcaagggtgcttcctccagattcacagacttctggaggaatcttctggagggcccaagtgggtctggttactatttgcacccccatttntactaagtacatccccctgccttgtttttagtgattctttgttcgtaaaggtacggaaacttacgaatttcgtaacgatacttgttttctttccataatngtacggaaaccttgcggattacataaccatcccctttttgacttacgtgtgtcacggaacctta

SEQ ID NO: 56487 - DNA, 285 bp, Glycine max
agcttgagggcacaatctccatcatatggttagcaattattgcattagcttctatgccaaattcaatacaccacttaatccattctttccaaaccgatgaaagaggtcctgccattaaacatgtacatgatacattaccacaccatatagtacaaaaagctacatcatatactggacaaaatcatatttgacaaattgcatacctaaagatacatccctgttatatatcccggaccagtactagtcatactcaaaacaccactcttaagaccgtctgtcctaaca

SEQ ID NO: 56488 - DNA, 473 bp, Glycine max
  unsure (1)..(473): unsure at all n locations
tgaggaaccgcagcaggttgctgtgcaagggctgcagccacatgttgtgcatagntntgttgaggaaccgccggctgaaattcagacaaaagaatcaacattagacgaaatttgcaattgtttatgtttatcataatatatataaacaaaaaattaagaaagtcacgacgttaagtaagtcagatcaacagagaagtattgttgaaatgagagttcgtgcagttaaactgctgcgactcaactcacgaaaggtgcccactggtttgctaataaaacaactgcgtgcatgtttgggataccgttcataccccctcaaactcagtttggccacagcaaccctgtataacttgtcagttcaggcgctttggaattcatgcctaccagccttggatggcaaagcanacacactacatcttntttccctatggaactctcatatttcccttattntntcactntcccttcttcaatat

SEQ ID NO: 56489 - DNA, 463 bp, Glycine max
  unsure (1)..(463): unsure at all n locations
tgcagcatgcnagctntgcagcatcaaacaattgatgtntacatcttgttcttattacatgcacctttttctcttcgttatgggcgtgggcgggtttagcaaaatctgaaacaaaatagaaactttcttcacaccaagtctttcatacatgcaccccttttttgttctgggcctagaatgaaataaaatgaacacaactatctacaccacttttttctaacacatgcacctttttcattttggacacaatctatttatttcgtaaaatttaaaacaaaataaaatgaatggttacaccttcttctttatatgtgcatttctgtcacttagaatggtgactagactcaccatgtcagtactctatcaattgactaattccaaatgaatcctttgactatgaagatcacttctttcttagcacacttaaattaaagggaacgtcttcatgaccaaagtgtgggat

SEQ ID NO: 56490 - DNA, 483 bp, Glycine max
  unsure (1)..(483): unsure at all n locations
gtgatcctctcagtcacctgcngcatgcaagctntggagtataaaagttcccactcagacatctagaataatataatttagtcaaatntaatggactgaagagaagactcaaaatattactacttaccagatgtcattataattagcaagaacataaattgttaccagatatatatcaatataaagttattaagaaaagacatatgatgagtctaggagaaagtacatttgaacttattgacaaagcagtatcaatatcctgaattaacaacctagcttcctctgcatagtcctgcatcaacataagttaaccaaaaaaatatggctgaaaactgcaactaccaaagggattattgacagtttgttaagagaagcaccttcaatttatgataaagaggttcattgcgtcgtgcaggagtaaatttcagtaactcatcaatgaattctaaattaactntcttgacattagagtcccgatgacac

SEQ ID NO: 56491 - DNA, 428 bp, Glycine max
  unsure (1)..(428): unsure at all n locations
cagaattatagtttgaatntaataagtgcctaactctcggttttatgaactggtaggtggtggagatatantttatgctggcttgaatatcanttttntgtacttatgtcaacttcctattgatcagatgtgtggcacatatgtcaactcctgttatatgttctgtaacagacattttcagcttattaaatattgttggcgggccatacgttcgtgagatggtggacttgtagtttgagtgaactgtttttctganaatggagtatctacttgtaataatcttgcttgtatactctctntaattgtttataattatgctaatgtaggaattattntcaactcttttccctatctgttntttttgcaaacctattattttccattcattttaattatactcaacactattcttgctttgtgatctctct

SEQ ID NO: 56492 - DNA, 415 bp, Glycine max
  unsure (1)..(415): unsure at all n locations
ttcacacgacaataactttctactcggatgtctgattgtgtcccgcaatatatcgagtcgctcgatattgaataccgaagcgctgagcaaattcaaacgacaataactttctactcggatgtctgattgagtcccgtattatatcgaaaagctctcaattgaatgttgaagcttctatcacattcaaacgacgataactttctactccgatgtctgattgagtcccgtaatatatcgaaaagctcgaaagtgaatgttaaagctctgagcaaattcaaacaacaataactcttactcggatgtctgattgagtcccgtantatatctagatgctcgatatggaataccgaagctctgagcaaatccaacgacaataacttttactccgatgtctgattgagtcccgtaatatatc

SEQ ID NO: 56493 - DNA, 393 bp, Glycine max
  unsure (1)..(393): unsure at all n locations
tctacattcaatntcgagctgttcgatatattacgggactctatcggacattcgagtaaattgttatggagatagaatttgctcagggcttccgtattccatttcgagcgtctcgatatattacgggactcaatcggacatccgagtataaagttattggtgtttgaatttgctcagagcttcagtattccatttcgagcatctcgatatattacgggactcaatcaaacatccgagtaaaaagttattgtagtttcaatttgctcagggcttctgtattccatttcgagcgtctcgatgtattacgggactcaatcagacatcccgagtaaaagttattgtcgttagaaattgctcagagcttctacattccatttcgagcttttcgatata

SEQ ID NO: 56494 - DNA, 468 bp, Glycine max
  unsure (1)..(468): unsure at all n locations
agctngagctgcagatgtccagtgctaggtttgacatccgctcacttagccgacgttttaaatacaaatcactttttttttaacatagacttggagtagcatgagagaccactccactgagcgagggctgcagatcaaaaaagctgccactctcgctgggatctgggctggcttaactaagatgatacatcttaagtacaaaggagcatgcgcttagctcgataggactcacttatcactcacattggcgcaaggagatcaccttacctgccatgattggcgcttagcttcatgaacctcacttatagccgtaaagaattgagcttggcggcagtgcctaatgcttatccaatgataaattgtcacttcgcgagccggctgaggcttacctgaattcagatcgaatagaagatggcttatctcatccttggccagcttagcgggctagatcagcctcagatgcatggg

SEQ ID NO: 56495 - DNA, 293 bp, Glycine max
cgaggtacttacccgttgaagatcgaagaacgatgattaacgaatgatgaacgtcgaagaacggtgaaacctttgcgagattcctcacggaaaacgttacggaaacgtttcggaagcgcctcggcttagattttcttcacggaaacaatttttccaagcaatttccaaagagagagaagtgcctaaagggctgggatccccttcttcttcatttcctcccctatttatagcaaaataggggaggtggttgccgcccagctcgcccaggcgagctcagctcgcccaggcgagca

SEQ ID NO: 56496 - DNA, 462 bp, Glycine max
ctttcttaacgtggctcatttgactactcagtacatggatgtcacgagtctattggcatagaatatcaaatcttttccacgtaagctggttgtacaaagtttgtttgttcatacaagcaatgtgattgggggagattttgtttgctccgcaaggtaaacagagccagccagtttttcattaaacaggaatgatagtcttcaactgcagaaaagtagtgcgggattccactacacattcataggctgttagggagggttgtgcaagtgaagaaggcctacggcattcaataaaagaagacagactttcaggggtgaaattctgataccaatgacagatgtcgtaccggatgtcacgacatcacgcttcagatcatgcagattatatttgactgtatgaacagattaaataagtaaataacacaagagaattgtaacccagttcggtgcaacgcacctacatct

SEQ ID NO: 56497 - DNA, 252 bp, Glycine max
  unsure (1)..(252): unsure at all n locations
agacatcatggaaagcatcaagatagttgcaattgttcacatagatngtgaaggcctcanagaacaccttcattgaaaggtaatatgtattacactatatttattgatgacttcaccagaatgtgttggatttttttcttcaagttcaaatcagaggtggctgaaattttttggaagttcaaagtcaaggtagagaatgaaaacggtctcaagattcaaattttgaggtctgacaatggcaccgagtacaca

SEQ ID NO: 56498 - DNA, 458 bp, Glycine max
  unsure (1)..(458): unsure at all n locations
gctagtgaggcaccacaatgttagtgtatctctccaagtttcttgggatgtgaatctggatctatcannattgtgttgggtaggtgtagagggtgttttcctcttctaagatgccatttgctaaatataagacaaacacaagagattaatacatgttattttcacaaaaacagaaaaataaaactgaaaatttgactgggcgcatagcacagcatgctgagcttagcgcaccttattaacttttactcaagcgctaaacgcagcaagctgacgcttagctcgaagacacagaaaacatttttctgtagaataggcttagcacacaactgagcttagcctaagtctacaattntcaaaaccacaaagaattagagcttagcgtagcatgctagcacttagctcaacctcaacaaacagacactcaagcttagcacacagggcacgcttagcttgactac

SEQ ID NO: 56499 - DNA, 341 bp, Glycine max
  unsure (1)..(341): unsure at all n locations
tagtgagagacatnttttctcactcaatttcagcttctactattctataatagagtggntggcttanattatcatttgtggcaagtgtgataccaaatgaaattcacattcattggtgcatcagaaagtccctgcttagaagcgtcattcactctatgtaggttcatgggaagatacatcttgtgttagagtactgtaaaggaggagatctttccttgtacatccaacgccacggaaaggtaccagaggcaactgccaaacattntatgctgcagctgggtatgtttcaactgtatacagatatgctntcttcanatgttctagtattaaatgactactct

SEQ ID NO: 56500 - DNA, 189 bp, Glycine max
tccttgagtggcttctttgagaagctaaagtcttaactacctatacccctctaataaataactaacctccttgaaaataaaacatgaataaaatagcacaacaaataaaatcaaacatcaattataattactaataatatttcagggtgttacacccttgctcctacatatactccagtgcgatgagga

SEQ ID NO: 56501 - DNA, 457 bp, Glycine max
  unsure (1)..(457): unsure at all n locations
agctaacagacttatatatagttagagcttgttctttctatctaaaaaggcattttaaaaaacttgagcttgacttttacagtaaacaagtcgagccgagccttacataggccgagccaaagaccctccacaagctgctcggctcatttccacccctaatcattggtcacattagaactttgccccaaacacagtttgacttatgtaattgctgatacacttgacacagactttgcttgtaagactgctctctccgtctattcgttaataaacaaaatatgcatatacactatgtatatttatatntcatttaccatatatatgtgattactagagtgtacgatcatgccttgcgagggtaaatattatttatgaatgaatgttctataaaacattgtgacatataaatatttggtaaggttatattaaaactattataattaaatatatttattta

SEQ ID NO: 56502 - DNA, 365 bp, Glycine max
  unsure (1)..(365): unsure at all n locations
taggtntagtgtcaggtttgataatggtttatatatgattctcactgccaagtaccatttcaaggtgttctaaccaaaatccaaaactagcacacgttgtagaagcaagcttcattgcttcatgatgatgaatcaagagtgactctaggtgtcttgatgataacaaaatgatgaccagaagcccatgagaatgatttcaagattgagtcatgaacaattcaagaatcaagagaagtttcaagttttcaagaatcaagaatcaagaataatctagaacaagattcaagactcaagattcaagaatcaagagcagactcactcaagataagtactgaaagagttttcaaaacattgagtagcacatg

SEQ ID NO: 56503 - DNA, 425 bp, Glycine max
cctctgtcctccgatcatttgcaggtatgtggaccttactgtgatgctcctgggggaaggaacgattctgtcactgcacaacttgatcttgccaacaccgatatttcctctccagatgagagccttctgtctcatcattgccaagtttctataccaacgactatctgtcacggatatgagagcccttgcgggtatattaatgaataaaactctgaaggtgtagatatgtgtctaattctcacacatatgacaaattttattatagtccttcaaaaagtctttgtcactcttacccctatagattatctattttaaatagatctatcatccttaacgatgataagacatgcgtttagatatgcacattaacattcttctaagatccgatatacttacacatatgtcctgtcatttgtcaatgatga

SEQ ID NO: 56504 - DNA, 409 bp, Glycine max
  unsure (1)..(409): unsure at all n locations
tgtaggattatggggtacccatcacatgtggtactaggtggtggtcgggcgatggtgcacacaaattttccacatccacaaatcgtgcataaacccaccatcccctgttgcccacctccaattgagctcacgtactcccacgtagcccatatcctcgtttctctcaacaccgggtccccatcaatcctcccaagcttccccaacatccaagtaattcaacattcaaacaacacaaactatcacagccaagaaaatagggcaaaggcagaaaactctgcccaaaacaccaaccaaaatcacagcttttctcacttaaagaccccagtaacagttccttcgttccagttcgttaaccgttggatcgactcgaaaattcactggaagtcntagtacataatcctacatttga

SEQ ID NO: 56505 - DNA, 340 bp, Glycine max
  unsure (1)..(340): unsure at all n locations
caatcactatgggaagctcacattacaagacaagaacgcttccatgggcttaagctgatcactcttggaggagtattattattgagctgattagataatagataatctagcatactcatatatcttaccctactttttataataagatttattttcgttcttaatcgcattttgagcctatgtttgaactacgaatggactactatccttctatttatatttttgacgtcttataataattagattagatattgggccgtgggcttanattatagctattagtaagagttatatatagacttagttaacaccttgtgagacagagctccacgattaataa

SEQ ID NO: 56506 - DNA, 322 bp, Glycine max
  unsure (1)..(322): unsure at all n locations
tcttagctattgacttttgcctctttcctcacatgatgatgataaaaggcaataaagaaatcgccatttctctttctttacttgtgaatggctcttgtcaaaattattactatctctttatgacatctacccatatgaagaaatccatgggcattagctcataatttcatatcctttctgtgctagtgattcaagcaaatctaacgctgtaggttcaagtcctataatacttgcaacacttacgatcanagttgcatgtgtagtcttacactgtctctataaattatgtgactatatnttgcctctaataactcaagtaaca

SEQ ID NO: 56507 - DNA, 434 bp, Glycine max
  unsure (1)..(434): unsure at all n locations
cgatggtgcacaacaagtttttncacatncacaatgcgcgcataaacccaccatcccctggtgcccaccttcatctgagctcacgtactcccacgtagcccatatnctcgtttctcccaacaccgggtccccatcaatccttcccaagcttcacaacatccaagcaaaacaacattcaaacagcacaagctatcacagccaagcaaaacagagcaaaggcagaaaactctgccaaaacaccacccanatcacagcttttctcacttaaagaccccagtaacaattccttcgatccaagtcactaaccgttggatcgactccaaaattgtactggaagtctctagtacttaagcctacatntttgaccgtgggatctactagcaaacatccagaactcattctacattactctttccacaaccagcaaatacatg

SEQ ID NO: 56508 - DNA, 454 bp, Glycine max
  unsure (1)..(454): unsure at all n locations
cagctgctgggggctctatggggctgatcttgagcttattgatgtccttcaatggngattttccaccatgggatgcagcgaaagacaaaggagaagaggtgagaggaggcgccatccactagggaataagccatggaagaagcagcttcaccaccaagaatgtgccttggataagaagcttggagattatgcttcaatggaggaaaagaaagggagaggaggagcatgaaattgaagtaggaaaagagggagagaagttaaactttgagttgtgtcttacaagactctcattcatcaaagttacgacaagtgttacacatacttttatttatagcctaggtagcttccttgagaaacttccttgagaagcttccttgaaaagctttcttgagaaacttccttgagaagctagagcttagctacacacactcctctaataactatgctcaccctc

SEQ ID NO: 56509 - DNA, 479 bp, Glycine max
  unsure (1)..(479): unsure at all n locations
agcttgcccccaagccacacccaacagaatacactgacctgtaaattntcaaggaaggacaacataatgaacattcaaatattatcacactaagaatgaagctagatataagaatcaacaatgtttgaccattatcatgaatgttgaggttgaggatccagacttctggtccacatacatgtaacaaatganaattaaaaaaagggaagatttctttattagttaaagaatacatcataatgaaaagaaattgtcttttcccttcagtacctttgtatgcttaaagaatgagcatgcaaaacttccttaatttgtataatataactaccaattagagttgctctttataaaaaaaatagcaataggaagaaaaggagaatatagctggagctcacattccactgggttgacaagccagacaaagcagatagcaataatgtaatggaaaccaagagcttatttcacattataacatatct

SEQ ID NO: 56510 - DNA, 346 bp, Glycine max
  unsure (1)..(346): unsure at all n locations
tctacttatgtggcagggcgggcttccctcactntcttgtctccaacgcgagctttgaccactgctcttcttcccgcgatgcttcttttcatatccgcctgagtgggcttataacctaaaccataccttccacgatttcctttggcatttatcaggctagttatgccgccgntgtcttttgctaaacccattccgggttcgtaaccggtccccaacataactcgggccatcattactgctgcatcggacaggcaaggcttgccagagaaggggtccacagaggaaatgcttaccacctcataagactgganagcagtttctaacgattcctctgcggcttccacat

SEQ ID NO: 56511 - DNA, 450 bp, Glycine max
cttcagtcacctgcggcatgcaagcttggagagggtgcttcaatggaggaaattttgagggagttatagagagaggggggagcatgaaattgaactttgagttgtgtctcacaagactcccattcatcaaagttacaacaagtgttacacatgcttctatttatagactacgtagcttccttgagaagctttcttgagaaaacttccttgagaagctttcttgagacaacttccttgagaagcttctgtgagaaaacaacacacactcatctaaaaactacgctcacctccttgagaagctagagcttatctacacatacccctctaataactaagctcacctccgtgagaagagaaactagagcgtagcttcacaccgctatgatagctaagctcaccccatgacaaaatacatggtaatacaataaaaagttcctactacacagacta

SEQ ID NO: 56512 - DNA, 287 bp, Glycine max
  unsure (1)..(287): unsure at all n locations
gcacaacaagttttcatgtggccgtcctaaaataatgactggnttaataataataatttaaataaccaaaaccatggtaatttttttttctcttccgtttctttttcatttctttctcttttcaccataactaggtttagaagggaaatcctcactataaagtcctgaatggccagttcacaactttactcggagtcatttctttcttaccgctcataattctctaaattattntgctgtttcaaaaggaagaatataccagccattactttangtcgtcacgtgaa

SEQ ID NO: 56513 - DNA, 460 bp, Glycine max
  unsure (1)..(460): unsure at all n locations
tgcaagctntatttaaaaaaattaggttatataattttttactacattaggttatataatttcgtttgacaatnttataaccaaataatctattcattctaaagttgaagattaaatttattggaacattgatagatttaaaaataaattaataaaaaatgacaaagttaagttaccatgaaagttgacaaataaaatataaattaattgaaaatagaagtaataagtggtcgaactcacagtacattactgcttgtgggcattaacattgttaaattatcaccattcaataacgaattaagcaactataatttgnctttnaaatatttatatattatttgataagttctacatgcattacaattaagtttataatcttttactatctatcaaagatgctatttgattatgatattcaacctttaaactttaatttagtacccatatattcttttttata

SEQ ID NO: 56514 - DNA, 369 bp, Glycine max
  unsure (1)..(369): unsure at all n locations
ccttcactttcttgtctccaacgcgatctctgaccactggtcttcctcccgcgatgcttcttttcatgtccgcctgagtgggcttatagcctaaaccatacttcccacgatttccttgggttnttatcaggctagttatgccgccattgtctttgcctaaacccatcccgggttcataaccgttccccaacataactcgggccatcattaccgccgcatcggacagacaaggttgcccaaagagggagtccacggaggaaatgctgaccacctcaaaagactggaaagcggtttctaacgattcttctgcggcttccacataaggcatggaggatgggcagcttaccaagatatcttcctcgcctgaca

SEQ ID NO: 56515 - DNA, 396 bp, Glycine max
  unsure (1)..(396): unsure at all n locations
tgcacttcttgcgaaaaattattgatttcacaaggtaataaaaaatgcgcatgtcactgaaaaatnacgcagtcctatttcacgaccggagtcagctattgagttctctattcattccctgaatgaaatatgcatgaagtcggctagcacatatttttggccgaggagggctaatgttctcctggccgaataaaagggaacatgccattttcggccgaatcaaaacgttggttgagctcgcacaaaaaaacctacccgacctacattgtacattatttatgcaacacctaaacaagacaacttcctctgccgcataaaaaaactttgtaagcctacaagcatattttaaaacaatagcgcaatgtcacatgaatgatatcaatcgggcctatttca

SEQ ID NO: 56516 - DNA, 453 bp, Glycine max
  unsure (1)..(453): unsure at all n locations
agctggtccttggnttaaacatgattggtactatganttgngactcgcaggattcaatttgggcaaaattggatgagggaaagagtggttntcgaaatctgcactttatgcagaattttgctgttgaaatgtgcagtagaattttgtataagtgcaaaaaaatgcttgtgtatggctggttgtgaaaagggtagtacatatggtgttctggacatttgctagcagatcccaacggtcaaaatgtagacttatgtactagagacttccggtaaaattttcgagtcgatccaacggttaacgaatcggaacgaaagaaatgttactggggtatttgcatgtgaaaagctgtgaagttgagttgtattttgggcagagatttttgcctttgccctgttttgcttgattntgttaagccatgatgattggatgtggaattactggatgntgtggaac

SEQ ID NO: 56517 - DNA, 307 bp, Glycine max
gtagcttcaacgcattttatcatgcttatggctattaatccaccatgggtttcgaattatgacaatatgaaatttatgatttgcttgtgagagcttttgctcgaatttggggctgcccatgtttgatactctacatataggccgcgtggaagacaccttgccatagtgcgtatacataggtaaatataaggagcatgagattcctaacatagtgtgaatgattggcttcctacatgaacgtatgatagtgtggaacgccttttgcatgcatcgatgtgcatactgtagatagcttgcctatatgtgt

SEQ ID NO: 56518 - DNA, 461 bp, Glycine max
  unsure (1)..(461): unsure at all n locations
agcttgagctctcccttntctcttcacattcttgttnttattacccattctttctttcacccctagttctaaaaccctcaatggccatgagcggctaatcccctagctagggcctggcaggcctaaaaagccaatgatgtatggtgtacttcaagagttatcaaagcaaagaggattcattctagggttttatgttctaattcttttctttctatcttgcatttatgtcttgaatttcttttaggttttattcgcttgagagagggtatttcctaataagggtttaagaattaatgcatgcaccagttttaggggttatacgcttgggaaagggtaacacctaatagaacacattaagaaaaggatcgtcgggttatcattgctaagcatagaatgatggcccaatgcccatgcatttaacaacatctagaaattaccttaatgcatttaactattgatct

SEQ ID NO: 56519 - DNA, 327 bp, Glycine max
  unsure (1)..(327): unsure at all n locations
tatacaatactgaagctgtccaacanagccaatgttggttcaagaaatatgaagttcattattgatgatgangangagcncggaagatcaataaagtgttggaaaagagcactattgggacaatgagcaggttgatactaaggagagagatggaagaggagtttgtgttgcctgtgttgggggatgatgctgattagattgatagtggagttttgttcaaatttgggatgtggacaccaagtccaagcactctcttgttttcaagagatgggttccttcaagaagttatgtattcattggtaattggattaaagattttgttgcaag

SEQ ID NO: 56520 - DNA, 402 bp, Glycine max
aagaatgagaaagcccaaagagaaaacgtccggccgattctccgctatattgtactataaaatgtttgtttctattattattatattattttctacctctttttttgatttccaacggggctacggcacgaccgaacggtcggaattcattttaaccgaagtttacggataatacaattccaacgatcggtggaaatttattgcatttacatgtgcaacgagacaccactcaacgacgatggctcagcacgtcaagagggggtataaaaagtaaatgatatgagaataaaaatacacgatacacaatgtggaccaccacgggtacatacaatgaatcgaaaagcttggctcaaggtacttacccattgaagatcgaagaacgatgaagaacgaatgatgaac

SEQ ID NO: 56521 - DNA, 399 bp, Glycine max
  unsure (1)..(399): unsure at all n locations
acccacgaccaatggtgaacgtgaatcctgctacttgtagaggctcanggcctcataagagaaatttcacagttatctaggggttgtcacaagggaaaaaattcctattgtccacgcgaattggagtgttgtcccagacaatctaaagaacctaatatgggaagatattttggtaagtggttataaatacacatattcttatgattttgtttttaagttagttttaaaggaatcatttacttactgttacataacaccttttgttgtgcatcacaaacttgacatccctgaacgtgaggaggcaaaaaagaaggtgatgttaacagttgcaactagaaactagatggaggcaattttaagtcgcattgacttctataattgtctatgctgacaatgaag

SEQ ID NO: 56522 - DNA, 467 bp, Glycine max
  unsure (1)..(467): unsure at all n locations
cgtcaagtgtaacatatcttaaatcttttaattatacctcattcaagagtagagtagttgctttagatcgctacactaacatagtattattgccgacatagggccttaagtcatgtgtaaggacaattaatccatatctgactgatatatataatatacatgtattattataggaaataaacatttaatatatattgtctctttcttaaactcttattaacatagcattaaagtacttttttacacgtatttaccccatttctcaaaatgtcttagccatatcaaagcattactcaaactcaagacaacttggctcctggatcattgaagcacgcttacttccaggacatttctgaagttcactctcagatttgtaatttatttcagatcaataattactatcatacattccctttntctttcatcgttcgtattacttaatgttttttcattatatcacttattat

SEQ ID NO: 56523 - DNA, 404 bp, Glycine max
  unsure (1)..(404): unsure at all n locations
ctcagctagtcttatgttgctccctttatctctaacactagnttctanattcatgagttggttcttcttgtttttaatcataacatttgatctccttaattataaaaattggtgattgtggttcatttattagattattaattgataattgtaattagtagaaatattaagttaattataaattaattaaaaattattattcattaaaaaaactgtaataaaaaattatgaatcctaattttcctcaacctttcttccccaaccaaatcaacaaaaaatcataagcaacaatacaattacaaaatacaatctaaagcagaatataattagaaacctaataatttcaacaacacattcaatactaggttcaaaccaaaaaaatctaaacaaaatgttgaaaaaaa

SEQ ID NO: 56524 - DNA, 198 bp, Glycine max
  unsure (1)..(198): unsure at all n locations
taaggactgagctatggccacgtaggccctcacccactcagagctagtcacggctcggggagcgatgcggacccagcagtatggctatgcgccacacgancgcgatggacctagcatctcccgccacgaatttatgcttggtccctataatagaaggggggacattcatggagaccatattctgatccctagctgggg

SEQ ID NO: 56525 - DNA, 374 bp, Glycine max
  unsure (1)..(374): unsure at all n locations
agctggcctcanagaggtccaggaaggacaagtcggccgaatgaactagttccgctccggagtacgacagtcaccgctttaggagcgctgtacaccagcagcgcttcgaagccattaagggatggtcgtttctccgggagcgacgcgtccagctcagggacgacgagtatactgattttcagggggaaatagggcgccggcggtgggcaccactggttactcctatggccaagtttgatccagaaatagtccttgaattttatgccaatgcttggccaacagaggagggcgtgcgtgatatgagatcctgggttaggggtcagtggatcccgttcgatgccgacgctatcagccagctactgagatatccgatg

SEQ ID NO: 56526 - DNA, 453 bp, Glycine max
  unsure (1)..(453): unsure at all n locations
ggcccgccgcacatccggtgcctaaacaccacctttagcgtttaccaaaaatgtaatttgcagcaaaaagcctgaggattcagcccaaattccggggtcatatgctaacttgctcccatatctaattgataatgcaatggtagccataacccctgccagggttcctcaacctccattnttccgaggatacgactcaaacacaacatgtgcatatcatggaggagatccgggacattccattgagcactgtatgaccttgaagcgtaaggtgaaaagtctaattgatgtgggctggctgaaatttgaggagaatcacttgtgaatcctaacattgacaagcggcaccacacatggngcaattngaagggtnngtgttgatgtctctaatgactcattangaatttcaaagttatgcaattattgagaaccacaattacaatgctaaataatatg

SEQ ID NO: 56527 - DNA, 486 bp, Glycine max
  unsure (1)..(486): unsure at all n locations
ttcagtcacctgcggcatgcagcttgtggtgatgaatcagtgattcatgttgtttgatgttaanaaagcccaagagaatgatttcagaatgagtcaacaagttcaagatcaagattaaatcaagattaatttcaagattcaacatatgaaatcaagaagaatcaagattccagagaagatgatttcacaagggaagtattgaaaagaattttcaaaaaccacacatagcatagttttgttttacaagaaaagtttttctcaaaattttctaagttaccagagttttttactctctggtgattgattaccagttttctgtaatcgattaccagtggcaaagtttgatttcaaaagtttttaactgaatttgcaatgttccaattgatttttaaatggtgtaatcgattacaatatattggtaatcgattaccagtgtatttgaacgttgaaattcanactaaattgtgaagagtcatatcttttcat

SEQ ID NO: 56528 - DNA, 423 bp, Glycine max
  unsure (1)..(423): unsure at all n locations
attgaagaatatgcttcctgactataacacgtttcccaagaattattacgaggcaagaagatattatgtcttgtgggtatggaataccaaanaatacatgcatgccctaatgattgtattntgtatagaaatcagtttgtcgaaattcgcaactaccctacatgtgggctctcaagctacaaggtcaagtatgacgaatgcagtgatgatgctgccactaacaaccattgtccaaaaaaagtgtgttggtatcttccaataataccaaggtttaagtgattgtttgctaatgcagatgacacaaaaaaacctaacatggcatgcagatggtaagaaaaatgatggatntctccgtcatcctgctgattctcctcaatggaagacaattgatcagttgtatcttggatttgataggatcctata

SEQ ID NO: 56529 - DNA, 465 bp, Glycine max
  unsure (1)..(465): unsure at all n locations
gcaagcttgtacttcacagcctcggcgacgcggttttgatcatggcngtggtgggaagaaggaccggaggtggagggagccacagtggcggcgaatgcaaatagggattggagggaggagaaggccggatgctcccgatcgaagccgcgggcctcaaagagggaggcggtgagggacatgtgcttgcctcacacttgcagttgggtctagagtttcacggtggaagagaaattgcgaagtgatgagaggagagagagagaaaagaaaattgggtgtgtggattctaattagggtgaatgaatactactgccagacaagagagctacaaggatgcgtacgtgttatgtttttgtgcccttcaacgacgtatttaaataactgacataatcgatctaatttcaagactttctcttaataaccatgttaacacttccattttaacaaaacgtcctgacgtattttatt

SEQ ID NO: 56530 - DNA, 350 bp, Glycine max
  unsure (1)..(350): unsure at all n locations
cttctttggcttatgctccctatnttgaagatggacttctgactgtcaagatgcccgacaactcatcccatgcaagaattttcaaatctcttgcttcttggatagttgtggtcttaggtttcgacaccttgggaaagttttccaaaaccttcaagtttatctgagctntggagtatgtttgtccaagagcctctagattgtttagaagaacttcaagtcttccaaacatgtcatccataggctcttcatccttcatgatgaagctgnnntnnggggntggcagagtcacaaccttccttagttcgacatcttcagtgccttcatagtttatgcttaatgagtcccaaatc

SEQ ID NO: 56531 - DNA, 469 bp, Glycine max
  unsure (1)..(469): unsure at all n locations
agtcacctgcngcatgcaagcttgcctaataacctgagagtgagagattctgatccttacttacacatggaaaagtatgctaagtggttgatgcctattccctgacaataatacttataaccttgcttgaagttccttcaatagcgagagattgacacagtctatataagttatatacacaaccgttagtcattttcaccacctaacagttgccccaaatttacagctttgcttgtcctcaagcaaatagagaacaactcacttgtcctctagtgactgtgacatgcagtgattatgtacgaaggcgtatgctacgaagtgactaattgcatgataagagacacccgaccagtccctcacacttgtcttccaacatgttctaagacacaaatactcgcccctgacacgttgtgaacgttgctaaacacaattcagaggtacttacccacgtctcacactatgttactca

SEQ ID NO: 56532 - DNA, 322 bp, Glycine max
  unsure (1)..(322): unsure at all n locations
atgatatggtcttcaccgaagaaaggatcanagngggtctaaanagaggcaaatctgatcatcatgtgtgataaatgcaaaaaaaaaaaaaaaactatggcaaatgaagagggtgagaatgagggagaagcccatgctgtgactgccattcctatacagccaagtgttccaccaacccaacaatgtcattactcagccaataaccaaccttctccttacccaccgcccagttatccacaaaggccatccctaaaacaaccacaaagtctgtttaccgcacttccaatgacgaacatcacctttagcacaatccaaaaacacc

SEQ ID NO: 56533 - DNA, 157 bp, Glycine max
tctccactgagtactcatatagtgggtgtacatacctagctactacgtccattacctgctgggatgaccttaacagggggtggctgccgctatgtgcatattctgtgataagagtcagtcggattccgttcgatgccgactctatataaatatatac

SEQ ID NO: 56534 - DNA, 311 bp, Glycine max
  unsure (1)..(311): unsure at all n locations
taagctctgtatactgcacaaggctcttaatattagaagagtattcttgaggaaccttcacccacgaagacactgacaaaaacttatcttctccttttcggacaaagtatggcaagctggaggcaagtaaattttcttaccattagaccttggatgcaactgtgatcatatgcccatatcaactagatcttgacgggtattgaagccgtgcttcgactggccttaaatgttaaggagctgtccaatcacactgtcacaagacattttccccacatgcataacatcaatacaatgtgtaacgtcnagatcag

SEQ ID NO: 56535 - DNA, 470 bp, Glycine max
  unsure (1)..(470): unsure at all n locations
agcttataagaacacnaaattctcaatcatttttcaatatgcatgngaattangaagcatcaacaagaatcaagccaatgctattgtgcaagcaatcaatggggcaaaacacaccaaatgattatgatgatggatggttcaaattctcacaaaggtaaactcatcactntcaaattgagctttcaaaactatcatgacatgtagaggagaatcaaggatttcaagtcacaaaatgtcaagaacttttattttcaaaacaattacccatttcttgaacatatcctataattcaaagaaaaacatgcaaagttgtacatgcacacagaattgacccanaatattaaactagaaatcctacgaaactaacaacattaacaaattaacacaactaacaaattaacaaaacccaacaaactaacaaaaaccaaagaacactcccccncatacttaaacaacacattgtcctcaat

SEQ ID NO: 56536 - DNA, 241 bp, Glycine max
aacaggatgtttctatctgtgcataggtcaggcttaagcatgaccctggagctcaacattggactttgctatctatgcttaagccttccaatttttgacgagttaagcatgaccctagaaggcatgtgttatcgctcatgctcaagcttgcaaatttggtgcggcctaagcacactcgtaaagatttaaatgcccacttaaaaaaagcccaatggatataaaaggtgtgtcttactgaaaa

SEQ ID NO: 56537 - DNA, 455 bp, Glycine max
agcttaggagcctaaacttgtatcttcaatgttaggaaacatgtttatggctaggaatccaaaatttggttttaggattagataagcatgaaaatagggacttttttgtaaggatctgagctgccccatgattggcactctgcacctaagtaacgtgggagatgctttttcaatggtgtgtagatatatgtgaatatatggcataaaaatatgttgcaaagtgtgtgaatatatggcataagaataccttgcaaagtgaatgaatagtaaataatgcatttcaaaatatgtatatttgtggataagtagcataaggagccttttaaaataaagaatgtacccgtgccacagatggcacgagaatgcttcccacatgaatatatgatgtggaattgccccttcagtgtagatagatggcatgagagtttcttttcaaatgcaagtgtgtgcgtgac

SEQ ID NO: 56538 - DNA, 304 bp, Glycine max
  unsure (1)..(304): unsure at all n locations
atctccttcttcactacatcaagaatctccgggttgttgtttctctgtggctgnttactggtttagctccatcctctaaatttattcgatgcatacatgtggatgggctagtaccaggaatgtccgccagggtccaacctatagccttcttatgcttcttgagaacagacaacaacttctcctcttgctcatcactaagggaggcagatataatcattggaaaacatttgctatcatccaaataagcgtattttaaatttgatggcagaggcttcaattctggtgtgtgtggctgggtagaggt

SEQ ID NO: 56539 - DNA, 480 bp, Glycine max
  unsure (1)..(480): unsure at all n locations
agctntgagcacgttctctcttccctatntgttctaattctgtaattgtggtctttccgctaagcatcacaagggttgactggagaattttttaactatacctgcactgttgctctgtgctgaaacacaaatggttacatgtttcagtcccccttccttagtggatgactagattcattatctgcacatgcttataattatgttcggtgttgcagtatggtactctagccaagggttacctgtatctttgttgcttggactagtgaatggcctgatccgaaactcaacttatctataaggctttcttttccttttgatctccattagtagaacaagatgagaagagtcttttgaaagctangctaactaattcttcttttggntacgtgcttgatcatatcaatcagtggcatggatggatatcaaccgagctctagcacctcttttcattaaagagttctaaataaccaagacttatac

SEQ ID NO: 56540 - DNA, 417 bp, Glycine max
accctaagtcacctgcagcatgcactcaatggtattattattatattatttctggggctaattgaaatacgtgaataatataaaataaaacacgctggtatcttattatatattatttaagaactataaggcccagtaacttctattatttcacagattttatcattgatatcttctttcacaaattttattatttaacttttaatatttttgaaagatgatcattaatttttttattttctgtatttttccactagaattgggaaagaatgatgtaagacatcactttgttagattcttgtatatggagcgtagtgataatcgatccacagtatgtgactttctatgtcgatttgcgagtataatgatatacacattaggttttctacatcagctccaaagttaaatatatataat

SEQ ID NO: 56541 - DNA, 259 bp, Glycine max
tcaccatctatgtagtccatacctcgcagttaattctcgcttggagttatacctaatattgtcggctggtccaagaacccccttgtgttccgccctccctcctattcagcatgctacacctcaataaaccccttccttaccttctttagcatccacaattattagtgagacgtacttcttccacaactatatcctcttccctttttccacaattacctaagtctacacatgccgtgcacactcactctaaatgcagtat

SEQ ID NO: 56542 - DNA, 466 bp, Glycine max
catgcaagcttgcagatagatatctcaacctatctattcttaagggttatataaaatttgactaaacggatttgtttgattgagcagaatgtcatggctctggaaacctacggagactaaaaatagactatgtggctaactaagttgtgttctctttctatatccatgttactcgtcctttccatatgatgttatctgggagaaatagatgcacagacagctctgttactttttattgtaggaatgagtgtctttattagcttattttagtttaaatttgcttgaacttggacttgattatagcaagtggagcatatcttgcgggaaggggaaattgttgctgatggggaagatgaggatactggagctacggcgaagtcaacaactccccatatgttctgcaagactctcacagcttcagacaccagcactcatggtggattctcaattccccgtcgggcagctg

SEQ ID NO: 56543 - DNA, 333 bp, Glycine max
  unsure (1)..(333): unsure at all n locations
gattcaatcatttaagaggaaaaggtcggttcagtgcaccgctccttcctcaatattttatacaccatcattgtctaacaaccattcattcaccanaagtaataaactaaaataaatgttgtctaacagttagctatattctcaattctcaattattgccaaagctttacttgtgatttaaggtggtttggttgtgtccaaatgataaacaaattaaaggagaggaattttaaaaaaaaaatgtataggtgcacagccctttctctnttactntaatttaaatatntttttatatttcttttccattcatttctggttaacacaaccaaacta

SEQ ID NO: 56544 - DNA, 388 bp, Glycine max
  unsure (1)..(388): unsure at all n locations
aataacttaatgcccttaacctatggaattaaaaaaaaacttaatggctgagtgtaactggaattgtggcaacccaaagtcacccccaacaaccaacaagtcagccaccatttggtctcccaaaaggctgatgcctangttgccaattgggcccttattacaacttgaactaaacctaactaaagcccttttagttgatcaacccaaaacatatttttggtcagccacctttacaaggattgtgccattatttagacaaactaaacacttctaaaatgaaacaaagtggtgtcatttagtcctccttcatttgggccatgatacaactcacaaccttggactnttctccttgaaacttgngcttgtattcaaatagtatggacagcac

SEQ ID NO: 56545 - DNA, 470 bp, Glycine max
  unsure (1)..(470): unsure at all n locations
agcttgttacaaccaatattctntggcctacctagtcactactatctctaacagaaataagaagatttattgggttaatggcataatgactaataccttatcctcttatagacaaataaacaatttcactacttaggtatttctcagcaagaaatcacttcctttttcgttagagcagggttgtacaacaaagcttttctttgatggcattgaggaatttaaacttgtcttcatttattcttcatcggattcaatagatcctaggagagtgtctctgctaaatagatttcanacacagtgttaaatgaagtcttaaatgtcatctttaatgtcatatcanatcatgattcaatttggtatcgtctaaaacacaagatgcaactcttaacctttgtattttttatatctaatcaaaataattaagagtcttgattcatttcaagacatanatgtctctggactntataata

SEQ ID NO: 56546 - DNA, 416 bp, Glycine max
  unsure (1)..(416): unsure at all n locations
tgtagggtaaagtctcacgaatgtcacgtgctcatgcaacttttgttagtcgtggctatacgagacatctgccaaacaaagtcaggttaacgataactcacctatgctntttcttccattctatatgtagcaaagtcattgatccagtcatatntgatgagttggaaaatgaggccgcaattatactgtgccagttggagatgtatttcccccttgctttctttgacatcatgattcacttgattgttcatctggtcagagaagcagaagaagccattgaattttgttcagaatacttagagaaggctaaacctgttgggcttcctgagtctcggcatgatgacagagtgggtgggaaggggtcaagaggactgcangtgatcacttcaagtgtagaagatttgttacaagctcac

SEQ ID NO: 56547 - DNA, 463 bp, Glycine max
cagcttggtggtctgttatataccttgaaatactctccaatctatgattgcctatgaagcacggatactccattcccttgccgtgtccggtgtgcgacacgcgttggtgtaagcgtctgacaccgacatgacactcgtactaggttctatattttgggacattacaggtgctcacgggttcatgttcgtgtcatgtccagtgaccatgtcgatgtgggggctatataaacgatggattacatttcttaatagctcttgtgatgagctacatgtcccttgcatacgctgatgcctatcgcatttcttggctagattactgtactgaagaacgtaatcagctggctatgttggttgagaactactcctaacgcaaggtttgaagcatgaattgcatctcataagcatttattattgggaaactgagactggacctatgagaaatgaatttaatgacgtcatgcct

SEQ ID NO: 56548 - DNA, 345 bp, Glycine max
  unsure (1)..(345): unsure at all n locations
ctcaagcttccgcttatgagtgcacatctccttcaaaattagcatatcttggaatnttctntatngcatccagcaagggatgtttacctttactttcctgaaggtctccaagatctccttttccacttcttccattattttgtttggaattgctctangtggaaatggaagagggataacatgctgttgtaagtcagaattactagaggaaggtccaccagcatgaaaatntttgttaggaagctatctcttttgtgcagctatctcatcctctctttcaagtgtagaatgaagcttgacaggttcaagtgcaggtgctgctactggtggaggcacttgaatttg

SEQ ID NO: 56549 - DNA, 415 bp, Glycine max
  unsure (1)..(415): unsure at all n locations
atcttcagctgatgaagatgaatctgtggccacctcatggactcctctaaggacaataacactatttcttgcactaaattgttgggagttggaagccatcttctcaatcaaattcctagcctcaacaagagtcatatcaccaagggctccaccattggcagcatcaatcatactcctctccatgttgcttagtccctcatagatatattgaaggaggagttgctcacaaatctggtggtgaggacagcttgcacgcaatttcttgaatctttcccagtactcatacaagctctctccactaagtttcccgatgcctaaaatgtctnttctgatggtagtggtcctagatgcatggaagaatttcttcaagaacaccctnttaatgtcattccagctgaatatggacctgggagca

SEQ ID NO: 56550 - DNA, 485 bp, Glycine max
  unsure (1)..(485): unsure at all n locations
aatactcaagcctaaatggtggaatgaaaaanaagtntgtatccagacaagagttatcattttcatacctaattttgctggggaattgtaacctcatttgctttcttatcaaagggacttatgttaaattcttaatgaagtntggtcacagtaactcttgttttagcgtcatgccaacagttgaaatagacaggaaaagagtaatgaggaaacaactgacattggaagtattttaaaggaaagcaatgaagaagtcacactagttatcttacatcaggaatgaaactgttatgaaaacataagaaatacctcaaatataggagagaaactcacanaatactaacctctcttatctgtggttcanaacccatatcaagcattctatctgcctcatctagaacaacaaaagaaattctggagagggaagtgttgccttgttgtaaatgatcaatgaatcttccaggggtggcaactgctatttcaac

SEQ ID NO: 56551 - DNA, 358 bp, Glycine max
gcagctgcaaaactccaaccacatttttggttaaagttgcaacgattctggatgaccatgtcatggtctggtgcctaagacacttaactgacgatgtggcgactacccctgctcatttcatgtacatggggacacgcttttcatatgatgtgatctgggagactgagacgcacacgagagatatgatactttatattgaatgaatgagtgaccctactaacatagtttagtttaaaactgcttgaacgttgactcgtatataacacgtggagcatccatagctggactgtgatatagttgatgacgagttagaagatgatacaccacctaccgttaagatgctacatctcatatgtaa

SEQ ID NO: 56552 - DNA, 469 bp, Glycine max
agcttatacaactcataagcattactttgatgttattcacaagacttctagagatatccttcgattcattaaaggctgaaagttgaatcttccttttaagaaaatacttcttgtcattccaaagggttcaagacaagaagttatttatgctatcattaattcaacacaatggcaattttgtatacccttaacattgatgaaaaatatgaggctccaaattgggtcttcatcatttgatgttaatgagatgaaggatttctcacattgaatactaagtattggagatggaagtattaaggaaagaaatggtagggagattgacattcaaaaactagatgatatgctaataatgaattcaagtgactctatcgcttttattattgatagcacttatacattattgctggagaatgtgattatctttcattttttcttcaacatagggaaattctagcacctacacatgata

SEQ ID NO: 56553 - DNA, 397 bp, Glycine max
  unsure (1)..(397): unsure at all n locations
gggaggggttgatgggggcccggngctgagtggaatgatgttatatggctacttgggactacggagctcagttgaatgtgggcaactagggatggtgggttcatgtttgatttgtgaaagtgggagagttgatttgcaccatcgcccaatcgccacctagtaccacatatgacgggtacctcataatccaacaagcttgaagtgagaaagcgtggaagtgtcagtcttcccacttttgtttgttgaccacagagtggtacctggagatatgtcgcgggggtcaggagaccttgcggacgtcaggtggggtgctattgcccaaaaccaagcttgaccaatcccgacccaatccgtgcataatcagtcagtgagaacctgtgacgtacataacaggcga

SEQ ID NO: 56554 - DNA, 338 bp, Glycine max
  unsure (1)..(338): unsure at all n locations
ctaagcttcaagaaaaggccaaacaaaatctgagnncatgtcttaaatatgtggcttngntcgagctcggtgcttagcgtgattctgaaccgcttagcgcgcatttgtgaattttggcttagcgcatggttttctcactcagcggatagactgaagcggtgcgcttagcgagatgacccttcgctcagcgaatatgcacagctcatccttcttccagattctttctcgcactcagccgagatgtgttgcactcagcggatggctcgctaagccagaagattggcttaacgagagggtgaanatcagcacttcaaaacttgcctaattaacctgaaatt

SEQ ID NO: 56555 - DNA, 352 bp, Glycine max
acagaattgttaatgcatcaacattcaatttcgagcttctcgatatattacgggactcaatcatacatccgagtaaaaagttattgtcgcttgaattggctcagagcttcaacattcaatttcgagcatctcgatatgtgacgggactgaattagacatccgagtataaagtcattgtcgtttgaatttgctcagagcttcaacattcaatctcgagcgtctcgatatgttacgagactcaatcagacatcccgagtaaaaagatattgtcgtttgaattggctcagagcttcaacattctatttcgagcatctcgatatatgacaggactcaatcacacatccgagtaaaa

SEQ ID NO: 56556 - DNA, 294 bp, Glycine max
ctaaggcacccacccgagggaagctccccaagttccaactccgaacgcgactcgaccggccggtaattccaacacgacaaggaacttcccttcgaggccgttgccggaattcaccccgctcccaatgacgtacgaagatcttctaccatccctcatcgccaatcatttggccgtggtaactcccggaagggtcctcgaaccccctttcccgaagtggtatgaccctaatgcaacttgcaagtaccatgggggtgtcccggagcattccgtcgaataatgcttggcccttaaata

SEQ ID NO: 56557 - DNA, 446 bp, Glycine max
  unsure (1)..(446): unsure at all n locations
gcatgcaagactagagagatcgaggattgttttgtttatctttagnggaagaaatgccgcagcatgttaatcataaatgtttcagtggaaattatgacgctggcaattttatgaacaagaaactggtctctctagtctcagaagtcagaaccattatctttccatagctgctatctatagaaccgttatctattaacaattgctgttttaaggacaacaataacaactgagccttttcccctacccactaggtgaggtgagctacgtggatcaacgacaccataacgttctattatgaatcatgtctatcaacaaatcgttgaccgcctaatccttcttaatggctcgccaacagcccttatcaatttctctctagcaataagggtctccttcatctgatctactcttcatacatgttaaatatactcaaacacatctcaagactc

SEQ ID NO: 56558 - DNA, 418 bp, Glycine max
  unsure (1)..(418): unsure at all n locations
gcacactaataactctcaatagacangaacaccaatcttagtgaattacaccctgttgacanactggtcattctacaaaactaccttaataaatatagggatcatggcaccatgcattgggcttattcattaaggagacacttaccaatgactttccttcctagaaaagtcttttaccaagattcttatcttcatccacacaagctcttaaaataggaacaggtgaaagcctgtcaacaatattacactcaacaatatacatgacagacacattatcgttgtccttaactatcagatatcgaacaatatctgcaaacacacaacaagccttatgttactcacataactaccttaagagagcgacactacactaagcatcacttgtctatacactatctatatatatatatatatatct

SEQ ID NO: 56559 - DNA, 513 bp, Glycine max
  unsure (1)..(513): unsure at all n locations
gacccgtgacctcttagtcacctgcggcatgcaagcttataactctcaatagtcttgatcaccaatcttagtgtattaatttctgttgacatactctcattctacaaaaataccttaataaatatagggtttagggcaccatgcattgggcttattaatcaaggagacacttaccaatgactttccttcctagaaaagtcttttaccaagtttcttagcttcatccacacaagctttcaaaataggaacaggtgaaatcctgtcaacaatattaaactcaagaatatacttgacatccagaatatgtttgtccttatctataagtttttgaacaatatctgcaaaccacaacaagccttatgttaccaagaaaactactttaagagagtgacactaaattaagcatcatttgtctataatatatatatatatatatatatatatatatatatatatatatatatgtcaactacaaatgcatcaagcanacatccctgcatataataaagcgat

SEQ ID NO: 56560 - DNA, 355 bp, Glycine max
  unsure (1)..(355): unsure at all n locations
acttagcatcaaattttcctaagttatcttttcattattcaatacaaaacatttacaaccaaagatatgaagatgtgagatgtttggttttctgccattgaacaattcatatggagttttatttaaaatgggtcttattaaagccctatttaaaatgtagcatgcagtgttaacggcttcagcccaaaaatattttggaagaggagtatcatttaataaagttctagcaatctcttccaaagatctattnttcctttcaacaaccaccatttgntaaggggttcttggtgcagaaaagttatgctcaatcccatacttatcacaaaatagttcaaattctttattttcaaactca

SEQ ID NO: 56561 - DNA, 386 bp, Glycine max
  unsure (1)..(386): unsure at all n locations
gaactttgaagtgtgtctcacaaagactcctgtcgcaacctaccctacggcggacgtacaagcaaaagcanaggtgcatcttctaaaaagaaaacgcacgggagtcaccagcaacgtttatttaaggaaaatgttagaaaaaccaaaagaggtatgcaaaatttgaaaataagggttcaagagttgtttatgcaagggaaggtattatcaccccacgcatccgtcacaaaggacgacaacctttaattgagtgtgtgcaatgtgacttcaaaattatttatctttcccgtcttatantttttatnnttttggagtcgacaagggggctgcccttgcttctaggtatcctcaggtgcgatgatgaattcaaacctacgtagttcttt

SEQ ID NO: 56562 - DNA, 354 bp, Glycine max
  unsure (1)..(354): unsure at all n locations
tttctttacaattgcatcacctctcaatgagctggtgaagaagaatgtgcattttcctagggtaaaaaacaagagccaagccttgctttgctcaaagaaaagcttactaaggcacttgttctagctcttcctgacttttctaaaacttttgagctaaaatgtgatgcctctggagtgggagttggagctgtattgttacaaggtgggcaccctattgcttattttantgaaaaacttcatagtgccacatgggctatacacacccttacccatggatgtgtggcttgtttacaagccaagtctagggtgatgcctcatgggctatacacacccttacccatcccatcttcacct

SEQ ID NO: 56563 - DNA, 477 bp, Glycine max
  unsure (1)..(477): unsure at all n locations
agctgccacccagctcgcccaggcgagctcatctagcccatgcgagcagggttgcttcctccacacgcaacagccttctggaggaatcttctggaggccccaagtgggcctggttgctatttgcacccgcattnttactaagtacaccccccttttctatttttntgtaactctttttccgtaaccggtacgaaaactttacgaaacttcgtaacgatacttattttttcttccgcaaggttatgaacccttacgacttatgtatttactcttttttagctttcgaagaagttacggaaacttacggattgcgcaaaaacacctctttttgacttctcgcacattacggaagttcacggatcgcacaagcctgctttctttngatttctgagacgtctcggaacttcatttattgcatgtcatcaagtaataagcccggacgaaattagggtatgacagttgcccctctttacttac

SEQ ID NO: 56564 - DNA, 409 bp, Glycine max
  unsure (1)..(409): unsure at all n locations
tcgattcattctatgcacccatagaggtccacattgtgtttagtgcatnttttctcgttttgtttacttntatacccnctgttgacgtgcttaagccattttacttaagtcgtttctcgcttaacttanaaataaaataaatttccaccgaacgtttgaattgtattatccattaactctggttaaaaacaattccgactgttcggtcgtgccgtaaccacgttggaaatcaaaaagagggtaaaaataatataataatcaaaaagacatcttttagtgaaataaagcggaaaatcaattggacattttctctgtgggatttctcattcttaatcgaatngattaataactaaagtgaaactaaaggctaaaatcaatccacctagtcaagctcgtccacaaaataggc

SEQ ID NO: 56565 - DNA, 435 bp, Glycine max
agcttcttccaatgacttattataacaaagttatttgagtgttgataaaacatggggtagagttttatttgttagagcccgaagagggtgtgacattatacttgtaaccacttgaaagttaatggagattggtggtttaccaacaatgtgacgctgtctttatggtagagatgaaccacatatactttttgtgtatgtttaattcttgtgttgtgttgcgctttaactgaccctgggtcttaattggtctttatttggttgaagatctcatgcattcttctgaacttatttttcttatcgactaaagtgctattggaattaagtatgttatctattcttaccaagttattcttatagaccaaaaacttttgttggttgaaaagttttaccatacataaatataattcacccttcccttctgtgaatatgccttta

SEQ ID NO: 56566 - DNA, 416 bp, Glycine max
  unsure (1)..(416): unsure at all n locations
atatanccttgcattggcttgcaagttctaacccaccaatttgggacttgttctccaacagtcttataatttatatatcgtcccagagtgcgagagagtgaggctttcagcttgagcagcatgtttgttaaaaaatgtcaagacattttggactcagccccttgcttatacacttttaacctttcatttatttagttctagtcctctaacgtgggactgattctcctacaaaaactaatattttaattttctactagtatctgtcaagttctggtttgttcctctctttttttttnttttacttctcttagcccaaagtagctattcagntctcaaaatttggggtgtgctattaccctatttttgtnttttgtggaattgagaaagtagctattaaattgatatcatctgatttc

SEQ ID NO: 56567 - DNA, 243 bp, Glycine max
  unsure (1)..(243): unsure at all n locations
gcagatntggtcttcgntggcgaaacgatcgaagagggtctaacaagattataatctgatcatcatgctcgataaatgcaaaataaactggcgcaagtgaagagggtgagaatgaaggagaaacccatgctgtgactgccattcctatacaaccaagtttcccaccaacccaacaatgtcattactcagccaataacaaaccttctccttacccaccacccagttatccacaaaggccatccc

SEQ ID NO: 56568 - DNA, 463 bp, Glycine max
  unsure (1)..(463): unsure at all n locations
aacctgtagagatgcactgcttgcatgcatgcatagtctagatcaccaattctagtggatatattncacgagacatactctcattctacaaaaatacctaaataaatataaggtttatggctccatgcattgtgcttattaatcattgagacacttaccactgactttcattgctagaaagctctgataccaagatgcttatcgttctacgcttaagcttacataatatgaacaggttagatactgacctcaatattaagatcaacaatatacttgtcatccagaatgtgtctgtccttatctataagaactgaacaatatctgtagaccacaacaagccttaagtatttagaaaattacattaagagagtgtctctatattaagcattattggtctatattatctatatatatatatatatctacatagacttacctacatatttgtatacttgagatgcat

SEQ ID NO: 56569 - DNA, 469 bp, Glycine max
  unsure (1)..(469): unsure at all n locations
agcttgtcacttttttgagtcactcangacattcctaagtttacttcaattggtgtctttatagaacttgtcttttcttaatacacttaagcaaactcataaataggcattaattgaaaaggtttatgatttgtgtttagaaggtttgtaataattaaagcatcaagggttttggactcaacaaatttcccataaaataagatgtaaaaacaattatcaaagagacattggagaacattcaccatacaaggatagagagcaaatatgaactaatcaaactgaatggtacacatactgaaataataagggactaaacaataaatatctaaacttcatataaccggttaaaattacctgctacaacaagtcaattttggtgattcatcgtgcactacccatttcanaacatttctaaaacttatgatggggtgaaggggttacattgttgaattcaagaacccgttacatg

SEQ ID NO: 56570 - DNA, 397 bp, Glycine max
  unsure (1)..(397): unsure at all n locations
tgctctattcaatggagttgacaagaatatcttcagactgatcaattcttgcacagngccaaagatgcatgggagatcctgaaaatcactcatgaaggaacctccaaagtgaagatgtccagattgcaactgttggccacaaaattcgaaaatctgaagatgaaggaggaagaatgcattcatgacttccacatgaacattcttgaaattgccaatgcttgcactgccttgggagagaagatgacagatgaaaagctggtgagaaagatcctcagatccttgcctaagagagttgacatgaaagtcactgctatagaggaggcccatgacacttgcaacatgagagtagatgaactcattgtgtcccttcacacctttgagctatgactctcggata

SEQ ID NO: 56571 - DNA, 325 bp, Glycine max
  unsure (1)..(325): unsure at all n locations
acataatacttgtacccactagaaagctagtggaatttcggggtttaccaacaatgtgacgtagtctcaatggtagagatgaaccaatatcacttgtcgtgcatgtctagtccatgctctttctgcgctattaactgaccctgagtctgaattgtnttttatttgtatgaggatctcatgcattcatccgaactcaattttctcatcgactaaagtgctattggaataaagtacgttatctattcttacatagtcatcctcatagacgaaaaacctttgtggctagaaaaagcttttacaattacataaatcaaattcagccctt

SEQ ID NO: 56572 - DNA, 400 bp, Glycine max
ggaggtaaactagatgccttggttaacttgttaacccaactggccgtgaattaaaaattgcacctatcgccagactctatggtctatgctcctctgccgaccaccatacagacctttgcccttctgtgcaacaatctgaagcaattgaacagcctgaagcttatgctgtaaacatctacaacagacctcctcaacctcagcagcaaaatcaaccacagcagaacaattatgacctctccaacaacaggtacaatcccggatggaggaatcatcccaaccttagatggtcgaatccttcacaacagcggcagcaacaacaacagcccatatttcaaaatgttgctggcccaagcagaccatacgttccttcaccaatcccgcagcaacaacaacaacaaca

SEQ ID NO: 56573 - DNA, 409 bp, Glycine max
ccctatttgtccagttgttttcttaattggtttggaacatgcttgaagcacaagcatccaaacactcctaggtgcttgagacaaggctcacttccactccaagattcttcaagggtcacattctatagactctctggtgaacatctggtgagcagataggctgatgtgacactgcctcacacgaaaactccttaggcaagggaaaaattcttagcatacacctggtcatgttgactatgggtctattgagtatctcacatacaccatcgtggtgtggtgcatatggaggcgcgatcttatgaatattacccgtcatccaatagaaattcctgaattcatgtgatgtgtattcactaccaacatctgatttgagtacttgcaatctacttctactttgtgtatataacat

SEQ ID NO: 56574 - DNA, 314 bp, Glycine max
  unsure (1)..(314): unsure at all n locations
atgctagtaaacntctagtacaactntccagaatattatttagacatgcttctaattatattccggacctatctttggacttgtaatgttttgagaccttctattgctattcttaagtcttttaattattatattattagactacgacccttgtgtttaactctatgttattctttctgctgagttacaagtgtgaggtgaagctccacattgggtataagtatatatgttgagcaccctataagtgaggagaccacccataaatctgagccttaatgttctgggttacagtgaggcgtcacgtcatcttatga

SEQ ID NO: 56575 - DNA, 437 bp, Glycine max
  unsure (1)..(437): unsure at all n locations
tgttatgatatataatacataatcataantttatataaaagaataataaatcataattttttctaaaaaacatctttaaataattcttgtgtttaaataatagtttattcttctcacttttatcgtaaaaaacatattaaatactaaatttataaaacataaaaaatactttgaaaatactctnttatgggtgaaaggaacataattaataagtaaactaaaaatggaaatttanatttcatattcttttcaacaagaaaaatcgaaaattttaatttgatcatcgtaacaaaatattttgactaactctaaattatttcaattgattgttattaatttgatcactgcaacaaaatatctcattaataatntttggttgaagcatgatcagacattaaatataagtatttnttcaaaacaaaaatataaattataat

SEQ ID NO: 56576 - DNA, 439 bp, Glycine max
  unsure (1)..(439): unsure at all n locations
tgatctctaagtcacctgcggcatgcaacgcttgtaatttagtcaacttttagaatatatatttattttgtttntaattatatnttggacctatttttggacttgtaatggtttgtgaccttntattgttatttttaagtcttttaattattatattattagactacgacccttttgtttaactctatgttattctttctgttgggttacaagtgtgaggtgaagtcccacattgggtagaagtagaaaggttgagcaccatataagtgaggagaagacccataaacctgagccttaaggttttgggttagagtgtggtgtcaggtcaccttatgtggtggctcgtggtccacaggtgtatcccttgaatcttcccaataattggtatcagagtcaatgggtcgaccaggttccggctcagacgagtatactagtaccg

SEQ ID NO: 56577 - DNA, 460 bp, Glycine max
  unsure (1)..(460): unsure at all n locations
cttgtgatgatttcactgcttctagcttctgcatggcaccttgtaatctttcctcactccnctttatctccaacaaggcctttttaatctcttctttggtgcctgcaacctctccatttatgataagctctttatctttttttgctgcttctgtttcagacttgagcttatcaagaggttttgacangttactgactatcgaattgggcttttcctctgcagaagacacggcttctaatttagattntgctctcaagagcttgtaactgagggttctaacttttgcaccaattttcgattccgtgttctttaaatgaatcgtggctgcactcacatgcttcagctcattttttgtgacatccatagaggccataaacttaanacccttgtctctaatggaagccaagatcttctttgctgcttctatatcttcttttgtagcccctaacacaccaacatc

SEQ ID NO: 56578 - DNA, 359 bp, Glycine max
atcttttatatatatatatatatattatatatttatatatatatatattaaccaacctcatgtagtatataggcgcatcacacaaacttccaaaagagaagctcatatgctcgaagtcactttcaagcagggacggaggcacgttggaatggtcagaatctatcgatttattcgatgcacatgagaggtcatctaatatgaatatataaagatcacatcttacacaaaatatgtatacctatatattgtttacacgcgccgataatatataataaaaaatatatttacaatgtgtatagccaggttcgcatctaccaccaacacttctgaatttattaaaacactagaatttacgctat

SEQ ID NO: 56579 - DNA, 464 bp, Glycine max
  unsure (1)..(464): unsure at all n locations
agcttctagccacattccaaccacatcctattccaccctaccgaatgcgctgttctacaacaaccatgactattgactgcatacaattccgaatgtaaagcagttgtcatcccaatgtaaattgagaaacaaccatgataagcaccgcagctatccctgaaaatgccccccactagttgcatgaccaggaaagcttctacaggctccatctgtattgcacttaatatatcccaaagttggcgaactccaatcagtggcggacctacagccagcgagggtattcacttgcaccccctcattttttaaaattcattaaatttataaataaaatcttatatttttatattttatcttatttatatttatataatcgaacccactgattntattttttatatattacacccactgacttagaggtttagatccgccactgactccaatcctcttgtttgactacaaat

SEQ ID NO: 56580 - DNA, 258 bp, Glycine max
ttttcagaagaagggacacattgaaaagaattgtcccgggttcccaacctcgctagagaagaaaagaaaatccatctcatttagatcgttacgaatctaatatgggtagcttaatattacccccggagattgattctggaccactatacatattgaaaattttacagggtatgcaaacctagggaaccagtgggaagtgagctatttttctatcacgcatatagtaggccacatgtggggccattgaacttgcatttg

SEQ ID NO: 56581 - DNA, 311 bp, Glycine max
  unsure (1)..(311): unsure at all n locations
ctttatagagccccaagggagatgagtcatggtgacgctttttggctaggcaaaaaggagcgacgactctgactgaactagagagaaacgtgattggaaacatatgcagcactggtgatgcatgcacctatgctgacactcaagcaggaaatgtttattgtcatgtgatgcggaggctaagatcacaatctctattntaggcaaccacaggtttccaaaatatgctcttttatgaatttgtgcatacatcctangccattacgggcgcccggggaaatgttacaacattcaccctataggtgtagacacat

SEQ ID NO: 56582 - DNA, 329 bp, Glycine max
  unsure (1)..(329): unsure at all n locations
actaagctcganggtaaagtctacgattgcacgtgctcatgcactattgtagctctggctatacgagacattttccaaacaaagtcaggttcacgataactcgcctgtgcttcttcttccatgctatatgtagcaaagtgagtgattccacaatatttgatgagttggaaaatgaggccgcaattatactgtgccagttggagatgtatttaccacctgatttctttgacatcatgattcacttgattgtgcatctggtcagagaaatcaaatgtagnggcctgtctatctacggtggatgtactcggttgagcgatacatgaagattt

SEQ ID NO: 56583 - DNA, 440 bp, Glycine max
aacgcctctagttcaacacccgtgctgcctaatgttcctatccatagggaagctcgcaagttccaactccgaacacgactcgaccggccggtaattccaacacgacaaggaacttctctccgaggccattgccggaattcaccccgctcccaatgacgtacgaagatcttttaccatccctcatcgccaatcatttggccgtggtaactcccggaagggtcctcgaaccccctttcccgaagtggtatgaccctaacgcaacctgcaagtaccatgggggtgtcccggagcattccgtcgagaaatgcttggcccttaaatacaaggtccaacatataatggatgccggatggctgactttccaagaggatcggcccaatgtgagaaccaacccgctccgccatcatggagggggagcagtttatgcagttgagtttgat

SEQ ID NO: 56584 - DNA, 439 bp, Glycine max
  unsure (1)..(439): unsure at all n locations
attgttttcaaagtataaatggggcctatacttgaacaccccttgggcttattacacctatttggaagataactccttatgaactggtcaatggatgaacaccnacctttatcacctgagaattgttggttgctcgtgtgcattacaaataatgaggaagactctctcggagaatttgatgcaaaggacgatgagcctatctttcgtggatattgattgcatagcatggcatatagagtattcaataacagagctctgaatgttgaataatctctacatgtgctttgtgatgaaactaactctattgttcaagaaaattctttataagaagatacaagtttttaggaaaataattctgaacttgaagatgacatcaaggctgaagaactagaacanagcaaagaaatctctatgactatgccaaaagaatttcctagag

SEQ ID NO: 56585 - DNA, 392 bp, Glycine max
  unsure (1)..(392): unsure at all n locations
tcgcagatntagtggttgctagcaagaggattgtatgggtatgataagaggcaaatttgatatgctgcttcgatgaaaaggaagcctgcggaaaatggagagaataagaaggagggagaaacctatgttgtgattgtcgtttctacatggccaaatttcccactagcttgacaatatcaatatgcatccaatatcagtccttcttattacccaccaccctaccagccaagaacacccaatcatccacaaagctcgtgatccaatcctaccccccaagggcattggatagaagactccaagaagaattgaccagagatgcaatagaaggccctatggttctcatgagccttanggtagattttggcccatgtgataagtatgacccacttatc

SEQ ID NO: 56586 - DNA, 466 bp, Glycine max
  unsure (1)..(466): unsure at all n locations
agcttctcgatatattatgcacatgaatcggtcctccgagtgacaagttatggccatttgaattnttcgagagcttccgctgctcaatttcgagcgtctcgatatattatactcctgaatcggacctccgagtgaaaagttaagaccatttgaatttctcgagagcttccgttgntcaattttgagcgtctcgatatattatgcgcctgagtcggacctccgagtggcaagttatgaacatttgaatatctcgagagcttccgttgctcaatttcgaccgtctcgatatattatactcctgaatcggacctccgagtgaaaagttatgaccatttgaatttctcgagagcttccgctgttcaatttcgagcgtctctatatgtgatgcgcctgaatcggacctccgagtgacgaagtatgaccatttgaatttctagagagcttccgttggtcaattacgagcgtc

SEQ ID NO: 56587 - DNA, 383 bp, Glycine max
actaagctaaagatgcccgatcattatcccttatatgttgtgtatgatggctatcagaatgcattccttgattatagggttgaaccaagctcatgcttttacaaaaaggttcatcaagtcaagttgaaatatggaagtaaccgtcttgcaaaattggggcaaaagatgaattgagtcacatcactgcttcatctactgccaaacatatataagaatgttgatgtccttggtacttccagtttcactttgacaaagatgtcatggaccatgttgaaaatctaaactgattcaaccccatattctgtgtaaaatttgcatacttaactgtcaccattcgcatcattcatgctttcattggtgattgtcattgatctttcttgaaa

SEQ ID NO: 56588 - DNA, 369 bp, Glycine max
  unsure (1)..(369): unsure at all n locations
tctcccacaattttctataaatagggggagttgtgaagtgtttaagggttcagccccttagcacttctctctctttcgaatttgctctgaaaaattgtttccataacgtttccgtgaggaattttgcgaaggttttcgaccgttcttcgacggttttcattcgttcttcatcgttcttcgatcttcaatgggtaagtacctcgaaccaagcttttcgattcattctatgtacccgtggtggtccacattgtgtttcgggtatntttattctcgtttcatttactttttatacccccttttaccttccttaagccattttatttaagtcatttctcgcttaacctaaaaaataaataaatttccaccgat

SEQ ID NO: 56589 - DNA, 458 bp, Glycine max
  unsure (1)..(458): unsure at all n locations
agcttggatgatgggcagacatgatncctttcttgtcatcatcaaggaggaggagaatgatggagctgtatacatgatcttgatgatgtcgaaagaagaatcaaacagggctcatttgcttcaagattaatacaatgatcttttcaacaagccaagccttgattcaagatttcttcaagatcaagccttgcctcagaacgaaagctttcaagtcatccaaggcacatgtaatcgattaccaatacatgtaatcgattaccaatggttggaaagtgtgtaatcgattacacatcatatgtaatcgattaccagagactctgaacgttgggaattcaaattttaaatgaagagtcacaattattcaagaaaaataattgtgtaatcaattacactaatgctgtaatcgattaccagagaggattttcaaggaatatcgcccatagccacatcttatcatt

SEQ ID NO: 56590 - DNA, 399 bp, Glycine max
  unsure (1)..(399): unsure at all n locations
gagcaacttcttcttcaatatttttataatggacttancacatggagaggagtgtgattgatgctgccagtggtggagctcttggtgatatgacccctgctgaggctaggaatntgattaagaagatggcttccaactcccaacaattcagtgcatgaaatgaggctattgttcttagaggagtccatgaggtggccacggattcatcttcatctactgaaaataaaaagcttgaaggaaaacttgatgccttggtcaacctagtaacccagcttgccatgaatcagaaatctacacctgttgcaagagtctgtggtctatgttcttctgcagatcaccattcagatctttgttcttctttgcagaaatttggagtaatgagcaacctgaacttatgct

SEQ ID NO: 56591 - DNA, 419 bp, Glycine max
acctcatggacttcagtacagacaatgcacatgattgcctgactatatagagggactgagactctggtcaaatcaggcgggaatcctaagcacgagttatatcaccaagggctccaccattggcagcatcaatcatactcctctccatgttgctaagtccctcatagaaatattgaaggaggagttgctcagacatctggtggtgaggacagcttgcacgccaatttttgaatctttcccagtactcatacaagctctctccactaagtttcccgatgcctaaaatgtcttttctgatggtagcggtcctagatgcacggaagaatctctccaagaacacgctcttaagggcataccacctgaaaatggacttgcgagcacaggagtataaccaatctcttgcactccctcagagatga

SEQ ID NO: 56592 - DNA, 277 bp, Glycine max
cgcctgctttaaccaattctcctttgagttcccttgcatgtccatggtggaaaatcaccattgaaagacctcattgaagctcacagattcatcctccatagaagacccacaagcaagcttccatcaataatggaccaagtgacattctagattttaagacttggttctttctaaactaacataatgcgcaatatatgcacattccaattatgttccatggaattatagctcatttggaatgggccatactcgaacaatatttgattcaaaataatct

SEQ ID NO: 56593 - DNA, 438 bp, Glycine max
gactataacttttaactcggatgggcaattgagcactttaatatatcgagacgcctgaaattgaaaacggaagctctatgaaaagtgcaacgacaataacttgtaaatcggatgatcaatcgagtcccgtaatatatcgagacgctcggaaatgaacattgaagctctgagcaaagtcagacgacaataacttttgaatcggatgtgcgattgtgtcgcatgggatatcgatacgctcgtaattgaaaacggaagctctgagataagcaaacgacaataacattcaactgggatgtcgattgcgccctgaatatatcgagacgctcgaaatggaaaaccgaaggtctaagaatagtcaaacgacaataacttttgactcggatgtccgattgagcctcgtaggatatcgagacgctcgtaattgaaacagaagctctg

SEQ ID NO: 56594 - DNA, 464 bp, Glycine max
  unsure (1)..(464): unsure at all n locations
agctngcaatcatcatatatataattggctacttttgncaacagtccacatatatcaaattcaagcacacattgtttcacaacttagtgagaagctagatgaatacaacgtgcaagcanaaagtttcacgatggcataatgtcaggttgaaattgattgctaaccgtgaaaaagatggtcgtacatataatgtacctactgttccagaagttgcagcactaattgtaggcaattttgatgcaaattcaaagagatattattattgaaacccagcatggacaattacaaaggatccatgaattacattctagttatctagctctacaataccctctcctatttccttacagggaagatggatatagacctgatatcctacatagtagtacaccaggtagcaagaaaaggaagagaaatcgtcttacaatgacggagtgacttgctacaggctataatgcagatca

SEQ ID NO: 56595 - DNA, 275 bp, Glycine max
tctcgcagggtgcgggatttaaagcaaaactccctggaaaaatcaggctaagctcaatgggttttaagtatagtactaattataaaaacaaagtatctatttgttaaggttactgacatgtataggtgagcttgtatagaagaattatgcacctcatttagactttcttgggtagccatcttctgacttcttgatgactgaagctcgtacaatgaactagataaaattaatctaggaaatatatatagcggatgaccgtacacttataagttttt

SEQ ID NO: 56596 - DNA, 393 bp, Glycine max
catgcaagcttgaagtgagacagtgtggaagagtcattcttcctacttttattcgttgatcacagagtggtacctggagatatgttgcgggggtcacgagaccttggggacgtcaggtggggtgctattgtccaaaaacaagcttgaccaatcccgacccaacccgggcatagtcagtcagtgaaaacctgtgatgtacctaaacaggcgagctcctgtaagtcaaccgataaaagaacacataccacacagcaaggatgcttgtgtggtggctggccagctatggatcttgagtgatatttggaagatggcctctggtaatcgattacaaaggatgtgtcatcgattacaaggcttaaaaatggagtcaagaagtgagatggcctctggtta

SEQ ID NO: 56597 - DNA, 406 bp, Glycine max
  unsure (1)..(406): unsure at all n locations
tcttagtctcacctggtgaattcgtggctacttcatgcactcctctaatgacaatagcatcacttctggcactaaatgctgggagtttgaagtcatcttcttaattaaatttctggcttcagcaagggtcatgtcttcaagggctccaccactggcagcatctatcatacttctctccatgttgctgagtctttcataaaaatattggagaagaagctgctctgaaatctggtggtgagggcaactggcacataattttntaaatctcttccagtattcatataggctctctccactgagttgtctaatacctgaaatatcctttctgatggtcgtggtcctggaagcanggaaaatgttttctaaaaatattctcttgaggtcatcccagctcgtgatggtcctt

SEQ ID NO: 56598 - DNA, 495 bp, Glycine max
  unsure (1)..(495): unsure at all n locations
cgtgatcttacagcacctgaggcatgcaagctntgatgaaagtacagtctgagggtaactctatacgcccttaatgcaaaacgaagttgggtgttaacacatggtcagggtaggtggctgggtttgcatgaaccttctcccttaaggttataaattcattatgcgactgcaattcctcagacagatcctcaagaaacagaaagtgaggcattgagaggatgaaaagcgaggcacttggtacatctaaacatcgtgataacgcgtctgcaaccacgttagttttgctcgttctatattgtatagagtaatcaaaacccaacaaatgtgccaaatatcggtgttgctccggcgtntgaacaacctggttcattaattcttttaagcttctatgatccgtcaaaattacaaagtggtgccccaaaaggtattgcctccaattcttaacagcagtggtaatggcagctagttcacgaacataggtggaggagctaagca

SEQ ID NO: 56599 - DNA, 479 bp, Glycine max
  unsure (1)..(479): unsure at all n locations
ttgtagaatcttacaagaaagtagtggattaataagaacttattatgttctcttaaatgaagcgggagttagtctttacatatccttgctcacaaatttaagtacaaaatagtgtagtttaataaatacaagtttaaataaaaaataaataaacaattcaataatgtagaatagaaaggatgatgtatctacaaatatgttagcattatatttaaggtttatttatgtgttacatgagtgggaatgatctatttattaaaaaaaaagttagacttagactttntaaaaagtcttttttgattaaaaaggccaagttttaggctaaaaaaaaccttaattaagcctggagatttacttgtttatantaatatttatatatattacatattacataaatataacacatatgtaatatttatatttaataataattattaatattaataataattttataataagaataatgtatgtaatga

SEQ ID NO: 56600 - DNA, 384 bp, Glycine max
cttatgattctaagattttagagaatattattttgagaggatccatttctgcacatgattgccataactcttcaatagtaaactgtattttcttggttatatttggctgggattctcaagtactaattttgatgtaatactcatatgcaaattgcatagaagaatcataagcaatagggttttttttttgaacgttagcaagagcttaatatcatactcatgcaaatatttagtttagttgttttttttttttttggatatcactattctttccttttactgacaattgtaattcaaactgcctacttttaatttttttaaagcaattatcaatttgaaatttttcagcaactattctttgtggttcaagctctagaatccagc

SEQ ID NO: 56601 - DNA, 253 bp, Glycine max
ctaagcttagttcagagccttggaacaagttagcctgtctccaagaattggttgccactctacatctcctagagttcaactccagtctcaaaaatatcacctaaaagtctgcttcgaggacttgagcacaataccccgttggttagagggatatcagtgataccagttattcttacgtcatgagtaattggatgcccagttcgtttattttttgtgaaatagaaactttggcactttccatatggacttcttt

SEQ ID NO: 56602 - DNA, 423 bp, Glycine max
  unsure (1)..(423): unsure at all n locations
taccctgtacgttctgggagcaacatacatcatatgtttggacaacacaatacttctttccatcttcgagtaagcgtccgcatcactctgcgaaagagcactgcaccgtcaaaacatctacaagagctgaggatacaacactcgcgttgactgcctggagatctgcgagaccctgactcttctatcagaagcctcaccgtcaccgtgttgactgtgtcgcgcaactctcacgcgcccattcgcgtaatcgtcgcacgtcgcccagaatgtcacgtgctcgattacggaaatgcccgactacgaatgtttgaaagtttcgaggcaggtgtcgaagcaagcccaagatggttttgcagttaagagcgaagacagtgtcgntgtaagccagtgacttcttcttaagaggccgtggcacgcccaata

SEQ ID NO: 56603 - DNA, 211 bp, Glycine max
  unsure (1)..(211): unsure at all n locations
ttgctagatgcaggggatgccgcanagcacttctattattatgttgccctggagacactgcaaattaggattaatcttccaacacttaactttgtggacatgctctgagtgcttttgtgcatctatattattcatttgaaccttctgagcttgatcctattgcttacatgatgtggcatactatgaaccatggttagctttggtttgatgc

SEQ ID NO: 56604 - DNA, 373 bp, Glycine max
tccttgagaagctagagcttaactacacccttctaataactaagctcaccttcttgagaaagaagctagagcttagctacacacccctataatagctaagctcacccccatgacaaaatacatgaaaatacaaaaaaaaagtccctactactaagactactcataatgccctgaaatacaaggctaaaaccctatactactagaatggccataatacaaggcccaaaagaagaaaaaaaacctattataatatttacaaagaagagtggacctaaccttggcccatgggctcaaaaatctatcctaaggttcatgagaacactaaggccgtctctatcagctctagccctatactcttggagctcttgctcat

SEQ ID NO: 56605 - DNA, 373 bp, Glycine max
  unsure (1)..(373): unsure at all n locations
ctaaatcccgctgttgtttaatatgcccaaaactgtattgtggcttcgtatcttgcagttaaaaatacaataacttgagtattctctatattggaaagctatattaataattaattntaatcggcaacaaactgcgattggtttgaattgcaatgagaacgtacacttctctcgcagattttgttattgctatatgtgaagaattcgtcctgcccttacattattactaattacaatggtctgtcttgattcaaactgtgcttaaagctactttctcttctccctctagatgataggngcatttctttgtatgatagacctgtgcacctgttcataatcattcttactttaagcaggagacttgccggtattc

SEQ ID NO: 56606 - DNA, 462 bp, Glycine max
  unsure (1)..(462): unsure at all n locations
agcntttagaaagttcagactttctaagccattctcacttatagaagaacgatcgaacacgagaaatgtaactcatcttaacacacagctggcttggacctagatttatgtgattaagccctgtgcaggcgaggaatcccatcattgatatcatccatacccgatccattaaaaacattttcccttttggtaaacgaaaacgattctcgttgatgcttatccaagtcgtcatcatcatcaacatcatcatcatcttcatcaggaagcacaattgaattgctatctacacttctgggaagtacaataggctgataagccattccaggttcattattaacatgaccattagcatgcctcgagcttccactaagtgcattatctacagctacaccatccacagtcgctatccatgacctcgagcanataccacccatattatgcncaattgctggtgacttatat

SEQ ID NO: 56607 - DNA, 367 bp, Glycine max
  unsure (1)..(367): unsure at all n locations
ggtagcacaattggaccggcccagtctctaatattangatgtgattcatgatgatggtgtngtttcatcctccactcattaacccacatatctctctccttatctcaggtgcttgcacttcaatgtatcaacaaaaaaagggtttttgctcattctattcatcagctgaagccaaacattgttttatttgcttggttactatgcagaaataaagaaaaacagacanttaaatgcttaaacagactttcgttcacaatataaactatattggcgcacagctaattcaacaaaaagaagaactacttatttatttaattataatcattaacccatttcgaaattctagacagaaaagaaaatatgaaca

SEQ ID NO: 56608 - DNA, 459 bp, Glycine max
  unsure (1)..(459): unsure at all n locations
ccttgaacaggcaactaactcctcantctttaccatgctatgcgctcgcgactggtccctttcctcccttcgcaacttgagttcattattgctaccccatagggctccacgaaatttgttccggccatactcttccttgcgagccctcttggtatctcgttcaagggctcttgcggtaatagcattctcttcacgtacctggcacactccttacgaacgtgtgtagcacccaacttgaacttgctcttggcgagttctgccttatctaactcgcttatgagagcttggacttcctcgtcctcttccggtgctataaaactctcttcgctgacgacttttaacttggcgagccaatctanacctcttatgcgaactatcaggcattcgtggtacccaccaatgatgccattacgaatgcctctaagctctcgatctttcttactgggttcccatgcctat

SEQ ID NO: 56609 - DNA, 323 bp, Glycine max
catcgaccagctcaactcttaaaacttttcaacttgttggcctctgatctctacatctcttgcttctgtactttagtactcacactgtcgatattttaaaaaggcagggccaatatcctattttctaatctggttgtgtggtaccaggactcaatcgctaataatactatctctttcctttacatacccaaaatcatataaatacataaattattcagcgctcttatcatagttatttaagcatctaaaaatattgctatatgcaacaccacatataagtacatagattattcgaccagcttatgtgctatcgccatatatat

SEQ ID NO: 56610 - DNA, 311 bp, Glycine max
actcctttaccttaactgccaagacataatcctagtagcatggaccgtgacaattcgatatcctataaaataaatctattgtcgacttacaaagcacataaactaatactcgttaagtatgcaaataaagattttattgaataatattcatattttgcgattgcaaattgtatataaaaaataatatacaggtcattggtttcgatgattattacactatagtattgtgccttaagaggaaataatcttatctcgaaattacgtgaccaatattatacaatgcttttatatatattttacgtaatacattt

SEQ ID NO: 56611 - DNA, 455 bp, Glycine max
gcaagcttatccttatggcttgccttcggacttttctccccgtgccactctggatgatttaagccaagcccctacttctgaggggcaactcccgccttatgacgactatcccgggcaagacgatgaggaaggagatacccatctcggccccctgctccacctcaaagatccgtccccacatgaactaccccaaccgaacatagtctgtcatatcccggcctcacccacacccgtaaaagaatctgttcccttcgcggaagataagggaaagatagaggcgcttgaagagaggttaagagcagtcgtgggccttggcaattacccattcttagatttagcggatttatgtctcgtgcccaatatcgtcattcctcccaagttcaaagtgccagactttgatacgtacatagggaccacatgtgcaaaggggcatcttctgatgtatcgcccaaaga

SEQ ID NO: 56612 - DNA, 456 bp, Glycine max
  unsure (1)..(456): unsure at all n locations
tagcatcatttcttgcacctgaattgtgggatgttgaagcaatcttctcaatcaaattgctgcctcaacatgagtcatatcaccaagagctccaccactggcagcatcaatcatactcctctccatgttgctaagtccctcatagaaatattgaagaaggagttgctcagaaatctggtggtgaggacagcttgcacacaatttcttgaatctttcccaatactcatacaagctctctccactaagtttcctgatgcctgaaatgtcttttctgatggcagtggtcctagatgcaaggaagaatttctccaagaataccctcttaaggtcatcccagctgaaaatggacctgtgatcaaggcagtacaaccaatcttttgcactccctcagagaagangaaaagccttaaaatattgatcttctaacatangggctcatggggacaacatatgact

SEQ ID NO: 56613 - DNA, 457 bp, Glycine max
  unsure (1)..(457): unsure at all n locations
atgcttcaatggagganattaagagggagatatagagagaggngggaacacgaaattgaaggaagataacaaggaagagaagttgaactttgagttgtgtctcacaagactctcattcatcaaagttacaacaagtgttacacatgcttctatntatagactatgtagcttccttgagaagctntcttaagaaaacttccttgagaagcttctttgagaaaatttccttgagaagctagagcttagctacacacacccatctaaaaactaagctcacctccttgacaaaattcatganaatacaaaaaaaaaagtccctactacgaagactaccaaaaataccctcaaatacaaggctaaaaccctatactacaagaatggccaaaataaaaggcccaaaagaaggaanaacctattctaatatttacatagataagcgggctcatacttagcccat

SEQ ID NO: 56614 - DNA, 421 bp, Glycine max
  unsure (1)..(421): unsure at all n locations
gatgatatggtcttcaccgacgaaaggatcaaagtgggtctaaaaagatgcanatctgatcatcatgcttgataaatgaaaaaaaactacggcaaatgaagagggtgaaaatgagggggaagcccaggctgtgactgccattcctatacaaccaagtttcccaataatgtcattactcagccaataacaaacctatctccttacccaccgcccagttatccacaaaggccatccctaaatcaaccacaaagtctgtctaccgcacttccaatgacgaacaccacctttagcacaaaccaagaacaccaaccaagaaatgaattttgcagcgagaaagcctgtagaattcaccccaattccagtgtcctatgctgacttgctcccatatctacttgataattcaatggtagccataacccta

SEQ ID NO: 56615 - DNA, 457 bp, Glycine max
  unsure (1)..(457): unsure at all n locations
agcttgagttcataagctcgagagaaaaagatataatatattaataaatgattgataatgtagtgtaataataaaagaaaaacaatattgatccgatgtttgaaatttttggttgtcaaaatataatcccttttaattatatatgaattagacgaagaaaaaaagggatcttatttaatttttgaacacttatgtgaaattgttttaacttaattataagtgatcttaattgtgttaaatagttaaaaggataacttcatcacttatagtcatcttagttagtttgagcaaatttgcttctagtgagagatacatgtaatctatctacaaataaaataaatgaatactacttattgtaaatnnttttcttctggattattgaaatttagaggaagggaatgacgatgtagtccaagacatgananaactttagataaacaaatcttacatttattcg

SEQ ID NO: 56616 - DNA, 318 bp, Glycine max
  unsure (1)..(318): unsure at all n locations
tattttcagctgatgaagatgaatttgtggccacctcatggactcctctaaagacaataacatcatttcttgcactaaattgttgggaagtggaagccatcttctcaatccaaattctagcctcaacaagagttatatcacctaaggctccaccattggcagtatcaatcatactcctctccatgttgctaagtcccttatagaaatatngaacgaggagttgctcagaaatctggtggtgaagacagcttgcacgcaatttcttgaatctttcccagtactcatacaagctctctccactaagtntcccgatgccta

SEQ ID NO: 56617 - DNA, 378 bp, Glycine max
ttcctttgaacgccctcctgagccttgcttccgtttgctctgtttgaagcttactacaacccttaaatgaaagaccatgatgtctccatatcctttacgaattctggagctctggaattggattgggaataagagtggcggggttatgcgctcatggactaacatattcggggctcacgcacacccgaaaaataatctgtccccttcgaggatcattacggatcgatataagctcttgaatacagagctataggacttcttggccttgctacttacccattcttacatttatcggatttatgtctcgagcccaatatcgtcactcctcccaagctcaaagagccagactctgatacgtacatagggacgacatgtcca

SEQ ID NO: 56618 - DNA, 401 bp, Glycine max
  unsure (1)..(401): unsure at all n locations
nggtggtactatagctggactaaataggtgttgtttaatttattgcagatgcaatgcggagcaaggggtgaagaccatatcttactaccatcatatgagaatgagtaggtaatactaagatccgaatattattatccctgaccgaaaatattatagacgctgtgtcacataacatagcaattgactcatatactggaaaaaaaaatactcctacgccatcattagccattattacttattgatgtcttttacaaaaatgtcgcccacttctttcgaattgtggtgatgatgtcgatgtccaattgtgtgtcattagcaccccactgcgagtattcataattgtaaggtactactgtcaatgtaaaactcagatctattgccttgagttatggattcatgga

SEQ ID NO: 56619 - DNA, 359 bp, Glycine max
  unsure (1)..(359): unsure at all n locations
ctgaangtggcgggcactaaggtcaagatagaaagatgagctgaatgatattagcatgaccacgactgaagcgcttcagcgagaaacgaagaaggctcgataagaagagtggatgtagaacaagttttgatgggctatgtggcgcaccacaactgagctcatacttatattggatgataggcgaaaatcaaggatggacagcatggtgttagaggatatattgacaatttgtcaaaggtcgaagagaagtttgacagagcagttgaaccatacgatagaaaatatgttggcattcatccatcaatatacagagaaggtgcgccttactgctagtcatgggcaaatgctgggacatgaac

SEQ ID NO: 56620 - DNA, 339 bp, Glycine max
actagctttgcacactcaatattctcaagattcaacgttgatatggtttatgctggaagtgaaaccaatttgagaaaccacggtaatgaagtggaagcgtttacgagcagttatgtgtttctctaaactcattaaagcttcttcaagcttcttagagctttaaacctcgaaatctttaagatccaaggcaatatggcaagtttggagtgcaacaattgaaaatcacggtacaagtgcaggttttccgggagctctgacttcttaaactttagagctcttaaacttctggatcttaagatctaaagttttgaaataatctatttcccccctttacaatct

SEQ ID NO: 56621 - DNA, 317 bp, Glycine max
cctatcatactcagcttgacttgtcacccacctgagatgaggtgttattatttagatatctacatactgcgcagagctttgggtagctcatgttatgcataatgccaaccgtatagctggtttagttaactcacaattaattatataagattctaacttctaaggttctgtaatttgttgttacagatttcagacacttgaaaacccgacatctgtctctgtagatatatgtggaacttatgcccttaattaagtaactttctgtgatatatacatttaacatatgattgatatgctttaattgtctagctaacaat

SEQ ID NO: 56622 - DNA, 452 bp, Glycine max
gacatcttgactcgctctcttatctgacattcaccacagattctggcttcttctatattcagattgcgaatgcctctaacagcacctttgtcaataattatcttcatgcctcttaagtgcagatgtccaaatctttgatgccatattttgacttcatcttctttggagaatagacatgtggaggagtaactggtttcttgaggcgtccataggtaacagttgtcctttgatctgctgcccttcattaggacttcactcttctcatttgtcaccaagcattctgactatgtgaagtttacattgaatccttcatcacacaactgactgatgctgatcaagtttgcagtcagtcccttcaccagcagtactttgttcagactacgaagtccatcatggactagctctcccattccagtgatctttcctttagagccatctgcaaatgtcacata

SEQ ID NO: 56623 - DNA, 365 bp, Glycine max
  unsure (1)..(365): unsure at all n locations
taagctcaagatcaactaagttcactccctctcacatcanacttggacaggtgcctgctcacaattccaatcaggatgtgttatgagtcggttttgggttgatgttattatttgtttagttttatatacccaccgctgatcaacagatttgttntttgtttgtgtttattttataccgaagtatctgaaaaaactgttagtttttttcttgaaatgttacttttgcttatgatatcactttaaacaggcaaacaggtatcatcacgggctcagtctggaggcttaaaaagtgcagatgtttgtactccagaggtacccctgngtttgngtgtgtggtgtgtggctttggatcttttttatacttc

SEQ ID NO: 56624 - DNA, 502 bp, Glycine max
  unsure (1)..(502): unsure at all n locations
acgtgatctctcagtcacctgcggcatgcaagctggatagttaatactcctttacatgaattatcatccatattggaacataaaatccatctatgtcaatgagaagacttagaatgtacatcccattttttcgtatataaattaaacaaaattattaaaaaataaatagagatttagaaaaatattgcggttttataaataaataaataagggagaaataaattattaaaataataatttgaaggacaataaacatgatattttatttattcatttgataggaaataaaataaagtatttatttataaaatggagtaaataataggctgtgagtaccctaactataaatagaggcatcttaggttagttntgagactaacgatgcttnctacgcgtcctcttcctctcaatttcgttttcctttctcctcataccaaaaacctctctttttcccgcatactaccgaatgtgtctcagaaaaactacaatctcggactcattc

SEQ ID NO: 56625 - DNA, 275 bp, Glycine max
acgacaaatattgccccccccacccaaaatatgaaacaaagcacgcacaaactggactgggactggacctctaaaacaaagcgaagaaacataaatgcgaaacttatcgcataatcttaacctacaactacttatctatacatacaactctacaggagcttgagcatggaacgattaaacacctataccatataaacaatgcttgctaacaacatccacatcgaacttgatccacgtaatgatatcctcgaaaccaaaacagcggcggagaagac

SEQ ID NO: 56626 - DNA, 473 bp, Glycine max
  unsure (1)..(473): unsure at all n locations
gcaagctataagatattntgcaaccatcatttggatattcaacaagatcatcctatatcttgatattggcaccttggtgattagaatatttctcccgtctctgatggaaagactacaatctttcatgtgaatatcataccctgtttcaagtaattagcccatactcaaaatattgttcttcatagccgggacgttttcaacattcgatatgaatgcatgcctctcatctttcaaacgaattgagatcttacctttgccttttacaggagaattagaattatcaccaaatgagacattgcgacttactgattcgtcaagatccacatacatgcttatatttctacacatatggctgcttgcactactgtcaaggtaccatgtgaaatcctaccatgcttggtaaagactccatgcacaaagcattgagttgcctaaatgctattattatctcatcatcacttgagtctggaact

SEQ ID NO: 56627 - DNA, 401 bp, Glycine max
atttcactatcattaaattctcttttttcaattaaagtattcactgtaattaaattatgttaattacctgtgttgggtaaacagggagttatgggactgacgaaaccactagataggtcggatcatgatgtcgatgatcccctatatctgatgacattgaccatcccatagaattttcttaagccgttgcgagttatgtgggatgctaccgtatttggggtgtttaatgacaacttccccttgtacataaagcatcaagatctctctaaaataacacatggtggtcaatgtctcagcatctctattatacagttgtgggatttgtaagtcactttacattattgtttattacctaacttattggtttaaaatcatacataatttactttattttaacaaca

SEQ ID NO: 56628 - DNA, 288 bp, Glycine max
agcttgaagtgatttggatacaatttttgtttgctctagaatagaataggaacgtaatagttaaaagaaaaagaaaacctaataggaaaaggaagcgtcaacaggaataggaaaaccaataaaaataatgaggaatataaagggacacataactcacacctaaattaaaggatatgatttttgtttgctctggaataggaacgtaataagaaagttaaaagaaaaaggaaacctaataggaaaaggaaacattaatagccaataaaaataatgaggaatataaaaggg

SEQ ID NO: 56629 - DNA, 383 bp, Glycine max
  unsure (1)..(383): unsure at all n locations
ctgactccacgcttaagcttgatatccagtagctcattttcccttgtttgtcatcttgcttaagcctggtctagtgataaacctcaaatttactatattttcatatgcaatttgagatgtttatttgatactttaggccttgttntgaatcaaatttgttatgctttcaatttttaatatattttagatatgtgtcgtaccctaatttcatccgaggaccattgtttggtggcatgcaacctttgctcgaccgcctcgatgtactgaacacccatcgntatgtaatccgtaaagtntcgcaacattcatgaggtcaaaaagaagattgttgcgtcatccataaagnttcacaacattctataaagaatatgggtgtcgttacg

SEQ ID NO: 56630 - DNA, 273 bp, Glycine max
agtgaagcgatctttttattttataagaagaaaacatacaaagaaaatcatttttgttttaaaatgaacgcttatatcattgaattgtatatattaaggcttaacacttaagtaatgtgatacatctcatagaagaacaacaaattaaataatattatacaaatatacgatttaagaacaaatattttatgcatagtcagcgcataatgattttatttaccaaataagaatgtacaactttatataaaacataaaatatttaaaatctaaaat

SEQ ID NO: 56631 - DNA, 461 bp, Glycine max
  unsure (1)..(461): unsure at all n locations
agtcttatatcttgagccaatcctttggtgatccagctaagtttctcatagagcagcttgtagctagagcagctgattctgccggttattttcaagatctaattctaaatttaattttattttcatcaatgtaaatgcttatttgttgtattttatgattattggttagctaagtaacgctcatgcaggtcttatcatggaagagttgatgaatattccagctgggaggagaaggaagtaccatgacgacgtgaccgtaattgtaatcatgcttgggatgaatcagcgtacttcaaaggcatcaacttgcatttaagacttgccacttcaaaaaaaaaaaaaagttaaaaaagaanaaacaaaactttgtacctatggagctttttcacaggacgctctcgtgttaagtaatatttcctaggttcaagtngtgggatttaaaatgtatatatgacatctta

SEQ ID NO: 56632 - DNA, 285 bp, Glycine max
agcttcaaccaatgggagatggaccatttcaagtgcttgaaagaatcaatgacaatgcttacaaagttgagctgcccggtgagtataatgttagttccaccttcaatgtctcagacttatctctttttgatgcagatggagaatccgatttgaggacaaatccttctcaagagggagagaatgatgaggacatgaccaagaacaagggcaaggatccacttgaaggacttggaggacctatgacaagggctagaacaaggaaagccaaggaagctcttcaacaag

SEQ ID NO: 56633 - DNA, 301 bp, Glycine max
  unsure (1)..(301): unsure at all n locations
tcattgcctaacaagccaacttacaacagcaagccccaagagactcagcataatgatgcacagaccaaagttgcgtatgtaaaaaaatagtatgaccaagtgaaggtgcaaattgcaaagaagaatgaaagctatgccaagcaagcccaaaagaaaaggaaggaagtggtacttgaacccggtgatgatcttggacattngaggacaaatgttttccaagaaggagggaatgatgagaatcatgaaacaggccaaatacagtctaaaggcccaagtggagaaagacgaaggcccaagtgga

SEQ ID NO: 56634 - DNA, 327 bp, Glycine max
  unsure (1)..(327): unsure at all n locations
ctacttggatgttgattcgcactatttgttcgctagaattgcgaatttgttggaagtgaccaatgtgactcctgctgatattgctgagaatctcatgccaaagtgtttgaatgaggatgtagagtcttgcttgctgaatntgattcaatctcttgagaaaaaggtggcagaagaagaagaggaagaagcacggttgaatgaagaaaaggtcaagggggaacctactcagcatgagaacaaaaataatgggcacagtgtggaagatgtgaaggaaaatggattcgtgctttgagtgggaaatggaaatactcttgattgagattgtac

SEQ ID NO: 56635 - DNA, 330 bp, Glycine max
cgggacccgataccgttagagctgcacgcatgccagccagacttctgttttgtattacagacggatcgaaaacacggcaaccggggacaaagaggggaaccttatactaacaatcatattatatatatgtgcatattccaccttacagggtggctttactcccctgcttctaaatattgtaagagcaagttgcgaagtgaaggctgatgcaatttagcattggtcttgtgagaattagacttcgtttatagaaatatctaaaaccttgcaattgcataaaaaaagacaaggggctcttgcactgtgagcttaaagattgacactattttc

SEQ ID NO: 56636 - DNA, 284 bp, Glycine max
agcttaatataatgtttaaccaccatggacaaaagcaaacaaatcacaaatgcttaacaaccatacagacagaagcaacaaagtttaaccatcaaaagcataagctaaacataaggctaaccactcaaaacagaagcaaacatgtttaaccacctaaaaagacagaagccaaccaataacaaatgcttaaccaccataaaagcagaagcaacaaagcttaatcatcaagagcagaagctaaacatgatgtttaaccactcaagacaaaagcaacacatgcttaa

SEQ ID NO: 56637 - DNA, 369 bp, Glycine max
  unsure (1)..(369): unsure at all n locations
tcaagttacattgagtctcanattcaaaccaaaccgcaggtaccataattatgctttggaaacctcacaggccatgatcgctccccaatatgcaagttcacatcatttacattatcaatgccaagatttctgatcaattctaatggtatgggctgctcaccacataaaataaggtgaatntaattagttatacttttgacaaagatgctctcatgtgtaaaactaaaacactaatctaattaaatacctcatgatacgatggattangcttgatagagagggtgaactgattccctgacacttctttgttcattcttggagtttcagaatccaagaggaaaaaaaagtgaaattaaattgacaaacatg

SEQ ID NO: 56638 - DNA, 280 bp, Glycine max
agcttgcttactataccttcgatcaaacacggccgagtatctgtcatggcccggatttaaggcgggctgcagcaccggctccgcttccctaactgtactggaggcggatgccgaggctttatcctctatagttttctggagttttaacatgacctccaagatggaagccatttgatcttttaaagccgatagaccggccttcatctgttcctgcacgccctcttcattatccatttttctggatcgagtgttataggggtgccttggtgttttcttagat

SEQ ID NO: 56639 - DNA, 367 bp, Glycine max
  unsure (1)..(367): unsure at all n locations
tgacgagagttacacgccgagcagagattccatccgtgccgttgatggttntcacaacttgaaggtaaattnttattttattggtttgtgtttgattgggatgattatgcttaattatttggtgttgactttgggaacattnttaggagattaagaccgtggaactcgtgaaggcaactgggtgggcttatctatccttgtctggagctgatcctagataactacagtgttctttctgtatccagtttttgttggtttaagtttgtatccagtttttgttgtttggaggcctggattnttgttttcaacgaaattttgtgtgcatgttntggtagatntctagcatagagtaaaaattaacagaatg

SEQ ID NO: 56640 - DNA, 285 bp, Glycine max
caccggtggcatccaagtttatttggcattgaccaaaggaagggctacaaacaatcagtaactctggttacagacttgaactgcccagtgatgataatgaaaggtccaccttcaatgtctcatacttatatatgttcgatgcatatggataatccgatttcaggacagattcttttcattagggaaagaatggagaagacatgaccaagaacaaggccaaggaccaacgagcatgacttgacagaactatcacaatggctaaaacaaggaaagccaacgaagcct

SEQ ID NO: 56641 - DNA, 525 bp, Glycine max
  unsure (1)..(525): unsure at all n locations
tggcatgaggnatgtaccttgaancccttgaatactagaacaaacccaatngactaaaagaccactacaacagcaagcccaagatattacttttgagcttttaccagcagcgttcgtataaaattgtatgaccaactgaatgtgccaattgcaaacaagaatgaaagctcatcccctcctcacccctaaaaaaaggaaggaagtggaacttgaacccggtgatgatcttggacatttcatgacaaattgtttccacaatgagggaatgatgagaatcatgaatcatgccaaatacagtctaaatgcccaattggataatgtccaaagctccagtggataaagacatatgtcccgattggtaaatgatgaatgcccaagtggctaagattatacgctctaggcttataccttttcatcactattaatatatgctgaacgcaaaataatcgtatggtccataaaaacttgcaaataagatagtatattatagatattgcccaatctaaaaagcgccgttttttaatt

SEQ ID NO: 56642 - DNA, 285 bp, Glycine max
atcttttataagtgaaatcaaatgcaaccatctccctaagtgtgctctcacaaggttgaggttgagccatgttttcagtgtgaaaattagtagttgaatgctcaaaatcagaatattcagaatcaccaacaacggaatactcagaatgctcaaaatactcacaatgctcgaaatgcatagaatgatcaggatgcacactatgcctaagtaatctatgaaaggttctatctattttaggatcaaagtgttgtaaatcacctggattgcccctagtcatgcactata

SEQ ID NO: 56643 - DNA, 528 bp, Glycine max
  unsure (1)..(528): unsure at all n locations
acgcgcatgtcactgtttatatctncgaccactataccattcccatagcagagcctgaaccttgtncctttaaacgtaatatacagaactgctcttatatgacgcgagggtgtcctccgctctttnttattggtggagcacggagcacgcgaggccagagaaatcaccatctgctgtgaagatgatggcgctctattttatcaatcacaattgtatattaatcaacaagagattgtgtgctctcatacgtaaatttgaacataaaggtctgacagtgttatctatcaaggtagaacgagatgtcgtgcctgtgaacactttttctccttttatactccaaatgtcaaatgtcttcacttcccggttgaacgcatcaaactcttggacctcaagaccgtctactatgactttgaataccattattaacctattataatatatatataatattagactgtcacatcagtaaattctgtcccgttaaaactgaccctaaatgttttcttcttaaatactatatagagatcg

SEQ ID NO: 56644 - DNA, 195 bp, Glycine max
tgtatatcattcataattatccaattatctttttgtgtaatctgtctaaacatagacttacatgttataccgactactttttgtttatagaaggattttcttaagaatatttgccattactttggactacctctattcaagcgaaaaacatattctggtttgaacttgtatctccactgaagacgagatcttgat

SEQ ID NO: 56645 - DNA, 264 bp, Glycine max
agctttttttcgtggggactttctcataaaatggcatgatcactggcgggcgccatctcaaatagccctgttgcttctccagggtcttcaggactatctttccccctgcagaaacatctaataattgcttggtatgtggtcacaacccatatataaacatattcaattggaaggggtcataaaacccatgagtgggaacttttcttaacaatcctacgaaatctttccatgctctactgtaaaaattcatagaaactaatgaaa

SEQ ID NO: 56646 - DNA, 559 bp, Glycine max
  unsure (1)..(559): unsure at all n locations
tggcaatgttggtttgatcccttgannnncttgagaccntttgaanaccgcgcacnatnnaatactcaagcacctacgcggtagtgcttcaatttgttggtggcatggatattatgccaagaagacaggaacttatatgcagtagctacgggcccatcggcggcgactctggttggttgaaaacctacacacaagatctggattggctccccaatttgagaaccacttatggggtagaggttgaagcttcggaagaggacgaagaggtacatgcgcttaagacaaaactcgagatagcctgaacagtcaaagaaaagttcaagttagcagctattaggatccgaaaggagaacgcccaactgagagatgttaattagccaccaccaaggccttagaacaagagaccaatacggcccgtagtgaataacatggccgaaacatattccgaggggctctgtggagcagcaacagcggagcttagcttcgaatagagggaatggaccaatcacgagtagacagattgatcttgaagaatgaattgacgattttcctattgccg

SEQ ID NO: 56647 - DNA, 285 bp, Glycine max
agcttgtttatttaatttctagcgttccgatatattacgggactcaatcggacatccgagtaaaaagtaattgttgtttgaatttgttcagagcttcaacattcaatttcgagctttttgatatattacgggactcaatcagacatccgagtaaaaagttattctcgtttgaatttgctcagggcttctgtattcaatttcgagcgtctcgatatattacgggactcaatcagacatccgagtaaaaatttattgttgtttgaatttgctcagagcttcaacatt

SEQ ID NO: 56648 - DNA, 407 bp, Glycine max
  unsure (1)..(407): unsure at all n locations
gcttcttgtttaaacctcgatcggacatctttcctgaccgacgtcgactaattattttttcgatcagtatcggagagtaaaantttttttccgaggatggcgaacgttttcccttccaagcaattgaaaagatgccagtgtcggccgaaacacaacttcgttgtggtcgaacgaagaaacctagccgacctacatagaannattttacgacaacaccgaacaaaagagctacctctatcgtaaaaaaatattatcggccagcgtttgtaaaaaagttgctcaacgtcgactaaaaattatcagtcgcggccttacaacaacagaagtcagccattctactttctattaaatcctcgaatattatctggatgatgntcgatcggcgtcatccggtgacgcttcttttt

SEQ ID NO: 56649 - DNA, 285 bp, Glycine max
agctttgtgtattttcaaacgacaataacgttttactcggatgtccgattgagacccgtaatatatcgagacgctcgtaattgaaaacagaagctctgagcaaattcaaacgacaataacgttttactaggatgtgcgattgagtcccgtagtctatcgagacgctcgtaattgaaaacagaagctctgagcaaattgaaacgacaataactttttactcggatgtccgattgtgtcccgtaatatatcgagacgctcgtaattgaaaagggaagctcttataaa

SEQ ID NO: 56650 - DNA, 550 bp, Glycine max
  unsure (1)..(550): unsure at all n locations
gacgtgcatgacgttattcgtgcactacaanaccagcnttggtttcattacgagcgtcttgatatattacaggactttatcnaacttttcttagtcataaagnntattgtcattctgagatttgctctagagctctctgttctcacattactcaacgcgtaagatatatcacgggacttccgctgacatccgagtaaaaagttattgtcgcttgatctttcttagagcttcccttttcaattaccagaatctcgatattctacgggacacaatctgacctccccagtggaaagttatgtgcgtttgaacatgctcagatattctgttttctattacgagcggttccatatattactggactcaattggccattcgagcacaaaggtattgtcgtgtgatttttctcatagctctcagtttgtatttcgagcgtcttgagtgactactggacactatccgacattcgtagtagaaattattgtcgtttgaatattctcacagctcttatttcatatcagcgctgcaattctactgggctcttccacatccg

SEQ ID NO: 56651 - DNA, 276 bp, Glycine max
agctttatttttttcacgttaacattatattatacaaacacaatttgttcaaactaaaaagaggaaatcaatataccagattaaattaacatttaaccaagaaaagaggaatatttcattacttgtatgataacaatttgataatttatgtttcagattaagtacatacatgtatgtatgtggagatataaaattggtcttaagaggaaaaaaaaaggaggaaggaaattaattcttcaataattttttaaccatattaaaattatttttatgaaa

SEQ ID NO: 56652 - DNA, 244 bp, Glycine max
atatatatatatatatataaacacgtatatatatatttgattcggttgatattgacttttatctaaaaaaattcaatttgatactcgaatcacattttacaagttttaattgatgtgattgagattcgacttaatctaagaaaaaccttccttcaattcaatcgatttaatttaaattgttagatccgactaatgaacagtcttccaagtcgaaaagaatgacctctattatgtactacaaaga

SEQ ID NO: 56653 - DNA, 286 bp, Glycine max
agcttgggaatatttagatctaagttcttgagtcatctgagcattttcgtgcaagcttcatgttgatggattgacaagtgcaataattcgtcccaagtagtaaagttaaaatggaagtctaagtgtcaaattcatggaactttgtttgtacttaggtagatgaatatttttttaataaaagaagttaaagaaaattgacttgaaaaggttataaaaaaagcagtaatttaaattgctagaaaattaaatcaaacaagagaagaatttaaaccagaatttaaattga

SEQ ID NO: 56654 - DNA, 377 bp, Glycine max
  unsure (1)..(377): unsure at all n locations
actcagctgagcagatggatgtcaaacaacccttttgcatgggaagctggatgagaccatttatatgaagcaacctactagntttgtcaaaaagggtgatgaacataaggtatgtttgctcaatccatccttatatgatcttaaacaatctcctanaatgtggtataggcgttttgatgattatatgattaaaattggattttctaggagtgtttatgactattgtgtgtactagaaatgtcacaagaatgagaaactaatttacttgttggtgtatgttggtgatatatatgctactgaccagctaaagcatgactganattgctagagttaagaaattgttgaatctagagtttgagatgaaagatcttggacat

SEQ ID NO: 56655 - DNA, 282 bp, Glycine max
agtttgtttaacatcttcgtaatattgagtctcttgtaataaccaagatggatggaacaacaaatgagcatcccagggctaaggtaaacccaacttttaatcgcaagtatgtggtacatgctaggttttggattttcaatcaagaatcagaagccgttattcctttcataatccatctttactgagtaatgatgaaagatgtaaaaatttattgatcaatactgatttgttttaactttgcagcctgatggatttcccactctcctcttcttcccggcaaga

SEQ ID NO: 56656 - DNA, 359 bp, Glycine max
  unsure (1)..(359): unsure at all n locations
tgctntgcattgtgttaacaaacagggcaacctcattattttgtgccactctggntcagaaaaagtgtcttccttttcttgtgggtttgctccattgtctctgttctgggaaacagaaacaaaaagaaaataacaaataaatgagaccggcacagattgtgttggttctggtttggttgctctgcattcacactcccaagttgttctgcgccaatgtagagtatgatcacagagcattggtcatcgacggcaagcgcagggtcttgatctctggctccattcattaccctcgtagtactccagaggnctctctctctctttctctcttcgngtgttctgcgtttcttttctttgaactt

SEQ ID NO: 56657 - DNA, 283 bp, Glycine max
agcttgtttggcggctagccagctatatatcttgggtggtatatggaaattagcctctggtaatcgattatcattcatgggtaatcgattacagggcttaaaaatgaagacaggatgttaaatgacctctggtaatcgattaccaatggtgtgtaatcgattacacagggtgatagggcactggtaatcgattaccagttgggtgtaatcgattacatagtgctacctgccactggtaatcgattaccatttaggtgtaatcgattacacagtgtaatttgta

SEQ ID NO: 56658 - DNA, 374 bp, Glycine max
  unsure (1)..(374): unsure at all n locations
ttggaaaatgatttctatacaaaagttagtcgtatgaagcgactaatagtgggtaatgagaaggactgatattggttgagtattgatattattaggctaatgggaaatttggccatgtaggaatggcatccacaacatgggtttctccctccttcttattccctccatttggcccagggttcctatcaccagaattcatcgaagcagcgtaatcaaatctgccttttcttaggcctacttcgatcttttcgccgacaaaaactaaatcggcaaagcttgaaggcgtgtaacccaccatcttctcatagttgaacactggtaacgtgtctactatcattgttatcatctccctctccatcnatgggggcactact

SEQ ID NO: 56659 - DNA, 271 bp, Glycine max
agtttacttataatcggcatgtaagactcttaccaagaaataatttgcaaaaaaaaaaaaaacggaacgaccattgaaataaattctgccgagaatgcatttataaaatataacaaatgtttgtgacttgggggaaaagggtgtgataaaacgaacactaataatctataaataggccatgaggtaaaaaaaacctaagccttggagaattccactaacgatcaaactcagggataaccaaaagaaccaagcttaactcaaacatatcaac

SEQ ID NO: 56660 - DNA, 363 bp, Glycine max
  unsure (1)..(363): unsure at all n locations
cgatcgtagaagctaagcagaatacatttaccgcgtaaatgattgtttatgccggcaagattcatgattattataataattatttaaaagtcatatcacatataatttgtaataattattttaaaagtcatatcaatataatttctaatcgaccaagtgtaaagtattctgagtgaccatgtatcacaattataaactntgataccatgggggaataaaccacatttatcttaaaactcttcttaaatgcctccaaagctaggacaaattccaagtgataatattattaacaatacatgttaagacaacaagaagtcaagagtcaagacagatgctagcnagtaataaaagaacatatatagc

SEQ ID NO: 56661 - DNA, 279 bp, Glycine max
  unsure (1)..(279): unsure at all n locations
agcttgatttggacattcgtgcgacaacttatgaccatttgaattacccgagagcttccgntgttcaatatcgagtgttgctatatgtgatgcgccaaaattggacattcgaattaaatgctatgaccatttgaatttctcaagagcttccggcgttcaatactgagcgtatcgatatggggtaaccctgaatcggacatccgggtgaaaagatatgaccgtttgaatttctcaagagctatcgttgattaatgtcgaacctctccacatattatgcac

SEQ ID NO: 56662 - DNA, 595 bp, Glycine max
  unsure (1)..(595): unsure at all n locations
catcttacgtcagttatcacnancntnntnnatatctagcttnntntaacanccnccaagcnnacccggtttgaaaccttgagacactgagagcaccngngannaancnnnagncnnccggaaganaaagcgcccagatcggacgtgcaggttggaagctatcgtcaatttcaaatggccagaacttgtcacactcaggggcgagtcacgctaattatatttcgacacgcttggacttaaacgtgcgaagctctcaacatatacagtatgcccataacttctgatactgatgttcgactcgggcgcattgttaggcgcgacgctcgaacatgaacgccgaaagctctcgccaaatcaaatggccagacttttcgctgggaagtccgaggctgacgtatccatatagcgacgcatcgacatgcacgacggaagctcttgagaaattaaatggcataactttcacacagaagtccgagcgtgcgcataatatttcgctgactcagactaccagcgaagctatgagaaatcaatgccaaaactctcccacggaagccatcaggcgatatttaacgcccgctcaaataacctccgaacg

SEQ ID NO: 56663 - DNA, 286 bp, Glycine max
agcttagctccaagaagggatggaccttttcaggttttggagaggatcaataacaatgcatataggttggacctcccagaagagtatggagtcgggaccacttttaacatttctgatttaattccttttgcaggtggagctgatattgaggaggaggaactaactgatttgaggtcaaatcctcttcaagggggaggagatgatgcaatcctccctaggaaggaaccagtcaatagagccatgagtaagaggctccaagaggattgggctagagctgctgaagaag

SEQ ID NO: 56664 - DNA, 649 bp, Glycine max
  unsure (1)..(649): unsure at all n locations
cactcccgaagctccacatcngnnnnnnnnngtcncnttnnnttgtgngnatnnantaaacccccnnncnccccgggaagcagccttttgaaccccttgagtaccttagccananccgcgacncnnnnngnnnncnnnaccngnnaannnanccncgaacaccaggganacgcacaccccgactttgtctctctcggcccatccaagcnagagcccattgctactaccccatagagcccctcgaacattggacctgctccatncttccattcgggctcttttcggatcttgctttaacgctgccaaccatagcatgtagacatctctcagctcatcacactctttcttgaccctagtgactgtcgtncttagcttctccttgaccattatacattcatttcgagctgccgcttcaaagcttgcacttcttcactttcctcaaagactgcagcttctttcccacttgggcctttaagccttgggagccaagttatcccttgcctcctaaacctcaaccacttgtgatagccgctgatgacgccattgctacttcccctaaactccttatcatatccttccactggattccatgctttatggaatctctgaagaacctcacatcggcttcatgaacctcgcgcgacgaaag

SEQ ID NO: 56665 - DNA, 285 bp, Glycine max
agttttgttttcttgcattacccacatcagcagcggggaagaattttattgaaacaactcttacacctgcgctgaaacagttgcattcaccaaaaaaaatttatccaacatttgcacacattatctacaaaaaaaaccgtctttttttttaaaaagaaaggttgattgcttgcacctttcagcttagattcctaagcaaatcacacaccgtaaagttcaacaatatataaatcagttacgaaacttttgaaaaattcgggagaatttcatataattattacgcga

SEQ ID NO: 56666 - DNA, 315 bp, Glycine max
  unsure (1)..(315): unsure at all n locations
gactccaactgggcgacaatagtattaaattcattaatacgatgagccacagagataccttctcccatcttgaggttgaacaaccgacgcatcaaatatactctgggggctatcgatgacttctcgtacatatttgataacgccttcattaagcctgcactcttctcgtatacaatgttgaacgcgacattcttggctaatgtcaatctgatcacgccaagagtctatcgatctagcgagttccattcttcttgcttcatgtcgtctggcttaatgcctgatgagggtngatacaacttcttttgatatagataa

SEQ ID NO: 56667 - DNA, 275 bp, Glycine max
agctttttttcgtgggttctttctcgtagaatggcatgatcactggctggcatgttctcaattagctctgttgcttctccggggtcttcagttttatctttccccctgcagaagcatctaatagttgcttggtttgtggtctcaacccatctataaacatattcaattggattggttcagaaaacccatgagtgggagtttttcttaacaatcctctgaatctttccaatgcttcactgagagattcaaaggaaactaatgaaataaagagattg

SEQ ID NO: 56668 - DNA, 153 bp, Glycine max
gggtagaggttgaagctccggaagaggacgaagaggtacatgcccttaagacaaaacccgagatagcctgaacagtcaaagaaaagatcaagttagcagctattatgatccgaaaggagaacgccaaactgagagatgtaaatatagccacca

SEQ ID NO: 56669 - DNA, 284 bp, Glycine max
agcttccgttgttcaatttcgagcatctcgatatcttatgcgcctgaatcagacctcggagtgaaaagttatgaccatttgaatagctcaagagcttccattgttcaatttcgagcgtctcgatatattatgtgcctgaatcggacctccgagtgtaaggttatgaccatttgaattgctcaagagcttccattgttcaattccgagcgtctcgatatattatgcgcctgaattggacctccatgtgaaaggtcatgaccatttgaatttctcgcgagcttccg

SEQ ID NO: 56670 - DNA, 364 bp, Glycine max
  unsure (1)..(364): unsure at all n locations
tggtcataacctntcacatggaggtttctattangcgcataatatatcgagacgctcgaaattgaacaatggaagctcttgagcaattcaaatggtcataaccttactctcggagggctgattcatgcacataatatatcgagacgctcgaaattgaacaatggaagctcttgagttattcaaatggtcataacttttcactcggaggtccgattcatgcgcataagatatgaagattctcaaaattgaacaacggaagctctcgagaaattcaaatggtcataacttttcacacggaggtgagattcacgcacataatatatcgagatgctcgaaatngaacaacggaagctcttgagcaatt

SEQ ID NO: 56671 - DNA, 286 bp, Glycine max
agcttgtttgattatggggtacccatcacatgtggtactaggtggcggtcgggcgatggtgcacaacaagtttttcacatccacaatgcgcgcataaacccaccatcccctgttgcccacctccaactgagctcacgtactcccacgtagcccatatcctcgtttctctcaacaccgggtccccatcaatcctcccaagcttccacaacatccaagcaaaacaacattcacacagcacaagctatcacagccaagcaaaacaaagcaaaggcagaaaactctgccc

SEQ ID NO: 56672 - DNA, 430 bp, Glycine max
  unsure (1)..(430): unsure at all n locations
tgaagatgaatgtgatggtggataaattactagagaagaaggttctggaagttggaaccttgttggacctacgataacaggatgatgcgtcaagctagtgacattaaaagagcgcttactgtgaggcaacccaacttttctttcccttctctttatttttcttttcatgtatgatctcttgcatgtagttaggatagttgcttgtgattgtgattaattntgcagcttgtttagtagtgaacaacggttcttaagcatatgtgaagagatggacagaacagactcagaacaatattnttcagttgttcatccgctaagcgcaacccttgcgctaagcgccatgtcttcacgcgctaagccttaacttgctcgcgctaagcgcttagaccccctgctagtttgctgaataagtcaactaagcgcacatcac

SEQ ID NO: 56673 - DNA, 313 bp, Glycine max
gtgtcaagaaattgttatcgatatgagcatacttattttactgtactttcttcaagttcctatttgctgctgatgattctccaagtattaactggaagcctcctacgaatggtgtggcgcgtacatagctcattgtgactggtcagtccaaaagcatttgaataaagccgctgttggagggattctgccaaatgattctgggcatgttgtctttgcattatcggcttaatatttcgtctttgctgtgttaagagctgaactcttggatatccttactggtttttgcatttccttctttcaaattctaattgta

SEQ ID NO: 56674 - DNA, 89 bp, Glycine max
gccccggggacctaaaagcaccgcagcagcaacatcttttgtcaaccaagcacagaggggccgggggcgagaaaagaccacggaacgca

SEQ ID NO: 56675 - DNA, 430 bp, Glycine max
  unsure (1)..(430): unsure at all n locations
tgtcgcaacctacccttcggcgggagggcgacgcaaggctcacggnggcatcttccaaaggaggaaaacacgcggagtcgccaccaacttttattcgggaaaaacgtcagaaaaaccgaaacgtgtggtctacaaactttaagtttgaaaggttcgagagttatttttatgcacgggaaatgtattagcaccccacgcgtccgtaacaagggacggaaacctttaatgaaatgtgcaattatgacttcaaaactatgtattttccttttttatctttnttatgtaattttcccttttatatagtgttttttatgtttttttaatttgcgtggtttttatgtattttacttttttgtggttgacaaggagtgtttcctcgctccaacgtattttcngtgcgatgattaaatcagacctacgtagttatttg

SEQ ID NO: 56676 - DNA, 242 bp, Glycine max
agttttattttcctatgtgtacggctacggccaccctctctctccatcacggcgaaactcccatttcgtcaacgcattcatcttctccaatacgccattcgcatcccttctgaccgacggttattcctttaatgaccctagcatcatcacccgctcatcttctatatccctacgccgccctccctgaaagatgcattaacctacctttcttgtcacccccccttcacaacacgccctagaga

SEQ ID NO: 56677 - DNA, 588 bp, Glycine max
  unsure (1)..(588): unsure at all n locations
agagcncttgaaaccattgagtnaccttgcannanccnncccnnnnncnnnnnnnangncnnggannnttagnaagacaaagatccacacagcgatgtcagcgnngnatcattatattgaagcacagnaccacangnagangcagacactatatatgatacatcagctaatgcaatcataacactctgacactgcactccgacgacaaggagatgagatatcagatgacgctcgcaaggtattatatacactagacgcgtgaacaaggccaactcacacgaactacagactcaatctgcagcacaataaagacatgctgtctatatccatacctgaaaccggttctatggcgcacagcactggatccgatgacagtgtttggccaagattctgccccactactcgacaggagaatgccatggctaatgcatataaatataactcgtcagataagcagggtctgtatgttcatacattcgcgcgaagaccacaccaattattgtgatgtgagatgacaaactgcattaaaggtcttatttttggatgctgcatcaccatgtaccgaaattaataatatcttctattgcg

SEQ ID NO: 56678 - DNA, 277 bp, Glycine max
tatcttcttgcttcaatcccctgtattgaggtcaacacacaaggagtccatgccttttagtgttctccaacaagtataaaaaaaaattattttttattcttgacttgctttttggtcacggagaagagagaagacaattgtaggatcgatttgttgacactttcataatctcccctctttttcaatgttctctaataaatattatttgttttcctcgacaatttcccttttttatatctttccaaatttgcttcctattaatgattttcatgttgtt

SEQ ID NO: 56679 - DNA, 277 bp, Glycine max
agcttgtttttataatctacagttacaaggcttctttctaccaagacacgtattccattttctgcacaaagcccacaaccatttaatatatgtataacatcattccggtccattcctataaagaaacaagctatatcaaggaatattcctttctctgtatcatcagttaaaccatcatagcttatttttaatttctcttgtacttcatcattaggaattttcttaagtttctccagtacattattccactctgttacctccatatcaaacaaatagg

SEQ ID NO: 56680 - DNA, 517 bp, Glycine max
  unsure (1)..(517): unsure at all n locations
gctgccctgacacttagactctgaganacccccnnnnaaannnacgcgcataggatctgaaagtattgtatagtcatttatattcacagggcctttggtgatggaacgacataatgatcatcgcattagatacctcccacccacgctctttcaatgctgatactggacttactggtgtgacgacatcgaattccacctccacatcctcggtctgcattgagaattggaattatggatacaagcagagacactntctgtctcaatcgaggtagtagcgatgcaataaacttcacaaaatgataataaagacaatttgataggtagaaccttgaactcaacaaacaaaagtgagcgcgcataactcaaatttatctacacgttaaaggacttcctcatgatatccaaatctcagctgaaatcacagaaaaatggcgcttgtggcacaaaagccacatatgtcacgcaataccattggaatcatggttgtcaatctttgtgcaaacaaatcaaaacaaag

SEQ ID NO: 56681 - DNA, 285 bp, Glycine max
agcttgaatgtttaaagttttgccatgttaatatgagccattaaatcttgagaatctttgagcccttattttcttcgtcctgataagaatttatgcttgatagtagtctcaacatctctcatcaggggcaattatcattcttggtcaagagcgatgattcttgttttgaagtcaaagaataacatctagtttatatagatcgaactcttcgcaaacctacagctaagggtccactttttgcatcatgggacaggtgcaatattatggtcctatcataaactaatc

SEQ ID NO: 56682 - DNA, 334 bp, Glycine max
  unsure (1)..(334): unsure at all n locations
tacctcggtcaataattcacatttgtccaaagtcaatttttttaattaggctgctgaatcttatgatcgcgctataagagatgacgttcaacaatttgttgttgctgcttaatgtcagattctccaattcacaaaatgatttggaaggacaattgtagtgccaaagcttctcaacatttgatttattacataaattaccttcaattnttccattgacaactgcaaggaacaaaatttaattttcaatttttcggaacagagataaatacataactaacaaagaagtgtgaactgcaattatgggtggaaatgagccgagctgcttgtcgagggt

SEQ ID NO: 56683 - DNA, 261 bp, Glycine max
agctagggctctttctctccattgagtaaaacatagatgagcctctatcttggcccttatccatgatttgttctgggtcctcgtcgtcgaggccaagaaacaagactgagtcatctcctatgtatttaggggctattttcaatcctatctcccaccataattcatcctccactctttcaaacgtagctgggtttcttaggcgtcctacccacgcgtccttcaaccactggggtgctcaagatccatgtccatgtggattga

SEQ ID NO: 56684 - DNA, 401 bp, Glycine max
gagagaaactcttcgaataatcacacccattttctgattatttgtcttcgtgttgaatggaccggttagctggattatacacctatgcagagtgattctgtgttgaacaatatttgtaagcctttaatgtgtataaacttatgagataacgtatgtgagtatggcagtctcatacctaatgcgtaagtggactaatgacatgcaaacatttttaggagacggtaacattcattgtatggatactattcataccactaagctattttttactcttgttattggtttaatcttctgcatacaataagtcttagaaatgtggtacaagtgagcgagttgccatcctattgtttaataaataatattgaatcctctattgtccttacatgttttcacatgactct

SEQ ID NO: 56685 - DNA, 288 bp, Glycine max
agctttgttccaaaatcctgactcaccataaaccttgacccagggtgagaatgtcaatccttaccctcggaagcaaaaaaagaatagaggggaaatttccaatcaaagaaaaagagaaggaaaatttccaatgaaagcaaaaaaagaaaagaaggaaaattccccaatcaaagagtgggagaaagcaaaaaaagaaaagaaggaaaattccccaatcaaagagtgggagaaagcaaaaagaaaagaaaggaaaattcccaatcaaagaatgagagaaagtaaaaaagg

SEQ ID NO: 56686 - DNA, 275 bp, Glycine max
  unsure (1)..(275): unsure at all n locations
tcacctggttcaagcacgactttctttctgcttttgatggcttgccttgcatagctcgcatttttcttttcaatgtgaaccttcacttgctcatgcaacttcttcacatactcagctntagcctgtgcatccttatgcttaaacatagcaatgttaggcataggcaacaaatcaagaggagtcaaaggattaaatccatacactatctcacatggtgaacaattagttgtgctatggacagcccgattataagcaaactcaacatgaggcaaaca

SEQ ID NO: 56687 - DNA, 287 bp, Glycine max
agcttcattattcaatttcgtgcgtctcgatatgttacgggactcaatcagacatccgagtaaaaagttatggtcgtttgtattggctcagagcttcaactttcaatttcaagcgtctcgatatgttacgggactcaatcagacatccgagtaaaaagttatggtcgtttgaattggctgagagcttcaactttcaatttcaagcgtctcgatatgttacgggactcaatcagacatccgagtaaaaagttatggtcgtttgaattggctcagagcttcaacattca

SEQ ID NO: 56688 - DNA, 376 bp, Glycine max
  unsure (1)..(376): unsure at all n locations
tgcattcggaattgcgaaagccccactccatcattaggattattacctgacatctcaaacaaacaaatcaaacgtnacaagacaattatagttgctgtttgaatacctcacccactcaagtgtatcacacaattatggcttttctctaatgaaacactctngccttttaccactctaattccccttgagttcttaggcaattcaagagattatggccacaacaaagaacaattcaccaatatgtgtaagggaaggctagacaaggaaaaggttaaccaagaaaaaggctaacaatgtttttatgcacaaatgaacgaaataaaattcagaatttaggaattcaagtaacaatccttcatgcaaccaatatattacc

SEQ ID NO: 56689 - DNA, 320 bp, Glycine max
ccccccacacccggactctctgcatgcaacccgcagcttgcctaccaaattttttggcgcaacaactcccgttccacagcagaatatggtccaagatagggatggaagtgactagactggcacaggaacctatttcctcaggcttaaaaatataagaactgtactatatagtacctcccatatattccaattatctactttaacatgatgcacccttcctaacataacaattatggggaatgatgtctggtggcctcaataatatatgcatggtgtaatggttcatttggcatgcatgcatgaaaccaggccatttataa

SEQ ID NO: 56690 - DNA, 280 bp, Glycine max
agtttatatcaggcacgactgacggataacgtgaatcctacccctaggagaggatcaggcccctataaataaaagtttcatagttatttgggggttgtagcgcggaaaaagattcctatagtccactccaattggaatgttgtaccaaaatctttaaagaacctaatatgggatgacattctaataagtgcatatttaagttgatattcgtatgcaactttgtttaattatattgcaaatatgattattcactaactattacttataattttcattcgga

SEQ ID NO: 56691 - DNA, 282 bp, Glycine max
agctttttgtcttacagaatgcaaaaagttgataaggataaccactcgtgtatttccgcccgtcagcgtgactcaaaagtcagtatgacagatcttttgagcacggaagatgacgtaaatcaccgcgtgtaaacgggcttgttggccgcaattgacgaatggcgcaaaagacgacgttagtctctacgtgctatcaggcttttcgtcttacagacagcaaaaagtttatacggataaccacttgggtattttcgcccgtcagcgtgactcaaaagttagtat

SEQ ID NO: 56692 - DNA, 340 bp, Glycine max
  unsure (1)..(340): unsure at all n locations
actcagctgatagcacgcgagactacgtcgctttgcgacttttaatcggttcgacagcccgttgacatgcggagatatacgtcatcttccgcgctcacaagatctgtcatactgacttttgagtcacgcttacgggcgtaaatacccgagtggttatccgtataaactttttgctgtctgtaagacgaaaagcctgatagcacgcagagactaacgtcgtcttctacgcccttcgtcaatcgcggccgacaagcccgttgacatgcgaagatttatgtcatcttccgcgctcacaagatctgtcatactgactttngagtcacgttgacgggcggaaata

SEQ ID NO: 56693 - DNA, 279 bp, Glycine max
agttttttctttttgtcctcctcatagttgtcgcgtgagaatacatgctctactatcatcacccactccaagttggcctcgggaccattctttccttttaacggaggaacgtcgagttaaattccattaatccggtttagtctaggaacaccaccattccctcttcgcctcctttcttcttcattatgatccctatcctccatttgatccaacctctcatggaatgcatcatctcgtagtatcatttacctttccaaatgttggatcaaagctttcatt

SEQ ID NO: 56694 - DNA, 281 bp, Glycine max
agtttctttaccttttatcttcataccaacaatcaagtgttttaaacagtttggacccccaatcaacaatcttgtttctaccaagtacatattgagaacttgcattccatatagagagacattcccttgataccaaaaatctttcaagcctacttttttccctaccattaggcctataacacgtaaactacctcccaatgaaaagtatatcctctacccccatgtcatcaatgaaataattgaattcacttctttctctactttcatagtctcccacaacc

SEQ ID NO: 56695 - DNA, 626 bp, Glycine max
  unsure (1)..(626): unsure at all n locations
ccgccccgcacactaggtnatnacaaacttgntttgagnnnctataatctncttatctnantcccccccccaacgcagagcgttgaanccttgagaccctcganacctcgaananccaaannnaagcaaactntaaccaaaagaaacgagacgcattttatccgtataaacctattccataaccccctccctatcgcaggaagctttgacacgtatacagattcccctcggaactgagtcgaaatagggatgagtgcctctttgtagcatcttcgcatcttcacaataagggaaacaccttttcttgcatgagtaattaccgattaggtgctctaaatttcgcattgtgaattagtatatgttccctctcgtgccatctaaggatgttgaagaatcggctcaattatatatatatatatatagggagagacataggagttaattaattacggctcacgagtgccgattacctnttctattaatctatatagcgagtatggatatttggtgcctatcggcaaataatgcgcgaactaagcagtgattctatattattaattcgatggtaaagaaatccgtagcggtgtgataatatatatagtataccgcaaatctacaagtagacg

SEQ ID NO: 56696 - DNA, 289 bp, Glycine max
atgcaagctttgatgatatgttttcttaccgcagaaaggatcacagtgggtttaaaaagaggaaaatccgatcatcatgctttgataaatgccaaaaaaaaaaaactagggcaaacgaagagggcgagaatgagggagaaacccatgctttgactgccattcctatacagccaagtttcccaccaacccaacaatgtcattactcagccaataacaaaccttcttcttacccaccgcccacattatccataaaggttatccctaaatcccaccacaaagtctgtctacc

SEQ ID NO: 56697 - DNA, 216 bp, Glycine max
tccctactgttggcatgtaccacgtgatctcggcttaaatcaattgcggatttgttatcaattcgctagctgttacgagtgaaatctctcatgctcaatttttgcatcatggctttgaaccatttatttggacccgctgctatctgagccaccatatattttgctttacttgttgacatggcaacttcactttgctcttttgaccaccaaaagatt

SEQ ID NO: 56698 - DNA, 265 bp, Glycine max
tagcttgttttaccaagaagaccaacatcttccatcagaatccaggcttgtaaaggattcgtctcaatcgattggagacagcgattctttaaacgattgattgagtaattgacgccaaaacaccgcctcgctgtaatacactcttcctggctggacaagatgaccattttgacaagttatctctcttacaaaaacttaaagcctattggaaaaaattgatttcccattcgaagaggttcatctgtcgatttattcacaaacattc

SEQ ID NO: 56699 - DNA, 283 bp, Glycine max
agcttctttaaatacttggggtccaacataggcatcatttcaggcctaatcaacgaggtaacacccccttgggtggtcctaacaattggtggggttctcaatttttttgggtatttcataatttggcttgcagtggccagaaaaattgctaagccccaagtttggaacatgtgcttgtacatcttcattggagccaattctcactgttccaccaacactggagtcattgtcaccagtgtaaagaacttccctggcacaaggggcattgtaattggcctcttga

SEQ ID NO: 56700 - DNA, 387 bp, Glycine max
  unsure (1)..(387): unsure at all n locations
agactaagtttagcctagcatcctcagactgatggccaatctgaacggaccattcattcattggaggacgctttgagggcgtgtgttttatagcaaaaaggaagttgggagagttgtcttccattgatagagttcacttataataaaagttttcattctacgattggcatggctccctatgaagctntgtatggtagaaggtgtaggacacccctatgttggttagagcctggaaaagacctcaccttatgaccggaagtggtacaacaaaccaccgagaaagtcaagttaatccacgaaaggatgaagactgctcagagtaggcaganacgttttcatgataagtgaaggaaagatctggaattcgatgttggtgatcatgtattc

SEQ ID NO: 56701 - DNA, 284 bp, Glycine max
agctttgtcttttgccttttgggctttttacttttttctagtcctgttcttcttttgataattattatgcttatggtaattcacgtaacaattatatattattcatattattaatacacagacattatggggtaattggtcgtaatcatatatattcatatgcttcatttaggccaaaaaatgattacaagaatatggattacagaaagaatatggaaaatcaatgtccaagtaagtttactatcattgcttgtgttagcgatacacaattcaactttactatg

SEQ ID NO: 56702 - DNA, 290 bp, Glycine max
cccgtaatttgacactaaattttactacccaacatgctataatcaagaaaatctcaatcttaatatatatcttaatgtctctcgaaaattatcaaaacgcttaataatttctacaaactaaataacaggatttaaaaaggaaacacttttagaagaatttaaaattattcttcacatacataatataagacttggtaaccggtatacgcactattttcctccaaaactaattttcttaagtcaaacaccttaaacttgttagttgacatttttgtgcccagtgtggaaaa

SEQ ID NO: 56703 - DNA, 285 bp, Glycine max
gatatgtcgcggaggtcaggagaccttggtgacgtcatgcggcgtgctattgctccataccaagcttgaccaatcccgacccaacccgggcatagtcagtcagtgagaacctgtgatgtacctatacaggcgaactcctgacagtctacagataaaagaaacatagaccacatagcatggaggcttgtggtggctggccagctgtgaaatttgtgtgatatatggttgtggcctctggtaatcgattaccaagggtgggtaactgattacaaggcttataaatga

SEQ ID NO: 56704 - DNA, 285 bp, Glycine max
agcttgacaagtctgtctgtttaagtaataatagtaataataattataataataataataattattattattattattattaaatacctattattactataaaaaaaaagcttgctaagctttgtgttttaacgacatgaattcaatatgattttatttatcaattattttgggatttgtacattacttatacgaaattttataagtttctttttttagttaatatttcactaagttttaaaataattaattgatcaaagatatctttacgcaaacttttaaata

SEQ ID NO: 56705 - DNA, 374 bp, Glycine max
actaagcttcgatggctttcttcataagaaatcaacagaactactgcttgaagaattttattgtccagtatcaataactggagcccgtctaacaacaacataaggtagtgactccacctcaatggacgaagtataaccacatttatactccattagttgcatacaaggctttaaccccatgtgccacagtagattggatactcccttatcgacaagaccagtgtatcccaacctggtgaagatggatcttcatttgatgcctagtggtaccccaagaaccactcgttcattgtctatgccagtagagctatagtaaaagaaaattattccttcaagtgatctccttaccaagactgcaagatttacttcaccta

SEQ ID NO: 56706 - DNA, 287 bp, Glycine max
agctctcgtgatattaaaattgtcataactcaccactcggatgtccgactctctcacattacatatggagaccctcaaaattgacccaacgaaaatcttgagaaattcaaatggacataatcttgcacacggaggtccgattcacgctcatcatataacgagacgctcaaaattgaacagcggaagatctccagaaattgaatctgccataactattcactccaattgtccgatttacgcacattacaaatcgagacgctccaaattaatcaactgaagctttcaat

SEQ ID NO: 56707 - DNA, 304 bp, Glycine max
  unsure (1)..(304): unsure at all n locations
ggccccggaganacggaacagaagagccgcacggaaggaagccaattttattaccggaggagcaacataagcagcccaagatgcataagacaggggagtaacaacgccctcgggcggtcacaaacacaacaaaggggaaacaaaagaaacgcgggaaacacgaaacacagcctagcaaaggccaacaaaatcgcaagccaacaaaaacggaacaagaccacgaacgaggaaaggggaaacaactctaaaaaggccaaacgacacagaagcagttgacgacaaggggaaaaccagaaatgggaca

SEQ ID NO: 56708 - DNA, 282 bp, Glycine max
agcttatcctgcaaacatctacaatagacctcctcaacctcagcagcaaaatcagccacaacagaacaattatgacctttctagcaacaggtacaatcccaggtggaggaatcatcccaaccttagatggttgagtcttccacaatagcagcaacaacaacagtagcaactgcaatagccctagaaatagcaaatagttgaggctcctccgcaaccttcccttgaagaacttgtgaggaaaatgactatgcaaaacatgcagtttcaacaagagaccaaagc

SEQ ID NO: 56709 - DNA, 347 bp, Glycine max
  unsure (1)..(347): unsure at all n locations
tcagctttgcctatttcctataatagggggagaagtgaaaggaaaaaatgttcttctctcctggtaattcgagatcacttgaaattagtgaaaaaaattgtttccgtgaagaatatccaagccgaggcatttccataacgtttccgtagcgtttccgtgggtaatttcacgaagattntcaaccgttctttgacgttcttcgttcgttcttcgtcgttcttcggtcttcaaccggtaagttcccgaaatcgaacttttcaattcattctatgtaccattagtggtcctcatttgttatccatggcctcctatggtggtgagcttcttctagactcatcttctccttg

SEQ ID NO: 56710 - DNA, 594 bp, Glycine max
  unsure (1)..(594): unsure at all n locations
agcgacatcaaacaatantttnttgcntcgttagactcaaactcatccccccnaagaagagcatgaacttgagacctgaanaccnccncnnannannnncnccannannnnacgaagacaccaacgacaatatcanaggtattactcctcacacagacggcagatgtcggacctaagcaacgacgagactctaactgaagaacagacctaatggaaatcacatgcgcacaacgcttcacacggaactccgaaccagggacatactaaaccgagatgctcgacagtgaacaacggaacactctggagaaaaaacaaacgaacaataactcttctttcagatgcccgagacggcgacatacactatcgagacactcgaaatcgaacaacaaaagctctcgagaaatacatatggtcatgactatccacacggatgtctgacttgtggacataaatatcgagacgctcaaaattgaacaacagaagctctggataaattcaaatggcaacactgatgatcgattcaaggacgatacatatcgagatgctccaaattgaacaaccgaagctctcgagaaattccatgggcatgatatg

SEQ ID NO: 56711 - DNA, 270 bp, Glycine max
  unsure (1)..(270): unsure at all n locations
cgaccagcaagcangcaagcaanattattcacacaacgaacccgcgggggaccacaacacagaacacggaaaaccacaacacggcaccaccaacaaaagcacacccncaaagagacgagccanaaaccagagcaagaaagacacactccagcgaaagcgcaaaaaaaaaaaaaacccccaccgaccgacagaaaaggaccaaaccccaacaccggcaaaaaagaaacccgacccgacggacgcgccgcaaccacgaaggaaaacaaaaaa

SEQ ID NO: 56712 - DNA, 239 bp, Glycine max
agcttcaacatcagatttcttccaaggggctggaactacttcagaaggactggatggggcctatgcaagttgaaagccttggaggaaaagaggtaatagcctatgtttgcaagaagggtatgaacttccttccaagaataaagcgctgggttacaaacattctatccattaaaagaaaggcctcacacaattgagaagtgattcacaggaggaaagcatatctaaccactcccaaagga

SEQ ID NO: 56713 - DNA, 293 bp, Glycine max
taaactaatcgagagtccaaggaaataattataggatttcacaccatgacgggaactttacattctttggtcgcgcacatatttcggaatagaaatcttccatctaaaaaacaaaatctcacgtcccttttaaatttagcaacaaggtgtttcctctttttgtcctttcctttccataatcacagtcacaatttgctggcaataatactctttcccattacgtttcttctctctcgaataaagaagaagacaattttaagggcctatttaaaaattaacaatgattagattct

SEQ ID NO: 56714 - DNA, 277 bp, Glycine max
tttcttataagaacaaaattgcctaaatcatttccaaatatgcatgtgaattaggaagtatcaacaagaatcaagccaaggctattgtgcaagcaatcaatggggcaaaacacaccaaaagattatgatgatggatgactcaaattctcacaaaggtaaacttatcactttcaaattgagctttcaaaactatcatgacatgtagaggaaaaacaaggatttcaaatcacaaaatgtcaagagacttttattttcagaacaattacccatttcttga

SEQ ID NO: 56715 - DNA, 285 bp, Glycine max
agcttgtttgattatggggtacccatcacatgtggtattaggtggcggtcgggcgatggtgcacaacaagtttttccacatccacaatgcgcgcataaacccaccatcccctgttgcccacctccatctgagctcacgtactcccacgtagcccatatcctcgtttctcccaacaccgggtccccatcaatcctcccaagcttccacaacatccaagcaaaacaacattcaaacagcacaagctatcacagccaagcaaaacagagcaaaggcagaaaactctgc

SEQ ID NO: 56716 - DNA, 353 bp, Glycine max
  unsure (1)..(353): unsure at all n locations
gagcttctatggaggctggatcnttgagcttctatgaggtccttcaatggtgattttccaccatggagatgcagcgaaagacaaaggagaagaggtgagaggaggcgccatccactagggaataagccatggaagaagcagcttcaccaccaagaatgtgccttggataagaagcttggagattatgcttctatggaggaaaagaaagggagaggaggagcatgaaattgaagtatgaaaagagggagagaagttaaactttgagttgtgtcttacaagactctcattcatcanagttacgacaagtgttacacatacttttatttatagcctaagtagcttccttgagaaac

SEQ ID NO: 56717 - DNA, 149 bp, Glycine max
caccaatgactatccaaaatacaccactaagcttcgctctaagagactaactcctgaaaacttactgaaaaaaacccctattgataaacttacacaatcaaatttctttataaaactggcagagaaaacacctgggaagccatatcctt

SEQ ID NO: 56718 - DNA, 288 bp, Glycine max
agcttcttatccaagacactctcttggtggcaaaactccttctttcatggcttattccctagtggatggtgtctcccctcaccttttctcctttatcttccgctgcatctccatggtggaaaatcaccattgaaggacctcattgaagctcaaagatccagcctccatataagctccagcaaaaaggcttccatcacctttagtaagcaccaactcattccttcctctattgcctttagttgtatacacctttatttggttctctatttggttcctaaccctctcatg

SEQ ID NO: 56719 - DNA, 334 bp, Glycine max
  unsure (1)..(334): unsure at all n locations
tgcaactggaatgttaggaagatatcacagtaatccgagattggaacattcggaagttgcacagaaagttctgagatacttaataggaacgaaagatcacatgcttacatataggaggtctgatcaccttgaggtaatngggtattcagactcaaactctgttggatgtgtggatacgagagaatccactcttggctatgtatttctctaagccagaggagcagtatcttataagagtgcaaagcaattagttgtagctgcatctaccatggaagctgagtttgtaaatggtttgatgctacactctaaactaattggtgcagaacttaattca

SEQ ID NO: 56720 - DNA, 307 bp, Glycine max
cgaactgcatgcgtgcgcactcacatttatttatgcccgtccggaaccttccctggtagaactagtgaggcaaacgactcttctaagcatgccctctcaacaaaagaccggagcctgtactctgagctcaactaataaaatgggactattggctgcgcagctgaattagcagcggtcgcaaaattctgacatatgaccttctctatctgtccagaatgctaaaaatgagagcgccattacattgaggtcaggaaagcagcgtcaaggacctcagccactagcatcttgctctttagccgatgaacct

SEQ ID NO: 56721 - DNA, 278 bp, Glycine max
agtttattttactcttcctcttccaccatcatctgcaaccaactaccataggagaaaccttttactttttctttccttatctttcttcgctgaaaaccatcaaatctcaacggaatatagcgacagtgagtgtgtgatagagaatgggaaaaaagaacgtttttttgaatgccatgggcggggaaatgaaataaggccctttattttttagaaaaagcctattctcaatctgaatttctctcactagccactctctaagcaacagaagccaataacct

SEQ ID NO: 56722 - DNA, 534 bp, Glycine max
  unsure (1)..(534): unsure at all n locations
ctgcctccattatcatctttcacactcaccgaacactcttctcactccaagcagaggattgtacctgatacctgcantccggaatatccacancagcatggctacataggcacaaatgtcgattacccgtttgtagtattacataagctagtagataacactagaagcatgcacgaagtatgcatataccttggctaggcatgctcctacaataacaacgggtgctcgaggaagtgcaaatgctcatgcgagaaattggacctttgagcattgacaggagcgcaccctatgtcatatactgtnaaatacatgcaaggatttacagatactatggtagttaagaactagggatccttgcgatattgatctcctatgatagtcaatcactataatgacgcgcctgccggaaatgcacaggattcacctgtctacattatctctctcccacacaacattgagaaaaatactatgtcttcaccacaataacggttctgctaaatatatgctacataacctaaagaaactctaatgacc

SEQ ID NO: 56723 - DNA, 200 bp, Glycine max
agcttctttcataagcttccttgagaagttagagcttagctacacacacccctctaataactaagctcacctccttgagaagcttccttgagaagcttccttaagaaacttccttgagaagataactagagaagcttgagcttggctacacacaccccctttaatagctaagctcacctccttgagatgagaagctagag

SEQ ID NO: 56724 - DNA, 419 bp, Glycine max
  unsure (1)..(419): unsure at all n locations
tccacaacatccaagcaaaacaacattcaaacagcacaagctatcacagccaagccaaacagagcanaggcagaaactctgctcaacacatcaaccaaaatcacagcttttctcacttaaagaccccagtaacaattccttcgatccaattcgttaaccgctggatcgactccaaaattttactggaagtctatagtgcataagcctacattgtggaccgtgggatcgactagcaaacatccagaactcattctgtactactctttccacagccaaccacacacaagcattttctgcaccaagctaaaattctgctgcacctattntgacagcanaattctgcataagtgcagatttcgaaaatcacacnttccctcatccaatcttgctcanatcaaatcctacaagtcccaaatcat

SEQ ID NO: 56725 - DNA, 399 bp, Glycine max
  unsure (1)..(399): unsure at all n locations
agctgnaatgatacactatggncacgttactccttgtaattcatatacaagtctgaacagtcacaactcttcagaaactaactatgtaatcaattacaatagttatgtaatcgattaccagtcaggaattttcaaaaataactctcaagagtcaaaactgttcaagaaagttttgaatggccatcaaaagcttataaataggtgactcgggacacgaaattccttagagtttgtctgaacaacattatcttttcctctcaaaacanaattgtcttataactctcaaaatattccttggccaaaacaattgcaaattcaataaggaatctcgatcgatcttcaaatttaatattcttctcttaaagagcgaagtcttcttattattattcttattcaaag

SEQ ID NO: 56726 - DNA, 282 bp, Glycine max
agcttgtttcggatcttttaagaagaaaactagacaaaaagggtgaacaaatgattatgctgggctatcatagtactggtgggtacatgctttatgattgcagttcaaataaagcagtgatcagtagtgatgtgatttttgatgaaagtagaagcctaaattgggaaagcaccattgaagatactggcacaaggcagcaagaactcaagattgatgagcctgcttctgaatcaacaagtgattatgaaactgtagatcatgagacactagttcacactgacc

SEQ ID NO: 56727 - DNA, 127 bp, Glycine max
gtaatcgatcaccatacatgtgtaacccattactcagcgccaaatccgaaatccaacattaatacccgctgcaaaacaaatcaggacaactgggaaacgataacatcctcagggcatcgaataccta

SEQ ID NO: 56728 - DNA, 241 bp, Glycine max
agcttctaaacaccaattagcttcacttgtttctcaattttctcgtttagatggcaatgttcttattttagaaaatttggtattttctccctcaagcttaagcagataggaagttatgtcgcctttccatgaaagatgttattttattatttttaagaaacacgttttattttatttttatgtccatattaatataacataatatgaaagtggctccattccattacttttgccaggttac

SEQ ID NO: 56729 - DNA, 287 bp, Glycine max
agctttgtcctccgatccctctagttggacaagacttagaccaaacagcattattgtaataacgtatataaaaccaaaacttaatccgcagatccctcatttaagactaagttccaatcctgcttcattcaagttctaaggcaacaatacatttcccaatgctaaagtcacctaaccatgcacacaaatggttgatcaaaccaagagcatacaaaatttaagcactagaagaatcattgaacacaagaaacacaatcaattagatattaaagtaattacattagttg

SEQ ID NO: 56730 - DNA, 252 bp, Glycine max
  unsure (1)..(252): unsure at all n locations
ctatgatgagacctatgtccctgttgctaggttggaagctattagatntttcttgcttttgcttgtataatgaatttttggttatatcaaacggatgtgaaaagtggatacattgaagaagagatatatgtgggagaaacctccaggttttgtagactttaatcatcctaatcatgtacacaagttggaaaagacactatatcgattaaaacaagaacctagatcttggtacgaaagattgagcaatttttt

SEQ ID NO: 56731 - DNA, 283 bp, Glycine max
agcttttgttcctttttataaaaagagaagttctaaaactcatcacttgtctaaaaaggccttgaggtggatccaagtgctctgatcattcattagcatatttatgttttggtgacatactcaccactgttgtttctttagggaactcaccataagtaaaaaagcgcaaaggcacccctataacactctgatgcaatcctaccccgcaagggcattggatagaagactccaagtagattgggctagagatccaagggaaggccctagggttctcatgagcctt

SEQ ID NO: 56732 - DNA, 363 bp, Glycine max
  unsure (1)..(363): unsure at all n locations
tgaagtgagaaagtgtggaagagtcagtcctcctacttctattgcgtgaccacacagtggtacctggagatatgtcgcgggggtcaagagaacctggggacgtcaggtggggtgctattgcccaaaaccaagcttgaccaatcccgacccaacccgggcatagtcagtcagtgagaacctgtgacctacctaaacaagcgagctcttggcagtcnaccgatgaaagaacaaagaccacaaagcaaggatgcttgtgtggtggctggccagctatgaatcttgagtggtatttggaatatggcctctggttatcgattaccaagggtgtgtaatcgattacagtgcttaaaatgaagacaggaa

SEQ ID NO: 56733 - DNA, 279 bp, Glycine max
agcttattttttcgtctaagggacgccacattaattctgggcacaacagtcaattctctgtagaaaatacctccattcatgcagacaagaatggatcaacttcagttaccttatacaaagatgataagtcagctacctcctataaagatgatgagcacagccacatttatgggcagatgagtgattcagcgagcagtacttattattcctctgaagataaacaaagtcgtactgtccatggtttttgattccctgttcactaagtttgggtatggaaaa

SEQ ID NO: 56734 - DNA, 324 bp, Glycine max
  unsure (1)..(324): unsure at all n locations
atgcagcatgtcagcaaaacagaaggtttacatgaggcataaggttctgtgntatgccaaaagatgagtgtgcacaaattgcccactcccattcacaatcttgcgaagatataaagcaggtaagatgattactacaaggccgaacaaaacttgaaatcatgaatcacaccaagagtagataatctcttattttgtccccaaagtagatcatgtcaaactaaactattaattgataatagtctatcaatctcagatttcacagtaattctgtggattaaactaaacaagatcatgggtaagcttataattgccatctgtacataa

SEQ ID NO: 56735 - DNA, 286 bp, Glycine max
agcttctttggaggtgagcttagttatgagaggggtgtgtgtagctaagctctagcttctcaaggaagttttctcaaagaagcttctcacggaagttttctcaagaaagcttctcaaggaagctacctagtctataaatagaagcatgtgtaacacttgttgtaactttgatgaatgagagtcttgtgagacatacttcaaagttccacttctctccctcttttattccttcaatttcgtgctcccccctctctctttctctccctctttcttttcctccattgaa

SEQ ID NO: 56736 - DNA, 382 bp, Glycine max
tcttagtttcagatgatgcagatgggtttgagctacctcatcactcctctaatgactatggcatcatttctggcgctaaactgctgggagttggaggccatcttctcaattaaatttctggcttcagcaagagtcatgtctccaagggctccaccactggcagcatctatcatacttctctccatattactgagtccttcataaaaatattggagaagaagctgttctgaaatctgatggtgggggcaactggcacatagtttcttaaatctctcccagtactcatacaggctctctccactgagttgtctaatacctgagatatccttcctgatggctgtggtcctggaagcacggaaaaaattttctaagaatactctct

SEQ ID NO: 56737 - DNA, 291 bp, Glycine max
agcttggataggattcttcaatggaggaaaagaaagagagagagaaagagagaggggggagcacgaaattgaaggaagaaaaagggagagaagttgaactttgagttgtgtcttacaagactctcattcatcaaagttacaacaagtgttacacatgcttctatttatagactaggtagcttccttgagaagctttcttaagaaaacttccttgagaagcttctttgagaaaacttccttgagaagctagagcttagctacacacacccatctaaaaactaagctcacctt

SEQ ID NO: 56738 - DNA, 401 bp, Glycine max
  unsure (1)..(401): unsure at all n locations
gtctaactccctngagtggcatntgttttcattgttatcttttatggtgcatcttagtacatatgatatttgtcttgcatcattcatcatcatgggtagtgtaaagaaaaatttctaagttagaaaagtttcttcaagatgcaaaaactctttattttaattgattacacgtttagcataatcgattatgacaagctgtctgaagcttgaagagatgagtctcgtatcaatttaatcgattaccgatatctcataatncgatactctgttgtntgagataatgactgatttattcaagagtctctgctttaatcgaatcccaagtgggttaatcgaatacttctctctcgtttagttggtcacaagtgaacaagaacactctaatcgattactttgagtat

SEQ ID NO: 56739 - DNA, 282 bp, Glycine max
agtttttttactgtttgaagcatattttagctgttttttggttcatctttggggctggtttttcctttgcattagccacaaaggacttgttttgtagttattttttatcatggcactacttttgctgctatcttaatatatgatgttccttttgcttattaaaaaaaagttggagtttgtatctcaaaagctacataaatgtcacaaaaaaaaaattaattaaaataattattgttcataaattttaatttgaccaaataaattacaaaacttacaattaaa

SEQ ID NO: 56740 - DNA, 378 bp, Glycine max
  unsure (1)..(378): unsure at all n locations
tcttagtagtatcttagtcagataaaaattgactcatctatattttaggttataccttgattaaaatttgcttatcataattagcgaccttagacttcagaaattcctatntctattatagtttgctacgttagtccaaaggtgaatgttcatttactgatgtcgttccctactagaattaggaattttgaaatttaaaaagtttcagtttaatatttcgtaatgccactattagatcaaattagtccttttggtcaattntgatgtgaaaggattaaattgatggatgtaaggaagactctaatgtattaaatataacgaccatatcgaaacatcaatgaaaacaggcatcaaaaatctatttaacctactatttgt

SEQ ID NO: 56741 - DNA, 283 bp, Glycine max
agctttgttaataagcagataacatgaatggctataaaattcataccgccttggcttccttgtactcattcactgccttgtgggaagcataactgaaattcacatcaggtcccaactcggggacaataaagtggctggatcaatgcacataaatcaatcaggtcagtcatggcatcaccagtaattccttcgtttttaattataaaactccttttagaaatttatttatttccttttatatttttttttaatttttaaatatattatttatttattttcacta

SEQ ID NO: 56742 - DNA, 359 bp, Glycine max
  unsure (1)..(359): unsure at all n locations
tagtcaactaattcaaggaaattttcaaagaataaacgtccgattgattttntcttgattattttattattattttttaaagatattttgattattttattatgattttggtttttttttgtttaaccgaggttacagcgtgaacgatcggttagattttgttttaacattgattaaacgagattacaacaaanataatcaattgaaattcattttatcatttattatgcgagaaaaaggcttatataaacggttaaagcacgttaaaaacggaagaaaataaaatcgaaagtgaacgagatgaagattataaccaacaaaacaagaaatgaattgaaatctcggattcaacacttact

SEQ ID NO: 56743 - DNA, 232 bp, Glycine max
  unsure (1)..(232): unsure at all n locations
actcggaaccgtggacatcgactaagggaacattaagtggaaatatattccacatttcaccatcggatttgaaaaaacgcctacgggggagaatcgtcatcgacacagacaggcaacgaagggtaaatcccttggttggctctgcgccgaaaactctacaaaggaaacgttggggaatctatgaaaccatagagattctctcactatanactacactcatgagccactagag

SEQ ID NO: 56744 - DNA, 271 bp, Glycine max
agttttattatggaggcatggagaacaaataccttatggaattcgaacgtctcgtgaatcgcatcattggccttgcattgccattcctcttaaggtgctttctctccagactttgtacgcagctacaccacgaagtgcaggctttacaacctctatcccttcaccatttagattgacggcgggagtacccataattttattccaacccacgtcgctcgttttctccaccttacctggttctcaaccctaaaacttcagttatggtgggaaa

SEQ ID NO: 56745 - DNA, 279 bp, Glycine max
agcttcttgttaacacaacttattgatttatgtcaacctattatactcatgttacgcatgaacaatatccatgttaaaattgttgttaacaaatatttagacatgaataggagaaaataattgatagaattcacacattttctgaatttcatgatgccacaatacataaaaaaatttatattggccttgctattattcaatgtgagatgaatcttgtaagctggatcagggattggtatcatataatacggaaattctaaatctagtttttttttttgc

SEQ ID NO: 56746 - DNA, 271 bp, Glycine max
tttctttattagtgcgggtctgggagactaaggtcaagtgttcgcgatatgtgaagatgatgttccaattacttcggatttggtccgaccatgccctcctgatttccagctgggaaattggcgagtggaggaacgccccggcatttacgcaacgagcataatgtaaacctttacggttttaaaagctctatagttgggcctaggctttagagttttcattttgttaaagctttgtgtcttttgttttttaatttataatacaaggatcttt

SEQ ID NO: 56747 - DNA, 229 bp, Glycine max
tttgcaaacttattttttgagccgtccttaccttataatcagttttgtggggttgagttaagccccaagtccaaattctaagttagtttcagagcctatcctatactcattgttgggccacttgcattgcgatgctcttggttggtagccttgggcatgatggggagtgttggaaagccaccttatttgctgttatccctagcccacctaattgtggttttttttagga

SEQ ID NO: 56748 - DNA, 280 bp, Glycine max
agctttgttctcctatccctctagttggacaagacttataccaaacagcattattgtaataacgtatataaaaccaaaacttaatccgcagatccctcatttaagactaagttccaatcctgcttcattcaagttctaaggcaacaatacatttcccaatgctaaagtcacctaaccatgcacacagatggttgatcaaaccaggagcatacaaaatttaagcactagaagaatcattgaacacaagaaacacattcaattagatattaaagtaattaca

SEQ ID NO: 56749 - DNA, 292 bp, Glycine max
  unsure (1)..(292): unsure at all n locations
ctatgatgagacctatgtccctgttgctatggtggaagctattagatttttcttgcttttgcttgtataatgaatttttggttatatcacacggatgtgaaaagtggatacattgaagaagagatatatgtgggagaaacctccangctttgtagactctaatcatcctaatcatgttcacaagttggaaaagacactatatcgattaaaacaagaacctagatcttggttcgaaagattgagcaattttttagttgggcaatcttttgtatgagatcaagttgacaaaaca

SEQ ID NO: 56750 - DNA, 284 bp, Glycine max
agcttgtttggttttagtctcacgattggcatgtgctcatgcaacaattgttagtcgtggctatactagacatcttgccaaacaaagtcaggttaacaataactcgcttgggctttttcttccattctatatgtagcaaagtcattgatccagtcatgtttgatgagttggaaaatgaggccgcaattatactgtgccagttggagatgtattttccccctgctttttttgacatcatgattcacttgattgtgcacctggtcagagaaatcaaatgttgtggt

SEQ ID NO: 56751 - DNA, 385 bp, Glycine max
  unsure (1)..(385): unsure at all n locations
agttcttgctctatttgatcatctgggtaatgcttatctcatcaccgatatccaagctcatatctgcttctttagattcaaccttctcttctggtatntcagctgaatctttntggataagattagccaagtcaatcaaaatcattaatctttctatttcagctaactagccacttccaaaagcttgatacaaagcaaaagcaacttgatttgcggaggtgttgctttggcctcttgccttgatggggtacccatattcctcttgtcaagtgaggtggctataatatntcaaatactaaagnntcttttggcttcttgtctaccttctcttttaagcctctatgcctgcttcattntcttcccttngtcagcaggctcctcatac

SEQ ID NO: 56752 - DNA, 238 bp, Glycine max
  unsure (1)..(238): unsure at all n locations
agcttatgctgcaaatatttacaacagacctcctcaacctcagcagcaaaatcaaccacagcagaacaattatgacctttccagcaacagatacaaccctggatggaggaatcaccctaacctcagatggtccagccctcagcaacaacagcagcctgctccttccttccaaaatgctgctggcccaagcagaaccatacattctccaccatnccaacaacaacaacaaccccagaaa

SEQ ID NO: 56753 - DNA, 377 bp, Glycine max
tttctcaagaaagcttctcaaggaagctacctagtctataaatagaagcatgtgaacacttgttgaactctgatgaatgagagtcttgcgagacacaactcaaagttcaacttctctccctttttcttccttcaatttcgtgctcccccctctctctttctctccctctttctgttcctccattgaagcatcctctccaagcttcttatccaaggctcatcttggtggtgaagctccttcttccatggcttattccctagtggatggcgccgcctcttacctcttttcctttatctttcgctgcatctccatggcggagagtcaccattaaaggacctcattgaagctcaaagatccagcctccatagaagctccac

SEQ ID NO: 56754 - DNA, 289 bp, Glycine max
agctcgctctaactttcattagtccaatacacactcaaaaaatagtcatcatccatccacaattccaatcattcatgctcaatatgatgcatgcacctgacctcaactctcatatgcaatgtggtaccatccccaaggaaatagcctaagtgtgtccacacaacactctcacttaggaaaactaggcagtaagtgttgaggtccctgtcgtgcacaggcaactccccaccccccacggtgatcagtctgagtctcaagggagttccaaactgagtgacatgccccctag

SEQ ID NO: 56755 - DNA, 342 bp, Glycine max
tgtgtgtggtgatgttgaatttattcagattcgaccactctagaaaatctgctcttactcactatgcaaggtcaagttgtatgacacctttgtttgcacaattttttaaatcctgaaaatttctttcaaatttaaggggggattgtataacaatgagaatgggatgaatgttgaaaaaaaagaaaattagaaaaaggcttaagtccccctattatgataacactcatagtgtttactccatatattgagactcttttttttttcttgcccagtgaaacatttctaactttttttcctcatatttaccatgcattcgaaacttccttttttttgcctctaaat

SEQ ID NO: 56756 - DNA, 279 bp, Glycine max
agcttcattttttagcttatcttttcccttttcccatttgtttttggtaaattgctgagatggagttcaatgtctttcacatgaaactgtttcttggggtataggattgattgttgtatctcttaatttgcccctctaagcatatctaaatatgcttggacaagagaattgtgtccttaaatcaccattcttgctatgtatcttcattggcttcttgatgcattctgttgtgggagctgagattccattgggttccaagctttctgtggttgataatga

SEQ ID NO: 56757 - DNA, 507 bp, Glycine max
  unsure (1)..(507): unsure at all n locations
tggcttaactgancttgaactttattcgccccnaaaactaacccctgggggggactcccctttttttttctaaaaatttttaataatgatccccttcttaaagtgaaaagttttaaaaaaccaaaacattgtttagatttataacgctgacacttatttatataatcattgttaaaaaaatatatacttgtattaacttggcgcatctgttttcgttattaaattagggaagaaattcttactctcggaaaacacaaacttcttgtaaggtttggtatgtgaaattaaaaacattattgggtcccataactccataatatggttgtcttttggaattgaggtttaaaaaaaaaaacatcgattgtccgattaatacctgacagcctgttgatatgcttgctggacttcgcttgctaggcttgcatttttgtgagtttgggatgcgagattgtaaatagggtttctcttgcccgactccattattcttatttcatcgcgttagaactt

SEQ ID NO: 56758 - DNA, 274 bp, Glycine max
attttgttttagaaaagggctggcttatattgcatgtctgatttaccttttagaactacaaaagcttttgccaagacttgaacacaataaatttttactctcgtattgctttcataatttttctcttttaaattgaagttgcaaaaagttattgacactgctcaatatgctatgcttggttttcttttatctaggctgcctggattaaagctgaagaggaggaaaggaagccagcaaagaaagcaatttgattgtaattttccgtacaattcat

SEQ ID NO: 56759 - DNA, 308 bp, Glycine max
gcatctccctataacgacgtgtgtttgtattctcaagtagttggtaacgtggcataacatttaattaaattacctgagaaaaacatttaattaaatctattcatggtggctaaatttgtctggagccaggggatcaatatattaattcttaaagttaaataagggctggagatatatacagcatgtttcgataaattagtatgttagacagctcaatacataaactataaatatgtgcatctggtacgcacgccacagaaaatatacatgttaataaatcatatacaagcaacattgtcatgatcccc

SEQ ID NO: 56760 - DNA, 282 bp, Glycine max
agcttgaatttgaattacccaggagagacacgtcagctgggccatttgccagcagggactaaacacattctatacaattagattcatttgatagaagcctccgaccagctgatgattctatgatttagtaaccaaatggaaaaacctcaccaccatgtggttgacacatgccagatgcatctattgtcttaccacaagttaatgctagatttttcaatcaataaacatccatagaatacaaccacaaaaaccacacaatatgctagagtgaagaagagattc

SEQ ID NO: 56761 - DNA, 263 bp, Glycine max
cgctgctatgcagatattgacaaccgttattacaatggtgcgacacgatatgaacgtcgaaagctcaacattgccaaagaattactctcaataagagctcgtatagtggatcactcacgcactgatgattatttaacagtatgtttgacgaaaggattagcttgacagaatgtgcgttacacttctcaaagaacgggactattgcccttactgcgaagagtcatcatgagggtcacccgtgcttaatgactggagatccctat

SEQ ID NO: 56762 - DNA, 280 bp, Glycine max
attttgccatgccgtccccgtttcggcctaaacccattttgggctcatatctgtcccttaacataaccagagccaccatcaaagcgacaccaaatatgcgtggctgcaccggaggagattccgcataagcactgctcataatttccagcgcttggaataatgttttgaatgactcctttgcagcctcaacatacaacgtagaagacggacaacttaccgatatgtcttcctcccctgatactataaccaactgccctttcactacaaactttaatttctg

SEQ ID NO: 56763 - DNA, 216 bp, Glycine max
aacttcaaggtcaatggacatcgacttaatccaatactcacaaacccttctttactggacgtaacggcggaagagacttccttactacaacctactccttctccaccatgactgatggaggttttcgttactacctccttctttactgctattacatttgcgtgagtctatgtgatggactaattgcttttaatctttcaattttgtgtcgtgtaa

SEQ ID NO: 56764 - DNA, 284 bp, Glycine max
agcttattttctatttattaggagttaaaaagttaaaaaattacaaacaatttgattgaaaaagttcttacaaaatattgaagcatttggatttgcatttttttttttaccaaagattcattgttacataaacatttataagatgttttatttttaaaaaaaaatcaaatcatgattaaatataaattaaaaaatattttttgaaaactaacaaataattaacgtactaacattatgtataccacaaaatactaaaaataaaatcactatagtcaccatgtgcc

SEQ ID NO: 56765 - DNA, 279 bp, Glycine max
agcttgctctataatttagattgatgtttgtatttatgggaggaggttgtatgccatttttgttttaagagtagtgtcccactggtaaaactaactttccaaatttttgccttcgcaggaaatggccccgaggaagcttgcctcaaagaggtccaggaaggacaaggcagccgaaggaactagttccgctccggagtatgacagtcaccgctttaggagcgccgtacacgagcagcgcttcgaggccatcaagggatggtcgtttctccgggagcgacg

SEQ ID NO: 56766 - DNA, 275 bp, Glycine max
agcttgatctcattgttgctgccccacaatgctccacggaatttgtcacggccatgctcttccttgcgagccctcttgatttcttgttcaagggcttttccggtagctgcattttcttctcgtaacccgacacactcttttcggacgtctgtagcgaccaacttgaatttttctttggcaagtttcgcttttcctagttcgatttccagagctcgaacttcttcatcctcttccggagcttcgaagttctcttcgttgataatctttagcatggc

SEQ ID NO: 56767 - DNA, 238 bp, Glycine max
ttgtagctagagcagctgattctgccggctattttcaagatctaattcttacatctaattttatttttatcaatgtaaatgcttatatgttgtatcttatgactaattggtagctaaataacgctcatgctcgtcttatcatggaagagttgatgaatattccaactgggaggagaacgaagctccatgactacgtgaccgtaattgtaatcattgcttggatgaatcagcgtacttc

SEQ ID NO: 56768 - DNA, 279 bp, Glycine max
tgcttgatatccagaaatactttcaacttcaatgacttcattaacatgtgacatttcctcaacttggtagggcacatcatcttgtacatgatcggattctatgctaccccttggcttcgttttaattgcaacacaccaaccacgcttgtcccttcttgttgttggatatggcacataatacacttgccttacattatgtgcattgatgaatgggtcaaacaaattatagcttttatccattagaattttcactgttccgtatttgggatcaactcttgt

SEQ ID NO: 56769 - DNA, 346 bp, Glycine max
actcaagcttggtcatcattatggtctgaagttaagaatctagaacttggttcctttagaatctacttagcaacatcttctgatgatccctattcctttttataaccattgctcttttgcattgagttatgatgagaaccaccatttgtttcacttttagtgctcaaagacccttgacttaaagaagttgacttgttaaagtcagaaggttttgatggctcaagtcctaatagtccaccattagtccagaacctaatgagatgattagccaaagactctctagaagtctcttcagatttgtagatatttttgctgttcttatctacttcgtcatttggtaaattag

SEQ ID NO: 56770 - DNA, 334 bp, Glycine max
ttagtgagatgtttggtttatatgtataaggtttaagagatgaaaagaattcaaatttgaataaattgaatatattttaaaccaatcatatcatgttaatgtgacacattaataggatagacagttatagccataaaagagataatcatgcttatgctggttagcgcaaaaatcgcaaccatgattggattattttctttaggacatttaatgatatacaatcctttaactaggtaagatgtgacagtaatctcaagataattgttacaaaaatactgtattcatgaaaggtagtactcgaacacactatttttggggggcatttgttacctat

SEQ ID NO: 56771 - DNA, 334 bp, Glycine max
tctgcagtaaaatttctttacaaaatgattataattaaggttaagaactataataaaaagggagctataaggatgagttaatagttgagaatgagatttaagggtgagaagggtgaaggagagaaggagaagttgttggttcaaatttttcctattaacatttgtaacaaaaattgacaaatgttaatatttaccgataaaaaaaaaaaagaaaagaactacactaaagatagtacaagaggtgctttggaggtactttgatctcttattatttaaaattatttcatcttatttaattcagttgtaaaatagctcttatgttgtctttatatat

SEQ ID NO: 56772 - DNA, 331 bp, Glycine max
tagatgtatcatgacgtgaatgccttaatgctataaacgcggccccgagaataccaaggctctgatggatcctgacatctgtggaaaacgcgagtggtgaatcagaatgaaactgttatgagcttaatgaaagagggggcatatagctgggaatgactgctttttgatctgctgtacaacctacaagatgactctcattgcatcagaatccgttatgccgtcacatgaaactatgaaacatatgctatcatgcaagcaacaaatacatgggcaacatatatcacgtaattaatgcaagctatgctaagggtgaatgcaataataagaatct

SEQ ID NO: 56773 - DNA, 335 bp, Glycine max
ttgcggatttggtcttcgccgatgataggatcaaagtgggtctggaaaaaggcaaatctgatcatcctgatttgatgaatgtgaaaacttgggcaaatgaagaagatgcgaatgagggaaaaacccttgctatgactgccattcctacacggtcaaatttcccatcatcccaacaatgtcattactcaaccaataacagtccctctcacccaatcatccgcaaaagccatccccaaatcagccacaaggcttgcctacttaccacaagcccaattcccaaacaccacctttagcgcaaacaccccaaattctagtgtcatatgctaacttgctcc

SEQ ID NO: 56774 - DNA, 333 bp, Glycine max
tgagatgaggaagtgttgaagggtgaaacttcctgcttttattgttgaccacacagtggtacctggagatatgtcccgggggtcaagagaccttggggacgtcaggtggggtgctattgcccaaaaccaagcttgaccaatcccgacccaacccgggcatattcggtcagtgagaacatgtgacgtacctaagcaggcgagctcctgtcagtcaacagataaaaggaaaacaagaccacagagcaaggaggcttgtggtggctggccagctgtgaattttgtgtaatatgtggattgtggcctctggtaatcgattaccaagggtgggtaatc

SEQ ID NO: 56775 - DNA, 331 bp, Glycine max
tcgacgactctcaaatgccgtttattcccacgcgctggcgcggtaactgcgagtccgcacctgacttcgacccttctctctgtaacaacaaactcatcggagctcgcagtttctccaagggctaccgcatggcctctagtaacgctagaaaaaccagagaccctgctaccccgcgtgaccttgacggccacggcacgcacaccgcctccaccgccgctggctccgccgtcgccaacgccacgctcctcggctacgccaccggcactgctcgcgggatggcgccacaggcgcgcgtggcggcctataaggtctgctggaccggcggctgctt

SEQ ID NO: 56776 - DNA, 293 bp, Glycine max
tcccttggttcttgggcaaaatacttaatctgatcttatcaaaacaacttgtggcaatcaaatctatcacttatcactcaccttctcacctatttcttgagtgtggcatcaatatccttcccctaaaaaaaagctaaaccaatttctaaatctgaattcttcaaggtgattcatcccattttcgtgtttgtatcaagatatctggcatactccctggagggtggaggatcataaccttggacagctagggcttcagggtcaactaccacttgctcatcaaactcaacttcttc

SEQ ID NO: 56777 - DNA, 329 bp, Glycine max
tcagcacgctgagctagttcatcatattcagcctgagaacaacatgcacaaaaagggatttaaaatatgacaattatgacctgcaaccagaagtatgaaaaaggttatactctctgtcacctgcttccgtaacctggatctgcgtgcagattcccgattagactgcttccgcctttgtcttttaagctctctttcgtcctaaaagttaagcagaaaggatgaagattaaaataagagtttagtgaagtaataaccaataacgcaatgagaaagtccgattgacaaagttaacctgcagccaaacttgtgactgaacaccatctcgtgat

SEQ ID NO: 56778 - DNA, 325 bp, Glycine max
ttatagatgatttctaatttattctctaacttagctctttacatatcaaatcaagtgtctaaaatactcgtacatggtagttagaaagtattagaaaaatcaacatccgactggggcatgttgcaatgaggttggtttgtcaggaaaaaactgataaaagaaaagtccacaacaataaatatatataagacttcatgtgcattactgtgcgttcggcgtgaactaaataaataacatgacttctcaagagtagactatattggtcgccgtggggaattagccgctaccaatatgagcaataaatgttatggcttgttgtgaaaca

SEQ ID NO: 56779 - DNA, 339 bp, Glycine max
taataagtttaaaacataagacatgtgttatgatccctgagacaccaaataaaaaaatagttttttctcctccatttgaagagaaaacgaagatcctcaaggtaatttgattgagcaatgtcattaaatcaattgttcgtaatcgctgtaagatttcactgcatgttgatcaaattctatgaattcaagtattctttaaaacctcttgatagtctgatataatatgttttagtactcatttaatattttataaggtttattaaaaattatcaacataacataaatgcccacgtacacttatccaaatgtgttgttctttatagtgttagaaaactaggg

SEQ ID NO: 56780 - DNA, 331 bp, Glycine max
tgtaagttaggtttcaaggctgggtttattttcattcattggtctagatggttgttttttaaagggttattatgggggacaactactagctgcagttggacaagatgcaaacaaccataactactgtattgcttatgcaattgtggatgctgagaataaagacaactggagatgatttctcacactactgaggcaagatttgggagattgtacgcagcatgggtggaattttatgagtgacatgcagaaggtacgtgttttagtttattgtactattatgattttttatatgttctttgaaggaccaaactgacagtaagtgaaatctttc

SEQ ID NO: 56781 - DNA, 334 bp, Glycine max
taacaagatgctcttttaaatacgatagtattttcaaagagttaaattgtcgttttggctcctattgtactttccaatttggtacctattatttaaagcatgccaatttgatctctatagttgcgctttttttttctttctcaacttggtcctccttgtaaaatctccgttaataatggttgttcgatcaatgttgtcttttattccacaacaacaattgttttaggtggtggtgtattgcgattatagaaggttgcgatggatgaacagtctaatgagtcatcaaggacagattagggaagttcaataagcaataatatgttgtggttgatca

SEQ ID NO: 56782 - DNA, 331 bp, Glycine max
tggcaaacatagttgacacagaatgtatatctcctctagatagaagcataatatcatctgcaaaagccaaatgagatagctgaatacctacacagtagggatgaaatttaaaattggcatcatccttgaggctgttcatatctctggaaaagtactccaaacagagcacaaacagataaggggagagaggatccccttgtctaagaccccgctgtcctttgaagtgaccataaatggatccattgactgccacactaaaggaagtggaagaaacacattccatgatccaagtacagaactgggctgggaagccaatggacttaagcatcca

SEQ ID NO: 56783 - DNA, 335 bp, Glycine max
tctgtaagtccgagcttaagttagttcaagggtgaacttaagtgagaaccaaatagttagctactataagttcatgcttaagcgaagccagaagtgcgcttaagcgagataagggattttagccactataagttcacgcttaagcaaggtcaagggtgggcttaggtgggcttaagcgaaaactaacaaaaagagaagtaaagaccacacttaggcatagagtaagtcgcacttaaaagaggttttctatcaagttttattttgtctatctcatttgaattttaatctaattgcttcttgatgtgtatgtaaactttaaattggatgaatgaagt

SEQ ID NO: 56784 - DNA, 333 bp, Glycine max
tcttagttttagatgatgcatatgtttttgtagctacctcatgcactcctctaatgactatggcatcatttatggcgctaaactgctgggagttggaggccatcttctcaattaaatttctggcttcaccaggagtcatgtctccaagggctccaccactggcagcatctatcatacttctctccatattactgagtccttcataaaaatattggagaagaagctgttctgaaatctgatggtgggggcaactggcacatagtttctcaaatctctcccagtactcatacaggctctctccactgagttgtctaatacctgagatatccttcc

SEQ ID NO: 56785 - DNA, 327 bp, Glycine max
tgctctaaatttacattgatgttttcttttatgggaggaggttgtatgccatttttgttttaagggtagtgtcccactggtaaaactaactttccaaatttttgccttcgcaggaaatggccccgaggaagcttgcctcaaagaggtccaggaaggacaaggcagccgaaggaactagttccgctccggagtatgacagtcaccgctttaggagcgctgtacaccagcagcgctttgaggccatcaagggatggtcatttctccgggagcgacgcgtccagctcaaggacgacgagtatactgatttccaggaggaaatagggcgcc

SEQ ID NO: 56786 - DNA, 219 bp, Glycine max
gtgtgctcaatggccactggaaaattatatgcctgttccaaaacaacccgataacgaaacattcctatgggtgcatttgaaggactccgatgtgccccgaaagcatcatgcagactggtactccaatctttcctgcttggctgcacaatcttctctaaaattcacttgatttctcggctaaaaatttctgcctgtacattggtttgggggtggtatggt

SEQ ID NO: 56787 - DNA, 327 bp, Glycine max
ttacgtagcaaattgccaaattcttttaccagggaattccttctacgtgcttgacctttgagttatcactgtttgtctcccaaaatcccttttgtgtgactttaaattttgtaagcattagaggacacaaacaataatcccgcagagctaaagcgcaattcaatagcgatggcgtgacatgggtggtgcccttgctgcatgtgctgcgtgcgtcttcttgtgctcgtatgagacaccaccacctttattttctatcctatgtactgtaccattcctcagccacaaggaccagcagctatatggctggacaaatacttttgacctttt

SEQ ID NO: 56788 - DNA, 329 bp, Glycine max
tgaaggtgtgtaacccatcatttttatattaaaatactggtaatgtgtctaccatcacgattaccatctccctttccatcattgggggtgccacttgggcggccagatccctccacctttgggcgtattctttaaaagatccatgcccccttttttgcacatgttctgtagttgcatcctatccggagccatatcacaattgtactgatactgcctaatgaaagcaaccattacgtctttccaagaatggactcgggaaggtttcaagttagtgtactaagtagcaattacccccgtaagactttcctagaagaaatgtatcaacagta

SEQ ID NO: 56789 - DNA, 337 bp, Glycine max
tctcccctatttttctataaataggttgtgaattgaagaagaaaagggttcagcctcttaggcacttctctctctctcgaaattgttgaggaaaattatttccgtgaagaaaatccaagccgaggcacttctgtaacattttcgtaacgtttccgtgagtaattacacgaagattctcgaccgttcttcaagattcatcattcgttcttcgttttcttcagtcttcaacgggtaagtacctcaaaccaagcttttcaattcattctatgtacccgtggtggtccacattttgcttcatgtatttttattctcgttttcatttgctttttataccccc

SEQ ID NO: 56790 - DNA, 335 bp, Glycine max
tgacttatgaattgattttagccttagtttcactttggttattagtcaattcgattaaaaaagaaaaatcccaaaggaaaacgtttgattgatctttttgattattttactaaaagatattttatattattatattattattttgcctctttttggttttaagatgtggttatggcatgaccgaacggtcggatttcattttaacagaaattaaaggatgttacaatacgaatgatcggtggaaatttattttattttttgatttggcgagaaaatgacttaaataaatgactaaagcacgtcaaaacggggtacggaaagtaaatgaaatgaaa

SEQ ID NO: 56791 - DNA, 333 bp, Glycine max
tgtagcaaattcaaacgacaataacttttatctcagatttccgaatgaattccgtagtatatctagacgctcgaaattcagaacaaaagctctgagcaaattcaaacgaaaataactttttactcgtatgtccgattgtttcccgtagtatatcgagaccctcgtaattgaaaccagaagcccgtagcaaactcaaacggcaataaattttaactcggatgtccgaatgaatcccatgatatatcgaggcgatcgtaattgaaaacagaagctatgagcaaattcaaatgacaataactttttactcggatgtcggattgagtcccgtaatat

SEQ ID NO: 56792 - DNA, 332 bp, Glycine max
tgtgttttactcaacatggatatgtatttttgcttgcgatgcaagaaaattttcctcgacgcaccccaactcatcaggtcattatgattacttgtaaactttttgggttttagatataaatagaattctaatattcttaaattttaattcataaatgtacattaacagaatttaaaaataaattataatatagaagaaactatatggaaaatgcatggattccatatggaagtggtaacagacagctgtatgactcaattatttaataaatagtataataaaaaaatttaaaaatgtagtttgaaaggaataattctatagaacaaataaat

SEQ ID NO: 56793 - DNA, 331 bp, Glycine max
tgggtacaattctctcatcctatcctccaacttccatgtagaatcaccctcatcggttccccaccgcaccttcaccaacgcgatctcctttcctctcaacgacttcattcttcggtcagtgatcttctgaggttgtgctttataggtgaggttatccttcacctgtacctcgtcctctgcaagaatatgtgatggatccgggttgtaccgtctcagttgagagacatggaacacagggtgcaaattcgataaactcggaggtaaggcgatatgataagctacaggcccaatcttcttcaaaatctgatatagacctagatacttgggtgtc

SEQ ID NO: 56794 - DNA, 335 bp, Glycine max
tatagaaattgataatgcagtatgtttgcaaaacagatggtctacatgaggcataaggcacggtgttattccaaaagatgagtgtgcacaaattgcccactcccatccacaatcttccgaaaatataaagcaggtaagatgattactaagaggccgaacaaaacttgaaatcttgaatcacaccaagagtagataatctctattctgtccccaaagtagatcatgtcaaactaaactattaattgataaagtcctatcaatctcagatttcacagtaattttgtggattaaactaaacaagttcatgggtaagcttaaaatagccatctgtacat

SEQ ID NO: 56795 - DNA, 334 bp, Glycine max
tggacacttcaagtatgaatgcgtttatctgaagaaaattcaagataagacgaaattcttcaagactatagaaaagaaggggtttaggagcatgtgcgaagacccagacgaaaccttgtctgatgaagacgatgaagaagccaacatatgcctgatggaaaacacaacttctgaaggatctgaatcagaccaggaagatgaggtaaattttgataaccctaagtctcttagaaaagcttatcatgaacttttatctaattcatttattctttcaaaagcttataaaaacctacaaagagatttcaagaatctatccagagatcatttaaaactt

SEQ ID NO: 56796 - DNA, 331 bp, Glycine max
taaaggagcactcaaacagagtgtctttacccccaaggtctaaacttcgaaaaatccgtttgggtctcaccttcctaattcaggtccaacccctaaaacaatttttgcacgcatacactattcatgaattataccatactcacgacctcacacttatgttttcaaacacatttaacacgttgtgctagagtttaacccttcaggatcctaaataggaatcctacacttttcctttaacactgcgcataaaaacttttttcaaggtaaatactggtcaggttattgtataattcacaactcacaacacaaataatatcacatcaagtattaa

SEQ ID NO: 56797 - DNA, 327 bp, Glycine max
tgttcttgatttttccttagttcttttcaagctttgaacaatatacatgtccttcatttaactatctttgggcttggcggccacgctcaacaaagtactttcgacacctactgtacgttgatttgaccaatgctgttatgggaatgttgcgacaatcctttaaaaccttattgatacattctgagaggttggttatcatgtggccatatcgacgtccttctctatcataagccatcgtccatttttcctttgaaatgcgatcaatccatgttgctatggctagactcagttgacgaaatttttctaaattttgatcaaaaatgtgtt

SEQ ID NO: 56798 - DNA, 296 bp, Glycine max
ctcactcaaggttatcctacgcttgccaggccttctttgtgctgcatatcttcttacaagtatgttcatccaccgaccgatacaagagaaagagagctttcttgactctctttcttgactcctgcaacgactcctttacacctcggcttaacgagacttggtcttgctcctcgaagccgttctctacgataacccgcccatcttgagctaccagtatcgcctatctcgcgatactacaaataccatacccgatattcgtgagctgcaaccttaggaaaggaaaaccttcatacagc

SEQ ID NO: 56799 - DNA, 329 bp, Glycine max
tggaaggatgcttcaatggttgattataaagagggagagaaagagagaggggggagcacgaaattgaaggaataaaagaaggagaaaagtggaagtttgaagtgtgtctcacaagactctcattcatcaaagttacaacaagtgttacacatgcttctatttatagactagttagcttccttgagaagctttcttgagaaaacttccttgagaagcttctttgagaaaacttccttgagaagctagagcttagctacacacacctctctcataactaagctcacctccttgagaagcttccttaagaagattcctaaagaagctagagc

SEQ ID NO: 56800 - DNA, 310 bp, Glycine max
  unsure (1)..(310): unsure at all n locations
tcaagctnctagcctaatggacttaccttgtaataattttcttagaaagcccttttgagccttgtttcccttaccccccccgagactcactacagagccttaagtgaaaaaccatgaatttaccataaccttatcgaattttggagctttggaattgttttgggaataagtgtggggggagtttggcttaatgtaaaacctgttttgtaaaaattctctaagaagtattttgggccaaacttgatggacaaagtaaaatgtttatacgttagacaatgctaaatgaaaagctgaatttctgggaagaatt

SEQ ID NO: 56801 - DNA, 329 bp, Glycine max
tgtacacgtccgtaacccgacgaatttgttcggctcaaattatgtcgcatttgtaggtgattccaaatcccaatcttatatggaactccgattcacagtcaaatccgcttagcttaactatctgtgaatttgttgagtcaacttgtctagctggggacagctactcctatatttagccgatgactcactcactttttgcatctaagcttaattactcagaagacaaaacactatcgacatttgcattgagaaggatatatcgtgctgtaccaaccatagattttatacaaaacaggccgagtgcaaattacattcgtgtccaccccaac

SEQ ID NO: 56802 - DNA, 333 bp, Glycine max
tttgtgtaaacatcagtaagttgttgtgttgaagcaaaaggcaagagcttgatcagacccgaaagcagcttatcacgaactaagtgacaatcaacctcaatatgcttagttctttcatagaagataggattagctgcaatgtggagagtcgatttattgtcacataacaccaaagcaggcttatgaataataccaaagtcatgaagcaaatatgtaagccattgaatttcataagttacagtagcaagggcacgatattcagcttcagaagaacttctcgagactgtggcttgcttcttagattttcatgatataagtgatgaactaagataa

SEQ ID NO: 56803 - DNA, 328 bp, Glycine max
ttgagcaaattcaaacgacaataactttttattcggatgtccgattgtgtcccgtagtatatcgagacgctcgaaattgaaaacaggagcactgagcgaattgaaatgacaaaaactttttactcggatgtccgattgagtcccgtaatatatcgagacgctcgtaattgaaaatagaagctctgagcaaattcaaacgacaataacttttgactcggatgtccgattgagtcccgtaatatatcaagacgctcgtaattgaaaacagaagctctgagaaaattcaaacgacaataactttttactcggatgtgcgattgagtcccgt

SEQ ID NO: 56804 - DNA, 324 bp, Glycine max
tgggtaacagaattgaaagtcagcttatcttcttagtttctctcgtctacttactcttctcactgtactagaaatcagggaaaaacattttcagaatgtgtccctccctcattaaagaagcctgaaaacttcttggagtttattctggtagatgcctgctggcatcagacattgtgttttcatgtactacaaaagtggtaaagagttacaaactcctaagaaacctatccccgtaccaaaacttaaatagggacagaactttggaacaaacacctgtttctaaatttctacaaccacttgacatgttgacaatgatgccatctg

SEQ ID NO: 56805 - DNA, 332 bp, Glycine max
ttttgattcattctatgtacctcgtttggtccacattgtgtttcgtgcatttttattctcattttgtttactttttataccccctcttgacgtgcttaagccattttacttaagtcatttctcgcttaacttaaaaataaaataaatttccaccgaacgtttgaattgtattatctgttaacttcggttaaaatgaattccgaccgttcggtcgtgccgtaaccacgttggaaatcaaaaagaggtaaaaaataatataataatcaaaaaacatcttttagtaaaataaagcggaaaatcaatcggacgttttctctttgggatttctcatt

SEQ ID NO: 56806 - DNA, 327 bp, Glycine max
tgtctttggtttggatacattttatatatgatttaggacttgtaggatccaatttgaggaaaattggatgaaggcaagaaggatttctaaaatctgccctattatgcagaaaattgttgttgaattgtgcagtagaaatttttgttcttgtgcagaaaatgcttgtgcattgctgggtatgggaaaggtagtacatattaggttctggacattttctagcaaatcccaacggtcaaaatgtagacttatgtactaggaacctccagtaaaattttcgagtcgatccaacggttagcaaatccaaacgaagagaatgttactggggta

SEQ ID NO: 56807 - DNA, 329 bp, Glycine max
tttcaaatgggaaaaaggctctcattttctttcttctacatcatattcaaacttgtccaaataaataataaagtcatctcgactcaaagaaggtcatctaagtctcatacaattaatatagaacctatatcctaatgtcacatcctatcagagcgtggtgttcccgtgtcctctagcatgaggttcttcatagtcatccacctattcatctgctcccccgaacacaaagttcaagatcatcacaggatccaaacacaaacagcaaaccgggagtgagttatcacatttctaactactagagagaaacaacacaacatatagtagccaaa

SEQ ID NO: 56808 - DNA, 329 bp, Glycine max
tgttgaggaagcctcttaatgaatctttttgaggaagctacatgagctgcctcggtaaaaatgctgcccagcctttgctaatcgttggatcttcttgaaatttggtttgcagcttcacaagacacttttccacgatcgaaccgttgggatctttgagaagatctctggagtgtgcgccaagcttccgttcctgagagcatttctgatttaagcatttcagccgttgctttcgtgtagcttaggaaaaacaccatttcttgttatttctttcttccaaagtcatttctaatgtcccaagcactttctccatcacccacagccaccattag

SEQ ID NO: 56809 - DNA, 328 bp, Glycine max
tccacaacatccaagcaaaactactttcaaacagcacaagctatcacagccaagcaaaacagagcaaaggcagaaactctgctcaacacatcaaccaaaatcacagcttttctcacttaaagaccccagtaacaattccttcgatccaattcgttaaccgttggatcgactccaaaattttactggaagtctatagtgcataagcctacattgtgaccgttgggatcgactagcaaacatccagaactcattctgtactactctttccacagccaaccacacacaagcattttctgcaccaagctaaaattctgctgcacctattttg

SEQ ID NO: 56810 - DNA, 329 bp, Glycine max
tgggcagtttgattggtttctctcttatgaaaaccaattgggagggagctggcagaagtttgttgacaaaggaccaggactaccaagtgtggttgagacaattgtttaataccaatctatagacattgctctattctgtaatggaaattgaaaatagcttcaataaagcgcacacattataggaaaaaaaaatttgtttgtaacatgtaacgaacaaacagataaggcatttcttatctgcttcgtatgagcttgagtccaatgcctccataaaaaaacaataaatttcatctgcattttgagttacatttgtttaaatgtagccgtgt

SEQ ID NO: 56811 - DNA, 336 bp, Glycine max
tagcatcttgaatttgatcgaccatgtattatacttcattgacaaaggtcacatagaactttctcttttaagaacaaaaccaaattaaagtcatcgatcaaattttaactagtgttaatattatcttaatattctaaggttttaataagaaaataaaaaacaaattcaaatttcaaacacatcatcacagaattcgcgagacaactgacacagaatacataatcaaatgcacatttggccatcattctaatcacagaaatgttgaactttacaactatcttgtgccggtttactcccatcagcatccccaatttcccctccctcaaagaataactg

SEQ ID NO: 56812 - DNA, 332 bp, Glycine max
ttttagttcctcccgtttaggcatggtacctaatgcctggttaatcaggaaatgatgtttctttggacatctcaatctcataattacattttccatgcataacatacgtattcccgagtctttcatctctatgaaatgttgtcgaagtattggcgatcaaaattgccattccttgggttatggggttgaaccaagctcatgcttttgtgaaaaggttcaccaagtcaagttgaagtatggaagtaaccaccatgcaaaaattggggcaaaagatgaatcgagttacatcgctactttgtttactaccaaacacattttggattgttgatgtc

SEQ ID NO: 56813 - DNA, 332 bp, Glycine max
tctttgagaaaacttccttgagatgctttagcttagctgcacatacccctctcataactaagctcacctccttgagaagcttccttaagaagattccttaagaagctagagcttagctacacatacctctctaatagctaagctcacctccttgagatgagaagctagagcttagctacacaccccctataatagctaagctcaccctcatgacaaaaaacatgaaaatagcaaaaaaaatgtccttattacaaagacaactcaaaatgccccgaaatacaaggctaaaaccctatactactagaatgaccaaaatacaaggcctagacgaa

SEQ ID NO: 56814 - DNA, 328 bp, Glycine max
tgtcgtaggtcagctgaggtctccatcgtccaagaaaagttattctgtcaaaagttttttatttttcaagtattattctcttatttttcttaacttatcatttttggcttatatagttagacttcgaattttcatttgaaattttttgtgctatcttctcatcattttataaggttgctcacaaaatttcaagtcatttagatatcatttaatggtagttgtagttcaaacctacattgtgacctacattagaagacaactagttgtgcatgctgaatttagtgtatgactagaggaaatccatctgacttacaaccctttgatcctg

SEQ ID NO: 56815 - DNA, 330 bp, Glycine max
tgggcggacccacttgcgcctttttttggatccaaagaagttgcccaacagagccgcatcaggcacggccaggcccctcacaatccccgccgcaaacccgccgagaaaacagtccccggcgccggtgggatcaacctgatcagcctcgaacggcgccaccttaaacgcaccgttttcacaaaacacctcgcaaccatccttcccgtgcgtgacgaccacgcaacaccacttcctcacctcctccacgtcaataaaaacggcctcatccgcagaagccttgagaaacgccacacgcggcaagaggtggaagaacccgctctctcttagcgc

SEQ ID NO: 56816 - DNA, 331 bp, Glycine max
ttcatcaagtggtaatcccatctctttatcttcaagtgggggctccttaaacctccattaattttttgctttaccttctcttccattgttttttcttcatttttttctccatgtatctcctcaaatgtcttgtgctaaatgtttttaacatgattctttaaagttttcaccgattaaacttgctataaaagctagattttattttctatggttcaaatttcttgttcttgttcttgaaccatgaattgtgttgagtttaggttcctttgagttttgtcttgttatttttttggctgaaacctaaaccataaaattattacaaaaatattaa

SEQ ID NO: 56817 - DNA, 328 bp, Glycine max
tctcaaggaagttttctcaagaaagcttctcaaggaagcttcctagtctataaatagaagcatgtgtaacacttgatgtaactttgatgaatgagagtcttgtgagacacacttaaagatccacttctctccctcttttattccttcaatttcgtgctcccccctctctctttctctccctctttcttttcctgcattgaagcatccttccaagcttcttatccaaggctcatcttggtggtgaagctccttcttccatggcttattccctagtggatggcacctccgctcacctcttctcctttgtcttccgctgcatctccatggt

SEQ ID NO: 56818 - DNA, 329 bp, Glycine max
tgtaatgtatatgttacattgttcttaaatttctaaaaagtttttaagaacaacctgtctaggtaaattttttcagaaagacttctaacaaaataagaaaagaaaagtttttcgtaattaccttataaaccagctaatgatagaagctctttcatattagtttttttcaaaagatatttttagattatgtataaactagcattaacttatagaaaagtttatttaattttttttctttttgttttctttttttagtagtacttctaaatacatttatccagatagacccttaatattaatatatatcaacaatacttagaatcttatga

SEQ ID NO: 56819 - DNA, 304 bp, Glycine max
tcaatgggtacggatgttcttgtttttagataacgaactccgtagagcatgatgagtctaaagatcaacctaccggaagaacgcggtatgtgtcatattgtccatctgtaaatgaaacgaagtgaaagactaagtgtaagaacaagattattgagaggtcacgccggctcatcatatgattactgctggattcaaacttctacggatcacctagctggttgttgctcttgaaccaggaaaagcatggaatgtgggaaactataagaaaagactggatagatcctacgctgagacatactgcatt

SEQ ID NO: 56820 - DNA, 333 bp, Glycine max
tgacttagcttatttccacccctattttgttcttttcaaagaacattgggtgtcctgacgtattttctccaccacgcacgcgcgcaagtcgtacgactttttttcttacaggaaaacaaaacaaaacgcaactcacactcacgcagacacccgacacaccacagtggcacagcctcgacccaccaccacgccaacacgcaaatttcatctcttctctcttattatcctatttttgttgggacgaattcattgatggtgcactcttaaatgtggagatagagaaaactcaagttacttcaaatatggaatcatttgttggtggagatgtaaaaa

SEQ ID NO: 56821 - DNA, 338 bp, Glycine max
ctcagcttcaagtgttttctccaatgaagtacttatcaaagttcgacaagtgtgcctatgtcctcgagagtatagctattatttctttttcttaatcataaacaatagggttatattaggatatatatccttgtatattatattaaactgcatacattatcttaaaccacgtacactatctttacatgtatatttttcttaatcaacatgcattatctttatccatttactgtatgacgcatatcattgggaatttacccttgcaccccaacccgcttcataacccagcaacaggtggcccttatatgctccatccataaattatgaggcatgcacaa

SEQ ID NO: 56822 - DNA, 329 bp, Glycine max
tttcctatatgatcttcaacttcttttgtttctcattttctggagaaagctttgttgtaaaactctctaattggctaacatagttttacttgcttaaatttgaatctcaaatcagaaacctgtaagaattagatgtaacaggaaaaggggttgtaggtataatcatcagggattgttaatctgaaagtttgtaatgctgttaaccagagaaatagaaaatggagaagttacttccgaattccaatgatcaccatgcaagatgcaggtttatgattatagagaaatgagtgaattatgtgctttggtaatgtgaataaatcccccttttg

SEQ ID NO: 56823 - DNA, 329 bp, Glycine max
tagccctagaggggatggactttttttgttttggagatgtcgcaacctacccttctgcgggagggcgacgcgtgactcgcgggatgcgtgttccacgaaaggaatacgcgcggagtcgccaccaacgtttatttgaggaaaacgtcggaaaaaccggaaaagacgtgatctacgaattttttaagtgaaaggttcgggagttgtatttacgcacggggaaggtattagcaccccacacgtccgtcccaaaggacgacagcctttaatcgaatgtgcaaacgtgactttgatttttacgttcccttttatgtccttatatcctttttata

SEQ ID NO: 56824 - DNA, 335 bp, Glycine max
  unsure (1)..(335): unsure at all n locations
tcaagcttgcctnaaagaggtccaggttttttttggcggccgaaggaactagttccgccccggagtacgacagtcaccgctttaggagcgttgtacaccagcagcgcttcgaagccatcaagggatggtcgtttctccgggagcgacgcgtccagctcagggacgacgagtatactgatttccaggaggaaatagggcgccggcggtgggtaccactggttactcccatggccaagtttgatccagaaatagtccttgagttttatgccaatgcttggccaacagaggagggcgtgcgtgacatgagatcctgtgttaggggtcagtggatcccg

SEQ ID NO: 56825 - DNA, 327 bp, Glycine max
ggaaggcgtgtagtccaccatttttttatcctagaatactggccatgtgtctaccatcattaacattttttctccgtcactgaggcgccacttgaactgccaggactgtccacctttgggcgtatcctatgaaagatctgtgcccctatatgcacatgttctgatgttgcatcctatccgaaaccatatcaacaatgtactgatactgcataatgacagccaccattacgaacttccaagagtgcactctagaatgctcccgcatatggtaccaagtaacaactaccccaggaacactctcttggcaggaatgtatgagcccgcact

SEQ ID NO: 56826 - DNA, 325 bp, Glycine max
tgaaggtgcgtaccccaccattttttatagtaaaacactagtaatgtgtctactattattatgatcatctctttctccgtcattgtaggtgccagttgagcgtattctttgaaagatccgtgccccctttttgcacatgttctgtaggtgcatcctatccagagccgtatcagaattgtactgacactgtctaacgaaggcaaccattatgtccttccaagaatgaactcgggaaggttccaagttagtgtaccaagtaacagttaccccagtaagactttcttggaagaaatgtatcagcagttcttcatcttttgtgtatgcc

SEQ ID NO: 56827 - DNA, 328 bp, Glycine max
ttcaacaagtttcttcttttatttctatcatgaagcagaaaactagggggactacccatcatatctcccaaaaccccatacccacgaaatttaagagagaaagaagtccacccaaacctgaagtttcgaagtcccactcgtagccacgcacttcacgactccaaaaatgccctcctttcacgatttggggcataaatgatggccaaaggttggagctttgttgggcaacaatggtggaggaagaagaaggagaaagccacgtgagggagagggagagctctggaaattttttgcttgggctgatgaaggaaaaaaaaaaccttttggg

SEQ ID NO: 56828 - DNA, 332 bp, Glycine max
ttgaagaaacaagacatgaatcattttcttttaactcccatttctattttattttattttatctaattcttgtaattctttctttaatttaatttacttttcctttttattttaatctacatattttctttttccaatcaaataaaatatcttattttatgtttttaaattacgataaagtgataatcataaaacatggtcccgtggattcaatttattacttgtggatacttcagcttggccattattttgagggtgatagggtgacgctaccttatgattcacatgatattgactcaacaccttttgaagttgagcattacaaaaatgcg

SEQ ID NO: 56829 - DNA, 328 bp, Glycine max
tcaacattcaatttcgagtgtcttttatatgacgggactcaatcagacatccgagtaaaacgttattgtcgtttgaattggctcagagcttcaacattcaatttcgagggtctcgatatattgcgggactcaatcagacatccgagtaaaaagttattgtcgtttgaattggctcagagcttcaacattcaatttcgagagtctcgatatatgacgggactcaatcagacatccgagtaaaatgttattgtcgtttgaattggctcagagcttcaacattcaatttcgagggtctcgatatattacgggactcaatcagacatccgag

SEQ ID NO: 56830 - DNA, 330 bp, Glycine max
ttgagggatttgacctgaaatgttgttttgtgagagatcaagggattctaacaatttcatttttcccatgtcatttggtatccctcccgacagatgatttctagacaagttcaaaaaccgcaaagcagatagcttggaaatttcagatggaattgctccagacagcttattacttgaaagatcaatcattctcaccaatatcagattgtctctgtactctaactcatctcctttgggaactaagacaagagtttccttgtagtggttataactgaagtcagagccatatgaataacttaaagggttggcaaagaagtcatcttcaccagc

SEQ ID NO: 56831 - DNA, 327 bp, Glycine max
ttgcatagctcctaaagccatatattattgatcctacaataataattacaattaggaactatttttttcaaagacaatttagaaaaagaaatcaacaaatccaatttgcatgcaggaatttaaagatatgttttccaaggagattcttcatggactatcgccttcaagaggcatagaacatcaaattgaccttcttccatgagctttattgcctaacaggccaacttacaaaagcaatccccaagagactcaggttgtaaacagaactttgtcttttcttcttagagctgtgattaaaaagaatataaagagttgggaagaatgtct

SEQ ID NO: 56832 - DNA, 329 bp, Glycine max
tgccacccagctcgcccaggctagttggttgcttcctccagaagcaacagccttctggaggaatcttctggagggcccaagtgggcctggttgctatttacacccccatttttactaaatacaccccactgccttttttttggtgattcttttttcgtaaagttacggaaacttacgaatttcgtaacgatacttgttttctttccgtaatgttacggaaccttgcggattacataatcatcccctttttgacttacggaatgttacggaacctcactaattgtgcaacgatgctttcatttgatttccggtgtgtcacgtaaccttac

SEQ ID NO: 56833 - DNA, 328 bp, Glycine max
tatccttatggcttgcctcctgtcttcactccccgtgccactccgaaagatttaagccaagcccctacttttgaggggcaactcccgccttgtgacgactatcccgggcaagacgatgaggaaggagatacccatctcggccccctgctccaccttaatgatccgtccccacatgaactaccccaaccgaacatagtccgccatatcccggcctcacccacacccgtaaaagaatctgttcccttcgcggaagataagggaaagatagaggcgcttgaagagaggttaagagcagtcgagggccttggcaattacccgttctcggatt

SEQ ID NO: 56834 - DNA, 332 bp, Glycine max
ttgagccgaaatgctgactctttatttaccttgacccagggggagaatgccaatccttacccttggaagcaaaaaaatggagaagagaaggaaaatttccaatcaaagaagaagcatgaaaaggagagaaggaaaatttccaatcaaagagaaagaaaagaagaggaaaggaaattcccaatcaaagagtgggagaaagaacatagacaagaatagaaagaaaactcccaatcaaagaatgggagaaggaaaacaagaagttcaaaagaagaaagctcctggtcaaagaaactagaagaaatgtgcagaaaggtcttttgaccggacgatat

SEQ ID NO: 56835 - DNA, 292 bp, Glycine max
  unsure (1)..(292): unsure at all n locations
tggtggaaagaacttttttttgttttcatggagaatngaaagataagccatggtggcaaaagatgcaaactcgggaagagttggctgaagcttccgctatcctcatatggattgcttcagcccttcatgctgctgttgactttggacagcctccaataggaggtttaatcctgagcaggccagctattatcgggagatccatgcctgaactggggactgctgaatatgaggccattggtcagaacccttagaaggagtgttagaaacactattctggacccaaggagaccct

SEQ ID NO: 56836 - DNA, 306 bp, Glycine max
ttgcgaaaggcctggcgtagtttcttacccatcaattgtcctaactctttcagactggcgattcctacgctcttaatcttgacttgatagaacctctttttaagccaaggcgtctaactcgatcccatgttttactaaagtggaataaaaaccaatgtgagtcaagactctgaaacctatcacaggtgaaatggatgaatgcatgaaaaaatgcgtatggcacagatgctttttacggatccgagagcccgggaaattatgttcttcttacatacaacattctggcggcataacgcctgatgcatg

SEQ ID NO: 56837 - DNA, 271 bp, Glycine max
gccaagaaaagccaccccccccacaaaaagggacaaaaaacagcaggcgagaaagcccagggagacgagagaacccacgggggaagaaaggaggaacaagaggccaaagggagaaaagaacctgaggacaaaccccggtgaaaaggagcaaaacaggaagaaaggccaaaggggaaaaagcatctgacggaaaagaaaagccggggaaaaaagagcccccaaaaaaaaaaaaagggggggcaaaagcccgagggaggccaaaaaaaagggg

SEQ ID NO: 56838 - DNA, 332 bp, Glycine max
tgtgttgttatgttgtaaaaaaatttcttttcttttccctattgaagcttcaccgggttgcaggtaatcttcttcatcatcctcattgtcaactccaccagcatcttccccacgggattcactcctatactcagcatcattctcctccacatcatctgctgttccattcacctcctcactcaaggccatattgttggcaaaggtctccgtggtatcaccaccataaccggcccttgtctccacacctttcagagactgaaaccaataatgacaagcaatttaacattagcttgataccgttcaccaggaggggtaaaaaacattaaactgaa

SEQ ID NO: 56839 - DNA, 329 bp, Glycine max
ttaacctcatcgtgtctcacaggctttatatttgggagccaatctaatccttgggttcggactctcagccacttatgatagccgccgatgatcccattactgcttcccctaagctctctatcctttcttcacgccgcatcccatgccttgcgaactccttggagtaccctcgcgttgtggtcactaaaaccccgtgcgatgaaaggcgtgatgctttcatctgatggcactcctctcatggggtagccaagctgtcttatggcgaggatgggattataattaatacaatccgttgttccatcaagggaacatttggacattcttcgcat

SEQ ID NO: 56840 - DNA, 338 bp, Glycine max
atagcctactcaagcttgaagcgtaaaggaatttattatttatattggacagatctgtgttataaattgaggaaacagtcaattaacgcattgaaattctttaatttgttggcatttatgtgtcaatgccgtgactcaaattaaattcaaatatcttaaatacgatattaaatttaaattttgtgaatgaactaattcaaagataagacttgactacaatcaatcaatcaatactcccataaatattaggcttcaataaagattaatatgacacactttgcaaacatgttttagaagtacttaatacaatcacattttgagcttaagaatattctgta

SEQ ID NO: 56841 - DNA, 333 bp, Glycine max
tgccatttgtccctaggctattcttttatcacagaagaaaaagaagatgggagaagaaagatgcaaagctgtcagaaaaaagtagacaaactccttaatgctaaattcattagagacatcagatattctacttggctcgccatcatcgtcatggtcaaaaaggtcaaaggcaaatggcgaatatgcaccgactacactgatctaaacagggcgtgccctaaagatgattaccctctgcacaacatcgaaaaactgtggaaggaatgccttccaagattattttgatgatgccaaagaatcaagtgtaaaacaagtttcaagaatcaagatcaa

SEQ ID NO: 56842 - DNA, 331 bp, Glycine max
ttttggagtagaaacatgggaccatttctttttattttcaaaaagaaagtcgtatctagtcaaggtctgagagaccatacaagtttcctaacgatttctaattatgtgggccattaagtctatcatatgctgacaatagccgagaagcccatgaatctcttcgggggcggagtaggtgtctgccatcaccttggccttggctaacaagcggggaagttcttgactcccgttcaaggtaagagcaaaccgatccatccacatggttgcctcttggtgtaaagagtcgatcacccttcctctagcctctgtttccgcgtatacttgagcatac

SEQ ID NO: 56843 - DNA, 328 bp, Glycine max
tccctaaagagaggttagtgtaaatattaaaaaagagagacttatgtaattttacaaaatctcagaggaggtttgtataatttttttaagttaaaaattgactgttactattagaaaaaatagatttaacatcgtcaggttaacatcgatttttgagaaaatcgagattaacataaacgcggtgacataattttaaataatgttcattagctgacatcggttttgcagaaaatcgatgttaacaaacttatgttaacatcggtttttaaaaaattgatgttattcgttaacatcgattttccaaaaaaaaaaaccgatgctaacgtaa

SEQ ID NO: 56844 - DNA, 323 bp, Glycine max
tccattggtgtcttgaaacctaagttgttgaagggcatctattaatcaaatatgctattgtgtttgcagcttctccccaaaaggtctttggcagtcctgcacttagaagcatgcacctcactctttccaaaaaggtcttattcattctttctgccaaaccattctgttgtggagtgtgagggactgttttgtgccttttgatgcctattttcctgcaaaactcgttgaactgctttgaaacaaactccaggccattgtcagtccttaaaacttttaattttgtaccaagttgatttccaacaagagtatgtcattctctaaat

SEQ ID NO: 56845 - DNA, 326 bp, Glycine max
tgctagagttaatattatgaaggattgttaatctgatgtatggagcccggttgaaggtgtcaccatctctgaactacaatctagattcttccttttccagttttatcaccatatggatgtccaacgtatactgaagtatggtccttggagttttgacaagcatttgttgatccgaggagttatcaaaccatgtgaaagtccaagccaagttcctcttttcacaatcccattttgggtgcaagtgcatggattgccaattggtctcatgtcttaaacaatggggcaaagcattggtaattatataggagagtttatataatatgatg

SEQ ID NO: 56846 - DNA, 328 bp, Glycine max
  unsure (1)..(328): unsure at all n locations
tgccgtcacggagntttccgactattttcttgngnggnggaacaagctacaaaaggagagagcaagaaatgaagagccaatggttgatacatggatggagatgaaaaagatcatgaggaagcggtatgtgccggctagttactcaagggacttgaaattcaagctccaaaaactaacccaaggcaacaagggggttgaggagtatttcaaggaaatggatgtgctcatgattcaagcaaagattgaagaagatgaggaggtaactatggctcgatttcttaatggtttgactaatgatatccgtgatattgttgagctgcaggagttt

SEQ ID NO: 56847 - DNA, 356 bp, Glycine max
  unsure (1)..(356): unsure at all n locations
aaaacattgtttcttanagcaaagctgatatcctataactgaattctgtctaaatcgaaatttagcactgcttaacacaccaataaaaacaaagatacagttagtaaattcctatgcaaattcagtttaaatgtttcataagacaggccataactttttttagaggaaaagaagacaatccataacttaagaccanattgaacactccttaagacacaaaagaagacaccaaactgaacatccctatttggattattatctctgcttcagtgtaagacatttacatttttttgtatgtgagaaagnactaatatgaagctgcgacagggtgctaatattctacaacacaaacactt

SEQ ID NO: 56848 - DNA, 460 bp, Glycine max
  unsure (1)..(460): unsure at all n locations
tagaacaccggaacatgtctactatcattggtatcatctccctctctatcattgggggcgttacttgagttgccagatccctccacctttgggcgtattcttggaaagattcatgctccttcttacacatgttctgtagctgcattttatccagagccatatcataatggtactaatactgcctaatgaaggcaaccattaggtccttctatgaatggacctgngaaggttccanattactataacatgtgatggctgccccaataagactctcttggaagaaatgcatcaacaanttttcatttttcgagtatgcccctattttcctgatgtacatcttcaggtgattcttggggcaagtagtccccttgtacttatcaaaatccgacacctttgacttctgatggatgacgatgtcaggcaccaggcacaactctaccatgtcaggaaaaacataatc

SEQ ID NO: 56849 - DNA, 224 bp, Glycine max
attgcacaacaccccttatctagcattgtcactctaaagactagatccctttgatcttctataatatagagtgggaaaggaatgctcctatatgacactatgaatctagaaccggatgacacaaatataacttatactcaagtagaactgagtccttttttaaaagagcccggaccacttaaagcaacatgaggccttacttaatcaggacccagaagagacac

SEQ ID NO: 56850 - DNA, 103 bp, Glycine max
atctagttgcctaattgtttataattagctaatggacaattgtactaggatactctagttgataaattcataacccttgccgatagcaatgcggggggtggat

SEQ ID NO: 56851 - DNA, 401 bp, Glycine max
  unsure (1)..(401): unsure at all n locations
agcttagccctagaggggatggaacctttcaggtcttgatatatgatcaatatnaatgcctataggtcggaccttccagaagagtctggagtcagcaccacttttaataattctgatttaatctccttttgctggtggagctgatattgaggaggagacaccaacaaatttgaggtcaaatctctttcaagggggaggggatgatgcaatccttcctatgaagggaccagttaccagagccatgagcaagaggctccaagaggattgggctatagctgctgaaaaatgccctatggttctcatgaacctcaagataaatttttgagcgcatgggccaaggatgggtccatctatcttngtacatattagattaggatatcattatttttggtccttttatt

SEQ ID NO: 56852 - DNA, 432 bp, Glycine max
  unsure (1)..(432): unsure at all n locations
tcgtgctntgatgctttcatttcatctcgnctactttcggtattcttttttcttcgttttaagtgagtttcgaccaatcgtttaagtcgtaacctcacttaatcaatgttaaaatgaatntcgaccgatcattttcatcgtaatctcatttaatcgcctttaaaataaaattcaaccgatcgttcatgctggaacctcggttaatcatcaaaaaaggcaagttccaccgaacatttactttgaaagtctctctaaatgagtgagaaataccaagtgaaataaggctaaataactcataataagctttgccccgaaaaggcattgaaatgttcaagtcacgcctaaggcctttactttatcgtaaacaaccgttaaagctaaaacacacccacataacttctgcttccaagacacggggctgagtctatacat

SEQ ID NO: 56853 - DNA, 441 bp, Glycine max
  unsure (1)..(441): unsure at all n locations
ctttctatcctttctcttctaattgccggcatcgcttcttgagccctcagcttgcgcaagtctgtgaccgtggaggttgcctagccctcgaacgctaggtatcaacgaccctctccaaaacaaataattagacaaatggaaactttacataaaacacagaataaaactctagctattcaatactctaaaggtagtggctaaagaattaaaacaaacaatctaatatgttaatcataaataaatgtaaaatanataatgagaaacacaatcttatgtctcccaataaaaaatttctactctcagctntgtgactaatgctcttgctgacacttattagtatttgtcaaactcttaattagtaatactatattgagaaaaacaatgcgaaagaataaaaaatataaggagcaacctcgtgtntatnttgaanaactgaactca

SEQ ID NO: 56854 - DNA, 243 bp, Glycine max
  unsure (1)..(243): unsure at all n locations
catacccacgaaatgtaagagagaaagaagtccaccccaacctgaaatntctgagtcccactcgtaggcacgcacttcacgactccataaatggcctcctttcgcgatttggagcagaaatgagcaccagagggtgaagctttgtttggagcttcatatgagaatgatggagaagaaaggcaacgtgatgaagagagagagctatctgaaaaagtgtggggctgaagaagagagaaaaagctt

SEQ ID NO: 56855 - DNA, 296 bp, Glycine max
  unsure (1)..(296): unsure at all n locations
aagtccatagccatcaaagtctgaacagagcatgatgaactaagggatgttaatatggccaccgatgaagccttggaatgagaaaccaagaaagcccgaaaggaagaacacgaccaaatcataattttgaggtgctttatagggcagcaatagtgagctcaaactccgaagaggtgaaaagaatcatcactgctcaaacgcatgatctggaaggacgagctaaatgcttgccttaggtcgaaaagaatattgtcccaacagttaatgtgagactgaanggaatatgtgggccatca

SEQ ID NO: 56856 - DNA, 339 bp, Glycine max
  unsure (1)..(339): unsure at all n locations
atattatttatattaactagcactttgatttccagccttgtattcggctatattattatgatatttgaacaatttactatttctttatttgtctgggatgtatgaacaaatattaattatgttatttgactatgtggattctatatgtcatctattcgtggntctcgcttcatggttcttgcttcatgatttggtttatatctttcatgaatgttgagtggatgcttaaatgtatttgcatgcattaaatttgttactcactctggaatttttgttgatgccaaagggggagagaaattggattaaatcaagaactacatgagaatcaactaattttag

SEQ ID NO: 56857 - DNA, 407 bp, Glycine max
  unsure (1)..(407): unsure at all n locations
actaagctcctctactaagcagaaatccacttttggcgttgagcgagacatttctctctgagcgcaattcctcttgggttggangtgcgcttagcacgcttgtctcgcttagcgagatgtccaanagtgttanttgataaatcccaacagtcaaagcgtgaatatttcggttacaatcctacagtccaaatttgaaggtgatccaatgataaacaagtctgggatcgcaggtttaccagaacaagtttagggtaaacttgaattctcattattcaacccaagtcaatanaactccacataactcaacattcacatcaagcaaatcacacatgactaattcacacaatacctcanatcatccaaatcaatcacataatcgaataacacaagaaatacattaaacatcg

SEQ ID NO: 56858 - DNA, 284 bp, Glycine max
ttcaatgtaagtcggctagggtctctcgcgtgagctcaaccgaagttgtgtctcggcctacaccggcatcgctttcaattgcttggaaaggaaaacgttggccaactcgggaaaaaaattttgatataccgatactgatcgaacaaaatgttatccgacgtctgtcaagaaagatgactgatcgatgtttaacccgaagcatacccggtgacccgatcaacattctctatgacatatcccatatattctggattatgatatacatttgatgagatatgaactgc

SEQ ID NO: 56859 - DNA, 432 bp, Glycine max
  unsure (1)..(432): unsure at all n locations
agcttaaggatggaatacttaattggtggtgatgaacttaagcgcataacggaatncaaaaatgccaaaaatgattaccctatggctgcaaactcgtaaatcccgagggtattgcttttgaatggngggtaaagatgtttttgaatgcaaaagcgttcccctccctcgttnttatattatggtgcaggggttgctcgcgggcgagctcatctcgcccaggtgagctaacctgcccattttttttttggttttttttttacgggaaacataaccatggccccctctctttacaggttaacgtttgcctactcgaacctacttaagttagaattaggcatcgattacttatttataacaaacaatatttataatcactgtgaattcaaaggatactgtgtttgccttgcagtgacgttctctgcttgtcaacat

SEQ ID NO: 56860 - DNA, 477 bp, Glycine max
  unsure (1)..(477): unsure at all n locations
attcattctatgtacccgtggtggtccacattttgtttcatgtattnttattcttgctttcatttactctgtatacccccttttgatgtgcttaagccatttatttaagtcatttctcgcttaatctaaaaataaaataaatttccaccgatcgtttaaattgtatcatccgttaatttcggctaaaatgaattccgaccgttcggtcgtgccgtaaccacgttgtaaatcaaaaaagaggtaaaataataatataatgatcaaaanaatgccttttagtaaaataaagccgaaaatcaatcggacgttttctctttgggatatctcacctagtcaaactcgtccacaanaatagggttatgaaagatatcattcagtttcttaccagaaaatggatattctaaggtcaacgcctaaatgatcacctttaagtaaaaaatcactgatcaccatagaaaaactagtangctgattctc

SEQ ID NO: 56861 - DNA, 306 bp, Glycine max
acttttctctctccatgaataatactctgcaaatgccaatgggtaaggtgtgcgcaactgaatcttgaaccactatctcaatttcatgatgatcgaacgggtaatgagtcctggatcatacatttactatggaggtgctgagtcttctgtgggaaaagagaaatctacactgcgaacgacatctctctaacctccaacattctttcgcaatatccaacggtgaaaatgctcagaaattagtttccgaccaggtgctgagatatcacgacgatccaacgattaaagaatctgaatcatcatttcact

SEQ ID NO: 56862 - DNA, 499 bp, Glycine max
  unsure (1)..(499): unsure at all n locations
tcttggtttctccccaattaaaaattatgccgggtcttcgatcatgatgtacacagatcttagacaagccattcagattgccaagaagaattatcatcatagatctaattctcacgctcaagatggtcagtggaattctctgtctcaagatgataattccatgtctcaatcttgagttgccaattctgaaaagaaaatcccaaaacaataattgagtttcataggttgcattaaacatggtggagttgtngcagcacttacagggttatgttgaactcatgaatgttgagtttcatacaagtccattggatgtggcatttgtacatganagaaagaaaaaggaaggaagaaagtatatttacaggatgagcatacttatatgatagtttcatcatttcaataatgcaagacggtggttacaggttangcacagctgtaattactacgttctgttaaagtgctactatgcatgctaagagaaagaacttgtgaagtgtca

SEQ ID NO: 56863 - DNA, 457 bp, Glycine max
  unsure (1)..(457): unsure at all n locations
agcttcaggttgctcattcactccagattgatgcatagaatgacagagatctgtatggtgatctgcagaagaacatatatcacagaatcttgcaacaggtgtagatttctgattcatggcaagctgcgttactacgttgacccaggcatcaagttntccttcaagctttttattttcagtaaatgaagatgaatttatggccacctcatggactcctctaagaacaatagcatcatttcttgcactgaattgttgggagttagaagccatcttctcaatcaaattcctagcttcagcaggggtcatatcaccaagggctccaccactggctgcatcaatcanacttctctccatgttgctgagtcccttatagaaatattgaagaacgagttgcttagaaatcttgtggtgaggacagtttgcaaacaatctcttcgaatcttttncagtactcata

SEQ ID NO: 56864 - DNA, 365 bp, Glycine max
  unsure (1)..(365): unsure at all n locations
atctaagtctcatacaatttatatatacctatatccttatgcacaatctattagagcgggtgttcccgtgtctttatcatgaaggtcttcatagtcattcacctattcatctgctcccccgaacacaaagtcaagatctataggatccaacaccaacaacaaaccgggagtgagtatcacatttctaacttctagagagaaacaacacaacatatagtaggcgaatacaatttacttagcatatctcacattatttcatcactgtgtcattcatcaatcacacttttcatgcatcaatcacacctttcaatcatcaatcactatacatangagtcacacactccgatcaagacataataacatat

SEQ ID NO: 56865 - DNA, 362 bp, Glycine max
  unsure (1)..(362): unsure at all n locations
tctatattcgaatggattatgtaaaactacgcccattatccgtgttatgtcgggtcttaaataaaccaatccacgnncccggatttgtatactcacccctagctaatatgatagtaattacaaaataattgagtggtatatgttaattgctagaacccaacatattgaatgatctctgacccataaaaaatctattacgatgactgacttttttcttgttccacataaggaaatctatccttaccaaaatcactcttgctttcttttaaaaaacaaactccttaactcataccataacacaacattaggaatttttatcaaatccttgaaggttacgcatgccttggagactatgtcaaccc

SEQ ID NO: 56866 - DNA, 336 bp, Glycine max
aaataagcaacacccaattacaataatctctcttggaccaattcggaagatgattcaacacaacatcagctcgtaaatcagtcttttgtgcactaccaagacatataaacgacaatgctcacctttttgtttggaactaatattttttgtgcagaaacccaaaatcggctctcccacccatagcacacacaccaaatgcaatacggatctaaacagagaagcaataccagtcacgtacatcactccaaataaaaagagagagaacaaaatatctagggaaatgagagaggacatatctaatactatgtatgaatccaatctttatcaaaatctgga

SEQ ID NO: 56867 - DNA, 460 bp, Glycine max
  unsure (1)..(460): unsure at all n locations
tagctcattcattctactacattggttatttattatgctngaactntaacaccctatttattatatggaatntggaaaatataatttaaaatgagtaatattntttcttgatttccaatcatggagataagactgcatacatcttaccctctcanttcacagttgtgtaatggaaaccttgtttgtctcatatatatatatatatatcaatatatatcatactgttctcgtgtattgtaaacctcttcttattgctttacatttggcttttatagattctttgactctgagatttattacctaaaaatgtggcagttttgctacaanctattagctatatttcttttagtntactgcctacgtattgtngccaattcaatgccgttttcatttcatggagagttcccttgtgatcttctctgagactactacaatatgataccatcatggttatatacac

SEQ ID NO: 56868 - DNA, 443 bp, Glycine max
  unsure (1)..(443): unsure at all n locations
atattctaagtaattatttttatgaatgggaacggaagtatattattaactattctggtctttttcttatttaaaaatcatagatctaataatgtattttttatataagaaattttattaaacctatganttttatttatatttcatatatgtaaaaattattagatcaaaattaattgttataaaatttattatgtaaacttatgtgtatattaaatatatattagaaattctagtgttatatttattaacactaattattttataacataattgattattagttcagttgattagaatgtgatactaataacacgaaagtacatattngagatatgaattgcanacttcgtaatttagagattgcaatccatgtgaacttacagaggataatgtggaattgccaaaatctgctggtgaaaaaaaactttcagaagaaatgt

SEQ ID NO: 56869 - DNA, 412 bp, Glycine max
aattatgacgcatcaacaagaatcaagccaatgctattgtgcaagcaatcaatggtgctaaacacaccaaatgattatgatgatggatggctcacattctcacaaaggtaacatcatcactatctaattgagctgtcgaaactattatgacatgtaaagaagaatcaacgacttcaagtcacaaaatgtcaagaacctttattttcaaaacaattacccatttcttgaacatatcctataattcaaagaaaaacatgcatagtcgtacgtgcacacaatagtgacccataatattaaactgaagatgcgacgaaactaacaacattaaccaattaacacaatctacatattacaataccaacagaactagcaaaaccaaagaacacttcctcaccatacttaaacaacacat

SEQ ID NO: 56870 - DNA, 402 bp, Glycine max
  unsure (1)..(402): unsure at all n locations
tatgtgaccatgacatgagtttcaatctataattatctatcatcaatcatctttgaatcatctattgttcaatctttnttcaacatcatctctcaatcatctttcaatcaatctttcaatatctttctacagaattttctgattcatttctcttcacctcttcacaaatttttgatcagcactttctcttccaagaaaagatctttgttcaaaaacttgtgctattcatattattcattctcttctcccattgccaaaagaacgaaggactaaccgcctgaattcttttgtgtctctcttctcccttacaaaagattcaaaggattaaccgcctgagaatttatttcattcttcccttcccgttaagcaaaagatttcaaaggactaactggctgagatatc

SEQ ID NO: 56871 - DNA, 413 bp, Glycine max
  unsure (1)..(413): unsure at all n locations
catcttggaggtgaatcttcttcttccatggcttattccctagtggatggcgcctcctctcacctcttcttctttgtcctccgctgcatctccatggtggaaaatcaccattaaaggacctcattaaagctcatagatccagccttcatagaagccccagaaacaagctttcattacctttggatgaactttgaagtgaaattctcaaatgatcaaagttcagacctcattngagacacagaatgttgtgctccttctctccctctccctccactcatcttcttctaccttcaagggtttatccatggcnttctatggtggtgagcttattcttgactcatcttctcctggaagtggcgtcatcaagcatctttctttcttcttcattccgctgccattaatcttcaaaaagc

SEQ ID NO: 56872 - DNA, 462 bp, Glycine max
  unsure (1)..(462): unsure at all n locations
tgatcatcatactaggacgaatgagaagactggggcaaatgaagagggtgagaatgagggacaggcccatgctgtgactgccattcctatacagccaagtttcccaccaacccaacaatgtcattactcagccaataacaaaccttctccttacccaccgcccagttatccacaaaggcaatccctaaattcaacaccaaagcctgtctaccgcactttcaatgacgaagaccacctttagcacataccaaaaaacaccaacataaaggaattttgcagcaaaaagcctgtagggttcaccccaaattccgttgtcatatgctaaacttgatcccatatccactcgataattcaatggtagccataaccccaaccaagggtcctcaacctncatttttctaaagatacgactcgaacgcaacgtgtgcatatcatggaggagcacccgngcattccattgag

SEQ ID NO: 56873 - DNA, 463 bp, Glycine max
  unsure (1)..(463): unsure at all n locations
gcttatcactggctcacgaatgcncaccctggtctatatggtacgtgatagaacatgcataatcacatagaaggtggtttctagtagaagaaaaaatgtaatccacgtaagtgcaattggtttatctggagctacagaggggtggcactgaatcatgcagactgccttctgttatagcgattaattgaagttttctttcatgccctgaacgtgaaatacagtgggtcttaataatactttataatattatgccatgtgagtataatgaccaacctttcatatcctttcagtggtttcggtcatgtcatttatagttttatttgaaaagacaattattaaattgctttatagagacggaactatttgaattatacttaatgtgggattttgtactaccaaaatgaatctatggatttgaaatctaattatatggttattgtatacgatctatgaatattatatt

SEQ ID NO: 56874 - DNA, 211 bp, Glycine max
  unsure (1)..(211): unsure at all n locations
ttcctttatgctagtgaggagntagtttgactttcaccttgatgattgtcttgctgactagnnctggggtagtacgttttgccttatagaatttgtaccttcgactatggntgtcgtagctcccaaggagtgatcttaccacaggtgtgccttatatttttttaagagtgtgtaccacaggtgcaccttgggcttcttgcattcctatata

SEQ ID NO: 56875 - DNA, 497 bp, Glycine max
  unsure (1)..(497): unsure at all n locations
tgcagctgtccagcctagtactaggtcattttttattntcaaaagcacaatcagaattggaacaccccatttggttctcattgccactatcaacagcaaaatcagatttggaacacccccctttggttccaattgccactctcaatatcataatcagaattggaacatggctttaggtccaattgccaccctcaatatcaaaatcaaaattggaacaccccctatggtttcaattactcatgattgaaaaaattgtgatgtttggtgatatatgctatattgatatatgcttatgatgtaaccttacacaaatagaaattgcaaagattaaaagataaatctatgtatctgctgatgttgaaaacctctagcccaaacccattccttctttccttcanatcatgactacctgcatttcctacctgcatgtgtgaacagaccaatttcatgtacaaatcattttcctattgccaactagatagatcaatttatctacc

SEQ ID NO: 56876 - DNA, 495 bp, Glycine max
  unsure (1)..(495): unsure at all n locations
tacatccttattattggtaattcttatctttttattgtacgttatatacttgttataggaaccctataattctaagtatatataggtgtagtatggcgttctgccttaattgcatagatagtatggntgcttgtgatttattgttcttagtgatgctaatactntatagttggatgactcatatcaagttatatttcataaggaatactttgttgatcgtaccttctaattctagtgcaacctatttttttgtggtgcgtgcttaattcaaatacattgatgtcacttgaaagcctgagtataattaattctttgtgttatgagactacatcaaacaattggattactgatgtttctatcacaatcaagtgattgttaatgtcttcatatgggtgtacattatggtcatgtttttgtttctagaattcattgaaatattgttggtgattctgaataagtgatcattttttttattcacaattattatctcctaat

SEQ ID NO: 56877 - DNA, 307 bp, Glycine max
acacagaagcatgattgattagagaaacatccttatatgcattagcttgtctgttaaaatgacccaacacttctacctactgctgacaagtatacttgcatttatacagatcttatgctagacctacagcaattctggtatagaccatcaaatatgaatgtatcttccaacaatgctctatttctgaatttaaacccgaacttgaacatatctgccctgctgtacgaaatcatccatcttaattattatatactcgacgatctggtgcactctacagcaaaccagaatcccttgtatatatctgtac

SEQ ID NO: 56878 - DNA, 476 bp, Glycine max
  unsure (1)..(476): unsure at all n locations
ngagatgaggaagtgtngaagggtgaaacttcctgcttttattgttgttcacagattgtgtcctcgagatatgtcgcggnggtcatgaccttggggacgtcaggtggggtgctattgtccaaaaccaagcttgaccaatcccgacccgtgcatagtcggtcagtgagaacctgtgatgtacctaaacaggcgagctcctggcagtcaacagattaaaggaacaaagaccacaaagcgaggaggcttgtggtggctggccanctgtgaattttgggtgatatgtggattatggcctctgctaatcgattaccaagggtgggtaatcgattacaaggcttaaaagtgaagacaggaggctaagatggtctctggtaatcgattaccacggggtgtaatcgattaccatgcttgaaaatgaggtcaggaagccatganggcttctggtaatcgattaccaaggggggtgtaatcgatac

SEQ ID NO: 56879 - DNA, 401 bp, Glycine max
  unsure (1)..(401): unsure at all n locations
ccgctgcaagcttgtcttcactctttggaaactcatcagtgcttctttataacatgtcccctcacatgtcagccactgcattgctttataaagctgcacaaatgagttcaaccacaaccaccaataatgagttaggcatgagatcaagcatagagaatgagcacagtagccatctacgtggtttgttgaactttcttgccaacggaaacaaccttggccagtatcacaacgtggtggaggagcctaatatgatgtcacaaaacaatcttggtttgtgctttggagggtctgataagaagaccttggactttntgtgtgttgggggaatggtgaggaatatgaacaatggtggagggttttacaaagagagcaacacaacaacactccatgggaattactat

SEQ ID NO: 56880 - DNA, 372 bp, Glycine max
  unsure (1)..(372): unsure at all n locations
taagaaaaaatatattatgagaagtgtgttattaacactctctgaattaaaaataatgtgtttggattgattctgtcgtaaaaaataatcaaataatttttttttatgactaagggaaaatattagatagttacttttactctttcataatatcactataaatttgtaggataaaactgattcttctattttacatcttntacatantctgaagaaaaagaanaaataacaaacataacaagttatacgacagaattgaaatatatataaataaataagtgttgtaagaatatcaggtaatttctaatattattccatgtccctccttgatgtgacttcggagaagtaccagccagccattgcattgcatca

SEQ ID NO: 56881 - DNA, 379 bp, Glycine max
  unsure (1)..(379): unsure at all n locations
gcctggtcgctatactcacccncctgtgtactaaatgcacccgcctttctatttttaagaattctttttccgtaacgttacgaaactttacgaatttcgtaacgatacttattttccttccgcaaggctacgaatccttacggattatgtatttactctcttttagctttcgaagaagtacgganactcacggattgcacaacaacacctcttttcgatttccgccacattacggaatttcacgaatcacgcaagcctgcttcctttctatttctgagacgtctcgggacttcatttattgcatgtcatccagtaataatccccggacgaanatatggtatgacagttcaccctctttacttacctctcatcggagata

SEQ ID NO: 56882 - DNA, 426 bp, Glycine max
  unsure (1)..(426): unsure at all n locations
attatattcacttatatgaaaactatgaaaaccaacttatgtttgaaacaaaaagaattataaatatggtgaaaatcattgtgaaagtgagtgtcatgagcaattagaaaaaataaaattagatattttaattatctaattgctaacatgactcattnttatacannatttacacatgtatctntttgctctcaaaagttaggttggtcctaatagttttcatgtaagtgaatataatgagataagtttcacatcctanatcaataaaaatattntcaaggtcgtgtctganaataaanaaaacaataagctttttgaaatggttaatgtgtcattagtaaaataaataggtgaccattttaaaaactttaaaaattagaanaccaatttaaaatcaagaaaataatttaagggacaattcttaca

SEQ ID NO: 56883 - DNA, 372 bp, Glycine max
  unsure (1)..(372): unsure at all n locations
tttttgtattacaaagtgctcaatctgtaatacataacaatgcattatggattggtgaatccataatgcaaaaactatntccattctccagccaggtaaccactatttttctaataatagagagtctctcacttaaaacagcgaagaagatcatattgtggtgggacttgatggcgttgaaggaggcccacgacaagatgatattctctagcgatggaggccgcggtgaggttgatctctacctccaagcctcgacaaaattcaacattccctctcctttgtctttgtttcctttgacaaagtcaacctctccaccatcacatcaacnaaaatacaacataacccataactgacaccagcaccagcaccacc

SEQ ID NO: 56884 - DNA, 465 bp, Glycine max
  unsure (1)..(465): unsure at all n locations
agtctcacgattgtcgcgtgctcatgcaacaattgtttgtcgtggctatacgagacatcttgccaaacaaagtcaggttaacgataactcgcctgtgctntttcttccattctaaatgtagcaaagtcattgatccagtcatgtttgatgagttggaaaatgaggcctcaattatactgtgccagttggagatgtattttccccctgctttctttgacatcatgattcacttgattgtgcatcttgtcagaagaaatcaaatgttgtggtcctgtttatctacggtggatgtacccggttgagcgatacatganaatattaaaagggtatacaaagaatctatatcgtccagaagcatctattgttgagaggtacattgcagaacaagccatctgaattttttcagaatacttagagaaggctaaacctgttgggcttcctgagtctcggcatgatgacagagtc

SEQ ID NO: 56885 - DNA, 480 bp, Glycine max
  unsure (1)..(480): unsure at all n locations
gctgtcacatctntctctctgtcgctcacttgaagctatatttaagcatatacctagtttatctcctaactaataaacttaattgaacatcacggtcttttgttctgaaagtctccccacctatccctctaacaaaggtacctctcaaagtcaatgtgtgaagtctgggagtctaccataatcatgtccaccttgatatgtgcaagccaacttctaaatttaataagtacaatgtataatataattttntgacctaattatattaaaatgaattatgaaaagtgtgtttacgcaacttagacttnttacaaatatacatcctaaaatttaatttgttcaaatgaccnctaaaattatctatttggcaaatagatatcatcacacttaatttgttcaaccaatacctttatttgcatataactttatgcanataatatatattaataatattatattgacagttgagtcttatataaatat

SEQ ID NO: 56886 - DNA, 415 bp, Glycine max
  unsure (1)..(415): unsure at all n locations
tctatatacattcatgtatattatattgcttcatcaagaaattggtagttaagagatttctatccaaagtcgggtccctttatataattcctaatatcatatcttttcgttcaattattaaggtcatgctttnttatttcattattgaattaaattaatttgtcatactcataattgtcacagtcactcctcattcatccgcaaaanaagggtaaagaaaagaaaagctntgtttgtaacataattgcatgcatggatgctgatgaaaatgggatttctacatgtttacttttgtttcatctttttttactttggttaatntcatgagtatgagccacgatgaaaagagaataacangaataaaatatggttcaggcaatatactttatggacagaaaacggcatatagttcact

SEQ ID NO: 56887 - DNA, 338 bp, Glycine max
agcttgtctcaacgtttatgcgagacacagaccaacatgttattcttcatcagcacgtaccaagaagaattagatctatccatggcccatgagcacaaagtggcggatgagtatgcccgagtgtatgcggaaaaggaggcttaatgaagggtgatcgactcgttacatcaagacgcaacaatgtggatggaccgatttgctcttactttgaacgggaagtaagaacttccccgattgctggccaaggccaaagcaatggcgaacacctatctcgctctcgaagagatccactgacttctcagctattgtcagcatatgatacacttaatggcctatat

SEQ ID NO: 56888 - DNA, 473 bp, Glycine max
  unsure (1)..(473): unsure at all n locations
tataaactacttgttctcgaggaaatctttttattacctccattctttaaggaaggggtaccactactggaaaacccgcatgcaaatctttatagaggcaatagaattaaatatttgggaagccatagaacaaggaccttatgttccctctataatagccggaagtgcaacaatagaacaacctatagcagattggactgacgaagaaagaagattagtacaatattatttaaaagccaaaaatattattacatctgccctaggaatagatgaatactttagggtttcaaattgtaaaagtgctaacgatatgtgggatacactacaagtaacacatgaaggcacaacagatgttaaaagatataggataaacactttaactcgtgaatatgaaccttttaggatgaatgtaaatganagtatacaagacatngcaaagaaggtcacacacatatgtaatcatcttgcatctc

SEQ ID NO: 56889 - DNA, 467 bp, Glycine max
  unsure (1)..(467): unsure at all n locations
agcttcttgaacgtgatcagtatattcattggcacatatataattgttgaagacgtggttcgcgatatcntttggtgtcaccctgattcagtgaagttagtcaatgcatgtaatttggtatttttgatagacaacacctacaaaacaaactggtacagactcccactactcgattttgttggggtgacaccgactgggatgacattctctgccggttttgcatatgtggagggtgaacgcgttaataatttggtatgggctttacaacgcttctgaggcctatttttaaagtgtgatgccctccctggaggtattgtcactgacagagaccatacattgatgaatgcaatgaatgatgtattccctgaatgcacaaatctgttgtgcacctttcacatanacaagaatgtgaatgtcaaatgtaatcactaattgngcacaaaatgcttggattatgcattgattgt

SEQ ID NO: 56890 - DNA, 482 bp, Glycine max
  unsure (1)..(482): unsure at all n locations
tcagagcacaagagcttcaagtaggtgctccttataccttcattaacgaaggataaagaacgcattcgacaagaaggtatgcccgcgcaagttcaacgagggggacctcgtgttgaagaagatgtcccacactgttaaagataaccgaggaaagtgggccccgaattatgaaggacctttcatggtgaaaagagccttttctggnggggctctgatactcacccacatggatggcgaagagttgccctccgcagggaattccgatgtggttaaacgatattacgcttgaagtctggggcaatcgagaagaccgttgcatgttttttatttctgattttttctcgttccttttggtttcctctagggattcccattcactgtatttgtctcgtttctttgaaaagaaaagatgggcggagctttagtcctccctttggtgttcannacttgtgtttagaattgtatacttgaccctttcctcg

SEQ ID NO: 56891 - DNA, 187 bp, Glycine max
gctttcccaacatgcaaagtagacaacctttgaacaaccaaactatccagccagaaacagagcaagcgaaactctgcatacaccaccaaacacagctttctacttaagacccagtacaatcccttgtccaattcgtaaccgtggatcactccaaagttactggagtctctatcataagccacatttg

SEQ ID NO: 56892 - DNA, 244 bp, Glycine max
agcctgatactccagacccgaattgaaatgacctctgggaaaacaacgacaatactttttctcgatgttgctgaactcgatatatcaacctcgaattgagtgaactctgatccatcaacacatactttactcgagcgatgacctcgcactatcaaacttaaagatgtgagcttagcattcacacatactcactcgagctgtcatctgctttgtacgccaatgatgtgtcttgacaatcaacaca

SEQ ID NO: 56893 - DNA, 193 bp, Glycine max
gagcgtctcgaatataaggatttttcttttgcgagaaaaaaaaatgggcggtaggataggctcagaaattccacactccccttctagccgttcaatatattacaggacttattcacactttcaaggaaaaagttattgtcgtttgaattagcttagagcttctacactcaacttcgagcgcctcgctatatca

SEQ ID NO: 56894 - DNA, 347 bp, Glycine max
  unsure (1)..(347): unsure at all n locations
acgaatgaagaacgctgaagatcggttcatacctttgcgagattcctcacggagaacgttacggaaacgtctcggaagcgcctctgcgtagattttctctacggaaacaatatttccgagcaaattccaaagagagagaagtgcctaaagggctgggatccatttcttcttcattttctcccctatttatagcanaatatgggagatgcttgccgcccagctcgcccaggcgagcttagctcgcccaggcgagcatggttgctttctacagaagcaactcgcttcttgaagaatcttctggacggtctacatgggcctggttgctatttgcacccccattttatcaa

SEQ ID NO: 56895 - DNA, 409 bp, Glycine max
  unsure (1)..(409): unsure at all n locations
ngctttacattctctccctctccctccactcatcttctcttatcttctatctcttatatctatgnatgcttctcaaacactcatctctctgactnttccaacatttcctttcaatagacttacaaaattatcataacatgtatgagaaccaaattatattggaggtggatcattgcattcttgacattagcaatctactcaaatatagctnttgtcctgtatctgtctaatgagtttataaaaaatcttacagcgactttctaactctctcctactcatcatgaaatttaaaatggaaaagaggatcttagtttcaccggtggtacctaagatctatattatcatcatttgacaaactccaaaatgaatgaaaaattatatgtctacttgaagatgagatcaaacctta

SEQ ID NO: 56896 - DNA, 329 bp, Glycine max
tggtgggaatcttggaacccataccattcttgggaagggttcaagatcgccatcttcccaaaggtttcatgcgactaacctagggaatccttttcaagcattgctggtgctggaacaggaataaacagtgcacgaattctaaggccaattcaagaagcacatcggaatggtgaaggcgttggaagaaccgcttctggtggaggtgtttctcaatgggctgaaagaagagatcaccactgaggtaaggctccatgaaccaaataacttgatggaatctatggtcaatgctcgtatggtggaagataggaatcacgtcttaagaacagtac

SEQ ID NO: 56897 - DNA, 499 bp, Glycine max
actagaatagaagtgcagtggtgtggcctatctttcttattgacatggatcgcagagcggtacgagtcgtattggctgaatggcccaaggagtcaccataaatgcccaccaacaagacaagcgggtgtggctgaatgatccaagtgggatatatactgtccgtagtgcatacaacctgctggacaatggctcaagagatgagattctagatgggacattcaaagacatatggatagttaacgcttctgagcacagcctgctctttcttgcgtggagactgataacggacagattgcccactaagtccaactcgtgcatgagcaggagaaatgttgaaataaatgacaaaatgtgtccattctgcagggataaggaaaatgaggcagctcatttatttttcagctgtcctaaaattcaaccaatgtggcgggaatcattgtcctggattacatgtgctgccctttccgataacccaaacagcacctcttcagcatcattt

SEQ ID NO: 56898 - DNA, 433 bp, Glycine max
  unsure (1)..(433): unsure at all n locations
agctatcagcaaattcaaacgacaataactntcttacttatatgtgtgattgagacccgcaatatatcgagacgatcgaaattgaattatgaagctctgagctaattcaaacgacaataacttnttgctcggatgtctgattgagtccacgaatctatcgagacgctcgagattgatatctgaacctctcagctaattcaaacgacaataacatttctactctgatgtctcgaggagtcccgtaatatattgagacgctcgaaattgaatgccgaagctctgaggattttcaaacgacaataactttctactcggatgtctgatagagtccgtatatatcaagacgctctaaattgaatgttgagctctgacaaattcaacgacataattttactcgatgctgatgagtctgtataaccagactctcaattaa

SEQ ID NO: 56899 - DNA, 511 bp, Glycine max
  unsure (1)..(511): unsure at all n locations
acttcgatactcagcttcacattcaatctcgagggtctcgatatattacgggactcaatcggtcatccgatanaanaggtattgccgcttgaatttgctccgaccatcaacattcaattccgagcgtctcgatatattacgggactcaatcagacatcctagataaaagttatgtcgctcgcaattgctcagaacttccacattcaatttcgagggcctcgacatattacgggactcaatcagacattcgagtagaacgttatnttccctcggatatgctcacagctttagcattcaattttgagcgtctcgatatattacgggactcaaacagacatccgagtaacaagatattgtcatttgaatttgctcagagcttcaccaatcacatttgacggtctcgatagattacggtgactcatccagacatccgagaaaatgttattgtcgtttgatttgctcaagcatcagcatccatttcaacgtgtgatatatacgggaccagtcaaca

SEQ ID NO: 56900 - DNA, 429 bp, Glycine max
agcttccattggttcaatttgagcgtatcgatatattatgcgcctgaatcggacctccatgctaaaagttatgaccatttgaatttcccgagagcttccgttgtcaatatcgagcgtgtctatatattatgcacctgaatctgacgttcgacttaaaagttatgaccatttgaatctcacgagagcttccgttgttcaatttcaagcgtcttgatatattatgcgcctgattctgacctcccagtgaaaagttatgaccatttgaattctcgagagcttccgttggtcacattcgagagtcttgatatattatgcgcttgaatcggacatccgagctaaaagttatgaccatttgaatttcacgggagcttccgttgttcacattcaagcggctcgatatattatgcgcctgcatcggacgctcgagtg

SEQ ID NO: 56901 - DNA, 144 bp, Glycine max
  unsure (1)..(144): unsure at all n locations
gctcatatagcgacctttatcataagacacgtttgnttattcataacantagagntcatctcttttatcttagggagagagattctcctacattctcgagtgatacaagaacaccttggcttgatcaacggactttcacaacct

SEQ ID NO: 56902 - DNA, 237 bp, Glycine max
atagacctcccaccttcctggtatctgacgatcacttgacactacccgaaaaacaatcgccttcgtgaataagattcaagccgaggcgcttccgtaacgcgtgtgaaacgtttccgtgggtgattccgagaagactatccgccatctatcgttcgatctttatcgtacttcatcagcctgcggtcttcaaccgataaggtgccgatatccgaactctttacttcattctatgtaccc

SEQ ID NO: 56903 - DNA, 430 bp, Glycine max
  unsure (1)..(430): unsure at all n locations
ttcctctanatccccatgcaagaatggcagtttaacatctaactgctccaagtgaagattctctgcagctactatgctcaaaataactctgatggtagtcatctttacaactggagagaagatctctgtgaaatcaattccttgtttctgctgaaaccctttcaccacaagtctcgccttgtatcttcttctaccgtcagaatgcttctttaccctatagacccacctattctgtaatgccttctttccttctggcaatttagttaaagaccacgtcttattcttttgaagggatgtcatctcatctttcatcgctagctcccactcaatagtgtcattcccctgtgtagcctcattgaaacattctggctcaccagcatcagntaacaacaaataatgcaatgaaggggaatacctatctggtggtact

SEQ ID NO: 56904 - DNA, 102 bp, Glycine max
ctgagctgcacttagaaacgatgctttttttggacccacggctgatcaaacgtcccgagcaggtcgagttggctcactgtgaacacaaagaccttggcttca

SEQ ID NO: 56905 - DNA, 134 bp, Glycine max
aggagataattgcttctgcatttctgctgaggctgagtgaggacagagataagctgtttggctttaaatacacaaggttatcccctttatttttccattattttattcaagctcttgcacatgtgcctatttga

SEQ ID NO: 56906 - DNA, 444 bp, Glycine max
  unsure (1)..(444): unsure at all n locations
gctgcatggtatgttataagtctgtatggtggtcagtagaggagcacataccacagacccttgcgacaggtacaaatttctggttcaaggccaactgggttaccaagttaaccattgcatctagtttgccttcaagcttcttagtttcagatgatgcagctgaatttgtagctacctcatgcactcctctaatgactatagcatcatttctagcgctaaactgctgtgagttggaagacatctnctcaattaaatttctggctttagcangagtcatgtctccaagggctccaccattgacaacatctatcatacttctctccatattactgagtccttcataaaaatattggagaagcagctgctcagaaatctgatggtgatggcaactggcacatagtcntataaatctctcccagtattcatacgaagctctctcactga

SEQ ID NO: 56907 - DNA, 454 bp, Glycine max
  unsure (1)..(454): unsure at all n locations
tttgatcgatatgcagtttgttgtatgatctgacaatcttgtgtntgttgaatgaatagaatggatcgatcgcatgaattgagtgaattgcgatgattagatcatatgctttgaataagtatgcagtaattataagagaaagaacatgaattatgggcatgactaaaaatgttggtaggcttgacacataaattgtgaaggtaatcattanccacaactcggtgagttgtgtgatctttatttgtgagagaacgactaccatagagctctgatttttgcatgactctctaattattgaatgaatgcatgagtttgaacatgatgaacgccattattgactgagatagctacttagtcataaaagctaccttgtatatgaatgaatgattcctcgccccatgtngagctgataatngagtgattgacttcgaccctgaacttgcaaattgtatct

SEQ ID NO: 56908 - DNA, 239 bp, Glycine max
  unsure (1)..(239): unsure at all n locations
actaagcttcttaaaacacttatagcttgatggccggcctatacctaagatatctatatttatatgtagatgtacctcgttctcagtatgataattattcggggaccgctctataatataaatattttggatacgcaacaaccttttactcagaatgctactcttgctcgaaatgcacgaaatgatcaagaagctcngtgtgagtcatgagccctgaaatgttcctctatttcaggatc

SEQ ID NO: 56909 - DNA, 465 bp, Glycine max
  unsure (1)..(465): unsure at all n locations
gctgacaaaccaggcaacactcctggccatgtttacaaccaaggtcatctgggacgctttgactaattctctcctagaatncaggtatagaaggtctaccattgacgatctgctctgttcttgactgaagatcgtcaagggtaagctccagcttgcctgngcgagacttccctgcatcaaatggatnttctataaatatccatgccagggaagggttangggctggcaattgaacgaacaaaaggaanaacgtctggagaaagagaagaagataanaaaaagcatagccgaggcaccgccgaactgaaccctagatcatttcctcatcctgtctcttgctagccttgcaccctgtgcaacagtcanngtagttttcttaagattatgaggtattctatgtacccttatnggtcctctatgatattatgtgtgcatttatcttctcagcttatcattggtaattca

SEQ ID NO: 56910 - DNA, 473 bp, Glycine max
  unsure (1)..(473): unsure at all n locations
gcgttatgcgagacagagaccaacatgctagctatcatcgtctagtaccaagaagagttaggtctagccgcggcccacgagcatatgattgcngacgaatatgcccaagtatacgcggaataagatgctagaggaagggtgatcgactctttacaccaagaggcaaccatgtggatggatcggnttgctcttaccttgaacgggagtcaagaacttccccgattgttagccaaggccaatgcgattgcagacacctactccgcccccgaagagatcatgggcttctcgctattgcagcatatgatagacttaatggccccataattagaaatcgtaggaaacttgtatggctctcgaccttgatagatcgacttcctttttttgaaaaaaatgagtggcccatgttttactcaaaagcttggcaatanatcactctactttatcttacatgcatgatgtggctcgtcttgcac

SEQ ID NO: 56911 - DNA, 235 bp, Glycine max
ttataccgaccgccgcatgcaagcttctcaagaatatcacactacgtggaatgggctctctttatatagctattgtatattttctaaggcgcgcgcagcaacctatccatcacatagcaactttccctccttgggtgacgcccagtggtctggccaccataaaagagctgcttccaccttctggagatgctggtagtttctcaaccacgatctgtgatgcaagctccataggagc

SEQ ID NO: 56912 - DNA, 155 bp, Glycine max
caaacactcatatcatgctatacaatccactacatatcattctcaatgcatatattgttcatacactctattggttcatactaacacctcaaagtgctgacatttataacattgacacttaagactcgtgagcccttaaatatgaaatattatga

SEQ ID NO: 56913 - DNA, 461 bp, Glycine max
  unsure (1)..(461): unsure at all n locations
acaagaaatataacaatcattacaaacaagggccatacaacacttctcatggcacgagtgtcaacatgcactctataaaataatcatattgtggtcgtgctattttatgacacatacgtatttgcacacataaaaattttgtgtgaagcattttacaacacctatccatgtacatatttttttgacaaaccttttcatgctacatcctatatatatacacacatttnttggaaggcttcttttgttacctactcacacatacacatattttgaanaacacntttacgctacccatccaacactatgtaaggcacttcatgctatatatactcatattatgcaaggcattctcatgctatatatattcatactttgcagggcatttattcaacttctgcanggcatttattcacattntgcanggcatttcatgctatatatattcacatatatacataccg

SEQ ID NO: 56914 - DNA, 483 bp, Glycine max
  unsure (1)..(483): unsure at all n locations
ttcataagtganatcaggtgcagccatctacctaagagttctttcacgatgtggatgttgagccatgttctcagtatgaaaattagtagttgaatgctcaaaatcagaatattcagaatcaccaacaacagaatactcagaatgctcacaatgcacgaaatgcacagaatgatcaggatgcacactatgcctaactaatttatgaaaggttttatctatttcaggatcaaaggtttgaaaatcacctggattggccctagtcatgcactatatgcagcaaataatgtgttctcaaacaagcaccagggcaaggttaaaactacaactatagtcaaatgatatccaaatgagctgaaattntgtgagcaacaccctanaatcatgaanagatagcacaaaanatttcaaacaanaattcaatgtctaactatggaaactacttaagcanagtttagaataataggacaataatactttgaaaat

SEQ ID NO: 56915 - DNA, 394 bp, Glycine max
  unsure (1)..(394): unsure at all n locations
tccagtacttgaagtgtttcatataaaagtcacatgtttagatgaaaaataacacatgttgaagggctattaaatggactaacacgaattatatctaacaaaaataagtgcaaaactagatataataagaattagctcaaaagtgatttgtaaaaacttctcatcactatgaaatagatatgatgtanaggagctgctcactccacataccttgcccannaagcatattccttgggaatccattctatccttatttggtagatcaagatttgtggcatggcggacttcatcctgcagatgatgtggcaggagataaaaaatacattanatatctctttataaatagtgttaaaaaaaatcttcattaagaaaagtgtaacatgttagcattcat

SEQ ID NO: 56916 - DNA, 451 bp, Glycine max
  unsure (1)..(451): unsure at all n locations
gatcaacattttgatcccaatgttgcatcccaacaactcgaaacattatcaaagctctaaccagtagtttttggatgctagtatctatcattgccaaaataatgtagtaatcaacatgtatatgataataatatacaatatctactttaagctagcacacttgccgtaactaacacaagtgactttgaggtgagtaagcttgactagaactagaagtnttgaatttttttttatatctaaacaacatgtatcatttattggatataattatgttcagttcaaatgggataagatcaccagtgacaaaactctcgttatgcagttacatactaaaattcggaaatcaaattatttggtttaaagttgaaacattttcaagctatttatacactcagnggtataangtatggatntatgtcataataaatgaaaaaattagaaaaagttgata

SEQ ID NO: 56917 - DNA, 350 bp, Glycine max
atctgcgcccgccaccacactctgcggagtatgcttctctgacgaccaccacacatacctgtagactttggtgcaacaatgtcgtgcaattgaacagtctgaagcttatgctgcgaacatgttcaacaggacctctcgtcctcagaacgtaatcaggcacaacatgagtaatctatgagcttctggcagagagtaagtactaactcctggggtgacggaatattcccaaccttagatgggcgaatcctgctcaacaggagcagcaacgattactaccttattctctagatgttgatggcgcaaggagacattacgttcctgcactaattcatccacaacgacagcaacag

SEQ ID NO: 56918 - DNA, 325 bp, Glycine max
  unsure (1)..(325): unsure at all n locations
tatgctgtacctacatataagaaatacgtccactctcacaatttacaaaatcatattcatatatcattggggcatttcaccgagcactaggtgggcgcatgtttggacataaattgcaagaggatggcgacaatgtggcatgccccattgcttcagaaaacaacacaagcctaaggccttctcaaacaaatactcatcttaacaaatcaagcatcagagcaaccccaaactgcctcacaaatataagcacgttctcacaatcttagagcatcaaaagatgaagaacacacatcaatgggaagctaaaaactcaatgatngcatac

SEQ ID NO: 56919 - DNA, 482 bp, Glycine max
  unsure (1)..(482): unsure at all n locations
ccccgaatcaagatcaagattcaagaatcaagagaagacttaatcattataagtataaaaagggggnncanaaactgagtagcacatggatntttctcanaacatgtttaccaaagagnttttactctctggtaatcgattaccagtagcaaaatgaatntgaaaaagttttcaaatgaatttacaacgttccaattgatattaaaatagctgtaatcgattacaatgtgttggtaatcgattaccagtgcctttgaatgttgaaattcaaattcaaatgtgaagagtcacattctttcacataaaagctttgtgtaatcgattacactaatttggtaatcgattaccagtgattgtttctgaataaatcaaaagatgtaactctctcaatggtttgtgactttttcaaattggttttaagttttctaaaagtcataactcttctaaatggtcctcttgaccagacatgaagagtctataaa

SEQ ID NO: 56920 - DNA, 455 bp, Glycine max
  unsure (1)..(455): unsure at all n locations
gcttatatacnctctatcatagatgataccctatctgatttcattgagggaagacatctattacatatcggtctcattgctaatgacgtgatttgaaaggccaaaaggaacaacaaatcgtgccttgtattcacagtatattacaagaaggcatatgattctgnttcttggaatttttattatacatgctggaaagaacaagcttcagctctaaatgggtcaaatggattgaggagtgtttaaatcatcattcgtctcagttttagtgaatgggagtctctcggcttgatttctccccccaaagagtcttangcaaggggacccattagctctcttcctgtttaatgtggtggcttgacgtctgaatgggttgatatgagagctacgaaacaacctgtatatggtttccagttgcatcataatgtgaatttatcatctacagtacccgacacaca

SEQ ID NO: 56921 - DNA, 356 bp, Glycine max
cataaattgccgacgtatcattcactcctatgctggtcaaagaaagtgaaactgttacgtgttgactttccttatgcatgtcttttaattaatttgcctttttctaaaacaggattattgaagaaagagaatattattactatcagacaaaaatattaatcaatctcctaaagacattagttagaaaattaaatggaaaaatatttttcattagaattatataaaatgatgtaacttatgatctttatattaaatgttttataaattctaattgataagttaaggttagtggttaacagcgggagatgttttggcgaataaagcaattaattccatatttgaatattgaagtatgc

SEQ ID NO: 56922 - DNA, 452 bp, Glycine max
  unsure (1)..(452): unsure at all n locations
gctngaatgttntagaatcctaagatatgtattcgattctgagcgattaacaaaaccatcacagactaatgaagggtgcagctcttcgatatgccaaaatatgatgcagtgaagacgttacatatttataaaagagctggccaacaggcgtactatgctttccttcagacccattatctttgttgtccaatttgaattgtctcttgtgctcaaataagctttcctaaaaggtcatacttgttgacttgatgatcattattactgtgtaggatgaaaatcttgctgacctctatgaatactacaagagattggaccttgccaggaattttcaatatccaaccttgagacaggttctttcttgctcattaatcataaatattttatagaaattcacacttgcatatagtttatccctaaactctatatgnattattcttatacttgttctttat

SEQ ID NO: 56923 - DNA, 486 bp, Glycine max
tatttaattgggtttaactagagcgttatcaagtctccatcgttatagtggctcctctatctctagaaggggtctttctctattgagaacattaaattagtaaaacaatatttcttgttacgtgatcaatgtaaaaatacttcaaacttcaatactatatagttagcttatgggtgaaaagtttaagtagtttgtattaatagtcttctttttactttccttgcagtctactattgccttcaacgagaagcactcctcacacgtgccaatgtggaaaggggtcaaggtttcttacacgatcattgcagcatgctgtatttccatggccattggaggctattgggcctatggccaattggtatgcatcttatgacaataaactaaaaattatataatgaacctaacattaggaccttatataactaatggaataccatatagtataatagtatattctaatttataatatgtaacttcaaatttaca

SEQ ID NO: 56924 - DNA, 245 bp, Glycine max
gctcagagcttcaacattcaatttcgagcgtctcgatatatgacgggactcaatcagacatccgactaaaacagtgttgttcgttgaattcgctcatacgttcaacattcaatttcgagcgtcccgatttatgaccggactcaatcagacatcccaatcaaaagttattgtcgcttgaatatgccctcagcatcacctttcaatatcgagcctctcgatatgtacgggactgattacacatccga

SEQ ID NO: 56925 - DNA, 309 bp, Glycine max
  unsure (1)..(309): unsure at all n locations
ttcattcccgtatatatcgagacgctcgatatggtattccaaagctctgagccatattctaaacgactcatcacgtatttacatcagatggtctcgattgagntacctgttcatattgtcggagaacgcctcaaatatttgaatatcagatgcctctgagtcacattctaacaacaataacttgtcacttatatgtctgattgagatccgtaatatatcgagctgctcgaaaatgaacaccgacgctcttaagctattcaaacaacaataacgtttcactcgaatgtctaatgagtcttgaatatatcg

SEQ ID NO: 56926 - DNA, 414 bp, Glycine max
  unsure (1)..(414): unsure at all n locations
ctgcttagagcttttgtttcaatttcgagcttctcgatagattacgagactcgatcggacatccgagtaaaaagttattggcggtagaaatttctcagagctttcgttatcaattacgagttactcgatatattatgggattcattctgacatccgagaaaaacttattgtcgtttgatcttgctaaaaaatccggtatcaattacgaggatctcaatatatcacgggattcattcggacatctgagtaaaaatgtattggcatttgcatttgctaagagcttctattcttgaatttgagcgtcttcatatatcgcgggacacaggtagacattcgatgaaaaagatattggcgttagatnttgctcatagcttctcgtatgtaattcaagcgtctcgatatactaccagacac

SEQ ID NO: 56927 - DNA, 406 bp, Glycine max
  unsure (1)..(406): unsure at all n locations
acgcatcaacaagaatcaagccaatgctattgtgcaagcaatcaatggggcaaaacacaccaaatgattataatgatggatggctcaaattctcacaaaggtaaaatcatcactttcaaattgagctttcaaaactatcatgacatgtagagaagaatcaaggatttcaagtcacaaaatgtcaagaacttttattttcaaaacaattacccatttcttgaacatatcctataattcaaagaaaaacatgcaaagtcgtacgtgcacatgaaattgacccaaaatattaaacttgaaatccgacgaaactaacaacattaacatattaacacaacttacaaattaacanaacccacaaaacttagcaaaccaaagaacactttcccccatacttaaacaacacatt

SEQ ID NO: 56928 - DNA, 513 bp, Glycine max
  unsure (1)..(513): unsure at all n locations
cacttcatactccgctggctaacccatggaaactcctaatatctnctggcacttttggagtgggtggtagatttcttctgcggtcactctttggtccactttntcttcgtacaaatatattcaagggaaatccggttttccgganagcacaccggatcgtcaagtatttaaaaattaaaatggatgaatccgagtatcgaacacagggaactaatggtagcctgagttaagttcagaaatgaagcattattgagagaacatgtatgattgataatttcaaacagaaattaaactaaacctttatgctaaaaactataaaaatgccaggtaagtaaaagtgatagcaattggtagaaatgttgggtctttctaacaaacaagctgatgcatataaatatatttctctaatcaatcatgctcttgagttctatgttgtagcctaaattactgaacctcgatcgctcgtcagaccgaatcaatccaagcttcatcctcagatcccttttgtggact

SEQ ID NO: 56929 - DNA, 369 bp, Glycine max
tcgagcaacgacagacaatactcatgctagactcggccaggtaatagaatatcacttgtgcgaacagaatataatgacctcaagtcctaacacaagatttccaacagactagacctccgataggacaataatcgatacagatacatgcttcacagatattcgaatattagtctttatgcacggctaaatagtggatgcattatgcattatatattccccctcacacagtctgcctagatgaaattagaatcatattcatttcttattagataatactcccagatattataacaatgcttctattgtgtggagcaagaatcatattctaacctgctaagtgcccaccagacgcaaccagaacaatcctca

SEQ ID NO: 56930 - DNA, 502 bp, Glycine max
  unsure (1)..(502): unsure at all n locations
ccttgatactaagctacgggttctcagaatgcttttggtctctcgcttttgattctttactctngncgntacatanacatccattaatgttcttctatctttgatgttgcatttataggtagagagacacttgcaattgtggagagtatcttcggaattgaatgttatgaccgtcgtgcatattgatcttngttcatgaattaagcggatactatgccgttttgtctaataggaccatgagtttccatatatgtcattcataattcaatatgatccggtaacatataaaaggatataaaagatagctccacaaatatgttcccttttaaatagaatcctataaactggaataaatagatatttcaaataaagtgtttattccactatttgttaggatggactggatgagtacttcatgcttccagtagactagttatccaataatggatatgtccctcccgatgctgcttctagtcattaaactcgttgacttacatgcaac

SEQ ID NO: 56931 - DNA, 431 bp, Glycine max
  unsure (1)..(431): unsure at all n locations
gtagatatatatggattttctctcttctgcggcatgattatctttccttattattgtcttagttgttatattaatgttgtggctcctcatttttatatctacatggcttatggtgtttttccctactactcttttcttttaacaaattgtgccagaaggttctttggtgaattcatgctcgtcttatggcataaacctttatgcataacatctaacttcatattttatggggatactntaaaattgtcaagttatttctcgatttgtatgccatttttatccaacctgcatatagtcacataattctataattgaattgaattagctgggtaagtagtacaaatacttttggaattgaatctttcggataataaatcaatgcgtatcattgtcttggtacgtntaccttggttatttggagaattctactt

SEQ ID NO: 56932 - DNA, 487 bp, Glycine max
  unsure (1)..(487): unsure at all n locations
catgttgtgttagagtaaatttttttcatgttatgtttcaaactacaaaagagaaacacacgccattaaaaaaatacgaaaaaatcaaaatcaaaatttacctcccgccattgcatgaaattaagagctgtcttgttttggttcttctaagctctcactttctctgtaaatggtgtatcaaacaaaattagaagaagtgagctcacggactaaatacatgtactatatatattatatattctacaatcaagatagcatttagtagccattatcactcattagtggtcattaccacccataagtggtcattcaatatttgacttcttaattccaaaattgatgaagcattntatnttctcaaacatataaaccaaattattacattcttccactaggtccaaacattttgactcaatgattaaaataagtaaatactcaatcttcttaagagatgaatatacgactcatagtgatagttcctcttata

SEQ ID NO: 56933 - DNA, 381 bp, Glycine max
aaaaaaaagcaacacccaaaatgtgtctgcccggacaacacgagcacactgaccatgccgaaagaatctttcaaaccaaaaaacaccagggaagagcaccgggccaaaccaacaccggaacaacacagccgacgccaaaacacaaacaccggagtccggtaaaactatccgccatgctggggggatggggaaacccaggaccacccgaccattagcaggacgcatcgccgtgcacaaagggacccgatcccaacacagctcaggactccaacctgccaacacataaactgcaaaccctgacacataactaatagtcaggggcggggaccaccatttgaaatcgccacgcacgacatgcagataaccataaccgaaaggcca

SEQ ID NO: 56934 - DNA, 140 bp, Glycine max
actaagcttggcaattgtacacctaactttaacacggtgtcgattgttttctttttatacggcgctcacataggttgggcacattcatatattcaccgacctatctcatactggatgtacataagcaccgtaaagtgtag

SEQ ID NO: 56935 - DNA, 414 bp, Glycine max
  unsure (1)..(414): unsure at all n locations
cagcttaagtagggatcaaactcgctctgtggtactggctctgcgaacatatcaacgagattgtgcagaatgctgatcttatgaactatgagtcttctttctgaccgaatgatgagatatctaacatctatatgcttggtcctatcatgatgaacctgatccttggccaagcatatatcactaatgttatcacagtagatgttagcatattcttgattaattccgagatcatgtatcagacctactagcccaattccttcctttgcagccttagtaagagccatatattcagcctcagtagttgagagggcaacagaaggttgaagtgttgcctttcaactcaacaagcagccaccaagggtgtaatcatacactattanggaccctctcttgacaagatcaacagcagaatct

SEQ ID NO: 56936 - DNA, 395 bp, Glycine max
ttgtcatcatgagacatcaggggacagacatcttatagatgtgggtaagataaatttacctcgatgataaagaacaatccactaatcatacatcttaggaaaacaagacatgttaagtcctaacattctcatcccattgaattctctattgattattttgcttcctattattctcttttgtctacagatatctactagtaaatgcttgtgccctctatctatcctttacctctctgtatctcttctcttataaattgaaaattatacaatacaagtacagaacaaagtccctgtggaaatcgacactcggacttccgagtttttactacttgtacatttggtgcacttgccaaaccattaacattcttcaataaggatactccactttcatatgt

SEQ ID NO: 56937 - DNA, 490 bp, Glycine max
atcctctgagtcacctgaagcatgcaagcttaatacgactctatgagtggattgtctctatcattcatatcacgttgctagattcagtaaccagaagaaaataaggcgcttcgtctctattactccatctgcatcatattaaagatgagttgatctaagctcacttgtttataatatagcgcgtatgaggatggactaccatcacacatatataactatgaaatccacttctaatctgtacacatgatgccatactagctacattttgatgcttgcttgatagcaacacactttcctctttctcctaacgcgtaatcaatcatgctgttgacatatatttctgcctatctccaacaatcatacaacatagtatataccttggggtggagcactacttgattttgttgtgtcctgagtaggtcgtggtatgacaacgtctggtcatgagcgacacatacaaagattggcctcctctatgctattataaaca

SEQ ID NO: 56938 - DNA, 444 bp, Glycine max
  unsure (1)..(444): unsure at all n locations
aggcagaacacagaactcataccagtagtgtccagcacagacgattgagtcttatttaaatatccgaagctgtcttcttcagaacgctcacgaccctcaaggatgatgcccagacaagcatagacacatggcggaatggtcaactgtatattctcacgctcatcttctgaaaagggggtgcctttgttacgtaatntggccctgcataaccatttacatcctataaatacgtcgggttgttggcttcagcaacaacatgcaagctggaattaagagatgataatgatgatgcacatatgctcattatgaccataccatacacatgtatctcttttttctcactagagagagttctaagcgcgacccataatgcctaacaattagttacgtatataatgaataatcgcctgcttaagaagagcgtcttgtccatacccggtgtac

SEQ ID NO: 56939 - DNA, 378 bp, Glycine max
  unsure (1)..(378): unsure at all n locations
ctaactaactaatttccattgatatatagagtgactactcagaaggaagggataggccttgattaggtccatctaatcaatggagagcttgtatgccttggaacttcttcatcaatggagtccattgcttcttgtaggccttgattatgaatgaaaaatgatagaacctaaaatcaacacaaaaacaagattcaagagtagatctacaaattttgaaccatagaaatgcaagaacaagtgtagatctaagatntaatcggtttaatgttttttgaatctactctaaacagcaccaaaccacaagacaatggaggatatacatggagaataagatgaataacaaggaattaaagagaatcaccccgacaaaagatagag

SEQ ID NO: 56940 - DNA, 441 bp, Glycine max
  unsure (1)..(441): unsure at all n locations
actttatactaagctgcgagggttgtggngacccggcgttgagaggaacgaggataagggctacgtgggagtacgtgagctcagttggaggtgggcaacaagggatggtgggttatacgtganttgttgatgtggagaatcgtttttcaccatcgcccgaccgccacctagtaccacatgtgatgggtaccccataatccgacaagcttgaaatgaggaagtgtagaagggtgaaacttcctgcttttattcgttgaccacagagtggtacctggagatttgtcgcgggggtcaggagaccttggggacgtcaggtggggtgctattgcccaaaaccaagcttgaccaatcccgacccaacccgggcatagtcagtcagtgagaacctgtgatgtacctaagcaggcgagctcctgacagtcaacagataaaatgaactaa

SEQ ID NO: 56941 - DNA, 408 bp, Glycine max
  unsure (1)..(408): unsure at all n locations
agcttcaacattcaatttcgagcgtctcgatatatggctgtactcaatcatacatccgagtaanaagntattgtcgcttgaattggctcagaggttcaacattcaatttcgagcgtctcgttatattacgggactcaatcagacatccgagtaaaaagttattgtcgtttgaataggctcagagcttcaacattcaatatcgagggtctcgttatattacgggactcaatcagacatccgagtaaaaagttattgctcgttgaataggctcagagcttaacattcaatttcgagcggctcgatatattacgggactcaatcagacatccgagtaaaaagttattgtcggttgaattggctcagaggttcaacattcaatatcgagcgtctcgttatattaccggactc

SEQ ID NO: 56942 - DNA, 425 bp, Glycine max
  unsure (1)..(425): unsure at all n locations
ttcgagccattcanacgacaataactttttactcggatgtctgagtgtatccgtttatatcgagaccgtcgaagatgaatgttgaagctctgagccaattcaaacgacaataacgttntactcggatgtctgattgagtcccgtcatatatcgagacgctcgaaattgaatgttgaatctccgagccaattcaaacaacaataactttttactcggatgtctgattgagatcccgcatatatcgagacccttttaaatagatgttgaacctttgagccaattcaaacgacaataactttttactcggatgtctagatgagtcccgtaatataacgagacgctcgaaattgaatgttgaacctctgagccaattcagacgacaataactttntactcggatgtctgaatgagtcccgtaatatatc

SEQ ID NO: 56943 - DNA, 459 bp, Glycine max
  unsure (1)..(459): unsure at all n locations
gagaagctagatccttatctacccatacctctctattaactaaattaaccaccttgaanataattacggataanaataacacaacanatataatcaaacattcaacataattactaataatatgtagatatatataccagggtattacacttttacctcaatgggtgatatcatgttttggttcctacctccaaaacctcttgacccacttccattacctgtaagcaaaacatttgttctagagcagaattgttttcaacaaataaatcaaaatctaatttttgatcttgaaaacccatctncaacttctttctacctatatcaactatgcagcttgcagttaacatgaatgaaccttccaatattacaggaaatgtagtatcttcatagatatccattaccacaaagtctgccgagaagataaatgtttactctgacaacacatcttcaatactcata

SEQ ID NO: 56944 - DNA, 470 bp, Glycine max
  unsure (1)..(470): unsure at all n locations
ctccgctctcattcctcttctataataggggaaggangggaagaataaaatgttctacccttctggtatttgagattcacttaaaattagtgagaataattgtttccgtgaagaanattcaagccgaggcgcttccgtaacgcttccgtgacgtttccgtgggtgaatttgcaaagattttcaaccgttcttcgtcgttcgtcgttcgttcttcggtcttcaaccggtaagttcccgaaatcgaacttttcaatttcattctatggacccttagtggtccttatttgnttcgcgtgcttttattttcatttcatatactttctgtacccnctgttgacgtgctttagtcatttatttaagtcattgtctcgcctaatcacaaaataaaataaatatccaccgatcattcgtattgtaacatccttttatctctggtaaaatgaattccgacctttcggtcatgccgtaac

SEQ ID NO: 56945 - DNA, 496 bp, Glycine max
  unsure (1)..(496): unsure at all n locations
gtcacctgaggcatgcaagcttcttatncaagacactatcttggtggtgaagcttcttcttccatgacttattccctagggaatgacgtctcctctcacctcttctctattatcttccgctatgcctccatgattgaaaatcaccattgaagctcaaagatccatcctccatagaagcttctctagcaagcttccatcaagtggtatcagagcacaagagcttcaagtaggtgctccttaaaccttcattaaatgtcagctttaccttctcctncatagtggattcttcatttatctccatgtatctnctcacacgtcctttgttaaatgttgttaacatgattctttataatttccaccgattaaacttgatatagaagttagatttgattgtctattgttcaaaattcttggtctngttcttgaccatcgaatgtgtgagttacggtcctttaagtttgtcttgctattttgggctgaaactaaccataaattt

SEQ ID NO: 56946 - DNA, 397 bp, Glycine max
  unsure (1)..(397): unsure at all n locations
catacatgcatgttgtatttaacagattatgccagcaaaaacattaatcaccacgaaactaatctaagcaatgacatcaaccatcccaaacattaactgtgtcatccaccacatcatgatttaaacttgaggtactgttgtaagtcacacggaaaaatcgcattcaagtggcacaatgttgaatgcagaattttntacaagtaccatattctttagtaagagaatatctaattccaagctcacaaagcagcttcgcttcatttgttaataacatgtaatataattaaaaacgggttcaattttacttncaaatacctattatgcataacaatgggcatcatctattactgatcttanaatgatatttacacacattaatcagctatctctatttctg

SEQ ID NO: 56947 - DNA, 365 bp, Glycine max
  unsure (1)..(365): unsure at all n locations
attaaaaactgagacatacacataaaatgtactgaagataacaatatatcaatgtttcagagtgcaagaaaatatagatcctgatcttgcaatcatcctgtccagtgtcattcatgtccagtgctggtgcagatggtatattctgagaaatatgcaagctcgacactagtgcagatagctctggctgagatgatgacagttacatctttgaatatgctctggtggaggaagtggagtaacctgaggggtaactgctacagtgttctcctgtggagtagctggaccagcctcaacaataaaaggctctgatggagagggctcttagatgttagtagatacatatntctgtgcacgctgaagctcct

SEQ ID NO: 56948 - DNA, 403 bp, Glycine max
  unsure (1)..(403): unsure at all n locations
ggatctctgagcaccgcggctgcagctgttgatggatgtttgattgacttctactcatagatccattccagtgctcatggggatcctcctcatcattaccttctgaagagaaagaagtgatcatcaagtcttataagtggattgaaatagtatcaaagatatttntgaggatataacagtgacagggcgtagtctanaagaacaattcatatagaataatcttcagctaatcatgtaaagacattgtgagtgcataaatagaacaataaatggatgaccatgtcacttgcagtgtatcatcgaatactatatcgtacctatattagtctgactcacacaaacgtttaaaatactttctagtatctacaaactattttcatgctggaagaaaactttccatttg

SEQ ID NO: 56949 - DNA, 419 bp, Glycine max
  unsure (1)..(419): unsure at all n locations
ctctagaagcctattcctgatacaactagattagaatgcatcttccattcgaggagaanaaaatattcatcattgaagatgccaaattttactaaagggtcatgcctttcggcctaaaaaacatatgcgcgacataccaacgactgatggactgagtcttcaaacaaaaaatcatatgaaatgtcaaggtacatgtggacggcatagttntcaagtttcaaagcataccccaacatgtggcggacaaagaagaagtcttcggggaactaacaaaatacgaatgcgccttaaccctanaatgtgtactttcggagtaggcggcgacaagttccttgtgtttatgatcacccaccaggggattgaagctaaccccgacaaatgcactgtcatacgggtgatgcatagcccaaccaacatac

SEQ ID NO: 56950 - DNA, 481 bp, Glycine max
  unsure (1)..(481): unsure at all n locations
gcttgtgtcttgtgggataggatcaaacgttagttttatcatttcaaacataaaaacaaacacactaataatcctttagatttataatcaacttcttcaaactatgtataatgatttctgccagtttgccactgtcacaatattaaagtgtctactttgtatatctatttgacaggctcaggtttcgagataatccatcttgtccgtttgacaacttctccctgtagcaatggcaaagtaatcagtcaattactaatttgcaatctcgctgttngatgatagatgaaactcttccaagtgctgttgttctttgtgacattctntagtacttctggagcaaatgaacatcccttactctgtctcatatgtatgagctatccctttaactagttntgttgtgacagagtacacantctatgtagagaacaagaaatatcntactctgggagtaactaaatttctagtctttctttaagtcaag

SEQ ID NO: 56951 - DNA, 377 bp, Glycine max
  unsure (1)..(377): unsure at all n locations
ttatagatatatgtctcacttgactagaatagcatgtaagaaaaagacaacatactgatgtcatatgctgatgatcttaataaaatcaaagttaaacacttcatccgaattcgtatatcaattagtctttgattactatccagtatcagcataaattgtatagatacttaatctctttgaacagctggttaatatatattacaaataccagctgcactctttcagtaactaagctaaattggtattttgtctattaaaataaataggatnttttattttattntttctcatcgatcntttggactcctgnaaatcagaagagtaattttgatttctagtcatttctaatanaataattaattttatgaatgtagatt

SEQ ID NO: 56952 - DNA, 398 bp, Glycine max
agatggacaagataatcccgaggattgtgagtatcatttccatagactcctctgtccctgatgctgagagagatgttccaacatcttccaccccatatgtatctggcctgatgtcagaaaagatgttccaacatcttccggccctatgctgaagtctctcttccccagcaaagagagatcaactgaggaagatgatcaagccgcagaggagactcctacaccacgggcaccagaacctgctccaggtgacctcattgacctggaagaagtagaatcttgatgaagaacccattgcaacaggttggccctggcatgcgaaaggtacaagccgaaaggaaatccctctcatatgtttgacgaacaaactatggccaaagaagacactccatcactcctcc

SEQ ID NO: 56953 - DNA, 271 bp, Glycine max
  unsure (1)..(271): unsure at all n locations
agactcccgataagatgaattccagattcacgagaagaaatctagaagactcctcaccggaagtattgaaattttttttccnanaacaaacatagcaccattgtatgttgtctcacgaagagtgctcctcaagattttctaagctacccgagtttttactctttggtaatcgattaccacgttcctgttgtcgattaccagtgacgaagtttgattcaaaaagctttcactaaatttcaatgtgcaattgattccaaacggtgtaatcgat

SEQ ID NO: 56954 - DNA, 370 bp, Glycine max
  unsure (1)..(370): unsure at all n locations
ggcaatagcaccncaccagacgttttcaagatctcctgatctccgcgacatatcttcaggtaccactctgtggtcaacaataaaaacaggaagtttcacccttcaacacttcctcatctcaagcttgtaggattatggggtacccatcacatgtggtactatgtggcggtcatgcgatggtgcacaacaagttttcacatccacaaagcgcgcataaacccaccattcnctggtgaccaccttcaactgagctcaacgtactctcacgtagcccatatcctcgtttctctcaacaccgggtgcccatcaattctcccaagcttccacaacatccatgcgaaacaacattcttacagcacaagctatctca

SEQ ID NO: 56955 - DNA, 421 bp, Glycine max
  unsure (1)..(421): unsure at all n locations
agcttcactcacagggagggaattgattataatgatgtattctctccagcggtgaagcataggtccataaaaattcgactatcaatggttgccaagtttgatctagaattggagcaaatggatgttaaaactgccttcttgtatggagaactggaagaaaccatttacatgagacaacctaagggatttataataaaaggaaaggaagactttgtgtttaaactgaacaagtatctatatggtttatagaattctccaggcaatggaatataagaattaatgaattcataactcgcatccagttcaagaggagcaaatttgataattgtgtctatttcaggttttcctcgtatcatanttttttcattntgttgctacatgtagatgatatcctaatagcaagcaataacaaggataaaat

SEQ ID NO: 56956 - DNA, 408 bp, Glycine max
  unsure (1)..(408): unsure at all n locations
tttcagcctcgtattttggctatattactatggtatttgaacaatctattatttccttatttgcatggtttggttgaacaagtatcttatttgactatgtggattctataagctaatctatttatgattgttacttcatgggttttacttcatgttgtggttaatatcttttatgaatgctgtatgaatgtttaagatataattagcttactttaaagtttaaatacacactttggctttttgttgatgccaaagggggagagaaatacggataaatcaagaactcacatgagtaaataatttaatnttaagataagcataaattcaaaaacaaaggtggagcagttattagagtgatcgactaggaaaaagtgtgtgtgtgtctcttgattctgaagttgcatcata

SEQ ID NO: 56957 - DNA, 328 bp, Glycine max
  unsure (1)..(328): unsure at all n locations
atcactattagtcttatatgtcacccaatccacgtgctcgacaaaaaaactaactgacctgctgaactacctgtgagaaccatggccatggtcacagacaaactgtggcatggcaatggaattcctccaatgagaanacaaggaggtatcaattccaaaaaatatggccgatctggatgggatacatacaataattcataaccatcccatgaattgacatatgcagaattcccattgcagcagactgaaaagaggcaaaaaatacacaaatgaatctgaatctgacatgatatattgacacacggggagaagtaatctcttatgtact

SEQ ID NO: 56958 - DNA, 498 bp, Glycine max
gaagaggaactcaatagttgcccacatagtaatttttctagcattatccccttgatccataactatgacccatcaaaacaacatgttagcatgagatatgagagtttattaagaaattaaatattgtttctagacaaaagctatagtattgaatgataccaagaaatacaaagtctcacacattattttttataaaacaaatttaacactcaatgcgacattcaaaatcaattagttaacatgattattcacatgcacacattcacatgctatcacaaaagtacggctaaatggtacgaaatagtccatgcatgaaacagtacgaaatataagtgtcttaatctttatttgtagagatctaatgaacaagaaaattaatcaaatcatggaacattgattgatttaaacttttgtacatctcatgtgagaataacgtcgtactattaacaatttcctacacataatacaaatacatgttatgtaaaacattgtaacatc

SEQ ID NO: 56959 - DNA, 297 bp, Glycine max
  unsure (1)..(297): unsure at all n locations
gaaataccatcaattntaatgtgatattattgatcattgaanactcttatatctcttacttgatgattggtttagaatctatgaaatatgtgctctagaaaatattttggattctgcaatttttatatatgaattgtattgtgttattataacttattaaagtgataaagatgttggttccttcttacaatcaatctggtgaattntggaagattaaaaaactatgatccatatttttactaacacgtgagactatttaatacaatataaatcaattttattagtggattctttaca

SEQ ID NO: 56960 - DNA, 505 bp, Glycine max
  unsure (1)..(505): unsure at all n locations
atgctggganattctagataccatgtgcatctgtttgttatttgtaagagttctaatgattggtattaatggtgggttataatagttctcattactagtgcangcagggtatgtgggatgtgttgagagagttagcttgtgagattgataagtcatagcctatcattggtgatttcaattccattcttcatccacatgaaagggttggaggtgctgacaatccatctctttgtgatcttacaagcctttcaatagatgaatttcaaactgtgaattaatatatgatgggtttcaaaggtaaccatatacttggaaaagaggcaaccttgaacagaggttggataggctcttgattaacttgcagtggagaataaaattccaagaggctgtgatgctgcatcttcccccttttaaattggatcatagaccccttttggttagattagaggtggaaaggaatcatcactctcaaacaagaccttttaggctgcatggattactcatg

SEQ ID NO: 56961 - DNA, 339 bp, Glycine max
  unsure (1)..(339): unsure at all n locations
aacaagaatcaagccacagctattgtgcacgctatcaaggtggcaaaacacaccaaatgattatgatgatggatggctcacattctcactaatgtgaactcatcactttcaaaatgagctttcacaactatcatgacatgtagagaagaaacaaggatattttgtcacaaaatggcaagaacttttatattcaaaacaaatactccgttgttnagatatcctataattcagagaaaaacatgcaaattcctacgtgcacacaacattgacccaaaatatgtaactgaagatccgacgaaactaactacattatcaaattagcacagcttacanattaac

SEQ ID NO: 56962 - DNA, 343 bp, Glycine max
  unsure (1)..(343): unsure at all n locations
tgaaagccttatggaggtggatctttttctttattaaagtcctacaatgttgattgttagccatggagctgcancataagatgaacgataggaggtgagaggaggcgccatccactagagaataagccatggaaggagaagtatcaccaccaagagagtgccttggataagaagcttatagaggaagcttcaatggaggaagattatgatagagggagggcgnggtgatttgatgagattacggagaagacttgaactttgaaatgtgtctcaagcttctcattcatcaaagttatgacaagtgtgacacatgcttctatctatagcctatcacatgggaaac

SEQ ID NO: 56963 - DNA, 361 bp, Glycine max
ctccacatatcgcttagcggtagaggtttttttacaaggccaacttagcggaccatgtctcgctaagcggccagtgtccttatcagttatatttccagttttttgattttaataaatgtgacctgatcagttgcttggttcctttatatgcagatggcctctaagaaacgtttgagtattgattctacgcgcacatgatcaagaattataacatggagattttcactctagaggatgcctggaaccgatatatcgataatattttagaccgaaggatccttccagagaggaatgtgaaactttatcattctgaggtcgacgagtttaaagtataattggagaggcgaaaccttcacaaaca

SEQ ID NO: 56964 - DNA, 338 bp, Glycine max
  unsure (1)..(338): unsure at all n locations
agagaagttgaactttgagttgtgtctcacaagactctcattcatcaaagntacaacaagtgttacacatgcttctatttatagactaagtagcttccttgagaagctttcttgagaaaacttccttgagaagcttcttcgagaaaacttccttgagaagctagagcttagctacacacacccctctcataactaagctcacctccttgagaagcttcttgagaagattcctaaagaagctagagcttagctacatatacctctctaatagctaagctcacctgctcgagatgagaagctagaacttagctacacaccccttataatagctaagctca

SEQ ID NO: 56965 - DNA, 402 bp, Glycine max
  unsure (1)..(402): unsure at all n locations
ctggataatatgcagaaactggcgtagatattggaaattatataagtggcaggattatataaaaatgcattaaaataatatggaattcattattaatttattatgaaaagataactcatttggttaaattaagtgaatgaattattataaacttcttgatatctttgattcctaatgataaaaaatcattatttattttttcattaaaatagtaaaacgaatnttgattctcacaactttataataaatagtcaagcgtgtctggttttaagagagatttttatcatgaaatacgagtgcatataaaaaaaacgttaaatatattttgataaaataaatataaaacttcatatgtttacagaaaaatgctattaattatggatatatatcatcaacagctct

SEQ ID NO: 56966 - DNA, 249 bp, Glycine max
ggctaccaaagtacccccatacgcacattcactcccatttttttccaaaagctgtgccaagatgtcattggcccttatacaactagaactaatcctactaagccctttagttgataacccaaacatatgttgtgcagccactttacaagaggggccttatttagacagactaacctttaaattgaacaaatggagcattaattctctcattgtgcagatcaacccaacttgacttttctgaactggctg

SEQ ID NO: 56967 - DNA, 441 bp, Glycine max
  unsure (1)..(441): unsure at all n locations
agcttccttttagtgcgtcacgttaaaaccgagctctatgatggtgcgagcctttgatggtactcggcgggaagtgatggtggaaatcgacattcccattcagataggcccccacacttgcaatgtggtgtttcaagtaatggacataaatcccgcctatagctgtctcttggggagaccttggattcatgcactgngagtggtcccttcaatgcttcaccagaaattgaagttcgcagtgggtggacttttagtgatagtgtcgggtgaagaggatatgttagtgagctgcccctccccagccccatacgtagaagcggcagaagaatcattggaaacggctttctaattattcgaggtactaagctgcgcctctgtggaaccaagtcccgtgataccttctctctccaacgcggncataatggtggcgcgtgtatgctc

SEQ ID NO: 56968 - DNA, 475 bp, Glycine max
  unsure (1)..(475): unsure at all n locations
tccttaagaagattcctaaagaagctagagcttagctactcatacctctctaatagctaagctcacctccttgagatgagaagctagaacttagctacacacccgctataatagctaagctcacccgcatgacaaaaaatatgataatacaaaaaaaaaagtccttcctacaaagactactcaaaatgccccaaaatacagggctaaaaccctatactactagaatggccaaaatacaaggcccaaacgaaggaaaaaccctatctaatatttacaaagataagcgggcttatacttagcccgtgggctcgaaatctacccaatgcccttgcgggataggattgcataagataatacagccaaattcgcccgtttctcatttaatggatggttctcggngtataatcaaataaagatggcaccagaggatgtagagaagaccactttcgtcacccaatggggaacattctgctat

SEQ ID NO: 56969 - DNA, 457 bp, Glycine max
  unsure (1)..(457): unsure at all n locations
accactatcncagagtgatcatggtgggttatttccaaatcaatagttcgaagcttattgtgaaaaaaatgatatatgaccaatgtttatagttacccgctttgatatatcaccaagtatgctgtgaagaaagaggttgattataaaacctattttgaagttaacaccatataatttgtatacgagtaggaaatccaacatataccatacgaggattnttggttgcaaatattttgtattaaataatggaaaagtcaattaggcaagtttgaccctacaatggataaggctatctccttgggtcttngcataacanatcatatagttttcaatgatagaacattattaagttgaagaatctatacatatagcacttcgatatgactaaccctcatgaggtgagaaatgatatagatgatgatcttgtaagctgcttgggacacctaccaaatgaagg

SEQ ID NO: 56970 - DNA, 467 bp, Glycine max
cgctttcaaatgtgttcatctgggaactctaccccctgcatttaccgccttcaaagttgctacctcattcttggatatttcctataaattacacggctttccaggaagcctcgtctcagaccgcgaccccatctttatcggtgcgatttggagagaacttttcaagcttgctagaaccacgttacggatgagcaccgcttatcatccacaaacggatggtcaaactgatgttatgaacaaggtaatcgaacaatacctccactcttttgtcacacttgaccaaggattgcacaaatttttagtcttgatagtggtcgacaatacttctctccttctggaataggaccacattgtatgagatcacctacggcaaaccaccgccatcacttccacgttatcttatcgggtcatctaaaaatgagggtgttgactcactcatcaccataagatagacactacatgaatca

SEQ ID NO: 56971 - DNA, 246 bp, Glycine max
  unsure (1)..(246): unsure at all n locations
tgcagcttatatggagctacatatgacttgtctgttccttcacacttttttgaagagcggnttgattgcgaagatgacggatcatgtgaggagacagtacatcatttacgacatccttattggaggaagctatactctcctactttgatactgggaatcgatattcatctcctaatatgtagtgactcctgatggcctcatttgacgatgtatcataccattcgtagcctctaggatttgatgggt

SEQ ID NO: 56972 - DNA, 380 bp, Glycine max
ctctgcttatgaacagaagacctcgattatgagtttcaatatcatcatctacgaaatgtgtaactgcagtttgatgaacgcaccctaggtcgttctggagtcgtgcctatagacaaacatcttaacataatatgcatgcgctggacactgaagatatgaatagttgagataactgatcgcgctatatgtgagtcatgtacactctatggtgattcctcagacagtccaaagtatgttgtaagacgcattggagtcttcatttctttagcataacccatgttgaatctcttcaccaattttttcacatacttggttaggtgaacatacatagatgcctgtgggtgttcgctttatatgtagaccacgaaagaatccagctc

SEQ ID NO: 56973 - DNA, 402 bp, Glycine max
  unsure (1)..(402): unsure at all n locations
agcttgtctgccgctctctcttaatttattcaatgaattcagacaacaagtacacaaaaattatgagaccccatgtaaattttatgtagatggcaacaattaaactcattgtagccataggcaccaacaattgaagtcgtttgttgtaactgcaagtttccctcttcaccaaagcatacatatatatacaagatgtgatggaagcttgcttgtgaagcttctatggaggttggatctttgagcttcaatgaggtcccttcatggtaattntccaccatggagatgcagcggaagataaaggagaagaggtgagaggaggcgtcatccactatggaataagccatggaagaaggaatatggtttagcatacctagggtttagcaccctatattactaaactta

SEQ ID NO: 56974 - DNA, 505 bp, Glycine max
  unsure (1)..(505): unsure at all n locations
tgtattngtacacgtatgaaactaattaatacactaaagatgggatatatctataatcttaaagatatataataggcttaatatgtctcttgttctattaaattctattttaatatcgcgatatttaaaaaaaaaatatcttaatcttttatattttttaaatgtattattctgacaatttttttagtttttcatctaaaacgtttaactcccataatgtttttatatttaaaataataactgttaaaaatagttactatttttattttttagaaataaatcaccctaatcctcaacttcttctgccttcaaccgtcttcattctctaatagatgtggatttcattttcttagaattggataaaaaatctcttatatgtcaagttgcatgtaacaatcgtaccanaaatgcaagtaaagggaggaacaaagaaatttaatattgaaaagcaaggatctcaacagaatcctacaattacagagacgataatgacaganatggatga

SEQ ID NO: 56975 - DNA, 382 bp, Glycine max
  unsure (1)..(382): unsure at all n locations
gaaagactggaaagcggnttctaatgactcctctgcggcctccacatatagcatagaggatgggcagctcaccaagatgtcttcctcgcctgatacgatgaccagatgcctttccactatgaatttcaacttttggtggagcgtagagggaacaactctcactgagtggatccacggacgccccaacagacaactgtagggggggttaatgtccattatttggaaggtaactaggcatgtgtgacggcctatctatactgngaggtcgatctctcccctaacctctcggcgggtgccgtcgaaggcacgaaccaccattgaactctgctgtacgtgggaggcatagaatggtaatctctacaaagtgctcttaggcatcacg

SEQ ID NO: 56976 - DNA, 480 bp, Glycine max
  unsure (1)..(480): unsure at all n locations
tactccagtagtagacctctcctcaccatatcctgcttgtgacccttccactcctgnacttgacattccagaggatcagaccacaccagtcttggcactgaacacctctcctccagctactccagtacttcacttgacagatgaggaggatgctcagacttaggatacacaggatctatctcaggacttttacattcctgattattttgctctttggataataattataactatattggcttcagcacattgtnttgagtaatctttggttcccgtttataattatatacttatactttttgtgaatagttggtatgcttgttttgaagcatatggaacagtntaacttgancttgatgattatgcagtgaaacattcttacctttttgtgaaaataggtgttatgaattggatttggattgaatgcatgantatgatggagtttgtgtttcttttcataagtttgagtgagtatgtatg

SEQ ID NO: 56977 - DNA, 486 bp, Glycine max
  unsure (1)..(486): unsure at all n locations
agcttccttaagaagattcctaaagaagctagagcttatttacacatacctctctaatagctaagctcacctncttgagatgagaagctagagcttatctacacacccnctataatagctaagctcacccccatgacaaaaaacatgaaaataaaaaaaaagtccttattacaaagacaactcanaatgccccgaaatacaaggctaaaaccctatactactagaatggccaaaatacaaggcctagacgaaggaaaaacctattctaatatttacaaagataagcgggctcatacttagcccatgggctcgaaatctaccctaaggctcatgagaaccctagggcctttccttggatctctagcctaatctacttggagtcttctaaccaatgcccttgcggngtaggattgcatcattatccgtataaatattcatttgctatctgtaagacagaacgcttgatagcatgcagagactgacatc

SEQ ID NO: 56978 - DNA, 317 bp, Glycine max
  unsure (1)..(317): unsure at all n locations
ttttgcgcaatctgtgagtttccgtaacttcttcgaaagcgtaaaaagagtagataaatgatctgtgaggattcgtaaccttacggaaagaaaataggtgtcgtaacattacggaaaaagaattaccaaaaaaagtagaaggggggtgcatttattaaaaaggggggtacaaatagaatcagtcccacttgggccttccagtttcttcctacagaatgtggttgcttctggaggaagcaaccttgctcgcctgtgcgagctgggtggcaagctcctcccctattttgctatanataggggaaggagtgaagaggaaa

SEQ ID NO: 56979 - DNA, 388 bp, Glycine max
  unsure (1)..(388): unsure at all n locations
atttgtgaaaaattggatgagggaaagagtggttttcgaaatctgcactttatgcagaattttgctgttgaaatgtgcagcagaattttgcataagtgcagaaaaaatgctatgtatttgctggttgtagaaagagtagtacagaattagtgctggatggttgctagtagatcccaacggtcaaaatgtagacttatgtactagagacttccagtaaaattttcgagtcgatccaacggttaacgaattgaacgaaggatatgttactggagtctttaagtgagaaaaagttgtgattnttgcttgagttttgggcagagttttttgcctttgccctcgtntgcttggtttgttagtttgtgatgttntggatgttgaattacctgga

SEQ ID NO: 56980 - DNA, 116 bp, Glycine max
tctctcacctcattctttgactccgctgcatcacgtgggggagcccccataaaggacctatgagctcaaaaccagccccataaagctcacagcaacttcatcaacttttactcgat

SEQ ID NO: 56981 - DNA, 494 bp, Glycine max
gattaacatgcaacgaacacaacattttctcttttaagtacgtcatgacagcggtctcaaacatgtcatttccgtcgacaacatcgcacgattcataactccatcaatgtcttgcacatggagatattcacatcatatatcttcacatcaatgtcttgaaccagaactgaggacaaatctgcttctatcctgctaaacataatcactaacatctatatcaattacactatcattgtcatctgattcatcacattcatgctacctaggtatatgtcataacaagctctcacaatctagagcaagcaatcactgcgaattcatactgaaatcgacgatacttccaaatgacatcaacgggtggatcaacgatcttcatgatgctggaaactgcaatgatgatgatcttcatcaacgactatatatctaaccgtttgacttcatcctatcacttaagcctactcacttaaacatacttctcttatctcaacttatac

SEQ ID NO: 56982 - DNA, 472 bp, Glycine max
  unsure (1)..(472): unsure at all n locations
cgttcttattttttcaatcaaacaatcgtttttgatcaaataaaaaaaggactcattgacatgtttattcaccaagatttaaatagtctgctgtgcatgacaaaaagaaaagcagtgtcgagaagagatttgcacttgacaatgcaataacaggtaaacccctacctgggggaaaaatattgaccaagcaaaccttgcaatgctaggaatgggaaagaacaaagtaaattgaaatatgtatcagaagtaccgttgacagactaccacgctgagcctctggtggaatctcaaaatccagttcaggtatctgcaaaatcatgcattctaagcaggtgccttttgaatgaatttattacacattacacantaaaatttcaataatagggccgcaataatcactcaatanatagagatgactcttaaatngcttcattcataaaaaaaaaaaattgtgctatctatctatctatct

SEQ ID NO: 56983 - DNA, 296 bp, Glycine max
  unsure (1)..(296): unsure at all n locations
ttaatggggantntccaccatggagatgcagcacaagacaaagganaagaggtgagaggaggctccatccattaaggaataagccatggaagaaggagcttcaccaccaagatgagccttacataagaagcttggagaggatgcttcaatggaggaaaagaaagagggagagaaagagagaggggcgagcacganattgaatgaataaaagagggagagaagtggaactttgaatatgtccacaagactctcattatcacagttcaacaagtgaacacatgcttctatttattact

SEQ ID NO: 56984 - DNA, 492 bp, Glycine max
  unsure (1)..(492): unsure at all n locations
gcgaccttaaatactcagctnntttgagccatttctgcgaagacaaacattggaatgttgtttataggaaatgttgttaaagcaaaacgcatgcaatctttctattataacaaacttgtgcacacatttccttaaaaagaaaatttaccaacgtgcatatgcgccaagtatcctgctatttatatcaatatacaaggatattcaaaacattctagttaccacacatatatttttgaaaagaattcatatatgcatgctcaaggtattgtgcccaaattacacatgtccatattaaagtattttgctatcaaaattatctacacacatttgacgtattntattaacatacaaaacaaaatttgttgttcattcacatntattatacatatatgcatattggagagcccatctcatgtcatgcacacacttgcatntatttgaaaaggaattttcatgccatctatctacacttgagcggcaattccaaatata

SEQ ID NO: 56985 - DNA, 358 bp, Glycine max
attatcttagctcagcactttttttcatttcgtttcaaaccgagcatgaccatccccacctttcattgaattgtaatgagctattgctggatgtgttgaaaacatactcaagtcttccaccttgagaaaatgagactgtccctcctgacataggtattcaccctcctattagatacatactctacccaagctgattgtggtgttgcaattccaacccattaccaagcaggcttcatgacttgctaggtcttaatcctaccctctttgctcttggaaacaccatgttccattaccctgcacctgttgctaaccccctccatagaattcttgatagatctgttttgacccttttggattt

SEQ ID NO: 56986 - DNA, 441 bp, Glycine max
  unsure (1)..(441): unsure at all n locations
tatttctccanactngaaggcaacataatccttctttggtagatgatctttttttgaaggggaacttcattgactcttagaataccaagaaacttatcccatgcaagattctttaggtctcttacttcttgaatgggtgtggtctttggttcccacaccttgcgaaagttgtccaacaccttcaagtttattcgagtcttggaacatgtctatccaagagctctccaaacatttagaagaacttgaagtctccaaacatgtcgtccactaacttttatttttcatggcaaagctttacagtgtctggtcaagtcgtgactttccttaattgacgccattggccttatagttatgctaatgagtccggatttttacagtttttgttgcaatttttgtctattttaataaacacatgtagaggatttgctttgtgtagctcat

SEQ ID NO: 56987 - DNA, 352 bp, Glycine max
  unsure (1)..(352): unsure at all n locations
cctctaatcgagtgtgcanaacatgacttcaaaattatgtattctccctctttatgttttattattattttggagtcaacaagggtgttgcccttgctcctacatatcctcaagtgcgatggccaaaatgatgggccattgcgtttgtctccaagggagataatgagcggagtcgccaccaacatttattcaangaaaacgttggaaaaaccaaataggcgaacgtctgcggatcttgaatatgatggttcgggagttgttacacacggagaatgtattatcaccccacgcgtccgtcacaagggacgacaacctctaatcgagtgtgcaaaacatgacttagaaattatgt

SEQ ID NO: 56988 - DNA, 462 bp, Glycine max
  unsure (1)..(462): unsure at all n locations
agaacaatgacaatcgcagaatctattcatgtttcctttgatgagcctaatgctatttcttctagataggatatttgacatgatattgtggaatctctacaacaaatgcatattcatggagaagattctaaaggaaaaggagagtgaagcatgaatatccttcagtaaaagtcaaagcaagtaatgatcttcccagagagtggaaagcttcaagagatcatccccttgacacattaatagtgatatctcaaanagggtgacaactagacactctctcaaagattcatgtaataacatggcgtctgtgtctatgattgaacctacaagcttaaatgaagccataatagatgacaattggatgatagctatgcaggaagaactaaaccaacttgatagagataatgtttgggagttagttaagaaacctgaaaactacccaatcattgtgacaaaatgggtgtt

SEQ ID NO: 56989 - DNA, 149 bp, Glycine max
gcttacaaaccctaacaagtaatgggaattccagagaatgtgggacttctttacctgccactcttaccttagagtaggagcctagtgcaactagagctccaaacctgaagccacagctccacctaaatactcgagggagcataagaaat

SEQ ID NO: 56990 - DNA, 476 bp, Glycine max
  unsure (1)..(476): unsure at all n locations
agcttggtaaagacaaaacttctgaaagaaattaacctatttataacaggacatccataaaccatagntcgaaggagaattcaacaagttggagccactacagaggcatatgccagaatgttggttcacaaaacttatatgctccaacttgaaagagtgtagaaataaaatcaatgaacaatgtacaaataatggtagtaaactactcatcaattactatctagtaaaagggagatctgtattgatagtagaatataaaaaaagtattgcaatcatgtaagagcaatgtttgctcccaaccaagttataagctaagaagccgataaaagaatgtgtcctacccctcctcccacacacacattatttctttggatatcatatctaaatatttntctctctctaactaactttccttcacttacttatgtagtctcttctaaatacaattaagctatagtttaatactagggcctatg

SEQ ID NO: 56991 - DNA, 343 bp, Glycine max
  unsure (1)..(343): unsure at all n locations
catcttaaatacatgtgaactttgaacaaaataccatgtgacaacaaagttgatctatctactcaatggtagggaaagatcttatttgtattgttgaaaataacaaaaacacttagagagcatcngccaagtcttgttgtctaactaattattagataatagtattaatcattggagacaatttatcaaccgaatatcaatattaattgcatcaatgataagagatgagtaagaattatttttacaaaatgcttgctccgtatatcggtaggactgaataacgcgtgattaaataatatctaatacgatccaatcatctcaggcatattcaaatatcttcata

SEQ ID NO: 56992 - DNA, 437 bp, Glycine max
  unsure (1)..(437): unsure at all n locations
cagcttgatggttcaatgactcaagaacatttttagaagcttgtgtataagaagcagaangaatctttctctcaatgtttatctattgaaaaaagaacgaatgaatggttccaatttattttctcaatgtataagatgatctggtgagagcttctagatgacatgcttcaatgacacttgaatgattccttggctggccatatcaacgtgccactccatgcctcagacaagtggttctgcttatttgaaaattaccaaaaatggtacggataggatttgccaataatgagtattttcactctttaccacaattagtaaattttatcttgatcgcctaggttattatgctaatctccctaggaatacatgtacccatagtgaacctcatactgagaacactctcatagagagtgatattatactaccgctcaatgtgc

SEQ ID NO: 56993 - DNA, 408 bp, Glycine max
  unsure (1)..(408): unsure at all n locations
tatgcaagntgaaagccctggaggatagaggtatgcctatgttgttgtggatgatttcttcacatttacctgggtcaactctatcagagagaaatcagacacctttgaagtattcaatgagttgagtctaagacttcaaagagaaatagactgtgtcatcaagagaatcatgagtgaccatggcagatagtctgataacagcaagtttactgattcttgcacatctgaaggcatcactcatgagttctctgcagccattacaccacaacaaaatggcataggtgaaaggaaaaacagaactctgcaagaagctgctagggtcatgcttcatgccanagaacttccctataatctctgggctgaagccatgaacacagcatgctacatccacaacagagtcacacttat

SEQ ID NO: 56994 - DNA, 442 bp, Glycine max
agcttatgtgagaaaatgtgggtgctgccatgcaggttttttatataaaagcactctgcatcatgcccgtcttactagcttcagcaatataccagtcacaaccctcacgcacttctagtatagttaagcctgaaactaatccttcttcataatcatagtcagaactctggcacagatgcaccatccagtggtcccatcaagggctcacctaacactgctaggacccacgtgtgatatgcctggttcatacacccttaaccatagtcataggttcgcatcaagttgcattcaaggctggatgccatagtctttcctttttgtcgttctttcaacttctttgtctatacagggtttgatgtcaatgcccttcaaaacacaagcaaaccccatcttgatatatttatgttaagggaaagaaaatgtcgaaggtcacttgatatgc

SEQ ID NO: 56995 - DNA, 433 bp, Glycine max
  unsure (1)..(433): unsure at all n locations
agcttgcttctacaggtaagtgtctcctccataaggttagccaagaaggaaagtcatttcacaataaagaccaacattatagaaaccttccctcttagacaacctccacattttctcccttgtaaaaagacactttttagcattgccacacctcttgggcttgaggttattcctcaagtaaaggagttgttggatgagggtttggttcgtaagagcttanatccttgtgctttgntggtgcccaaaatatgtattattaagcaccaaatccctaaaataggtggtatgatgaatgtgttgagtggtgcaacactcttttgtaaaatcactcatgcacccaacatcctcatgatatgtgtacatggngactcatttggtaggtttgttcttatttttagtttcaatacaaacttatgtgctcatatgggacacc

SEQ ID NO: 56996 - DNA, 528 bp, Glycine max
  unsure (1)..(528): unsure at all n locations
atganaccatcattgaccngcctattctgtccagtcgatctgtatgatgcaagctcggactcgccagtttgactggcgaggtgagggtacgggactgatgttctcacgctacgcgcatcagctctgcaggaggagggacagctatttggcagtggaccacgccagtgctactggcgatttgtgctgcangtangagtcaccagtaacataggcgattgagcatgagtatccattccatgggattcagctctttataaccaaagctccgaccatttgatgtgcgtttcttgaaatcatctgagagttgatattttatgtgccttctctaacagatagtgagagttaaattggtttattatactattntgngttgaatcctaaaaaccatgttgaaggcaggttcaagcacagctttaacgtataacagtcaaatgtgtatagctattctaaatatattaagttggtggtgtgggaaataattcgattgaatatgagactatatcttttcattactatattggttggcgg

SEQ ID NO: 56997 - DNA, 489 bp, Glycine max
  unsure (1)..(489): unsure at all n locations
gcttgaagaggatgctntaatggagganaagatagagagaaggtgggagcattatattgaaggaataaaagagggaaagaagtggaactttgaagtgtatcttataagactttcattcatcaaagttacaacaagtgttacacatgcttctatttatagactaggtagcttccttgagaagctttcttaagaaaacttccttgagaagctttcttaagaaaacttccttgagaagtttctttgagaaaacttccttgagaagctagagtttagctacacacacccatctaaaaactaagctcacctccttgagaagcttccttgagaagctagagcttagctacacacacccatctaanaactaagctcacctccgtgagaagctttcttgagaagctagagcttatctacacactcctataatagctaagctcacccncatgatanaanaacatganaatanncaaaaaatcctactacaaagactac

SEQ ID NO: 56998 - DNA, 401 bp, Glycine max
  unsure (1)..(401): unsure at all n locations
actggatgatctntattgcttccttcttcttttcctttataatcttcgccatgaatgagcatttgttctaaagattctataatatcatctaaaatatcctttcttggataaataacattagactcatcaaaggaaacatgaattgattcttcaattggcattgttctcttattataatttctataagctctactatgcaaagaataaccaaggaaaattccttcatctgacttagcatcaaattctcctaagttttcttttccattgtttaatacaaaacacttgcaaccaaagacatgaagatgtgagatgtttggtttcctaccattgaacaggtcatatggagttttctttaagatgggtcttattaaagccctattcatgatataacatgcagtatt

SEQ ID NO: 56999 - DNA, 403 bp, Glycine max
  unsure (1)..(403): unsure at all n locations
acctgctgcatgcaagcttgagatgaggaagtgtagaaaggcgaaatcttctgcttttattcgttgaccacaaagtggtacctggagatatgtcgcggnggtcaacagaccttggggacgtcatgtggggtgctattgcccaaaaccaagcttgaccaatcccgacccaacccgggcatagtcagtcagtgagaatctgtgatgcacctaaacaggcgagctcctggcagtcaacagataaaacgaacaaagaccacaaagcaaggaggcttgtgtggtggctggccaactgtgaactttgattatatgtgagatatggcctctggtaatcaattaccaagggtgggtaatcgattacaaggcttaaaaatgaagacaggaggctaagatggtctctggtaat

SEQ ID NO: 57000 - DNA, 238 bp, Glycine max
atctctttgattttattgagagtgagtctcctaaattcttgagtgattcaagaacacctctgcatgtatcataggacattcacaacctttgtgtgttgccctcgcttgaaagagtgattatttccttgctttcatcttcacccttgttctttcagaccacaattccagaagattcacctctgcccagaattatctcgtggccatgactcccattgtacgcactcaaattaagtgattc

SEQ ID NO: 57001 - DNA, 390 bp, Glycine max
  unsure (1)..(390): unsure at all n locations
agcttccttaagaagattcctaaagaagctatagcttagctacttatacctctctaatagctaagctcacctccttgagatgagaagctagagcttagctacacaccccctataatagctaagctcacccccatgacaaaaaacatgaaaataataaaaaaaaagtccttattacaaagacaactcanaatgccccgaaatacaaggctaaaaccctatactactagaatggccaaaatacaaggcctagacgaaggaaaaacctattctaatatttacaaagataagcgggctcatacttagcccatgggctcgaaatctaccctaaggctcatgagaaccctagggcctttccttggatctctagcccaatctacttggagtcttcta

SEQ ID NO: 57002 - DNA, 493 bp, Glycine max
  unsure (1)..(493): unsure at all n locations
agacgatgaagtgtcgaagggtgaaacttcctgctttttttgttaccacagagtggtacctggagatatgtctcggtggtcaggagaccttggggacgtcatgtggggtgctatttgccaaaaccaagcttgaccaatcccgacccaacccgggcatagtctgtcagtgagaacctgtgatgtacctaagcaggcgagctcctggcagtcaacagataataggaaaacaagacccacaaagcaggaggcttgtggtggctggccagctgtgaattttgtgtaatatgtggattgtggcctctggtaatcgattaccaagggtgggtaatcgattacaaggcttaaaaatgaagacaggaggctaagatggtctctggtaatcgattaccacngcgtgtaatcgattaccaggctttgaaacgaggtcaggaagctaatgagcctctggtatcgataccaaggggtgtatcgatacaagcttataaaggactgg

SEQ ID NO: 57003 - DNA, 418 bp, Glycine max
  unsure (1)..(418): unsure at all n locations
tcatgatggtcaatctacaataattattgcattatccttaggcatcattgcctctcatgggtaatgcagaacaatctcctacgttgactattgaaagtaaatttagaaggtacgatcgcaaaaattgtcacgagagaaagaacaaaataaggtatttatatatccagctaataaaatcgtaacaattgatcaccaaaccttgtaattgattaattcaatcaaataccatttgttctgcatttccagaaccatggtaatcaattacaccaactggtaattgattatctcgatcaatagagagcaaacattactctntagaagcaattgtaatcgattatgaaatatggtaatcatttctctcgtcttccagaaagcttcctaagtgtttagacacaatgttatcaattagtaaaaatgg

SEQ ID NO: 57004 - DNA, 70 bp, Glycine max
cttatctattggcccttttttccctttctactctttaccttcagtttgggatcttcgttctagaaacccc

SEQ ID NO: 57005 - DNA, 391 bp, Glycine max
  unsure (1)..(391): unsure at all n locations
agctnntaaatttgaattataatattcaatatctgctggtaatcgattaccatatatgtgtaatcgattacacagtgcaaattttgaattcaaattttaatagctgttgtaaatcatttttggccactggtaatcgattacatcctctggtaatcgattaccatagagtaaatctcttgaaaaagactctntatcttatatttcttggccaaaccttttgctacttcagttaggaattcccttcctatttaatatacccttcctaagactctagagactgtcttgatcatccatcttgaatatctntaatttctttgtcttgaataaagctttgagaagcatgtgatcctttggcatcatcaaaacattcaacttgatcctttgtctacac

SEQ ID NO: 57006 - DNA, 498 bp, Glycine max
  unsure (1)..(498): unsure at all n locations
ntttgatacgcttgcannnacgcgacactatagaaactcaggcttgtatgaaggtattaccggtgagatgaatatccgngctagttcttataaccatttcacctccatgtgtcaagaagaggctacccttgctgaatgctacaaatactcttcttcaaagggatagaaagcacttcttaaatttcctaacagtggtgaagtcttttggtttgggggtaaatgaaaaaatttgtaatgattttggtttttacttttttcaagcaaaacaaaacatgtagagcaaattaatggcagcggacattctaactatatgtttgaatgtcacacacatgacatggcctattcgaatgcaaatggccatagagacanatactacattggcctatnctcatacttctaacatcatccaccgtgatgtcaaaccaacaacatctacttgacattagttttcggtaaagagcagattntggctttcagaatgctcccaatatgtattca

SEQ ID NO: 57007 - DNA, 441 bp, Glycine max
  unsure (1)..(441): unsure at all n locations
agcttaagaaaaagcttatcanacttagaaatcaagtgatcatgtattccgaaatatagggggagaaaacggatgcacattntatctatatacagttgtttgttgtttgcttgaatcttgatttcaggtattgtattgtcatcatcaaaaagggggagattgtagatgcaattggctatgatgntttgatgatgatcatgatgatgtgttgcaattgatgcacatgggcttttcaagattaaaattcaagacaatacttcaagattacaagtcacaacatcaagatgatcactataatattaggaagggaattcctaattgaattagcaaaggtctggccaagtgatttacaataaaaagtgtttttcaaagggtttactctctggtaatcgattaccagaggatgttatcgattaccagggcccatacgtttataacagc

SEQ ID NO: 57008 - DNA, 356 bp, Glycine max
  unsure (1)..(356): unsure at all n locations
ttaccacagaattcagacttagcctttccactctcaaagcctcactctttttccactcagtacaccacattctcactttctaacccgtaagtagttctacccttcgtctctaacagatttccatcagcaatttcagcatataaacatcacaaacatcatcacgaanaccctaaaacagaatgggtatgtttaactcatccaaacatggcaatttcaacaagttntcagcaaatgccttcacaaataatcatcatacagcagaaacctagcgagactacccatcatatcntcgcaaaccccatacccacgaaaatcagaggagaaagaagtcacccaaaccagaaatttcgaagtcc

SEQ ID NO: 57009 - DNA, 441 bp, Glycine max
  unsure (1)..(441): unsure at all n locations
agcttgactaggcgagttgattntagccttattttcaccttagttattagtcaattcggttaagaatgagaaatcccaaaaagaaaatgtccggttgattttccgctttattttactaaaagatgttttttttattattatattattttttacctctttttttgatttccaacgtggttacggttgacgaacggtcggaattcattntaaccgaagtttacagataatacaattcaaacgatcgctggaaatttattttatttttaggttaagcgagaaatgacttaagtaaaatggcttaagcacgtcaagagggggtataaaaagtaaatgaaatgagaataaaaatacacgatacacaatgtggaccaccacgggtacatagaatgaatcgaaaagcttggttcaaggtacttacccgttgaagatcgaagaacgatg

SEQ ID NO: 57010 - DNA, 462 bp, Glycine max
  unsure (1)..(462): unsure at all n locations
tctatatntacatagatgttggtatttatgggaggagtgtttacgccatatttgttttaagagtagtgtcccactggtaaaactaactctccaaagttttgccttcgcatgacatggccccgaggaagcttgtctctaagaggaccaagaaagacaatgcagccgaatgaactacttccgctccggagtatgacagtcaccgctttaagagcgttgtacaccagcagcgcttcgaggccatcaatggatggtcgtttctccgggagcgacgcgtccatctcatggacgacgagtatactgatttccacgaggatataaggcgccgactgtgggcatcactggttactcccatggccaagtatgatccagaaatagtccttgagttntatgccaatggcttgccaacagacgatggcgtgcgtgacatgagatcctangtcaagggtcagtggatcccgtttg

SEQ ID NO: 57011 - DNA, 412 bp, Glycine max
  unsure (1)..(412): unsure at all n locations
agctngagatgaggaagtgttgaagggtgattcttcctgcttttattgttgaccacagagtggtacctggagatatgtcgtgggggtcaggagaccttggggacgtcaggtggggtgctattgcccaaaaccaagcttgaccaatcccgacccaacccgggcatagtcggtcagtgagaacctgtgatgtacctaaacaggcgagctcctggcagtcaacagataaaaggaacaaagaccacaaagcaaggaggcttgtggtggctggccagctgtgaattttgtgtaatatgtggattatggcctctggtaatcgattaccaagggtgggtaatcgattacaaggcttataatngaagacaggaggctaagatggtctcttggtaatcgataccaaggggtgtaatcgatt

SEQ ID NO: 57012 - DNA, 414 bp, Glycine max
  unsure (1)..(414): unsure at all n locations
agcttgtattattatgggatacccatcacatgtggtactaggtggcgttcgggcgatggtgcaagacaattctccacatcctcaaatcacgtataaacccaccatcccctgttgcccacctccaactgagctcacatactcccacgtagcccttatccacgttcctctcaacaccgggtccncatcaatcctcccaagcttccacaacatccaagagattcaacatccaatcatcacaaactaacacagccaagaaaatagagcataggcagaaaactctgcccanaacacaaaccaatatcacagctnttcacattcaaataccccagtaacattctcttcgntccaattcgttaaccgctggatcgactcacaaatttactggaagtctctagtacataagtctacattttg

SEQ ID NO: 57013 - DNA, 511 bp, Glycine max
  unsure (1)..(511): unsure at all n locations
cgcacccgcacatgantccttgattcacatgatacgtcgagaccgcgatcttaagtcgactgagcatgcacttgttttggtcctttcaagattgttcatgcgagcccaagagagcatatttgatcattttactangacgactgtgaaaattgcggccaangacaagggtgagaaagagggagaaacccatgctgtgactgtcgattctaatctgcccaatttcctccaacccaacaatggcaatactcagttatataaccaaccttctccttacccaccgaccatgttttcacttaggccattcctaattatccacatagcctgcttccgcgcttctatggctaagaccacattactcatactcgtatacaccaacaaaagtgatttctgtcccgaaagtctcgaggttcacccaaaatccgttgtgtatgctgatctgagcccaattccctcataattcatggttgcctatacccaccaaggtcctcaactccatttttggagatacacg

SEQ ID NO: 57014 - DNA, 419 bp, Glycine max
  unsure (1)..(419): unsure at all n locations
ttcaaatgttatatagtcacattattttcacnataaaagttnntgtcgtaatcgattaccacttatttgcgtaatcgattacctagtgactgtttctgataaatcanaatatgtaactcttcaaaaggttttttgactatttcaaatttgttttaagtttttctaaaatttataactcttctaaatggtcctcttgaccagacatgaagagtctataaaagcaaggctntgttttgcattttattaattcattctttcagactttacttttcaaatcaatcctttacaagccttgaatctctntgaacttcttcttcttcttcttcttcttcttcttcttctttgaaccaaaaagctttctgaagttttctggttttccaaaccttgaaaacttgtgctattcatcttttcattctctt

SEQ ID NO: 57015 - DNA, 531 bp, Glycine max
  unsure (1)..(531): unsure at all n locations
ccccctgatnccatgcattanctgacactatagatactcagttgataccgtagatgnacaatttttttcattttttggtgatttttttcatttccaattntcctgaaagctaatattatttttttacctttttacccttaaattccccaactggttaaggactttttgggaaaatcaactcacccctcaaccccatgtgctatttgaacccggtcccccacccccattcactcttattttattttcccagtgctaagggtantgtagaagcccctaggtgagttctaccttcattcttcttttggtgaataccctaattgatcctcaaagtatgaagcgttgcactttgatcaataaaatacactacaagagaagtgccaatntctggcagaatataactaacgggatctaatcttgtggaaanntgtaaaataccaacaattnttcaatggatatatgtttgtcgaanatgaaatgttgccatttcgacggatatggtatgangaatataaccttntcgataanattttg

SEQ ID NO: 57016 - DNA, 471 bp, Glycine max
  unsure (1)..(471): unsure at all n locations
agcttgtgctnttacgaanaggttcatcaagtttttgttgaagtatggaagtaaccatcttacaaaanattgnggcaaaagatggatcgagttacatcgctgcttcatctactgccaaacacatttaggattgtcgatgtccctgttacttccagtttcaccttggcgaagatgtcatggaccatgttgaaaatctaaattgattcaaccccatatcctgcgtaaaaattcgcaattcttcaactgtgcatcattcgcatacatccatgttgttcattggttgcattgctcattgcattctttccttgaaaaaaaaagaacttaatcattgttataaaaaagaaaggaacacgctntacggtgcccttaccgaacctgtgctagagctagagtaatgggtagagtagaggaggtgcaagagcagatggaggtcgacatggaggccatgaaagagaaaatggccacaatgat

SEQ ID NO: 57017 - DNA, 389 bp, Glycine max
  unsure (1)..(389): unsure at all n locations
ctatttctgctatatagactagatttttggtcttctctctgttctggttattaaactccatcatcttccatttttatggtgacagtccagttaggatgaagaattttattattatgaatgtctntaacgctagacaattctttatttgtgagcatttgaatatgtataattactattatttgtcttgtgtctactacattcaaatacagcaagcatcccaccatagcatgcactgtgctgtctgagatttataagtattatcagtaggctcaaaggatctaaggtacaagaacacaacaactcaaatcacctaataagcacggaatgagaacgatgacatccaatacaatcgaacttaataccctttccacattaacactcatcaatgt

SEQ ID NO: 57018 - DNA, 422 bp, Glycine max
  unsure (1)..(422): unsure at all n locations
agccttgatccttcagtacttcatagaatcttcggtagacaatgtttatttctctatttacatactatgttcaagttcaaattctaagatatggcataagccttccatatatgaatgaactatacatcttttctcttgcagcgctctctgaaggcttccggacaatggattcctatgacaaaaaagaagaagcttctcgaagaagcacangctatggccgatttaaagctcacctatgttgtttcttgtcaagtgtatggttctcagaagaagtccaaaaatactagagacagaaactgctatactaacattctcaatctgatgttaacgtgagtcaatacaaccatttgctgaactttataagttccttatatatgtaaaataacaatgggattgacaatggtaaaacggaacattccatg

SEQ ID NO: 57019 - DNA, 308 bp, Glycine max
  unsure (1)..(308): unsure at all n locations
cacgatcaacaaagtactttcggcacctattatatgttgacttgaccaacgctgttattggaatgctgcgacaatctttcaacaccttattcacacattctgatanggtgggtgtcatgtgaccatattgtcgtccacatgtatcgtaagccatgctccatttctccttngaaatgcggtcaatccatcttgctatggctggactcaattgacgaaatttttataagttttgatcaaacacatgcttgcaaagagtgtacgctgcatcaaatttgatatcatcaaaagttgtacgtagacatcaaact

SEQ ID NO: 57020 - DNA, 451 bp, Glycine max
  unsure (1)..(451): unsure at all n locations
cacctgcngcatgcaagcttgaccggatgtaagatacatcttcttctaccttaatcattcttgactctatttcattgaagcgcatatccacttgcagctccaaagtatcaaacctctcaccaacaaaggtttgaagaccatcaaacctttccaatatcttagaaagaagagatgaatcttctccctcatgtccttcttcaccaacatttctagcacccttctttatccaagatccatcatgctctttaacatatccaaaggatgctatgactgaagcgcctataaagaattatctcttgattagaacataaggttcacaatcaatacggatgttgaagtgctgaaggaaaagggtaacaagatgaggataaggtaatggggcattcaatcgcaatgccttatgcatgcgatatctaacaagatgtgcccaatcaatttgtatacctttatg

SEQ ID NO: 57021 - DNA, 220 bp, Glycine max
tcaagagaaagcccaataagaaaagaaagaaaattcccgatcacgaggggagaaagcaggagaatagacagaatatcccaatcaaagaatgggagaaagaaaaaagagaataggaggaaagaaagctcctgatcaaggatcgaaagaaaacagaagaaatgtgcagagaagtctttggaccggacaatatctgaacaatacagaattgtcaccacatgaa

SEQ ID NO: 57022 - DNA, 612 bp, Glycine max
  unsure (1)..(612): unsure at all n locations
actactccattgaatccatcgatgagccgngatgcatgtagcgtcgaactgtctgcagtgcacgctgtctgcactgcaagacttccaaatattcaaatgttgatactgtctcgattttattacagcgacnncaacgtggacatcacgcgcatacaagttatttgtcgaatatcaattttctcacgaactgtcnggatctaaaaattatgagccgtgctcgatattattacatgggactcacatcatgactatccagagttgagaatggttattcgttcgtattggaattatgataactgagtcttnacgtgtttcatatttgcgagcatcatctacgatataattacagacacctctgtctgggctatgcagagtaaaaagttatttgtcgttcgaattttctaagagtatccgttctcaatatggcagcgatcgatatataacgggactcaaccggacatccgtgtataaagttattggcatttcaatttgttcagaagttctctggtttatcatgaccgtangacttgtgacctcatctttccgacatcctagtcataagctataggagtttgacttcgcacgacctttcattttcagtttgagccttcg

SEQ ID NO: 57023 - DNA, 397 bp, Glycine max
  unsure (1)..(397): unsure at all n locations
agcttccataacaaanaatatctcctagtatttactaaatttgatctgcttgaggagaagattgaacacattcctctagcacaatgtgaatggtttagcgacttccaaccatttatcagtcccaatcagaagagaggctgtagcaatggcaataataactcttcattagcacaatgtgcttttcaatacattgctgtcaagtttaagagattgttcctttccatcactggccgaattctctttgtttcactggttaatggattggaacctgatactattgatgaagctctcagatatggaagggaggttatggagtgggaaaaatgggatccctctattgtaactgatccaaagtccgagaatacttcaacaagcattgatgagcaaagttacttat

SEQ ID NO: 57024 - DNA, 489 bp, Glycine max
  unsure (1)..(489): unsure at all n locations
natgatacccctgcannacgcgcactatganactcagcttattatttgcctctaaactactgtccccgaggttattcattaatanggctcccatttttaatggtgttggttaccactattggaaaaaccgcacgccaatcttcatagacgctatcgatttatacatttgggaagccatagaaatagggctctatattcccaccatggttgctggaaatacaacantacaaaagccctaggaagattggagtgaggaagaaagaagactacttcaatatatctttatagccaaaaacataattacatctgccctangaatggatgaatactttanggtatcaaactggtaaagtgcaaaggatatgtgggataccctcaagcaacacatgaaggcacaacanatgtttatagatctangattaacacacattaactcatgaatttgactattatgatgaatgcaatgaaagatacaaacatgcacagagt

SEQ ID NO: 57025 - DNA, 434 bp, Glycine max
  unsure (1)..(434): unsure at all n locations
tcttatctatccacacccctctattaactaaattaacttccttaaaaataattacggatgaaaataacgcaacaaataatcaaacatcaaacataattactaatatatatatatatatatatatatatagatatatatatatatatatatatatatatatatatatatatatatatatatatatatatatatatatcagggtgttatagatacaaagcctatgttgatccgatggatgctccggctacaaaaatgtgtcttggagatccgagataggagcggagcacaaaatttggttgctgatcatgtgagtccgatcgaacatgtgtttgatgaggactcacccatctcggatgatatcccgacgatatatatatatatngatagtagtgtgatctctctcactccctgtatgcaacattgcaatataaggg

SEQ ID NO: 57026 - DNA, 536 bp, Glycine max
  unsure (1)..(536): unsure at all n locations
gggattgtcccttgatnaccgacncnnnnanacnnntttgatacgttgtattacgcgcctatanatactcagcttgttgttgtgagcccaccatcttttcatagtagaagactgtagatgcgtctactattattggcatcattttattttctccgtccttgaggtgccacttgagctgacagggctcttcacctttgggcgtattcttttgaggattcgtgcccccttattgcacatgtattgtagttgcatcctatctgaagccattatactgacattgcctaacgaaggcgaccattatgtccttccaagaatggactcgggaaggctccaagttagtgtaccaagtaacagctaccccagtaagactttcttggagggaatgtatcagcaattcctcatcttttcatatgcccgcatcttccgataacacatctttagatggntctctgggcaagtagtccccttgtacttgtcaaagtccagcaccttgaacttgcgacgggtgatgatatngcgtactaggaacaactctn

SEQ ID NO: 57027 - DNA, 366 bp, Glycine max
agtcttgcacgtatcagtcaagtgtatggactatatcgtagccaaagtgctcatcgataatggttccagtttaaacgtgatgcctaagagcactttggagaaattaccattcaatgcctcccacttaaagccgagttcaatggtggttcgtgccttcgacggtacccgccgagaggttaggggagagatcgatctcccagtacagataggccctcacacctgtctagttactttccaaataatggatattaaccctccctacagctgtctgttggggcgcccgtggatccactcagtaggagttgttccctcaacactccaccaaaagttgaaattcgtagtggaagggcatctggtcatcgtatc

SEQ ID NO: 57028 - DNA, 422 bp, Glycine max
  unsure (1)..(422): unsure at all n locations
tatgctccgtttatgaactatgaaattgagatgcccgaattttctatctttcctagttaaccatgcattangtaccatgttcaattatattgtttnttaagcgaaacgggtttatgatcccaacatggttggctcgtggtgcctaacacatgaaactaagaatgtagggcgaagtttcacgcttcccccttatgtggttttgtcttgtagaggaaaacgcacggatgagcacacatgaatacaaatggtatgcaattctgcacatcaaaagagttgttgaacgcatatgcatgatgatgccatgactcatgcaaaatgtgaggctggaatatgataacggacaaatgcaggaacgatatgttcattatgatgttatgaagagatgcttatgcgatgcatgatatgaatgcattttactgaca

SEQ ID NO: 57029 - DNA, 434 bp, Glycine max
ctgcagctttaagaataagaaattagggtctttctcaagatgttgtcaaacttcataaggaaattggaaccttaaaaactacattagccaaatttgttagtgggacaaataatcttaaaaaattgttaggataccgtagaagtccctcagataagtttggaaatggatatgatggtgagatctatgttcataatgaggacaccattgtctgttatttttgtggtaagattggacacatgacatccaagtgtagagatcgacctaaaaatggtgcaaccaatacttaagaaaaagattattcgtgttgcagatgtccttgatagtaggaagcaaatgcttatcatggtacctggacagtaactgctcatggtacatgacaagagaaaggtgtatgttccaatgcctaactccctatcatggtggaacagtcactt

SEQ ID NO: 57030 - DNA, 476 bp, Glycine max
  unsure (1)..(476): unsure at all n locations
gtgtatctctttgaacttcatcttcttcttcgtaccaaaagtcttnttgaagttntctagctttctaaacccttgaaacttgtgttattcatncctttcattctctntctcctttgccaaaaagaaattgccaaggactaacccgctgaattctttttgtggctctcttctcccttttccaaaagaacgaaggactaaccgnctgaattcttttgtggtctccttcntccttgtcaaagaattcaaaatgacacattctgagaattcttttgattcttcccattcccttatacaaaagtgttcaacgaactaaccgcctcagaattcttttgtatccccattcacaaagtatcaaagggttaacagcctaagatctttgtctcaagacattggagggtacattctttgtggtacaagtagagggtacatctacttgggtttgactgagaacaagagaaggtacatctcttgtggat

SEQ ID NO: 57031 - DNA, 465 bp, Glycine max
tgcggcatgcaagcttcatggtatggcctgtatcctatagttatggagttcttaaggccaacgttgcatattctatatttgtaagtctttgcaggcttcatggtgaagagtggttcgtcttttccatcacctttagctgttttgccattgataaggacaccttcatgcctaccaagagagcgcccgctatccaataacttcctcagaatggtgtgactctttgtgtaccagtcaccaatgagaacggtgtattcatcctcaggatctgggtaaggcacacgaataatcatgcgactgtttacacgaaggccaccaaaaccaccagctgccctatgcatggctgtgctcgggtagaataaagaactgcctatttggtcctcacctgatacgaacgtgaagttgtcctggcgaatgggcagtatttctgcacccctcttgcatgaattcttttgtgtggatgccttc

SEQ ID NO: 57032 - DNA, 281 bp, Glycine max
cttggtgatacttgaatccatctcattgaagcacatgtgcactttgtactccaaagtatcaaacctttcaccaacagaggttagaagaccatcgaacctatccaaaaaattttgaagacgagaggaatcttcttcaccatgtccttcttaataacaagacagccaccctgttcacccaagagccataatgctctttttgatagccaaaggatgcaatgacaacaacacctattagaaaggatctcttgagtggaacatagagttcataatcaagagggacg

SEQ ID NO: 57033 - DNA, 286 bp, Glycine max
  unsure (1)..(286): unsure at all n locations
aattgcgctgaagtatttaatgttatcttgagtctttaattggtctgctaataggtgttatttgaataaacttctccaaaaacacttataanagaagaagaanaatataaaagcaaattgaatcaaacagctttctaaagttaaaatcaacctacctcaatctgtggaaaagttagatgagtgaagttatataaaagtcgaagtgcacgagttgagtttaacttacgaaagaaatctaattgactatattacttttggtgttcttcatttataagtgattatggag

SEQ ID NO: 57034 - DNA, 410 bp, Glycine max
  unsure (1)..(410): unsure at all n locations
catgcaagctgtatagtgcgggtctgggagacgaatgtcaagtgttcgttatatgtgaagatgatgttccaagtacttcggatttggtccgaccatgccctcctgatttccagctgggaaattggcgagtggaggaacgccccggcatttacgcaacaagcataatgtaaacctttacggttntaaaagctctatagttgggcctaggctttagagttttcgttntgttaaggctttgtgtcttttgtttttgaatttataatacaaggatctttcttcatctgttcctggtctctacccattctcattcatttgcatgtttacttctttttctgaaacggcagattcgatgacgagtcccccgaaggtactaatacctgcgacccgtctatcaacttcgagcaagaaat

SEQ ID NO: 57035 - DNA, 467 bp, Glycine max
  unsure (1)..(467): unsure at all n locations
ttggcaatgtactcaacgaagtacttgtgtgcctctaaaataaaaggattaaaaatatatcagttacataggcagttggatctgtaagagcttgataagctttggcaatgtactcaacgaagtacttgtgtgcctctaaaataaaaggaataaaaatatatcagttagcagttacatatgcgattgtaggaatccaacattcctgcaaacatcaaagttggcattgcaacaataaaaaaaaataaacaactgaaacaccttcaacctggatctgggtttttatctggatggtattgaatagaaagtcgcctatactttttctttatttcagactctgccgctccaggctctaatcctagaatattaaacggatcanaaatttcaatctgcatcaaaattaaaagaaaaatttcagaacgtgcaccagtggaagtctcagccaattagtaaaatgttaaacacaaata

SEQ ID NO: 57036 - DNA, 296 bp, Glycine max
  unsure (1)..(296): unsure at all n locations
tttgttaaaacataagcacttatacaatgaatgaaagctggagttgctgcacatgatgtccaacgttatgtcaaggaatcagattgggctgcacaatgcacaaggcaaagataaaatgtcaaatgaagatttgaagctgcaggatccacgatgtcggacacgatgtcctgacatccggcccgaaaatactggacacataaatctgttatatctttaacagattaatgtgcagttagcaacagaattggcgatctatctttaggaacgaattanaagataattaaagtttgaattac

SEQ ID NO: 57037 - DNA, 444 bp, Glycine max
  unsure (1)..(444): unsure at all n locations
catgcaagcttctgttatgaatntcgagtgtctcgatatactacgggactttatcggacatccgagtaaaaagttattgacatttgaatttgctcatagcattcgttgtcaattacgagcgtctagatatattaaaggattcattcggacatccgagtaaaaagttattatctttttatttcgctcagagcttctgttttcaatttcgagcatctcgatatattacaggactcaatcggatatccgagtcaaaagttattgtcgtttggatttgctacgagcttccggtttcaattacgagcgtctcaatatgctacgggacacaatcggacatccgagtaaaaagttattgtcgtgtgaatttactcagagcttccgtcgtcaattacgagcgtctcgatatattacagggattacttggacatccgagtaaaaagtcattgt

SEQ ID NO: 57038 - DNA, 336 bp, Glycine max
  unsure (1)..(336): unsure at all n locations
cttcacaaatcgtctataaaaacttgcttagccatgaaaactcctcacctcggtcacagacttaggtgtaggccattcttgaatagccctaaccttcttctcatcaacttgcactccttttgaactcacaacaaaaccaagaaacacaacatggttagtacaaaagatgcatttttcaagaatggcatacaattgttcttttctaagcacagtcaagacagaatttaaatgatcaatatgcaaatcaagtgaagtgctatagataagaatatcatcaaagtacaccacaacanactttcctatgaactctctcaagatatgggtcattaatctcat

SEQ ID NO: 57039 - DNA, 226 bp, Glycine max
actacaataggccattacatcaactcctgtattggaactacccaactatacttaacaatctgtgttataaacacatgcatctgggattggaatagggcgtatgacgatcaaaatggccacccaattacatacttctccaataaataggttcctagaacgcaaaaataatctgcttacaccagggaattgtttgttataacaacaacattggctaaattcaagcatt

SEQ ID NO: 57040 - DNA, 282 bp, Glycine max
gatccgagagcatatgcgaaggaaaaatttattagggatcaaatgcaaaagtcaggtatatattgcggatcaaaaacatgtttaagcaaaaaaaaaatgaatatgtgcataaaaatttagacttcaataggcggtgaagataaaacatatttggataaccaatccatgtaccataataatctacatgctccagataccaacacaattttatgtattttatgagtcaacaaaatattaaaaagaggaacctaattcagcaacatgcttgtacacctggtagtc

SEQ ID NO: 57041 - DNA, 443 bp, Glycine max
  unsure (1)..(443): unsure at all n locations
accttaatcaccgcagctgcagcttgattatcaaatttgtngatatgatattatagtggctgactggaagactntgttctttggaccaatcttagtgattcgagcgaataataaaatatattcgttggttttccatgaaatttgtcctttttttactctagaaagttttttcaacaactttcatgttgaatcccttgagagatgaagttgttttaaggatcatctgtgacaaaactcatgggtttcatattcattaagtggtagaaatatataaatatttgaactatgtcaaaattggaatgctctttgtcttgttgtgttgcacaatttttacgtatttttgtagatttttttcctaatgaatcggtttaacttgttggaaagataagaaaattagctctaagttcatataaaaagtttatcttaataaattatttctaaat

SEQ ID NO: 57042 - DNA, 538 bp, Glycine max
  unsure (1)..(538): unsure at all n locations
attgaccctttgannnacggacactatgannncncntttgatccctttgctattaccgacactattgatgctcaagcgtgattctgcttacataacactntntagntnactattttttttaatgcttcatgctattagtgcaaactggtttgctatggtctcgagttttttgtcgggctgcgggtttgagcttgaaaagtgaacggttggtgttagctttctgaaccaaaggttacaagggccttggtatgttgttgttggtgtatggcactataacacatgaatgcattcttgcttgcaacctgctgcgttagcaatggttgtgaagccaatctaatattnaataaaaacaaatgctttctctctttctctctttgtatgttaatgaaaaattatanatatttatagaatatcttttcatatatttgatgaaaatataattaaataatattttatatttatccaacttcctatataatcatgtaatttactcattatgagtnttatcacacanaatanagtcttcatattataatgg

SEQ ID NO: 57043 - DNA, 516 bp, Glycine max
  unsure (1)..(516): unsure at all n locations
cttagtcccttatgaacccattgtagacccgtgatcctcagagtcgacctgcggcatgcaagcttataaaggaacaaattttgtctcgatcttgatcctatacatnaaccgcacgcgagaaactaatatatatcagttcactatcatctcggaacgacaagaaantacaattacgaatccgcagagctctgctccactatccaaaataaagggtcatgattactctctaggtgtgcctcaaatagttcctcaaactgaaagtatacgtcttctaaatgcggatgtatgtactacgcgtgcctagataaaaaaagacatgtgagagctaaggcacttgcacttcatacatgcatgtccaatgaccgctgtgcctgaggacttgaacttctttatcgtgactgcacatagagcaatgattaatgttttgatggtaatttaactgcatagacaataaacacgcagaggcttcatgttaacagaagtcgatattttgccatgcatagcgttgtgttgacg

SEQ ID NO: 57044 - DNA, 379 bp, Glycine max
ggatccttaagcacctgcaggatgaagctgaagttacgatagtatggagtgtttttagactgacccatgtattcaaccgatagatatatattatgtattcatatgaaaataataataaaatatttataaacaacatagtaataatacatcacgattacataataatttgttgacgttatacgagtaatagatcattttcatagaagagttgatgttattagaaaataaggatttgatcttatcaaattaagaattttgtatttgaaaataacacactaaacgagggtatgttgaatgttaaatagactaaaaaataaaaaaaaaaataactcacatttttggctaaattttgtaacttggataattcctgacttcggat

SEQ ID NO: 57045 - DNA, 396 bp, Glycine max
  unsure (1)..(396): unsure at all n locations
agctttcttgagaatacttccttgagaagcttctatgagtattacttcttgagaagctagagcttatctacacacacccctctaataactaagctcacttccttgagaagattcctaaagaagctagagcttagctacacacaccccctataatagctaagctcacctccatgccaaaatacatgagaatatanaaaagattccctactacaaagactactcacaatgccttcgaatacaaggctaaaaccctatactactagaatggccaaaatacaaggcctaaaagaaggaaaaacctattttaatatttacaaagaagagaggacccaaccttggtccatgggctcaaaactctaccctggggttcatgagaaccccaaggtcttctttagc

SEQ ID NO: 57046 - DNA, 96 bp, Glycine max
atgaaattattctcgtctcttacttttatcccctttactgctaaccattattaagtattctccttatctaaaaaaaaaattccacgtctttaatgc

SEQ ID NO: 57047 - DNA, 417 bp, Glycine max
  unsure (1)..(417): unsure at all n locations
agctntgaacaatatacttgtcccttcattttctgtctctgggctnnggggccacgctcaacaaagtactttcgacacctactgtacgttgatttgaccaatgctgttatgggaatgttgcgacaatccttcaaaaccttattgatacattctgagaggttggttgtcatgtggccatatcgacgtccttctctatcataagccatcgtccatttttcctttgaaatgcgatcaatccatgttgctatggctggactcagttcacgaaatttttctaaattttgataaaaaaatgtgcttgcaaggagtgtaggctacataaaattagttatgaataacaattttaagtatatatgaaagttaaataaacgtgaccatcaatatgaaatcttacccaatttcttcaacatttctttt

SEQ ID NO: 57048 - DNA, 548 bp, Glycine max
  unsure (1)..(548): unsure at all n locations
naggcctatnccttgattacggacacatganactcacttacacatgagaatcgcgaccataacactcagcnatatctttattanacagcttatctggacaaagaacatgtttcttctgatccgagaataactctattaccaattaagcaagattggttgcacagaagaaaatcaacagataattaccatataacagcaaactngccatggttgacaaattcangaggaccaagttgactgccctcacctactttgaggatcaanaaaaganntatttgggcattccgattgacgagatgcttctctgggaatgagctgcactatggtctaacttaaaggtgctgctgctccagaaatcttctgatccatccaccttagtcactggttgaccttgagtccttagtcctttagatgcttcatccattgaaataatccctggagtttttttgagcattcaagacatgctatgatctgctggtaaacacggtaagttaaaccataagtattgataacaccaactattaataacattcagtctaccagctggn

SEQ ID NO: 57049 - DNA, 326 bp, Glycine max
  unsure (1)..(326): unsure at all n locations
nngcttatatgattggctaatattttgttaatacataagcactnagacaatgaaggaaagctggagttgctgcacatgatgtccaacgttatgtcaaggaatcagatcgggctgcacaatgcacaaggcaagataaaatgtcaaatgaagaattgaagctgcaggatccacgatgtcggatacaatgtccaggacatcctgcccgaaaatgcacaaggcatgataaaagaattgaagctgcaggatccacgatgtctgatactatgtccatgacatcttgcccgaaaatactggacacataaatctgttatatctttaacagaata

SEQ ID NO: 57050 - DNA, 464 bp, Glycine max
  unsure (1)..(464): unsure at all n locations
catgancccttgaatnacgcgcactatgatactaagcgtgtgctatgattatatgctctcacttaagggggcctgttatatatgtgaattggcatgaaccaactctggccaaagaataagcttgtagcctgttaggtgaagacacacatgggtttatggtatatatctaacaatagtaatctattaatatagcttacaggttcattatgcatacaattttagggtccaagtcatcgcatatattttcatgaaggaaatcanngacctgcatatcattattagaatcatatantaaattttgtccgtacttncatagtgtccattaacacnatttcagcatatgattctctttctatctctttctcacaacaatgagcnncaggagcagagntttctatgagcatcattcaagaacgtacaaatattatattacatgatagaaaaactaattaagttataatatt

SEQ ID NO: 57051 - DNA, 434 bp, Glycine max
  unsure (1)..(434): unsure at all n locations
agcttaaatccttaactgcacaggctctattatttgaagagtatccttgtggaaccttcacccaacgaagacactgacaaaaacatatcttctccttcttggacaaagtatggcaggctgggggcaagtaaattttcttcccatcaaaccttggatgcaactgtgatcgtatacccatatcaactagatcttgacgggtattcaagccatccttcgtcttgccttgaatgttaaggagcgtcccaatcaaactgtcacaaacacttttctccacatgcataacatcaatacaatgtctaacttcaagatcacaccagtacggaagatcaaagagnatggacctcttcttccatatgcaactatgactattatccatcttttaggtcttcccacatacaatattcaggtgttgaacccgctgatatacctgctca

SEQ ID NO: 57052 - DNA, 269 bp, Glycine max
  unsure (1)..(269): unsure at all n locations
acttgtaggattcaatttgggcaaaattggatgagggaaagagtggttttcgaatctgcactttatgcagaattttgctggtgaaatgtgcaacagaattttgtataagtgcagaanaatgcttgtgtatggctggttgagaanagggtagtacatatggngttctggacattttctagcatatcccaacggtcaaaatgtagacttatgtactagagacttccagtaaaaattttgagtcgatccaacggttaacgaattggaacgaa

SEQ ID NO: 57053 - DNA, 329 bp, Glycine max
  unsure (1)..(329): unsure at all n locations
aagatgtgctgaattctctagagactgtcttcttagaaataaaaaggcaatcgatctctatatgtttggcacgctcatgaaaaattgngtagatgtaatatgaggagctgcgtgattaacacaaattagtctcagttccaacctcacacatttagctcttcagcgattagtctaattgntttatacattatttgacaagttgtgagagtcatagcttgaatttctgcttcagctttggaccttgcaaccacattntgattcattttttttcctttccatgaaatgagaatccctcaanatagaacacaatatccaaaggtggatctcct

SEQ ID NO: 57054 - DNA, 523 bp, Glycine max
  unsure (1)..(523): unsure at all n locations
tggtttgctcctgcattactgacctatgatactcagctgaaacacaaggctntggcggnttggttggagacttggttatgacatacttgtgcatctnccttgaaatcacccttccaatgttcactcctatattgctcattatgctatagaactcatgcatcaccttctcattgatcttgagaggaaaatcaattagcttggaccacttnctctngacanattcgtcctagaattcccaatcaataatctgacctccctctctttgatgaggccttggtcagcattgttcttgaatctatcttggttgggaaggaccaagcatttacccttttggaagcctggagaagaaggttggtggtagaatangtgtttatgtatgtgtgtgaagggatggttangtggtggtggangnancnnntttctcnntnntnntnataanattaagaaaggcctcatataancctctcttgtcacttncntcattcttgttaagtggacattcactctttatacaaatcaaacg

SEQ ID NO: 57055 - DNA, 366 bp, Glycine max
  unsure (1)..(366): unsure at all n locations
atatgtatttcattagtgggcgctcgctgatggtaccatatcttgaatattgctctgtaacactgttaaaattaatcatgttcaagttttcaaataatgtgtaggttggaagccaatttaactggcgtgttgcattctgggttgaggcaatattgatgcttccttttcccatgttgggttttgtaataaagcctctgcaattggaaggtgaccattntcttctgtttgatgtgtttcagaatagccttaatttttttaatccctatcatagtaatgcattcattggtaatatattatatattttcttatgatttttttaggaaacatattttcttatgatatnttcgcaatttactgagaaaaata

SEQ ID NO: 57056 - DNA, 363 bp, Glycine max
  unsure (1)..(363): unsure at all n locations
atgtgatacattgagaatttgatttatgaccgtgacattcctattgtaaaaatgaagcagatgtaaaggatctggtagagaaccgattcattgatccagtgagacagattggaaatctaaaagataacgtttatgttcctgcggtaaaattagcgagtatgggtttgatacggaggaaagaggtcccattagcaggatttggatggttagatacttacattanngttgtatggagctgaaggatcagatatattgaggacagccatggataaaggtaacgatatcgatattaggacttgataccatattaagagtaactagatatatatcatattggtacgaagtattcattaaattttttat

SEQ ID NO: 57057 - DNA, 445 bp, Glycine max
  unsure (1)..(445): unsure at all n locations
agcttgtggtgctccattgtattacacacatttttaaggctaaggtggngagattccttcctattctctttctttattatgtgagttgaatggtaagttnttagtgtttgcttgtagtaacaatgactntaaatggaagtatgcttccatattatactctatattttatgtttaagagtgtatttattcttactttgtatcaaggacctatggcaaagtaatgaatatatatttttgtattcatcataagaggtctaataattggtatcacagtcttcttttaaggcttgttattcaacaatattatttatttattttaataaagcacacatatatattatttcgtttcggtataagctattatgtggtgattggaattgactcatgttatttgatatataatagcatgtattagatatttctaattgatatactnatttaatta

SEQ ID NO: 57058 - DNA, 502 bp, Glycine max
  unsure (1)..(502): unsure at all n locations
natgatncctttgaannacccgcactatagatactcagctttggaaatgggtggttcaccatctcgctagcccatctgtttgcttattgagcatccactaagcgtgacacttctgggcttagcgcgaggaagaatccaaaagaagatgagttgtacagggttgctaaacacaccgcttcatctctctaagtgcaccgcttcagtttatccgctaagcaagaaaggcgcgctaagccaaaatatactaacgtgcgctagcggtccatcacaaacaaggccacctatntaagcccgaaattggattttgtgaagggagtttggattaggatttagagctttgcatgtctagggtttctagagagagaaaggtccaagttccagagagntttgagagaatttgctgtgtgaagatctgtagagaccagagcttatagcagggagccgattgagatcttgagattgaattgtgagtgattgtgagatcttataggtgaaggagacn

SEQ ID NO: 57059 - DNA, 334 bp, Glycine max
  unsure (1)..(334): unsure at all n locations
anngctgactgtctttccttatctttctttgtcatagcatgtagataaggaaggtgctccatcggtggatggtttactacaactttacctttgttagtggcttggttctttgatttatgcttctcttcttcactcaccactttcttttccactttttcattagccatcacttcatcatttttctctttttctttctcaactccttctttattctttttctcaccattatccttcaaaccaactacagtcccccaccttgttgtaattgagttgcatttttcctttgggataacctatgtgnttgctaagaaagatccattcatgctcagagagt

SEQ ID NO: 57060 - DNA, 354 bp, Glycine max
agcttcttagtatcagatgatgcagatgggtttgtatctacctcatgcactcctctaatgactatggcatcatttctggcctacactgctgggagttggaagccatcttcttaataaaattctggcttcagcacgagtcatgtcttcaagggctccaccactggcagcatctatcatacttctctccatattactgagtccttcataaatatattgaagaagaagttgctctgaaatctgatggtgggggcaactggcacatagtttcttaaatctctcccagtactcatacaggctctctccactgagttgtctaatacctgagatatcctatctgatggctgtggtcctaga

SEQ ID NO: 57061 - DNA, 261 bp, Glycine max
  unsure (1)..(261): unsure at all n locations
agctnttaaggtggacacgacaaccactgctttataaggatgtcctcgctcatacgtagaggtagttaaggagtttaaacctggtcacatgagccccatgtatacgagggagggtgctcatcacgccgaaagggataactttatgcctgtcaccttaagctcgaataaggagaactctgagtggcttcacaagtcctgggtaggaagattgaacaacagagccatgtttgaaaggttggaggaggagttgaaatgggtggt

SEQ ID NO: 57062 - DNA, 433 bp, Glycine max
  unsure (1)..(433): unsure at all n locations
gcttttatccaggctcatcttgggggtgaatctctntnttccatggcttattccttaatggatggcgcctcctctcacctcttctcctttgtcttccgctgcatctccatggtgaaaaatcaccattgaaggacctcattgaagctcanagatccagcctccatagaagctccacaagcaagcttccatcaagtggtaatcagagcacaagagcttcaagtaggtgctccttaaacctccattaattttttttctttaccttctcttccattggtggttcttcattnttctccatgtatctcctcacatgtcttgttctaaatggtgctaacatgattctttacagtttccaccgattaaacttgctatagaagttagatttgattntctatggctcaaatttcttgttctttgtcttgaaccatgaattgtg

SEQ ID NO: 57063 - DNA, 452 bp, Glycine max
  unsure (1)..(452): unsure at all n locations
agcnttgatgctntccgctagntatgaggtatatatctatatagatagggaattctttgcgtttaccgaagaagaaagtaaatacaattgtacagtagacattggattcttttctaggtccataaggttgtcggatccttattatcacagtcacgacttctattattatttgtgggttcaaggaattgtctcaatcaaaatttattcaagatgataaagatgtctttcgggtggtcagggagtttttatttttattttattttttaaatatatttttctaaataacacgtgctagaaaagtaattctacatttatcatcaaaattgagaataaagattctgtanatttgattctaactttaaacaacaattctatttaccatcattaccacttcgattttgtcattatggctagcgcacatcattatcgtatcgtttactgatcacaatatt

SEQ ID NO: 57064 - DNA, 300 bp, Glycine max
  unsure (1)..(300): unsure at all n locations
ttcgagcgtctcgatatattacgggactctatcggactttcgagtggaaagttattgtcgttagaatttgttgcgagcctcggttttaaaatttgagcgtctcgatatattacgggactcaatcggacatccgagtaaaacgttattgtcgttcgaatttgcaacgagcctctgtttcaattntgagcatctcgatatgttattggactcaatcagacttccgaatgaaaagttgttgtcgttcgtatttgctacgagcttcggtttcaatttcgagcgtttgacgggactcaatcggac

SEQ ID NO: 57065 - DNA, 320 bp, Glycine max
  unsure (1)..(320): unsure at all n locations
agctntgtactctattggttagattagactctctcgtttaactaaatcccatatttaaactcacacgtaacactttaataactgtagttcttttaccacacaatttgaattgcctttatttttttttccgtattcttgctttactttccttttatatctaactntacaactgtcctaggtcctaacaaaaaccatgtgattaataacaactcattccaattcccattttaaaggagaactcaccctcttgacttgtacaaacaagtattataccaactagaattagtagaaattggttgaaatatgttaactgatttatt

SEQ ID NO: 57066 - DNA, 387 bp, Glycine max
  unsure (1)..(387): unsure at all n locations
atatgtgtaacaagttgtgaactttgtctgaactaccatggctgaaaacgtgtattattatttgtgactgtcaagattgtgagactttgaatcaattnttgttgacattattgatctangtaactctaataaatatgatgcatcgaggtgatataatattttctcattntcctcatcatgttttgaatttagtattatttcatctgtgcatgtcacttatttcttaagtcttaacccatttaggagatttctaatcgtaggcttattgattatattgtggaatggattattgccttaatttccatctccatgatacatggatgaattgaatacacgatgttntaagaattcattactatcaacattaatagttactaataatagagt

SEQ ID NO: 57067 - DNA, 355 bp, Glycine max
aatcccattttgaatcgagacatatatatcgatgggtcatggtggataacagagaacatatagcgtatgatgacacgactgaatgagagttcaagaaatcattggacagagcagcgaatgctctgatttctgctaaactccaacgcttggaatgcgatgttgtgcactttttgacaaaaagaatacgccacggtacacaactttcgaagtactaaacaaatgtgggacactctggctattacatatgaacgcacgtcatatgtaaagatgaacaaactcaatctcctcacccataaatatgaactcttctccatggaagaaaatgaagacatacaatgtatgttcatatgttgtc

SEQ ID NO: 57068 - DNA, 549 bp, Glycine max
  unsure (1)..(549): unsure at all n locations
gccccccgggttgaccctgcattacggacctatgaaactcagctgaaacgctgataaaccggncgcaaaagcatctcacctcgttcattatacagacttaggagagagagagagagacttattataccaacgaacctgaccaagactactaacaagtatgtgtgcgctacagagagaaagacgaatcgggagagggtgtcatcctgctgatgttctccatataaaaatgccccgtagttcggttcactcaacaccctagtttcgatgttgctgctctataaccacgcaatagatcaggaggaaccctaaccaaacaagaaaccaatggtggtggcgctagggcaacaaatgagggagctctccaccctcgtcactggagaagcaagcttcatgatgatgaaccaagcgattntgctgatgccataagcccaagtgatcgattccagattgatttaggacttctcaatcaagcatcaggaatgcaatccaagagtcgagaatcacgagacaaaatccagaagcatcgggtcaagacttcatatatgatag

SEQ ID NO: 57069 - DNA, 398 bp, Glycine max
  unsure (1)..(398): unsure at all n locations
agcttgtcattatttctttatcatattagtattaatcctactacaaaactgcttanatgtaaaagttgacacaatgttatattgctagataacaattcttgtgagatgaatcactatttggttggcgttgcttggccaaggttttaatttccgtgctgaagttgaagaatataactgtaaactatatataaactcactcacaatatatgctttgttttattcagatggggaagagggcatctcaatttttcccttgaggggagggtcaacttgcaatattagaattatttggattagggacatttcaacttcattaaaaaaatattgcttcctgttggaagcgttgttatataaattagacaaaatattctcctttnttaacgtaaatgatctgatat

SEQ ID NO: 57070 - DNA, 393 bp, Glycine max
  unsure (1)..(393): unsure at all n locations
caatagacctccaatctttaatggagagggttaccactactggaaaacccgaatgcaaatttttattgaggcaatagatctaaatatttgggaagccatagaaatagggccttatatacccaccacagtagaaagagtttcaatagatggtagttcatcaagtgaaagcatcactatagaaaaacctatagatagatggtctgaagaggatagaaaacgagtacaatacaacttataagccaaaaacataataacatctgccctgtgaatggatgaatatctcanggtttcacattgtaagagtgctaaggaaatatgggacactcttagattaacacatgaaggaactacggatgttataagatctatgatacatgcactaactcatgagta

SEQ ID NO: 57071 - DNA, 434 bp, Glycine max
  unsure (1)..(434): unsure at all n locations
agccttcacctttggtcattctcatagttgttgcatgagaaaacatgctctatnttcatctcccactccaagtaggcctccagatcattctttcctttaaagggatgaatgttgggtttaataccatcaattcggttttgtctaggaacaccatcattccctcttctcctcctttcttcttcattatgatctctaatctccatttgatccaacctctcatggagcgcatcatctcattgtttcattaacctctccaaatgttgcatcaaagcttgcatttggaattgcgaaagccccactccatcattaggattagtacctaacatctcaaacaaacanatcaaacgtaacaagacaattatagttgctgtttgaatacctcacccactcaagtgtatcacacnaatatgggctttctctaatgaaaacactct

SEQ ID NO: 57072 - DNA, 341 bp, Glycine max
aaacgctgtctagccttcgttaaccattggatcttctcgaaatttgggttgcaacttcacaagacacttttccatcatctaaccgttgggatctttgaaaagatgtctggagtgtgctcgaagctttcgttcccgagagcatttcttatttaagcatttcagcctttgctttcgtgtagcttaagaaaaacgccatttcttctcctttctttcttccaaagtcatttctaacatcccaagaactttctccatcacccacagccaccattagccaccacaaactgccattattctccgttgagacccacaccgagaggaacccttcaaccgaagcggaatct

SEQ ID NO: 57073 - DNA, 374 bp, Glycine max
  unsure (1)..(374): unsure at all n locations
agcttgtccacaaaatattatttttaggattttaaggttcaatacctcagttnttctcacctagtataaagggatcattttaaggcccaatgccttaaaaggaccaccttccaagtaaaaagaatcgcatgattcacccttttgaaagaactacgtaggtctgatttcctcttcgatggagggtacgtaagagcaagagccccgcttttgtcgacctcaaaattaaaaaagaaataaaagcttagatacataatttcacacaattctaatctaaggctgttgtcctttgggacaaacgtgagacgagctaataccttccctcaacgtaaataccactcccaaatctggaatattcttcatgaaccgattccttt

SEQ ID NO: 57074 - DNA, 351 bp, Glycine max
  unsure (1)..(351): unsure at all n locations
agcttgtgaaggatgctttattggagganattaatgagggagagaaagagagaggcgggagcactaaattgaaggaaggataaaagggatacaagctgaactttgagttgtgtctcataagactctcattcatcaaagttacaacaagtattacacatgctgttatttatagactacgtagcttccttgagaagctttcttgagaaaacttccttgacaagctttcttgagaaaacttccttgagaagcttctttgagaaaacttccttgagaagctagagcttacctacacacacccatctaataactaagctcacctccttgagaagcttcctttagaagctagagctt

SEQ ID NO: 57075 - DNA, 389 bp, Glycine max
  unsure (1)..(389): unsure at all n locations
agcttgaatngngtaccattatcggtgacaatggcataagcaagaccgtatctgcatatgaactntctcacagtggccttgcttcaatccacttggtgaaatagtcaatggagaccaaaaagaacgtaacttgtcttgtgcttttggtgacggccctagtatgtccatcccctacatggcanaaggccaaggggaactaaagttatggaagttgtcgggtggtgttcatggaacttctggcatcgtaaataccttcttgttaagttaagggcgcctaccttaagtgtcggccaatagtagccatcatgcactanctttttttccagggagcgccccctcgtgtggaggccaaagaatccttcatgtaactctcccatgacataatctac

SEQ ID NO: 57076 - DNA, 297 bp, Glycine max
  unsure (1)..(297): unsure at all n locations
actattactcaatatcatcaccacaaaagacacaatattaaggtccattgatataagacttccattgtacaactcacagattgagatgtaccagatatacatgttcatgtggcactattatttgataattcatctattttagtaaaaggtgtaccattatgacaatgaattctaattnttatgagatagtgtgatacaaaaagcataaaatctttcattaatcccatcccaaattaatatattacaattcctctctgttccttgaaaaataccactagctctttcgagcttgtctat

SEQ ID NO: 57077 - DNA, 310 bp, Glycine max
atcctcttagtcacctgccgcatgcaagcttggcactcggatgctgcgatggatagtgggagtgatgctcttgcgaacattagatcgaaagtatatctgtctcccaagctttggtatttgagggttaatgtgataaaggcacaggaccatatgccaactgataagggtagataccctgaggtatttgtgaaggctattctggggaatcaggcctcgacgactagaatctctcaagtatgagtattaatccaatgtggaatgaggatttgatgtttgtggtggcagaacagtttaggagccgctgattttg

SEQ ID NO: 57078 - DNA, 114 bp, Glycine max
gaatttcaaagatcattcaagatgaatttcaaggatgaagaaagcaagatgtcaagcaaagcacagatcttaagataagaattaagatagactcttagaagaagtttgaaaagc

SEQ ID NO: 57079 - DNA, 494 bp, Glycine max
  unsure (1)..(494): unsure at all n locations
cacctgcggcatgcaagcttgagacacacaagtcgaacaagaggcacatgccagacatgtgccagcttctctccaaagggtccaggtacgagcgttacacacccataacaaccaatcgcaccatgattctcgaggaagcattcaacatgaaggtacccatctggttaccccatacgaatcctcccaggttggggtcaaatgcaacactgaaaactgttaggccctaaaagacaagataaaagaacttatacaagctgggtacttagcccaatttgttaagagaccaggcaacccccaagcaggagcgagacttgaaggacatccagaggagcataataggaaccaagaagcacacgaaagaagagtataagaacaaggcagaccaacacaataacaacaacggtgtaaatgataacctccaccgcaacaagaacccgcccaacacattagaggtgtaatcaacaccatcactggcggcttttnctatggaggac

SEQ ID NO: 57080 - DNA, 344 bp, Glycine max
  unsure (1)..(344): unsure at all n locations
gcatgcaatcttgtncaccgcagtctttgccttgattattatctaagaatgttattaatgaccatctccacaagcactggctttcaacctatgaaggttattaataccgtctgagtctgtgggttctactttatgtgatgtgcttattgcgcctcatacccacttgtgctatagtcctgtgtctattagcagatctatgagagccacatggcaatagaaatttgacctttcaccattaccaccataaactgacagttaaatcattcatattaatctgaagagctggcgatattaccagtctggctaaaacaattagcaatgagcttatcaagacacagatttga

SEQ ID NO: 57081 - DNA, 344 bp, Glycine max
atgggtcatggacacttgatgatttcttatgagttcatagaaatctttgggttctgtctatacagtcagtatagttggatttatcatatcttggttgcatgtaacaaagtgcatatttccattattttctaacacatgttaagtatgttttagatgattcttctatctgacagcagaggacctactcgattcacttcaccataagactacatttcaagtaaactaatataagcaatgctaaggtgtaatatcatgttatgtttatatgagaatagactgaagaccctgacttgatcatgtatgatgagcggggtgaacatttatctggttttctgttatattca

SEQ ID NO: 57082 - DNA, 219 bp, Glycine max
gattttcttacgatttcgttttaatgagtcaactgatccgctagattcgcttagacaactgtgggattgtttccaacggtcatatcttcaacggccatatttcctctgttgcttaatgtgacctgcgcctatatatcctctttcttcctttctaaaaaaaaacacgacagagcgtccgtcccgtcctcttctcccaaaattttctatttcttttattat

SEQ ID NO: 57083 - DNA, 340 bp, Glycine max
tcatcgacaccgaagccaatccaagagtaacacttcttctccctgcaatccagtgcccttattacacacatactatttctcatttacacattttatcaaacacttgcgtgaggaacgtaattttgtgcttacgaatccaacgaattaatagatgaaaaggacgttagcagtagtaagcagcaattcgatggcttgtcccgtatgttacgattccttgacatggaacggtgatcctggtttcttcgtgtgagttaatacaacaaacgattgtttctttcattatatgtatcatgacattggccacatattgttatgtgtatacactggttgctgtggatga

SEQ ID NO: 57084 - DNA, 353 bp, Glycine max
  unsure (1)..(353): unsure at all n locations
taagtataatgtaaaggaaattaatatacatgatattnttatttttcaatttttttactacaatcaaacatccgtacctcgtatcttagtgtttaattaaatgttgcacctttttcttttttcaagaataaaatggtatntttaaaaataaaaataactgaaaaagaaatgacaaatatattgaagattggcaataaccgaatggaccatactcgtgtactgggtcgntattaaataatattttgctaattttatcaaattcgtttttgaagttctattctcaaacaatattaatccgaatttttaacattatatttaattctctcanaatataaactcaacaaacgtatcat

SEQ ID NO: 57085 - DNA, 387 bp, Glycine max
  unsure (1)..(387): unsure at all n locations
acagctttctagaaacctactctggatacaactttattatattgtttcttccaggcgaggaganaacaatattcatcattgaagatgccaacatttactaaagggtcatgcctttcggactaagaaacatatgcgcgacataccaactactgatggactgagtcttcaaacaacaaatcatatgaaatgtcgaggtatatgtggacgacatatatttcaagtctaaagcatatcccaacatgtggcggacaaagaagaagtcttcggcgaactacaaaaatatgaatgcgccttaaccctaagatatgtactttctgagtaggcggagacaagtttcttggtttatgatcacccaccacgggattgatgctaaccccgacaaatgca

SEQ ID NO: 57086 - DNA, 358 bp, Glycine max
  unsure (1)..(358): unsure at all n locations
agctnggactcatgagtgttaagttgaggtttatgtggattggtccttctgttgttactaatgtttttacttatggtacaattgagatcaaaagcgactccacaaacaagagcttcaaggtcaatggacaccgacttaagccattcctcacaaacccttcttcagtggatgcagtggtggaagagactttcttactccaccctacgtttcctccaccatgacttagggagttcttcttttcctatctccttctttgcttttattacacttgtccgattctatttattggattaattgcctttaatcttttaattgtgctacattgaagacaatgtgttgattaagtatgggggggggg

SEQ ID NO: 57087 - DNA, 353 bp, Glycine max
  unsure (1)..(353): unsure at all n locations
ttttggtttcccgctctaatgtttcaaccgtagtcgtgttgatgtctctcagcacattacactttntcctgaccctagtgactgccatctttagcttctccttgaccactctngttcttttgagctctactntcaaagctngcacttcttcgctntcctcaagaactntagcttctttcccacttaagccttttagcttcaggaacaaagttatcccttgtgtcctagacctcaaccacttgtgatagccgccaatgatgccattgctacttcccctaagctccttatctttcctttccactgtattccacgctntacgaattctctgaagtatcctcatattggcttcactg

SEQ ID NO: 57088 - DNA, 324 bp, Glycine max
  unsure (1)..(324): unsure at all n locations
agctntctaaagttntctggtttccaaaccatgattacattattgtgctatatattnttcattctcttctctctttgccaaaaagaattcgccaaggactaactgtctgaattttttttgtatctctcttctcgcttttccaaaagaacaaaggactaaccacctgaattcttntgtgtctcctttctcccttgtcaaagaattcaaaacgacacagtctgagaattcttttgattcttccctttcccataaacaaaagatttcanaggactaaccgcctgagatantctttgttttcccttcacaaagtttcaaaggactaac

SEQ ID NO: 57089 - DNA, 344 bp, Glycine max
  unsure (1)..(344): unsure at all n locations
ctctttngaaaactagtcactntatttttatgacttttgaaaaactcttcaaaaacaagtcactttaagaattgtgactntcggtaatttatttttcgaaattagtcgctggtaatcgattaccatcataatgtaatcgattacacatcaacaaatgtgactcttcatgtttaaatttgaaaatcaaaacgtttagaaacactggtaatcgattacaagtattgtgtaatcgattacacaagnttgaaatgatttgaaaaagttttatcacaagttgtgactcttganattgaaatctaacatttaaaacattgtaatcgatacatgttatggtatcgatacag

SEQ ID NO: 57090 - DNA, 319 bp, Glycine max
agagaaggagaatggattaaagcctccattccactatctacgcgcgatgagtatttctccctccaaagacattaatttgcaaatctcaacggtgaaaacatgtgaaagtggcattcaaatcctgtgtcccaatttcatgaagatccaacggttaacagaacctggattgtagttttactaagatagttttgggtttctgcgggaagagaaaaagttacaatgcgaagggtatttctctcagcttcgacattgtttcgcaattttcaacggtgagaattcttggaaataagtttcaaacctggggctgaaatatcatgac

SEQ ID NO: 57091 - DNA, 374 bp, Glycine max
  unsure (1)..(374): unsure at all n locations
agcttcgtcctcanatccctcttgttggactattcttaatttagatagccctccaaggtttagactaacttaaactaagcttcgtcctcagatccctcttgttggactagattcagcttaaatagcttacgaaagtttagactaatttagcctaagctttgtcctcagatccctcttgttggactagacttagaccaaacaacattattgtaacaacatttttaaaacgaaaacttaatctgcagatccctcatttaagactaagtttcaatcctgcttcattcaagttctaaggcaacaatacatttcacaatgctaaagtcacctaaccatgcatacaaatggttgatcagaccaagagcataccaaaatta

SEQ ID NO: 57092 - DNA, 376 bp, Glycine max
gatctctaagcacctgggctgcagcttataatcatctcaattattttaattatttgttaatatataaaataatataattttttaaaatattctaataccacgagagctactactgtcacgtgatgacctcgttatccaactcgagagaccaagtataataatagctacaacaattgtaaaagtatatagattcctaaaactctataaaattcgggaacattctaataacacgggtgacatccttatctaaactcacagacaattcaaaagtttgatttatgtaaaaaaaatggtatcattgatcaattataatatcttaaccgtttagattattacgcaattattataagaataattacattgaggcgcatattat

SEQ ID NO: 57093 - DNA, 101 bp, Glycine max
tcattctaatatgtgaatgtgcatttgatgcatgaagaacgagagccacccccgtgacaacatagactcacaacctgtgataactgagacgatgagagcta

SEQ ID NO: 57094 - DNA, 338 bp, Glycine max
tcctttaggtgcaacttgctttattttattcttcagttcatcgatgggacatgttgaaggaagttgaaatttcttttggaatttttcctgtgaacgcgcatccaacaaatttgttctggggtggcatgttccatttcccgttgtaatacaagatcgcgtcatgagtacggggcatagtgcgttgaagtaagtttattactccacctggtgttcttccaacggtgcataataactcaatcagaccaacacgatgaaaatgatcattacacattaacattgtgttgacatcgtcatcatttatcaatttcatacactgaaagcgagattggtacctgtat

SEQ ID NO: 57095 - DNA, 264 bp, Glycine max
acgccttaaaatgatcacctttcatgttaaaagaatctcttgattcacgcttaagaaagaactacgtacgtttgatattctcatcgatggagggtacgtatgagcaaaagccccgcttgtgtcgacctctaaaaagaaaaagaatataaagtttaggtaatactatttccacaattgtacaaaatacgttgttgtcctatgagacaaacgtgagaggtgctaatacctttctcacacgtatatacaactcccgaacttagaatt

SEQ ID NO: 57096 - DNA, 331 bp, Glycine max
  unsure (1)..(331): unsure at all n locations
atatcaccacggnttaggccttcctaaatttctcttatccgcggactgcatacatatatgctgctcttcccttccctcatcgccgacttccaatcggccttcatctatcattcattgcaacaattcctccactgctaaacatgattccatgttatgtagctcaccgggatgcaacaaacaaaaatcctcttcatgcccaccgtggggaatcacacctcccttttgagggcctcaaagataaacctcctaggggtcgctacgtcctttaaaggcttagacctgcgtggtctatctgacacaatggcattaaccgctccccctccatgattag

SEQ ID NO: 57097 - DNA, 154 bp, Glycine max
  unsure (1)..(154): unsure at all n locations
acctgcggcatgcaagcttgaagaactntccaagaaagtcatcctatgatcttgaattttactcactttaaagtttattacagctaggctatgtaacaagagctactctttttccaacctggacttttaatccatataaaataatgagggtttt

SEQ ID NO: 57098 - DNA, 434 bp, Glycine max
agaagctagagcttagctacactctcctctctaatagttaagctcacctccttgagtatagaagctagagcttagctacacaccccctataatagctaagctcaaccttcttatgtacgtttaactcactaggcgtgtttaccacaagtttaggagttcaatattcacttaggatcaaaatatcaacaattcaatcaccaaaactgaaagtcacattagacaaaatcataaggaaacctaaaagttcaagagaaggttcacaatcaaaaactctctaagaattttgcatgaacatgttaaggacaaatgaacatgagagaattgactcacatcaactaataggctaaaataatttcatacactcatgaacaaatgagttatacaaagaaacaagaagaataaaattcagcacaacataagaaatcttatgtgac

SEQ ID NO: 57099 - DNA, 413 bp, Glycine max
  unsure (1)..(413): unsure at all n locations
taacttattacacttctcattggacgaccaatgggtaagaatataatcataccttagtaactcataaaaatagtaaatgcattttatccaattaaatgtcaatacttagatcaaaaattcagtaatcagtaaaagcagtatcctccaacattcaacagaatattaatttaatgtacaatgcattgttaactacttttcaactttgacaggcagctgagcacccaatgaaattgaatcgtgtgtcaagattactgcagtctgcaatcatgcaggggacaagtagagaactgcttcaaatcaaaataataaaccattaattgggaagctagaaagagtcgtacagaagcagttaaaagtagtacaagaagtcattgttctagccatagttgtgagtntctgtataatactataac

SEQ ID NO: 57100 - DNA, 260 bp, Glycine max
ttttcccttgatatggaaaatcttaaaaaacaccttttgtgctctgattgcagtgattctgtttgatggcgagatcgtggagctcataacatgggaacctgcgagaaatagatttgtacagtaaattggctttgaacttggcgactcagcaatagtctgaatttctgaaaatctgcttgtgaattatttattgtggagtgggacaaaatggtttttgaaatcagtactgttggttcaaaattgcaaacgttatccacctc

SEQ ID NO: 57101 - DNA, 444 bp, Glycine max
  unsure (1)..(444): unsure at all n locations
agctntactatacagagaatatccaaggaatttaccttcatctgacttagcatcaaattttcctaagttatcttttccattattcaatacaaaacatttacaaccaaagatatgaagatgtgagatgtttggttntctgccattgaacaatccatatggagttttcttcaaaatgggtcttattaaagccctatataaaatgtagcatgcaatgttaacggcttcagcccaaaagtattttggaagaggagtatcatttaataaagttctagcaatctcttccaaagatctatttttcctttcaacaacaccattttgttgaggggttcttggtgcagaaaaattatgctcaatcccatgcttatcacaaaataattcanattctttattntcaaactcacccncatgatcactcctaatagatataatcttgagattttctta

SEQ ID NO: 57102 - DNA, 351 bp, Glycine max
  unsure (1)..(351): unsure at all n locations
aattttgtgcctcacatgaagtctgaactttgaagtgtaattctcaaatgatcaaagttgataaaatccacacacatagcctctatttatagcataagtgtcacacaaaattagagggaaatttgaatttctattcagatttcacttgaatttgtggagtcaaaatttcactaattatgattagtgaattntagcaatggttcagtccactaatccaagatcaagtgcaagatttctccactaagtgtgcttaggtgtcatgaggcacgtaaaacatgaaagacatgcacaaagtgtggctatatgatgtggcaatggagtgtagcaagaaaatgttcacattcccctcta

SEQ ID NO: 57103 - DNA, 191 bp, Glycine max
  unsure (1)..(191): unsure at all n locations
aggctcgttatcaatttttatgattgacgcattatcatcgattattgccatcatccgctacatacctcattaagcgcatcaccagcgctaaggcatcantactgctcaaaatataccctcgactgtcctcatacagtctgtggtacattcactttagcagcctcaaacttcaacagtctatatccgctcct

SEQ ID NO: 57104 - DNA, 382 bp, Glycine max
  unsure (1)..(382): unsure at all n locations
agcttgtggatcaagttgttccgcangttacttactaatcaacttgatccgtaacaagcttgtggatcaacttgatccgcangangcttgcgtctgttttttatatagggggatcttattttatttttgaatatgaataacataagatttgcacgaattcaaacatagaatcattccaaacatagaaataacattacattaacttcagcagagtcgaaagatatagaattagcatccaatacgacaactatgtgatgcttattttgtgacaaggacatattatcttccatttcgatgacatgcttactagaaacaggtaaaatttctattggcccaaatcttntccagtagttagaatacactaacacactcaacacatcat

SEQ ID NO: 57105 - DNA, 464 bp, Glycine max
  unsure (1)..(464): unsure at all n locations
ggattacccctgatnacggacctatgaaactcagttactcgctgaatnacggacacttagaaactaagcttgttctttaagtactcaaaccgtntaaggacaacttttnatacgcctcttactttatcggtaacattgaccttcaaagctaaaatatcatattatttatcactttgcagaactacgaggtctgagttctcacccacattgggatacatatgagaaaagctcacttttgtcaccaccctttcancaaaccaaagatcgttatggtcaatgcctgaacgtttttactttcaaaaccagagatcgtaatggccaatgcttaacagtcttctttaaaacaagaatcgtaatggtcaacccttacgctctctncttcaaattacaatattaatggccaacgcttaatgactttgtcattagatatatttgcaaaaagaaaaacactaacacgttatttg

SEQ ID NO: 57106 - DNA, 182 bp, Glycine max
cttgcacacaattctgtgtcctttccattggtgatgatcatggaaggcgaaacacttcatcaatccaacaatcgattccaagcaaggctgaatatgagttctagcttaaaatttctaggttttatgaatggtcatctttctcttcaatcctattttctattttcatgagtatgagaatgctt

SEQ ID NO: 57107 - DNA, 431 bp, Glycine max
  unsure (1)..(431): unsure at all n locations
agcttatgcacnagaaatgtatttatgaaatttatatgcccgaagaaacaccattttctagttaaccatgcattaggtaccatgttcaattattttgttntgatggtgtgtgtgtttttttttttttttagaaatgggtttgtgatcccaacatggttggctcatggtgcctaacacatgcaactaagaatgtagtgtgaagtttcacgcttcccctttttttgttgttgcagaggaaaacacaaggatgagcaaacatgaaaacaaatggtatgcaattntgcagatcaaaaagtttgttgaacgcatatgcatgatgatgccatgactcatgcnaaatgtgaggctggaatatgataacggacaaatgcaggaacgatattgtcattatgatgtattaagagatgcttatgcgatgcatgatatgaatg

SEQ ID NO: 57108 - DNA, 454 bp, Glycine max
  unsure (1)..(454): unsure at all n locations
agcttatcatacatcaaacttggagaaagagttctttgggtcaagacatgagaagcaatcaagtataatgttacttccttcactaaagcggtgatccatctccacacatattttatcaatagcaacataaaaaatctttgcacggtaatgatgaagattagtgatagtcctcccttctgctcttgaacgatcccgaaccggtatttcgtcattcatatttggtaccggaatacttttagctacacaaaatccttggacatcggcaaaaaaattattccagccactctctctcattgtgcccaaccgagctttgacaacatcaactaattccatggcattcacaatattaagatcttttctttgcaatacaattgagagctcgtgtgtgatacccaaccacttttacattaacctcanaatataagcacatttagagctctccattntttctatc

SEQ ID NO: 57109 - DNA, 438 bp, Glycine max
  unsure (1)..(438): unsure at all n locations
agcttgcatgctattggatttgtatccggctttgtaagataaacaaagtgaaaatttcacatgacagtttcaaaaaatattacagcaagaatataaactcaattaaaattaaacagataaaaaaggtaaaacatttgaaattctaaaataaaactagaaaccagttgttcacacaaaatgatacacaattaacagcaatcaaaatttggaatttgtttaagtccacttctggaccttgaactccaaggcccatgagttaagacgtcgatatttacatataattcccttccatcaggtaattctatagttntaaaccaacaatttagcaaaaaactcaaaactgaggtagttgagaagagataaaaagaaaactatatttctcttttggtcatactntataattcatacaacaaccttatatagtattttaaaaacatt

SEQ ID NO: 57110 - DNA, 272 bp, Glycine max
  unsure (1)..(272): unsure at all n locations
atgatgttattatggatggtaaaacgggcaggcccaagtgggttggcccaccattgatcaatatggtaggacgaggtggataactcaacctgtcctgacctatcccgcttaaccaacccactcgttgggggagatttatatgcgatgtggggttggcccaccaacccatcatatttatttgnttttaataatacttatactttatattntataatatatgagaagtgaattaaaaaaaaaagtttgggtttgggtttgacttctcctctcat

SEQ ID NO: 57111 - DNA, 131 bp, Glycine max
  unsure (1)..(131): unsure at all n locations
cacatanaagttttgtgtaatcgattacacttatttggtaatcgattactattgactgtttctgataaatcaaaatatgtaactcttcaaaaggttttttgactatttcaaatttgtctataacttcttct

SEQ ID NO: 57112 - DNA, 342 bp, Glycine max
ttacctttttacccttaaattccccaactggcttaggactttttggtaaaatcaactcacccctcaaccccatgtgctaattgaacccgttcccccacccgcattcactcttattttattttccaagtgctaagggtatgttagaagcccctaggtgagttctaccttcatttttcttttggtgaataccctaattgatcctcacaagtatgaagcgttgtcactttgatcaataaaaatacactacaagaatagtgccgatttctggcagactataactaacggatctaaatctgttggaaatgttaaaattaccaacacattttcaatggatatatgttt

SEQ ID NO: 57113 - DNA, 189 bp, Glycine max
  unsure (1)..(189): unsure at all n locations
agcttgagatgacgaagtgtagaagggtgattcttcctgcttttattcgctgtatcacagagnnggacctggagatatgtcgcggtggtcaggagaccttgtggacgtcaggtggggtgctattgcccaaaaccaagcttgaccaatcccgacccaacccgggcatagtcagtcagtgagaacctgtga

SEQ ID NO: 57114 - DNA, 181 bp, Glycine max
atgagcaaacatgaaaacaaatggtatgcaattttgcagatcaaaaagtttgttgaacgcatatgcatgatgatgccatgactcatgcaaaatgtgaggccggaatatgataacggacaaatgcaggatatgtccattatgatgttatgaagagatgcttatgcgatgcatgatatgaatg

SEQ ID NO: 57115 - DNA, 350 bp, Glycine max
  unsure (1)..(350): unsure at all n locations
tcacaaatctggacctgtcgcaagtgtttgtggtttgtgctcctctgctgaccaccatacagacctttgcccttccatgcagcaacctggagcaattgagcagcctgaagcttatgctgcaaatatttacaatagacctcctcaacctcagcagcanaatcaaccacagtagagcaattatgacctttccagcaacagatacaaccctggatggaggaatcaccctaacctcagatggtccagccctcagcaacaacaacagcagcctgctgcttccttccaaaatgctgctggcccaagcagaccatacattcctccaccaatccaacaacagcaacaaccccagaaac

SEQ ID NO: 57116 - DNA, 358 bp, Glycine max
agcttgatctggatggtcacttttctaagcatatattttctcttacatccaaatccagtacttgtagtgtttcataaaaaagtcacatgtttagatgaaaaataacacattttgaagggctattaaatggactaacaagaattagatctaacaaaaaaaagtgcaaaattagatataataagaattatttcaacagtgagttgtaaaaacttctcatcactatgaaatatatatgatgtaaaggagctgctcactccacataccttgcccaaaaagcatattccttgggaatcctttctatccttatttggtagatcacaatttgtggcattgcggacttcatactgcagatgatgtg

SEQ ID NO: 57117 - DNA, 466 bp, Glycine max
  unsure (1)..(466): unsure at all n locations
agcttcaattggtttgcgtcttctacctttgttttatgttatgactnttcgtangacaaaagctntaaattttttgggtgttctgcctttgtctaatgattcaatatattttttggcatgttgattntttttattaatcgctattgtatgtagagaaggtggaaaaacacactaaagctgcgatttttatctcaaaaactccatgagtacaagttcgtaaacacaaaagctaaaactttnttgggtgttctgcctttattttgttttctgacttctcgctatgcaaaagtttaaatttttttgtgttcctgagccttctccaacatgcttattgtttcctatacccatctttntgtgttttcgtccttttttggtggtctaatggttcaatatattttttggcatgttgattttntttatgaatgcagagaaggcggaagaacacactatagctactaattttatc

SEQ ID NO: 57118 - DNA, 379 bp, Glycine max
  unsure (1)..(379): unsure at all n locations
agcttaacctaacanagttagtaactgactttttcttctctatcttcacgaaacttcgagccgagaagttggagcgatgaagtcgaagaggtgaaggagcttcaatggaagaaggggtaggagcttcaatggaagaacaggtgaaggagcttcaatggaagaaggggtagggcttcaatgtcaaagaaagcgagggttcacacgaaggaggagatgtgttgggttacaagtgtgaggtgaagtctcacatcgggtagaagtaaaaaggttgggcaccatataagtgaggagaagacccataaacctgagccttaagggtttgaattaaagtgtggtgcaggtcttcttatgtggtgactcgcggtccacaggtgtaccc

SEQ ID NO: 57119 - DNA, 210 bp, Glycine max
  unsure (1)..(210): unsure at all n locations
attgcaatggaactaacgaggtgaaccatatgacagntatagattaacattaatgcatcagtgagcaatttttgaaaattactgtaaatacttttaaaattttaactcagtcctccaaatttaaacgaatataagatatctgaggtcctatgagaccttcatatgccccaactgatattcaaagccggacggcttgcttctgtctgatcg

SEQ ID NO: 57120 - DNA, 380 bp, Glycine max
  unsure (1)..(380): unsure at all n locations
ctgcagctgatttggagttgttttagccttattttcacttggttattaatcaactcattcaaggaatcttctaaagaaaaatgtccgatttgatttttttgattattttatttaaagatattttgattattttattattattttttcaagatattttgattattttattattatttttacttntttttatttaactgagtntacagcgtgaacgatcggttggattttatttaaacagtgattaaatgagattacaacacaaatgatcggttgaaattaattttgtcatttattaggtgagataacgacttatataaacggtaaaaagctcgttaaaagcggaagaaaagaaaatcataagtgaacgagatgaagataaa

SEQ ID NO: 57121 - DNA, 382 bp, Glycine max
  unsure (1)..(382): unsure at all n locations
agcttccttntagtgcgtctacgtttaaactgatctcgatggtggtgcgagcctttgatggtactcggcaggaagtgatgggggaaatcaacattcccattcagataggcccccacacttgcaatgtggtgtttcaagtaatggatataaatcccgcctatagctgcctcttgggaagaccttggattcatgccttgggagtggtcccttcaacgcttcaccagaaattgaagttcgcagtggatggacttttagtgatagtgtcgggtgaagaggatatgttagtgagctgcccctcctccgccccatacgtagaagtggcggaagaatcattggaaacgactttccaatccttcgaggtggtgagctgcgcctctatgga

SEQ ID NO: 57122 - DNA, 303 bp, Glycine max
aaaactagctcttatctgctacagggggaactcctcttttggtattcctagggataccctcactacctttctttttgcttccgtgcatcccatggggaaataccattaaggacctcatgagctaaagatcagactcatagagcccccaagcaacttcatcataaggatctcgtatgtatcagactcgcgctctgatgacaagggcaaaagaaacgtagtctctcgtgtaacggctcactagctttggtgacaaatggcaatacgacgtagacttgcggtcaacgctccttatcttgttgaaaa

SEQ ID NO: 57123 - DNA, 458 bp, Glycine max
  unsure (1)..(458): unsure at all n locations
ctgcagctgaccttttaccacgactacaaattttgtgcggttataattgcagcactcagttggcatttacaaacacatgccatattcattgccctgctgagaaccaaagtgcgtgcgttgcaaatgattctgtagcagtagtacagagccgccaagtttatttntttgaagcatatcagaatttatggttgcatgacacggtaaatttgattattaacttcatcctanaacaaaccattgcacaatttttttaatgaaatttatggaaaaatcacactatataaatttatcacattttaaagtattntatttatttattgtgtgatagctaattnttttttctccccatatactcacattctatntttgcaccccanattctcattctccgatctcttaaataagccccgtggcatgttccacccaccataagaattggacaaactccgaagcttagt

SEQ ID NO: 57124 - DNA, 411 bp, Glycine max
  unsure (1)..(411): unsure at all n locations
agtgcgggtctgggagacgaaagtcaagtgtttgcgatatgttatgatgatgttccaagtacttcggatttggtccgaccatgctctcctgatttccagctgggaaattggcgagtggaggaacgccccggcatttacgcaacaagcataatgtaaacctttacggttntaaaagctctatagntgggactaagctttagagttttcattttgtaaggctttgggtcctttgtctttgaatttataatacgacgatctttcttcatctggtcgtgggctctacccattctcattcatttgcatgtatacttctattctgaaacggcagattcgatggcgagttcctcgaaggtactaatacctgggacccgtctatctacttcgagcaagaaatgaaccatactgaagatg

SEQ ID NO: 57125 - DNA, 338 bp, Glycine max
tgcttgtggagcttctatggaggctggatctttgagcttcaatgaggtcctttaatggtggttttccaccatggagatgcagcagaagacaaaggagaataggtgagaagaggcgccatccactagggaataagccatggaagaaggagcttcaccaccaagatgagtcttggataacaagcttggagaggatgcttcaatggaggaaaagaaagagggagaaaaagagagaggggggagcacgaaattgaaggaagaaaaaaaaagggagagaagttgaactttgagttatgtctcacaagactctcattcatcaaagctaaaacaagtgttacaca

SEQ ID NO: 57126 - DNA, 330 bp, Glycine max
actcgcgcgaagcgcgagggtggcgctaaacgcaatttttctggttcagagcctattaaaagctattcgatgcgcaattacggtaagaatccacagaatcaccatcacacatagaagtcatagcccaccacagcgcctatttatggataagagctctggacgcaccaagaggagcaacttttgcagagatacctaggttgtgtaattacagagacattatggacgttgacagtgatagtgaaatgctgacaaaaggaagagggactccccttcttggcgctggagcaatattatctacatcataatctcattattgttatgggttttttg

SEQ ID NO: 57127 - DNA, 297 bp, Glycine max
atgcaacaattgttagccgtggctatacgagacatcttgccaaacaaagtcaggttcacgataactcgcctgtgctttttcttccatgctatatgtagcaaagagactgatccagtaatgttagatgagtgggaaaatgaggccacaattatactgtgccagttggagatgtattttccccctgctttctttgacatcatgattcatttgattgtgcatctggtcagaaaaatcaaatgttgaggtcctgtttatctaccgtggatgtacccggttgagcgatacatgaagatctta

SEQ ID NO: 57128 - DNA, 432 bp, Glycine max
  unsure (1)..(432): unsure at all n locations
gccgatcgatcatttccaatctttattatccactaattattcangtattgaatagaataaacaatggccggtgtcggtcgctatatggccccgactgatatccttcaaccgacattgcgcaatttcttttagaanagctggccgataatggtttcttacggtagaggatgttttttggtgttgggttccctaanaaatatacgatgtacgtcggctaggttcttccctgcgagctcaacccaggttgtgtttcggacgacactggcatgttctcatttattangccaagatagcgtaacccaccccggcacaaaatacatcataacggaattgatcataaacatatacggacgtggcgtgagagatgacgatcagatctaaaaggaacatcccggtgacccgatcaacattctaatgaatctgcaatctatc

SEQ ID NO: 57129 - DNA, 336 bp, Glycine max
tcatccatagatccctcatgtaagactatgcctaaactaaacagcattattgtaacaacatacttaaaaccaaaacttaacccgcagatccctcatttaagattatgtttcgatcctgcttcaatcaagttctaaggcaacagtacattttccaatgctaaagtcacctaattgtgcacacaaatgggtgatcagaccaaaagtatacaaacatcaagcattgaacacagaaaacacaatcaattagatattatgtatttacatcagttgttcattagaaatccccaactagggtgtttagccagccattacaaagaaaccctaacaataaatgag

SEQ ID NO: 57130 - DNA, 357 bp, Glycine max
  unsure (1)..(357): unsure at all n locations
ttttctcccctttggaacatttttagccaaagaactcggaaatcaacacagntataacaatggagtagcaagatataagtatcagagtattaaatccaataagcccaactcataatcaagaaaattatccaaccagaattcanataacataaaatgtccacaatcacaaaatatccaagacccgaacacaagaaannataagcaagtacttagcataataatgtanattctaagaaactaannagccaaatacacgggcttataaagataaataagcagaatctanaatctaagaagacggaggaggtggtggaagatcanaactctgacgaatgtatccgacatcctcttcaagct

SEQ ID NO: 57131 - DNA, 333 bp, Glycine max
tcatggtagttcttaatatctggtctgttcttgagacggaacctgcgctccttcctgcaactcgtacaatgtaggaactcatccctgtgaaagtttcgtttcctcattgcagtgtctttccagttagccacatttgcctggtgtgtgtaatatttcgtcagaggtgtcttccagagtggaactctatcttcatcttcacaatgaacccagatgttgctcttccaccttccagtcccttctttcaaagcatgcttctcaaacgcttctggagtcacattcactgatccaaataataattgtaaaactaaattagtgtaataagattatctatta

SEQ ID NO: 57132 - DNA, 361 bp, Glycine max
  unsure (1)..(361): unsure at all n locations
gctcactgttgcacgggctatcacttatggttatttttatgcatgtgactgaacttgagccaatttatatgaaataaaataaatgcattctcagggtttcgttctgctgaatgctacaagctatgcaaaacttttttgctgctatagtctattctgcaaatactagttttgattctctgctggagtcactactagcctgtgctaagccttctccacagtctggtggcattgctaaacaagctttgcattcaatagctcagtgtgttgctgttctatgccttgctgctggtgatcagaagtgttcatctactgtgaaaatgcttactgacattctcaacgatgacagcagntctaactcagt

SEQ ID NO: 57133 - DNA, 336 bp, Glycine max
tctacttatgtggcagggcgggctttcttcactttcttgtctcccacgcgagctttgaccactgctcttccttcccgcgatgcttcttttcatgtccgcctgagtgggcttatagcctaaaccatacttcccacgatttccttgggcatttatcaagctagttatgccgccgttgtctttgcctaaacccattccgggttcataaccgttccccaacataactcgggccatcattactgctgcatcggacagacaaggctgcccagagaaggagtccacggaggaaatgctgaccacctcaaaagactggaaagtggtttctaacgattcttttgc

SEQ ID NO: 57134 - DNA, 422 bp, Glycine max
  unsure (1)..(422): unsure at all n locations
gataacgagtctactatcattgttatcatctccctttccgtcattgaaggtgccacttgggctgccagatcctattctttgaaagatctgtgccgacttttacccatgttttgtagctgcatccaatctagggccatatcagaattatactgatactgcctaacgaacgcaaccattangtccttccaagaatggactcgggaaggttccagattagtataccacgtgacggctgccccagtaagactttcctggaagaaatgcatcaacaatgtttcatctttcgcgcacgcccncatcttccaacagtacatnttcaagtgattcttggggcacgtagtccccttgtacttatcgaaatttggtgtcttanacttcggaggaatgaccatgttgngtactangaacaactcttctatgtc

SEQ ID NO: 57135 - DNA, 346 bp, Glycine max
gacctattaaactcagcttattgcttggaaccaaccttatttataccctgatttttgaatttatctcacaagaataccatcaatgacaatgaagtattgtgtgtgggatgtgttttgactgtaaatatacttggcacttgttctttgaatgcaatttttttctctagagtttggtgcggttactttagctggtggggtattcattttgcacaatataatgactctccttcgaacttctcacaattcgtgggtttgccaagttgcaatgattaaaatgagttaccgtgataacaatttggtttgtagtgttttgggcaaaatggaggactcgtagttttcttgtttt

SEQ ID NO: 57136 - DNA, 450 bp, Glycine max
  unsure (1)..(450): unsure at all n locations
gcttgtgcaaatcanatcactcctacatctcatctctatcatgcattntctttctttacccactcctcancgttggttntttagggaaaacactataactaaacgcgccgcaagggatccctatcgcaccagatccaaatctanaacgatgggtgatcaagaggagacacaggaacagatganagccgacatgtcggctctgaaagaacaaatggcctccatgatggaggccatgttaggtatgaagtanctcatanagaagaacgcggccaccgccgccgctgtcagttcggctgccgaagcagacccgactcccttggaactacgcaccatcctccctcatacatagtaggacggggaagggacgcactgngacacgatggcaaccctcacctgngatacaaccgagcggctacccttatggattgccgccaactatcaccacccgtc

SEQ ID NO: 57137 - DNA, 308 bp, Glycine max
taccaacatcagacaccatggattatattttgtgagaacgaaaaaaggggtggagggagactgacacatagagaccgatgctttgagccggaaatgaagtctgagcttggacctgtaattctcaaatgatccatgttgattgattactggcacatagcctttctttataacataagcgtcacacaaaaatacagggagaggagaatatctattcaaactgcacatgattctgtggtgtgaacatttcgctttttatgaataaagaattataaccatggttcaatccactaaaacaagaccaagtgcca

SEQ ID NO: 57138 - DNA, 421 bp, Glycine max
  unsure (1)..(421): unsure at all n locations
gcatattggactggatattgtacaagtatgccagctttgaagggctatgtgagattcatgagtgcttactatcacgcagaatcttgacctctcttacattatgaagtaattcgctatgtgcttgtgggctctcataactcatatttcgctgagtgggctacatttagtgcttttcttctattgacatttacgcagcacgacgattgtaatatattaaagggaggaatgatacacgaccaagtactgatgcgtgagctgatgctntagcaatagctcaacaccatgatgcagttagtggcacagaaaggcaacatgttgcttctgattatgcactgctactctcaatgggatatgaagaggtataaataataacttctgttccgtatagtatcgtaacatcacttattcgctacacttctat

SEQ ID NO: 57139 - DNA, 322 bp, Glycine max
  unsure (1)..(322): unsure at all n locations
cttaaggttgagaaatgagtttttgttagggagaaaacaggacacaaaatttatgcctcaaatgaggtctgaactttgaagtgtaatttcaaaaatgattaaagttgaaaaaaatgcatacccaaggcctctatttatagcctaagtgtcacacaaaattgaagggaaatttgaaattttggctccacaaattcaaattcaaattcaaaatnncagtgaaatttgaataaaaattcaaatttcactaattatgattagtgaattttagctatggttcagcccactaatccaagatcaagtccaagattctccacttgtgctt

SEQ ID NO: 57140 - DNA, 519 bp, Glycine max
  unsure (1)..(519): unsure at all n locations
atcctcttagtcacctgccgcatgcaagcntcacgtgaatgggttttattttgggtgggaaatttatatagtgtcttaagaggagggacgttaatgtggaacttgagctgctgcaactggattggtgatcaacatgctccatataatcgaatgcttgatactttaacggtatttgaagtgagcactatctctgtctactttattagttggtctgtgactctgttccattataattcatagtgatctaatgtacaagcggatgttgtatggttatgtgtacaaaccttcttagttgtattggaaatatggaatcttaatattgattatttgaatagttacatgtgaagaagtataacattggcatggattagcgaggaatcacgacatatgattcttattaagagagtagaatctaacacaaagggaagaagacacactgatggagtcttacatcgctcattacttngctaaaatacacatgatttgattgattgctacacgctatacattataattttg

SEQ ID NO: 57141 - DNA, 258 bp, Glycine max
tgccacccagcttacccaggctttttctactcgcccaggcgaactaggttgcttcaccgccttctggaaaacctcctggaaggcccaaaatggtctaggtgctatttgcacccccttttttactaaaaacaccccttgcctttttttgctgattctttttccgtaacggtaccgaaacttaccaattacctaaccatacttgtttccctttcttaatgttacggaaccttacagattaacgtaatctccctttttttg

SEQ ID NO: 57142 - DNA, 386 bp, Glycine max
  unsure (1)..(386): unsure at all n locations
agcttctcgatatattatgcacatgaatcggacctccgtgtgacaagttatggccattngaattnttcgagagcttccgctgctcaatntcgagcgtctcgatatattatactcctgaatcggacctccgagtgaaaagttaagaccatttgaatttctcgagagcttccgttgttcaattttgagcgtctcgatatattatgcgcctgagtctgacctccgagtgagaagttatgaacatttgaatttctcgagagcttccgttgctcaatntcgagcgtctcgatatattatactcctgaatcggacctccgagtgaatagntatgaccatttgaatttctcgagagctttcgttgttcaatatcgagcgtctctatatgtgat

SEQ ID NO: 57143 - DNA, 306 bp, Glycine max
gttttgatagatctttagtattctccaaggatgcaatagtagcctcaaatctttcagggacagtcaccagtattttctcaactattcttaagtaaaaaaaaattagaaccaagcaatcttactttgttagcaatgctaagaagcttgttagcatgctctttaattgtttcagactccttcattttctgcatctcaaattctctaaccagatttagggcttgcattcctttaatccattcatctccttcgcattcattctggaggaaactccatattttatatgttgatttggtggtcatgattcta

SEQ ID NO: 57144 - DNA, 332 bp, Glycine max
  unsure (1)..(332): unsure at all n locations
cctggagatatgtcgcggaggtcacgacacctctgggacgtcaggtgaggtgctattgcccaaaactcaacttgaccgatcacgacccgaccacggcatagtctgacaaagagaacctgtgatgtacctaagcacgcgagctccttgcagtcggccgcttgaaggaaaacacataccacatagcaatgacgcttgtggcggctgaccatctgtgaatttgtgtgatatgtggagcatactctcttggaatcgactaccatgggtgggaaganattacaaggcttaataatgaagacaggacgctatgatggtctctggtaatcgattaccac

SEQ ID NO: 57145 - DNA, 261 bp, Glycine max
tgctacaggttctagggaacattacactgcgatgggctataaaatccgcatacattgtgagcagcattctgaaagatgcttctgtgcctgatgctgagaaagatgtttcaacatattccaccccaagtgataccgtgcctgatgctgagaaagatgttccaacatcctgcgctccgaatgctgaagccctcccttcacccagtgaagaggaatcttcagaagaagaggatcaagccttataggagactcctgctccacggg

SEQ ID NO: 57146 - DNA, 407 bp, Glycine max
  unsure (1)..(407): unsure at all n locations
nagctctgtgaagcttttgtntagcttttactcgattttactcaaccattcgaagttgaatgtgatgctagtggagttggcatttgggctgtnttgatacaaaacaaaaggcctattacttatttcttggagaaattgggaggagccagattgaactatagcacctatgacaaagaggtctatgccattgtgagagctcttgatcattggaatcattatttgcgtgctaatcactttatattgcattcagatcatgagtcattgaagtatataatgggcagcagaagttgagtccaaggcatgctaaatgggttgaatctcttcaatctcttaatgtctctctcaaatacacggatgggaagagtaatgtggtggctgatgcactatcaaggaggtatgctttaatt

SEQ ID NO: 57147 - DNA, 538 bp, Glycine max
  unsure (1)..(538): unsure at all n locations
agctataagtgtacaataacttagaagaaatggaatatggatggtgtttgttcgataaatatcttgttgaagcanatcgagatagatcttaatgagctaggtattattgatgagagccatggtcttagtgaagatgatttaaagaagtgactaanattacaataagaattttggagagttgctaattataatgaatctcttttatgccanaagtcaagagatagatggctaaaggagggtcattgcaacactaaattttttcattccatcatcaattgaaaaagaaagaacaacttgataaagggcttgcttgtggaggagacttgtgttgaggagcctacaatggtcaaggaggaggtaaanaaatgagaatattttgagganaatgctangtggagaccgaagcttgatggtgtngaattcanacacatatcaagaaaggatnaattgatgcttattttggatttanagttgaagaagtgaaagaagaaatatgggattgtggaaagtcatgacccngatggatctacctttcttt

SEQ ID NO: 57148 - DNA, 332 bp, Glycine max
  unsure (1)..(332): unsure at all n locations
ttacacctttcttttgtaagcatgttttattatagccatgngaacccttctaatgacatttgattccatatagtactacctacggtttaagtgtccattaaattacggcaggttttcgtagtccttacatgttaccaactatggaatttatgcccgaattaccaagaaagaacccctcccttgctaaaaatcattgcattggaaacagatttcttctcattttcgatgtgaaagcataatgtgaaatggaacaaatacccacaattattagtgcaagctgggaacttttgcttaataaacgccctcaatttattctattattgatcctatta

SEQ ID NO: 57149 - DNA, 440 bp, Glycine max
  unsure (1)..(440): unsure at all n locations
gattaattaactctaagcgctcagtgtatgtggggttcgcttgcttcgattaatacaagtagcaaaacgagatcaatatgcggttacgacaattatacaagtattatctctctatgaacacgggtgtatctgtaagaccgtgacgtgcatcactactccgatgattgccacttttgctggctttagctcccttgtctgccatgtatagcctataagaagaatatgaggaatttgaaacaaagaaaaatcactacgtgaatttaatatttacggaactaatatttagactgacttattaattagaattagcaaccgtgaaatatatgaagctgcaagtttgactcctgttacagtattacgatggcgaaataaagagatctccatcgcataagctgctgcagtngacatcatgtattgcgtgcgatatgctgatagtcttc

SEQ ID NO: 57150 - DNA, 324 bp, Glycine max
ttctcaagaggcttgtttgagaagttatttctttaactactaacaccattttgataactaaactcacctccttgaaaataattactgataaaataacacaacaaataatcaaacatcaaacataattactaaatatatatacgatatatatatcagggtgttacagccgtaccttgtgacggacgcgtggggtactaataccttccttggacgtaaaaacaactcccaaacctttcacacttaaagtttgtaaaccacaccttttctgggttttctagcgttttcctcaaaaaaacggtggtggcgaatccacacatttttttt

SEQ ID NO: 57151 - DNA, 353 bp, Glycine max
  unsure (1)..(353): unsure at all n locations
agcatgatggattaagaaatatctgtatatgcattagctggtatgttagaaagacccaacacttctacctaatactgntaattttacttgcattattgtactgtttttagcctacacttagtttaatcatgtgttanatcatcaattttcaatgttacattcaacaatgccttatatatgaatttaacctctgcttacactaattccctgagntcgatactcagaatcatccgtcttaatttaaaaacatgacaatccagtgcgctatctgaaaaccggatttctcttgacatatttgcataaagagaaagtggaccatatagtaactgcaggggaaatcaacanagtattat

SEQ ID NO: 57152 - DNA, 290 bp, Glycine max
tgaagctgaaggaaaagtttgaagattttttataagatattttggcttttacatgtccaactcctttgagtggcatttgtattggttgttaacttgattgttgcatcttagtacatttgatatttgttttgcattgtgcatcatcatagtgtaagtgaagaaaatgttctaagttagaaaattttctttaaaggcaaaactctctattttaatcgattacaaaagtgccataatcgattacaacacattgtctgaagcttaaagagttaagtctcatatcgctttaatta

SEQ ID NO: 57153 - DNA, 391 bp, Glycine max
  unsure (1)..(391): unsure at all n locations
ctgcagctgcgggcctttattgatctggcctctcttctacttatcctttgtctctacttccaccatcatatatttcttcattctattggtcctagaaaaatagccatcttgtcgatggttccctaactttgataggaatcattgcaaccatgttgtatgtaagggtggttgactactggcaagtgtaccaatttgtcgccgtaagttacatatttattaagaggagatcatctccacatacacttgagttacttaattcattcngataanagctatcagtttaataagtatgtaccaaattaatngaaatatcatgggcttgtctaactaaagaaagataactanagtaacaaaatagcgcacataacataaattacaaaaattatggaat

SEQ ID NO: 57154 - DNA, 204 bp, Glycine max
ttagcctgatcgctaagcgacaacttattcttggctaagcatgacctattatcgtcaagcgcaattccttacaaccataactgtggtcaatgaagctaagtgccagtcatggtatctaaacgagattcattgtggcaatgtgcgcgctaagcatgtcctcatcaactaagcgcatactcctctatacttaagaagcatcatttt

SEQ ID NO: 57155 - DNA, 310 bp, Glycine max
  unsure (1)..(310): unsure at all n locations
actcggatgtctnactgttgtaccgaatttattgagacgctcgaanatgattaccgaagccctgagcatattcaaacgacaatcactgtcttactcggctgtttgattgagagccgtaatatatcgagacgctcggacttgaatgccgaagctctgagtaaattcaaacgacaataacattttacttggatgtatgatcgaggccagtacactatcaagacgcttggactggattgccgagtctctgagcaaatcaaatgacaataacatattctctgatgtctgactgagtcctcgaacatatggagac

SEQ ID NO: 57156 - DNA, 347 bp, Glycine max
  unsure (1)..(347): unsure at all n locations
agcttnttatccaagacactctntcggtgttttatcttcgcctttcttggcgtatgctctagtggatgacacctcctctcacctcttctcctttatcttctatagcaactccatggctgaaagtctccattgaaagacctcattgaagctcaaagatctagcctccatagaagcttcttaagcaagcttccatcagaaccaaaataaatcttgttggctatgttctttttgactttttctctctctattgcattctttatcaatttgttaagtttcaaagaaatctcaaatcaatgcactttaatgaaagagtattatgtttgggtgattgggtcaatatttctttt

SEQ ID NO: 57157 - DNA, 379 bp, Glycine max
  unsure (1)..(379): unsure at all n locations
agcttatccttatggcttgcctactgtcttcactnccttttttctccggaagaattaagacaagccctacttttgggtgcaactcccgccttatgacgactatccccggcaagacgatgaggaaggagatacccatctcggccctctgctccacctcatagatccgtccccacatgaactaccccaaccgaacatagtccgccatatcccggcctcacccacacctgtataagaatctgttcccttcgtggaagataagggaaagatcgaagcgcttgaagagaggttgagagcagtcgagggcctcggcaatacccattctcggattagcagattatgtctcgtgccaacatcgtcgtccctccaagttaaagtaccg

SEQ ID NO: 57158 - DNA, 334 bp, Glycine max
  unsure (1)..(334): unsure at all n locations
tctcaaggaagctacctaggctatttatttaagcatgggnaacacttgttgtaactttgatgaatgagagtcttgtgatacatacttcaaagttccacttctctccctcttttattccttcaatttcgtgctccccccttctctctttcttttcctccattaaagcatcctcttcaagcttcttatccaaggcaattcttggtggtgaagctccttcttccatggcttattccctagtggatggtgcctcccctctcctcttctcctttgccttccgctgcatctctatggtgaaaaatcaccattgaaggacctcattgaagctcaaagatcc

SEQ ID NO: 57159 - DNA, 435 bp, Glycine max
  unsure (1)..(435): unsure at all n locations
agcttatgtgatntctctcanatctcctctaatggatcttatattgaatntcagttcanatatttcattgtcaaacatggacgtcaaatcaacacacattagaggaaccaaaaacagtgattcaacacacataaaacataagattaaagatggtttaagcttcccttacctatgaaactcaatgagttagttttgagatgaagaanaagaatacaggggaagaatttggattcaagatgaaagctttntttcacttctacagtagttctacatcatccacacccncaaaccccanaaccaacaaanaacatattataaccttgaagataaccacttnttggaagctttgaaaagtgttcatggaggaaaacgaaaatgaactcanagagaagaagaatgagatattacctcgcctangaatagtcaacaaccact

SEQ ID NO: 57160 - DNA, 259 bp, Glycine max
  unsure (1)..(259): unsure at all n locations
tgtccacaaaaaataggggttgtaattttatcatttcagncncttaccaagtaaaaaggatcatttttaaggtccaacgccttaaaagtgatcacaattcaagtaaaaagaatcgcttgattcactcttaagaaagaactacgtaggtctgatttcctctccaaaggaggatacgtaggagcaaaagccccgcttttgtcgacctcaaaaataaaaagaaataaaagttaaggtaatacaatttccacaattctaaaaa

SEQ ID NO: 57161 - DNA, 463 bp, Glycine max
  unsure (1)..(463): unsure at all n locations
atcctctatagtcacctgccgctgcagctatganntgtgacccgcgcttctcaggatngttttaganctaananangngcatgatcatggttntacatggttcactacctgtatattctacgttgacctgcgattattggtaattaattactagtactctattaatagatatgtgatgtgctatntttttacaattttaaatttaggtgtgtaaatggggttatctgccaagatatctagaacaagaggaaaaagtgacagtgattcagatgactacgataatatggagtatgaagaggtatccattgctgcaaaattatagattctntaatntattgtgtaataattgtataaccgtagtgacttccttatgaaatttgattaacggttattttcctgatgtaggtggaggatgaatatgatgacgatggtgatgacgatgatgacgaacatgaacatggag

SEQ ID NO: 57162 - DNA, 331 bp, Glycine max
  unsure (1)..(331): unsure at all n locations
tatgaccatatgaattggnccttatctttcattgttcaatttcgagcgtctcgatatattatgcgcctgaatcggacctccgagtgaaaagttatgaccatataaattgctcaagagggtctattgttcaatttcgagcgtctcgatatattatgcgccttaatcggacctccgagttaaaagttatgaccattggaattgctcaagaacttccattattaaatttcgagcgtctcgatatattatgcgcctaaatcggacctccgagttaaaagttatgaccatatgaattgctcaagagctttcattgttcaatttcgagcgtctcgat

SEQ ID NO: 57163 - DNA, 300 bp, Glycine max
  unsure (1)..(300): unsure at all n locations
acctgccgcatgcaagctcgcccagagaaggagtccacggaggaaatgctgtctatctcanatgactggaaagcggtttctaacgattcttctgcggcttccacataacgcatagaggatgggcaactcaacaagatgtcttcctcgcctgacacgatgaccagatgcccctgcactacaaatatcaactgttggtggagtgtagagggcacaactcccactgagtggatccacgggcgccccaacagacaggtgtagggggggtatatatccatatatttggaatgtgacttgacaggt

SEQ ID NO: 57164 - DNA, 311 bp, Glycine max
tactgcaaacacccacttttaaaattcatttgaagcttgaacaataagtcatgaacaagaaccacacaaagacaaaaccttaataggacattatattaaacccaaaacctctgcaaaattaagatattgtgacattctttaataacttactctttcaaaagtttagcatttcaaaaaattattagtataccaattaaacataagctggtaatttaaaaaatgtattagtataccagttaagtaaaaaattctctcaaaattcctcataaatgaaaccatgaacattaaacttatttaaataaaatgctaaa

SEQ ID NO: 57165 - DNA, 404 bp, Glycine max
  unsure (1)..(404): unsure at all n locations
agcttatcttgctaagcccagataacttataanatnnttgtaaatgccatctcgcgctaagcgcagccatcctgagctaagcgctattccttgcagcctgcattgggctaagcaagcttgaactcgctaagctcatataacttagaacaatttttttatttttgccttgcgctaagcgcctcacttttgcactaagcgttattcattgcggtttgtataaggctaagcgagactngctcgctaagcccaatagcgtctagtagtcgagtcgcgctaagcgagcacctctcgctaagcgcatgtttaaaactggttttccctgagctaagagagtgcctatctcgctaagccaattatgcagaaaagatnttctgtcataactcgctaagcctatgaagtatttc

SEQ ID NO: 57166 - DNA, 346 bp, Glycine max
ctcaagcttaaggatggaacacttacttgttgtttatgaacaattgctcgaaacggaatctaaaaaatgcgaataatgatgaccctatggctacaaactcgtcaatcccgtgggtatggcttttgaaaggggggaaaaaaagtttttgaatgcaaaaacatcccccctttcgacattcttataatttggtgcaggggtggctcgcccaggcgagctaacctgcatttttttttttgaggggaacattaaccatgtcccctcccttctcatggattagcgtcttgcctaacttgaacttacttaagttaaaataaagcgttgattacttatttttactttttaaaac

SEQ ID NO: 57167 - DNA, 293 bp, Glycine max
ccgcctttttttgaaccttcaaccagaaaacctccaccatgatcgtagaccattaatgaattcttggcttgacgatttgctaaccatgattgatttcttgtggccaacctataaagtcatttattgatagagtgttttctatcgggcataattcacctcacttttggcttcccgtgctcatagaggaacttaatttcatatgattgtgagagtatagttgagaacccacctacgtgttatactttacatcttatgcaccttgatgggaaccataactatttaatttgctatat

SEQ ID NO: 57168 - DNA, 377 bp, Glycine max
  unsure (1)..(377): unsure at all n locations
agctataagntatgttgtantcatatataatgcacatgtcatcatgcaagtatggcacagttgcataaagtctttgatttatagaatcttaaatggtgtcttgttcgccacgagtaaccttagcgacctaatattatttgaacattgttattcttaaaccttctggtcatttgtttaaaatattgcttatgtcttcattggttgtacgaaattctcttgcaaactacgaattgcagcttcttatctgataataagctattgttgttctccctcccatcatcgcactgctagcattatggcatgtatctttgtaagtatgtatgtcatacttatgttcgtaacgtatctaaatacgtatagcattatctatgtcgtgg

SEQ ID NO: 57169 - DNA, 518 bp, Glycine max
  unsure (1)..(518): unsure at all n locations
cagcttctaccaatggacttacctgaataattcctttgtagccctttatcctatgttccctttctttgtnttaagctcattacaagccttaagtgaaaaaccatgatatcaccttacccttaaggaatnttggagctttgaaattgttttgggaataagttgggaataagtgtgggggggtatgtgtcattggaagatataattnttggccatgcttaatgttctattgtggccatgcctaatgtatctgtatattgcctagttcttgctttaatcttcanattcgtactggtaanaaaaatgaaaaaaaaatcaattgctgcaaattctgcaaatttgtactgttcaaaaataaaaaagagaagaagaaaagaagtgaagcttgatatatgacgtcttggtatgaggactntatntggaagcctcggtcntgatttgtgatatttagagggttgngntactacttgtgcttaattcactatatttccattgtctctattcttnggattactactatc

SEQ ID NO: 57170 - DNA, 337 bp, Glycine max
tgcttctacactaagaagcactctttattgagtgaatcaccaaagagagaacaaccaccaaaattgaggaccgttttgtaattttgtaatttacaatttacttaccttcatttctttcaagttttgtaacaaaaaggcctttcattggaagtgtgttgggagcctccaataagttaccaaacttccatttgtgtgtaataattttaggcaatttttccttaggatagtgagtgttttgttgggaaccttgaatgtggtcatccaaacactcttaggatttgcctagtttacatttcttgcttactttcatagcttatttcctttaccttccctttta

SEQ ID NO: 57171 - DNA, 332 bp, Glycine max
ttcaacaaatgtcttcacaaataatcatttttctgcagaaaactaacaaaactacccctcatatctcccaaaaccccatacccacgaaatttaagagagaaagaagtccacccggacctggattttcgaagatccactcgtagccacgcacttcacgaccccgaaaatgccctcctttcgcgatttggagcagaaatgagcaccatagggtggagctttgttggggtttcagtggagaatggaggagaaggaaaaagcaacgtgaggaagagggagagcttctgaattttctgttttggctgagtgaggagagagaaaagctttttgggctt

SEQ ID NO: 57172 - DNA, 314 bp, Glycine max
agatctggaccttacgaagactgacaactatttgcttgaaaatggggtgggcgtattctcataactgagacggacgtccaatagtaattggggatcaccatcttgcttgctgaagtaagagcgccacacctgccaactttttcactgctcataatcattgttaacgcagatccgccgtacggaagacaagaaatgacctttctccatagcagctgctttatcttctttggtctcccaaactatatcagtgtgaccgtgattactgtacagtcacggatcgccatatatgcttgattcataaacttttatcgctg

SEQ ID NO: 57173 - DNA, 496 bp, Glycine max
  unsure (1)..(496): unsure at all n locations
acctgcacgtcatgcaagcttccaagaaataagatcaagaatcattcaagaatcattagaagacttattcaagataagtattaaaaaagttttttcaaaaactgagtagcacatgatattttctcacaacctcttaccaaagagtttttactctctggtaatcgnataccagattatngtaatcgattaccagtagcanaatatatttcaaaaatctttcaactggaattacaatgctccaattggattcaaaatggtctaatcgattacaatgtttnggtaatcgattaccagtgtgtttgaacgttgaaattcanattcaaatgtgaagagtcacatcctctcacacaaaagcgttgtgtaaatcgatatcactaattggtaatcgattaccagtgatagnttctgaacaaatcanaagatgtaactcttcaaatagttcttaccctttttaaaatgggtntntaagnttttctaatggtcataactcatctaa

SEQ ID NO: 57174 - DNA, 221 bp, Glycine max
gacctatgaaactcagcttttaaaagaatgatcttctggtttttggggcttcatggaggaacaaacaatatggaactccttaagatgcttatgaggatcttcacctgcaagaccatgaaacttgggcagcaaatgtattaggccagtcttgagaacatatggaacatcctcattaggatattgaatgcacaagctttcataagtgaaatcaggtgcaacca

SEQ ID NO: 57175 - DNA, 321 bp, Glycine max
  unsure (1)..(321): unsure at all n locations
gctcgantacatatgtagatgttgagacaatgtctgatanatttatgagtgtgtcggacactcaccacttatgatgtaagngattacttctctctctgctatcgtacattagtgagacaataatacgttaatcgactactttgagtatataatcgattacatcgctctcgagttgttccaagatgttaggaagaacactggaattaattaacaagatagtggaatagatgactgcatggaaataattgattaccttggagatataatcaattgctgacaattatagttggtttctctatagataactgtcgcaacctaccc

SEQ ID NO: 57176 - DNA, 340 bp, Glycine max
tgcttgcgctaagcgcttatacctctgtctagttggctgaatatttcagctaagcgcacatcactacgctaagcccaacatctttactggaagtaaacttcaagcagtgggcttagtggagatgattgttagtcaatgaatacgactaacttttgtgtaagaaatctgtgaaaattgtatctaactcctcccatttatggttatttggtagtgttgtaattaccttttgttaaatataggtaataagtacttagtactcccattttgtgtatttaataatcatttcctttcaatttcaggttaattaggcaagtttgtgaagtgctgattttgatatgct

SEQ ID NO: 57177 - DNA, 462 bp, Glycine max
  unsure (1)..(462): unsure at all n locations
agcttgcatgtggggcttctatggatgctggatctntgttttttcaatgangtcctntaatgggaatnttccaccatggagatgcaacagaagacaaatgagaagaggtgagaggaggcgccatccactatgatataagccatggaagaaggagcttcaccaccaagatgagccttggataagaagcttggagaggatgcttcaatggaggaaaagacagagggagtgaaagagagagaggcgagcacgatattgaacgaagaanaagggagagaagttgaactttgagttgtgtctcacaagactctcattcatcannagtacaacaagtgttacacatgcttctatttatagactangtagcttccttgagaagatntcttgagataactttcttgagaagctagagcttatctacacacacccctctcataacntangctcacctcttgagaaagcttc

SEQ ID NO: 57178 - DNA, 334 bp, Glycine max
tagtaactaataccaatctagttttttcttgctggaacacaagtttaaatccactaaatttagtcaaagtagaacgaggaagatcaaatattaatgtcacaaaaagaaaggattgatatgtaccaccaatttcaatgcccttatgaacaaaaggaacagaaccagtaacaatgatgatattttttgtagttactattttttctaaagagccaactttcaccttttgaggaccctgcacagttgcacaaaaatatagaatatttattttcatttgatatgcacttataacaattgaataatcttgttgcaactcctctcctcatgcctattaata

SEQ ID NO: 57179 - DNA, 523 bp, Glycine max
  unsure (1)..(523): unsure at all n locations
atcctcttagtcacctgccgcatgcaagcttctattttgatccagcagaggatgagcatacaacctatttcactcaagtcacacccacggaattcaagcacaagagacttggtcattgtcatcttgaaagaatgctatacatgaaaaataggacatatgcaaaagaatatttgaagaagtttcatatggaggaatgcaaatcttgtagcacaccaatgaatcaaaaggtgaagttcaacaaggaagaangtgttgataacattgatgaacgatattgtgggagcttgattggatgtctaatgtatctcacttcaacaaggtcaaacattctattttctataaagaacaaaactggaatttttgttgacaatcaagtagccattgctattgcaaacaatcccgtgtgtcatgggaagattaaacatttcaacatccatgtttattatttcataaagatgcaacanagtggagaagcgaacttaatttactgcacgtctaaagatcaattggctgacattgttac

SEQ ID NO: 57180 - DNA, 216 bp, Glycine max
  unsure (1)..(216): unsure at all n locations
tttaagatgtgctcgntngattttcttcatctatatattggnagaaattcatgctcacgtaaccacaagctgcaataatgtgtgaacatggatagtgaagcgcagaataccttccacattgacaatgatgaccattcaagttaactgcccacttttgtccgccacgttgcgttataaggttgaagcttttttctacttcaaacttgtggagtggat

SEQ ID NO: 57181 - DNA, 423 bp, Glycine max
  unsure (1)..(423): unsure at all n locations
atcctcttagtcacctgccgcatgcaagctngcttgtggagcttctatggatgctggatcnttgattctcaatganggcctataatggtgattgtccaccatggagatgcagcggaagactaaggagaagaagtgagaggaggcgccattcactatggaataagccatggaagaaggagcttctccaccaagatgacccttggataagaagcttggagataatgcttcaatggaggataagaaagagggagagaaagagagaggggggagcacgaaattgaatgaagaccaatggagagaagttgaactttgagttgtgtctcacaagtctcattcatcaatagtacaacaagtgttacatatgcttctatttatagactacgtagcttccctgagaagctntcttgagaanacttccttgag

SEQ ID NO: 57182 - DNA, 334 bp, Glycine max
gctatcaaattgagaaggacttctaatttcttcaaaaagattataaacaaattcaagggaaatatgaagaaaagattgataattctttagaaatttccactcaagtatctgataactttgaaagtctaaaattagagacaacaaaacctcatcttaagaatgatgaaatttgtaaagaaagatctagtctattgcaagacctttagaagttgaaaaataaactagaaggcttacataatgagtatatcacactcaacaaacttcatgatcacctaaatgaggaaaggtgtaatctattgaaagaatgttaacaagtccataagaatgatgaaaa

SEQ ID NO: 57183 - DNA, 346 bp, Glycine max
  unsure (1)..(346): unsure at all n locations
tgcaagctctaagtggctatcccttacgcttcctatcatgctctctatgtggattttataagaanagnnccagcacatgttcatgcaatttttcatatcacgtggcaagagacatactagataaatcacgagattctatgatggctgttcccttgggttgccattcactacttatacatcacacagatgcattgataactatgtgagtgaatctctatagcatgtctagtctactctcgattgcattcatactacataagccatagagatgaatttatgtgttcatcctatatctttgaacatttgacgcgccgtcatgtggtactcgtagggtatcccacatact

SEQ ID NO: 57184 - DNA, 335 bp, Glycine max
tactgcaaacacccacttttattattcatttgaagcttgaacaataagtcatgaacaagaaccacacaaagacaaaaccttaataggacattatattaaacccaaaacctctgcaaaattaagatattgtgacattctttaataacttactctttcaaaagtttagcatttcaaaaaattattattataccaattaaacataagctggtaatttaaaaaatgtattagtataccaggtaagtaaaaaattctctcaaaattcctcataagtgaacccatgaacattaaacttatttaaataaaatgctaaaaaattagaaaaataaaattataag

SEQ ID NO: 57185 - DNA, 412 bp, Glycine max
  unsure (1)..(412): unsure at all n locations
gatccttttagtcacctgccgcatgcaagctntaacctcatcgtctctcacagtctttagaattgttatccaatccaatccttgtgttcggactctcagccacttatgatagccgtcgatgatcccattactgcttcccctaagctctctgtcctttcttcacgccgcatcccatgccttgcgaactccttggagtaccctcgcgttgtggtcactgaaaccccgtgcgatgaaaggcgtgatgctttcgtctaatggcgctcctctcatggngtagccaagctgtcttatggcgagaacgggattataattaatacaaccccttgttcccatcaagggaacatttggacatccttcgcatgaagatagaatcttgattcttcctttcttctagcgagggaaccaattaaca

SEQ ID NO: 57186 - DNA, 320 bp, Glycine max
ctcaagcttgcttgcgcttagcgcttatacctttgtttatttggctgtatagttcagctaaacgcacatccctacgcttagcccaacatctttactggaagataacctccactcgtgggcttatcggccattattggtaagacacgtctacgactaactctcggtaagaaatctgttcccataagagtgattattagaatttctgttgtattgattaagaaacatattcgagcaactattatgcaatagcttatacgtgttaaaaataatatccattgcataacaaaacttgtcggctaaacattttgacgtacacttca

SEQ ID NO: 57187 - DNA, 388 bp, Glycine max
  unsure (1)..(388): unsure at all n locations
gactaaatcccactcttcattccttttaacctaatttagttcttcatgcatagccaacaaccaatgctcatcatacaaagcttcatctatgtntttatgttcaatctgagaaacaaatgtcatgttattgcataanatcctaagtctagagagagtagatactcccttggatatctcacctattacgttgtccaaggagaggtctctcggagttcttcattcctttgggaggtctntangaggtgtgacagtgattttcttgtttttgaagaatccttaaccttgtttcatctntaagtgcaatgtccttatcctaanagcatgcaattccatcttccacagcattntcttgaacaagagagttatgttcatcacacacaacatgtac

SEQ ID NO: 57188 - DNA, 426 bp, Glycine max
  unsure (1)..(426): unsure at all n locations
acatggtatctactgtcaacgctatccagtcatgcacaggccactcgcccncccccncncncctatattgatcgacatgagtnnccaaagaattccaaatcgagtgaaataccccccaagtacaagattattcctcatgaagaactgtaggtacttactgacacagttatactatttccacacaattatgcaatatgaaacatgtagctcaatagtacactgaccttggagtagtaaccattgtaaaaaattgtctctcttctncagcaatgcttataatttttgaaccaatccctttccttctgcgggatattcaaaaagatcactacactccatgtcataccaacatgcttcatctcgtggcatcataacatcaacatatctatctcatgtgataacatcacagcaatacattcacacatcaca

SEQ ID NO: 57189 - DNA, 138 bp, Glycine max
ttttgactcccacggtagtggggggcctcctcagtttggggcgtcttcatcttatgataatttgcaatattcttatttgctcatgatttttgcgggtaatgtttaattatttatttttttcttgtgaaataatacttt

SEQ ID NO: 57190 - DNA, 338 bp, Glycine max
aggacctataaaactaagctttataaaccctatcatgtgataggtttttttattacgagaagatggtcaataacactcaattaactaataatcagaatgaccaattcaaatatagaagtgaaagcaatagaaagatacaatcaattgaataacctcaaagaactttattaaaaagagaaattatagtacataagtacaactatatcacaatctgagttctaagcggttagctaaccatagcatagccaaacaatatacaatattgcattagaaataaaagagattgaaaacctttacaaattcagaactgtcgcaacgtgcccttttgcgggcgtgcg

SEQ ID NO: 57191 - DNA, 480 bp, Glycine max
  unsure (1)..(480): unsure at all n locations
gctatgctgcaagcatctacaatagacctcctcaaccttagcagcaaaatctaccacagtagaacaattatgacctctctagcaacagatacaatctcgaatggaggaatcactctagtctcagatggtcaagccctcatcaacaacaatagcagcctgctccttccttccaaaatgttgctagtccaagtagaccatacgttcctcctccagtgcaacaacaacaacaacaacaacaacaacatcaacagagacaataatccactactganggccctcctcaaccttcattggaggaattagtgaggcaaatgacaatacagaacatgcaatntcagcagaagactagagcctcaattcagagtttaacaaattagatggggcagatggccacccagctgaaccaagctcaatcacaaaactctgacangctaccttctcaatctggccagaaatccannaatgtgagtgccattacat

SEQ ID NO: 57192 - DNA, 231 bp, Glycine max
tggtctataaacccatttagttccttttttgttaatgttagtaaagctcaatactaatccacacagcctttgttttaaaccgatttaactcatcgagcataaacatgatccaaaactcatctttaaaagcctaatcaatagttaatggaactacttgcaacacacaagccataggttacaaaataaacctaaagaaagtgtagtaaacactcccttctcaaaatctcaaat

SEQ ID NO: 57193 - DNA, 525 bp, Glycine max
  unsure (1)..(525): unsure at all n locations
ctcctgaatgaagaaagcctcatatttatagttctgaaagttaaatattttctatattaaacctggttttgaagtaaaattgcgccattaatttgtggagatttctccacgggaggattaaacacctgaacttattcaagttaaaccagctaaatggatatagtgatantttttagaccatatgcaatttgagcttacaagccagtttagccagggagagaactcccaacaaaatctagctagctataatgggtgtnggagaaagtggtgaatttctntttaatgaaataattataatatttaaatcttgaattaaattgaatataatgattctgttggcagaattatgttattggtgaatttatatctanttattagaggttntcacttctggtactttcctatntaaagaactctcatgttctacatgaaaactcatagaaacatatntctcatattctgctctctatttctttgaagtaatataatctagcttatttaaacttaanatctataacaatatat

SEQ ID NO: 57194 - DNA, 311 bp, Glycine max
tgaatgaccattgtataggccatgttttgatgtgcaccatcttaccatacgtggatggtttaacttttgaatttttagaaggaaatgactaaagtagacatagacaaaaatggagtgaatagacaatttagtccctgagattgtacctattttgcatattactccctaacttaatggttaattcaaaatattctctatctatagataaatgttgcaaaattgtccttttgttaaattttaacgtgacgttgctagcgaggccaattttagtgtctcctggattatccaacgggggactttaggaagacctg

SEQ ID NO: 57195 - DNA, 297 bp, Glycine max
tgttgttgaccacagagaggttcctggacatatgtcccggcggtcacgagaccttgaggacattaagtggtgtggcctatttcaaaacccagcttgactaatacctacccaacactggcatagttagtcagtgaaaacctgtgacgtatctaatcaagcgatgctctggcagttcacccataatataacaaagttcacgaagcacacagacttgtgtggcggctggccactatgaatttgggtgtatcttacaatagctctggcatctataccattgcgggaatcgatacaggggta

SEQ ID NO: 57196 - DNA, 216 bp, Glycine max
cccgaaaaagggagggttcgaatcgagccccgcctaacgaagaacgaccgcaccggcgggaacggcggccaacagcagaaccagggagacaaagagaagaagggaaccgtcaggagacgaaaaaaggaaccgccaaagaaaccataaggaagaaaaattcacaaacaaaaagggaaataacagcaaaactgaagaacgaaggggcacaacaaaaaa

SEQ ID NO: 57197 - DNA, 331 bp, Glycine max
tgaatatgattatatgatggatgattatgttgagaatgagaggtgaccaggaagatagctaagggaattgaagtggcacacatgcttaggccttgggaaagagatagttcattgtttcaccaatatctgttggtttttttcttcatacttgtctttacattttcttccatttttaccatagtaatagaagcagtgtgatgtagctccattggagcctgtaggccttggatcttcttcatcaatggagtcctttgcttcttgaagtttgatggcagcggaaaggagaaggagaaatatgattggagacgccactttcaggagaaaaacagtc

SEQ ID NO: 57198 - DNA, 389 bp, Glycine max
  unsure (1)..(389): unsure at all n locations
agctngcttgtggagcttctatggatgctggatctttgttcttcaatganggtccttaatggnggttntccaccatggagatgcagcggaagacaaaggagaagaggtgagaggagacgccatccactanggaataagccatggaagaaggagcttcaccaccaagataagccttggataagaagcttggagaggaggcttcaatggaggaaaagaaagagggagagaaagagagaggcggggcatganattgaatgaagaaaaagggagagaagttgaactntgagttgtgtctcacaagactctcattcatcatagttacaacaagtgttacacatgcttctatntatagactaagtagcttccttgagaacctntcttgatgaaac

SEQ ID NO: 57199 - DNA, 336 bp, Glycine max
tgtaggattatggggtacccatctttttggtactaggtggcggtcgggcgatggtgcacaacaagttttccacatccacaatgcgcgcataaacccaccatcccctgttgcccacctccatctaagctcacgtactcccatgtagcccatatcctcatttctctcaacaccgggtccccatcaatcctctcaagcttccacaacatccaagcaaaacaacattcaaactgcacaagctatcacagccaagcaaaacagagcataggcagaaaactttgccaaaacaccaaccaaatcacagcttttctcacttaaagaccccagtaacaattcctt

SEQ ID NO: 57200 - DNA, 455 bp, Glycine max
  unsure (1)..(455): unsure at all n locations
acctgtctgcatgcaagctcggactgtgctatagagaaaatcttatgatcaatgtgattaaagattcttttctagggcaaaatggagtgttgaggagtcacaatttgattcggcggagtcttatgtgtaaatccagtttgagcaagtntagattgatgttatggactggtgtgaggtgagaagttgcttcacatttaccttattctcaatttcacttttcaaacctagaanacccattgaatggaggggtgttggacacttagattctgtgttgctgtgttctggagctcggttntgggttagacatgattgatacatgatttgngactcgtatgaattgatttgcgcaagactggatgagaggaagtgtgaatttcgaaatctgcacttatgcagatatttgctgtcaaaataggtgcatcataattttggttcgacanaaaaatgcttgtgtg

SEQ ID NO: 57201 - DNA, 325 bp, Glycine max
ttacttcaatattttccaaatcatttataatcttgttgaaatcagccaattgttcagtggcagttcttgactctgtcatcttgaagatgtacagttgttgcttcaagcatagccgatttgcaaggaactttgtcatatacaatgactccagtttcaaccacattgaggttgttgtcctttctcttgcaacttctcttaaagctttatctccaaggcatagaatgattgcacttctggctttagcaatcatctctaatttcttctttgagcttaaagattctgacatcctttcttccccttcaagagcttctacacagccatggtg

SEQ ID NO: 57202 - DNA, 308 bp, Glycine max
  unsure (1)..(308): unsure at all n locations
cctgacttattantgagttatgtcttctcaattgtattaatcactntanngctcgccaaacgtacttacaaatgtatgtccttgtctggttttaggtggcattgctaatgagaaacctgtgcatgattntaactagctgagatttttagcacaatgtaagtattgatggtntgacctttaaattactataaatatgtagnatgtcatgctgagtaattgcctgccctgtataagcaccattagaagttattntggtanagtgttattttgtgttttggtctgtaaatctgtagtatgtcatgctgagt

SEQ ID NO: 57203 - DNA, 338 bp, Glycine max
  unsure (1)..(338): unsure at all n locations
tgttcagcctttgcatactcatctttatctaattgttactcgatatcagccttatcaaatttgtcatcctaaaactcaaaaatcctccaggtccttgttgaaaaatgtgcaatggaatccattgacgctcatggcccaaaatccctcatcatatccgagtctgattggctgagcatagaggattggataagagcacgaggattaagtccttaccctatagaaaagagtagcaatcaacaccaactccaaccttggcctttttgaaggcccttcattttgaggacccaaagtcaccatagtggttcttgggctagatgtangaagaggaggaggaggag

SEQ ID NO: 57204 - DNA, 246 bp, Glycine max
  unsure (1)..(246): unsure at all n locations
agctaggtgatgtaaggttacgtcatagntgatcactcatctatcaagtcgcccaagtgtgaagggagtgaaatccaaatgattnttataagtcgggttgaatgattgcacctcttattacgcctaatactagtcaagaacatatccctaattatatatttctctaaacattatccatttaaacgggatgtattaggctacattgtcaccataagaaacgacacaacattctttctcaaccctagc

SEQ ID NO: 57205 - DNA, 430 bp, Glycine max
  unsure (1)..(430): unsure at all n locations
agcttattataatcttattatatgggntgttnntgagacttttgatctgatttattcanggagtctcttgctgtagatcgattatccatgtgatantaaccgatctacttctctttctantaagtgaattcaaaagtgaaccaagaaccattttaaattaattaattttgagtatcgtaatcgaataccattgttcttgaactntntcagctntgggaagaacactttaatcaattaaaaagataatctaatcgattacttcattgaattaatcgattatcatgtagaattaattgatacagacggttataattatnttctcattntctctataagtaaccagcttgtgttctcttctaaaaaaatctcanaatctnaaaaataacacaatcagcctttgagtgagctanatcatgtgctatttatagtt

SEQ ID NO: 57206 - DNA, 323 bp, Glycine max
tgctcacgaattttaaccacgatctccttaatggtagggtcctagtcataataatatattatattaaaataattattcatctctttcatattatttaaagagtacaggtctttttttttatttttattaaaatgtcagaattttgatgtgcaaatataaaaatcttaagtatatccaacactttctttttgctgttttattattttctttctctattctaatcttattcttttgtcataatttcctatttttattaggtttctaattactagaattttggtttttttcttatggttgtttgtttcgaaataggatttctccta

SEQ ID NO: 57207 - DNA, 523 bp, Glycine max
  unsure (1)..(523): unsure at all n locations
tactatagggagaaaantataatactacattacttataacagttatggagatacttgtcattctccttaggttcttgttcgtgtttcagaagcaaggcctaggtgccaataatagttcaattgcatacataattaagtaataagtagtacttttgaaaattgctattataatctataatatcacacaagtgagccctaagtgtcctattatcttgaacttagagactctacaaacatctaanactcttaactcatgaattatctacaaatgggtagacttcttaccctttacaatgacactcaccagcctaaaattatgcaaaactttgatacagaggaagcatatatatgcatatgtgcttcaatccaacaaatgctataatctaccacatattgttatncttatttgaaggtgtgcatcaagtcacaacttaccacttgatacgctcaccaaaaatatggtaacaaacaatgtactaataataatacaaaatgaaccatatcaatcatgaataattacttt

SEQ ID NO: 57208 - DNA, 376 bp, Glycine max
  unsure (1)..(376): unsure at all n locations
aatgcacccatatacaatcaaggtagcttcattacctacattatctacatgtactctccaggtgtatttgttatttacatcacacacgcctccttggctaaatttacatacatgcatactcaaagcatttcggggtaccaaaaattgcacatgcgctcatcttggtatttctaatacctatacatataacaacttcatgatgaatcttgactacctacgcaataaggtgctacattgcatgctnntttttttanagtgttgctacctaccgccacatgaaaatgcaagcatatttttctttgctgactaaaaatgtattcaaattagaaaggttatcattttttagtatatgtnttcttacataacatgcaacaca

SEQ ID NO: 57209 - DNA, 337 bp, Glycine max
tttaagagccgaagaacttaaacatcttttctagaatggattatgatcattgttcctacttactggtatgtttatgtttattttatctaggattgctagtgttgttccgatcatgaggagctagtcctcctagttcgaagattattagataacttatcatttgtaccattctcctcatttttaatgaaatttctcattgattttatgttaattaattctcttgtttttactgtttatttgaaaccaatcattttaatacttaatcaattgcataatactaatcatgtaattggtagatttaggtagagaatgttttatgtcacattgcatgatcaaa

SEQ ID NO: 57210 - DNA, 489 bp, Glycine max
  unsure (1)..(489): unsure at all n locations
tcactgggagggctgtcttcttatgaaccactnggactgttctcacccactggctgtcataaatggggtagatgattccagcttgtaaaagcttggtcacttccttnttcaccacatctagaatgacggnngtgagtcaccgctgtggctgcttcactggcttaactccatcctctnaaagtatcctatgcatgcangtagatgggctaatactangaatgtctgctaaagtccatccaatggccttcttgtgcttcttgagcactagcaacaacttctcttcttgctcagcatcaagggaggctgagatgatcactgganattntttcttgtcctccaagtanacctatttaagaagtgctggaagggcttcactctggtatggtggtggtgaatatggaggaaccaagaggaaagagaaggtctcactgtcctataagcagcataaatatgtcttctgcacaggtagtcatctgctctaaaacatac

SEQ ID NO: 57211 - DNA, 339 bp, Glycine max
tcctgattatgagggagctaacaattattttcatgcaggtggaccttcttctagtaattctgacttgaggccattaaaggctggtcgttcctcaaggagaggcaagtccaactaagagacagagagtatgctgagtttcaagaggaaattgcccgaaggcaacagacttatcttgtgtcacccctagctaagtatgacccaaacatagtcatggagttctatgccaaggcctgccccatggaggagggagtcagacacaagtgctcctgggtgaggggccaatggatccccttcaatgaggatgtcattaacaagtttctggggcatccattggtccta

SEQ ID NO: 57212 - DNA, 339 bp, Glycine max
tttgcatgtttagagatttctagatagtttattgtccaagttctagagagtgttgagagcttttgctatgagaagactggcagagaattgagccagaagaggaagccatcctaagagcatgagatgagtctatgaaggagacatccccactacttgtatttcttgaatccttcatttttctcttctctttgttgtaaaggaagcttcccagatatggagagctaaatcctctgttggttcttccttgtaggtacttgatgtaaatacctgtatatctatttaatgatgttttatgtgttctctgtgctatcagtacgtcatttcagtgtgctattgcct

SEQ ID NO: 57213 - DNA, 341 bp, Glycine max
  unsure (1)..(341): unsure at all n locations
gcagccatctcccttagagtcctctctttatttggagatngcaaaatagaaaacgaacttataaattgaagaacgataatttatcgctactggaatcgcaaaacgaaaaaaaaatgtctcatagacaaacctataactaaaagaacgataataggggagagagaagagagagcctaaactataaccttggtgctgttatatagtnttccagccccaaagcttacatatctgtnttaaatccacacccataaataaaatcaaatctagataagatgagatctagatgagataatatatagatcagatcatatctaaataatatctatataagataagataag

SEQ ID NO: 57214 - DNA, 342 bp, Glycine max
tgcttgtgtggcttctatggaggctttatctttgagcttcaatgaggtcctttaatggtgattttccaccatggagatgcagcggaagacaaaggagaagagaagagaggaggcgccatccactagggaataagccatggaagaaggagcttcaccaccaagatgagccttggataaaaagcttggagaggatgcttcaatggaggaaaagaaagagggagagaaagagagaggggggagcacgaaattgaaggaagaaaaagggagagaagttgaactttgagttgtgtctcacaagactctcattcatcaaagttacaacaagtgttacacatgcttcta

SEQ ID NO: 57215 - DNA, 280 bp, Glycine max
  unsure (1)..(280): unsure at all n locations
tatatgctcctaatggtgcacangccttggttntttctcaattatctatgcaagctaacccaagtttttttatattaatgtctaaatgaacgaaatgcatcattgcgagangcttactgcatcaatctctgctcatgcgtactcaatacagacatctacctactttcgtcattggcatcaaagactcggcactccattcacctctcgtgtccttcattgtgcgcctcaagcccaacacaatttctattcttagctcatctggagtcttcgtattaataag

SEQ ID NO: 57216 - DNA, 265 bp, Glycine max
tctagccaaatagacttaccttgtttttattcctttgatagcccttttgagccttgtttccctttccttgttttgaagctcactacaagccttaagtgaaaaaccatgatatcaccatatccttaaggaattttggagctttggaattgttttgggaataagtgtggggggtttttgtttcattggataacatgttttgttggccatgcttcatgatatattttgagccctacctgatgtacattgcctattggttaaatgttgg

SEQ ID NO: 57217 - DNA, 354 bp, Glycine max
tgaactatagaccactcaagcttattgagggaccataccattttttttttgagtatcataactcactttgaactgcccaaagtgtgtaggaagtgagatcaaaaccaattgctagagcatgtcttcaccaagctctaacttaagtgacttaagtttcgatgcaagattagacatttccataatgtactccttgatgttttctttgcccttgtacttcatggagatgagtttaaccaaaacgttactcgtctctccgccttttcatttttggaaaagtattgctcaatttcctcaataaatttatttgcactttgacctttagaaatatagcctcgaaatgcttctctataatag

SEQ ID NO: 57218 - DNA, 336 bp, Glycine max
tcaagttgcttggataacaacttttttttatgccatcaaagcgtcctgtgatgaaagctccaacaggcttcttttggttgggatgtgtgctttatcacgcaagattgcatggtcactatcagccatattctcaattaattccatggcttcttcaggggtcttcaattttatttttccccatgtagaagcatttaaaagctacttggattgtggccttaaaccgccaatgaaaatattgagctggattgattatgaaaatccatgagtaggcgtctttcttagtagcccacgatatctttccaaagcctcactcaaggactcgtctggaaattgatg

SEQ ID NO: 57219 - DNA, 269 bp, Glycine max
agctcgccacccagctcgcccagactagcagggttgctttctccagaatcatcaacctttggaggaatcttctggagggcccaagtgggcactggtgctatttgcacccccattattactaagtacacccgctgcctttgtttggtgatctctttttcgtagagatacagaaacttacgaatttcgtaacgatacttgtattctttccgtaatgttacggaaccttgtggatcacataatcatcctctctttgactcacggaatgttac

SEQ ID NO: 57220 - DNA, 306 bp, Glycine max
  unsure (1)..(306): unsure at all n locations
gctgcagctgaaacctgcttttccatgtggacattnttttggtagcaaagggtaggagaggaaacaatgtatgtaactgtgagtaacgtgactttagtgcatatatgatttacctaagcagntcacaataacatgcatcatgaaggttggaaatgaactataactagcacatagtaattcaaactgataggtttgacaaacattgatgcattacttattgatgcctcttgaaattgttacagctcgaaaacgagcaatgactaatctaatggcttactccatcttttatgggtgtgggtggtattc

SEQ ID NO: 57221 - DNA, 376 bp, Glycine max
  unsure (1)..(376): unsure at all n locations
atcctcttagtcacctgcacgctgcaagcttctacttatgtggcanggcnggtttccttcactttctttgttccaacgcgagctctgaccactgttcttccttcccgcgatgcttcttttcatgtccgcctgagtgggcttatatcctanaccatacnttccacgattcccttgggtttttatcagactagttatgccgccattgtctttgcctaaacccatcccgggttcataaccgttccccaacataactcgggccatcattaccgccgcctcggacagacaanggtgcccaaagagggagtccacgaaagatatgctgaccacctcanaagactgngaaagcggttctaacgattcttctgcggcttccaca

SEQ ID NO: 57222 - DNA, 326 bp, Glycine max
tccatcataaggggggttgtcgcattctacccttcggagggagggcgacgcggggctcacgggtgtgctttccaaggaaggaaggcgcgcggagttgccaccaacttttattcgaggaaaatgtcgaaaaaactggaacgtgtggtctatgaactttaatcgtgaaaggttcgggagttgtttttacgcacggggaagttattagcaccccacacgtctgtcacaagggacgacagcctctaatcgagtgtgcaagacatgacttcaaaattatgtatttttcctttttttttttatggtttttaactttttatgggcctttttga

SEQ ID NO: 57223 - DNA, 327 bp, Glycine max
  unsure (1)..(327): unsure at all n locations
atctagattagataagatattatctagatgaaataatatctagatgaaataaaatctagataagataagataagataaaatctagataaaataatatctagatgagataaaatctagataagataagattgggtagaataaaattgtctgctctcttcaagtccaagcccaattacttataattctccttgaaataaattaaaaaccaaaaattaatccagtacgcccaaatgataaaactgcataattaatttgacaattaaggctaatcagtaattaaaatggtgacaaanagggttaagaaatatgagaaaatgatgacacatc

SEQ ID NO: 57224 - DNA, 262 bp, Glycine max
gaacaaaaaacgcatcgagaaccaataccactaatttttatctacctaatcgaaggaggagctgagcctaggttcccctccctatataacaaatctcacccccacgaggaaaaacagggagaatgctaaaaaggaccttatggcacttacaacacataaagccccaaaatgacggcgttaagagaccaatactaatgaaatggtcaacaagaaaggccgttaacaaagagaaacccatatactatccaaaaagaggaaaagg

SEQ ID NO: 57225 - DNA, 352 bp, Glycine max
gacctatgaaactcagcttatgcttacctaggtcttacactatttctcatcaccattgggttctatagttagaaatgctttcaagaactcaattctctaatggtaagagtgctccattgatgaaaaaaacccccccacaaagaatcgtgtataccttagataggatgagggttctccttatatagaagtatagatatacctctgtctcataagtaacttacaataaatttttggcacttgtattatatctactctcttgccggtgattttcttcatttggtaatttctttgctgttttaattcaaaaatgtttttaaatcataaaaaataatcttacaaagatggattgtga

SEQ ID NO: 57226 - DNA, 338 bp, Glycine max
tccattgttcaatttcgagtgtctttttatattatgcgcctgaatcggacctccgaatgaaaagttatgaccatttgaatttctcgagagctacctttgttcaatttcgtgcgtctcgatatattatgcgcctgaatcggacctccgagtgaaaagttatgaccatttgaatttctcgagagcttccgatgttcaatttcgagcgtcttgatatattatgcgactgaatctgacctccgggtgaaaagttatgaccattttaatttctcaagagcttccgttgttcaattttgagcgtctctatctgtgatgcgcctaaatcagacatccgagttaaa

SEQ ID NO: 57227 - DNA, 308 bp, Glycine max
  unsure (1)..(308): unsure at all n locations
ctatacattgtttccttgatgagtctaatgccattcttccaaggaaggggattttagatgatatttcagattccttagaagatacacatattcatggaaatgactctaaagaanaagatgaaggaagcaatgaagattctcaagataatggagttagaacaaataatgaacttccaagagaatgganagcctcaagagatcatccnctcgacaacattatggctgatatatcaaaaggggtaacaactagacattctcttagagattatgcaataatatggcttttgatctatgatgaacctaaaata

SEQ ID NO: 57228 - DNA, 341 bp, Glycine max
tataccattaccatactaatttctatatatttcatgcaaaaatttaaacagagtgttcacgcccccactttaaaataaaggcaactaatatgcaaataagcaactacaactttgaccgtttgtgatagatccattaaatgctaaggttataacattataattagcttactcaaactttcaagtttgaaaaattcgaataagaaccccttccatcccaaaagcttcaatttataaaccttaaattaaaattcaatttatagaaaaaaaaattgattcaccaaacttgttggtcatgataaccatattgatcaattcaaggctagtttagctgctagagacaa

SEQ ID NO: 57229 - DNA, 393 bp, Glycine max
  unsure (1)..(393): unsure at all n locations
aataccatcacataaccttgtatctntangccttggtacaggnttgactcagnaaataccaacctttgagtgtatgaatatatgcgtcagtgaggttgcaagtancacaccatcaacaggtatgtgtctttgttaatcatatagcacanacaaaagtgtagtaaataatagaagtgcagacatcactatcatagcctcaagataatgtgaatgtatatacaataaccaacatgaattgcagttagaacctgagagttcatgcatttgccctcataatgggaggggaatgaaaatattatacgagtttcttgaaggcttggcaccatgagatttggtcaattatacaataaataggatgaagaatcttgatggtatcataatatactgaatttg

SEQ ID NO: 57230 - DNA, 340 bp, Glycine max
tgtgccagaacaaaatgtttgctttcttgtaatggaggttgaacaggaggtcctgaaggtgacggccaaatttgatatcacccattgaggtatatacgctaagctaatgacgttaaaagagcgcttcctgggaagcaacccagttctgattcctttcattttgttttttttttcatgcattgcataagttggaattttctttataatcattgaaaaaagggggatatcagcttataatgagtcatagatatttagggttggattaaaatgtttttgagaaatggggttggattaaaacatctgagaatgtggactgaaaataacttaaaaacattttcat

SEQ ID NO: 57231 - DNA, 432 bp, Glycine max
  unsure (1)..(432): unsure at all n locations
atcctctagtcacctgccgcatgcagcttcccanattgagcttatttctagaccagagtttctcttgttccatcaagtatggacggggaataatcataatagaaactaatttctctctatgtgatcttctgagattcctctttgtctctcaatgtctagaatttgtttcagcttcatacgccaccatgctaaaggagaacaccactctaacattgtccataaaagatattcatctttatatggatctttcagcatgtcgtatgtcatcaaagaatttatggcgatggngattgactattgtactgtattacaccaaatggcccatatggttggttcacacaaatcccactccatctcacggaacaattcanatatacctncaaagggtatctcacggtcaaatatttatgttggagtgtgatngaatctcat

SEQ ID NO: 57232 - DNA, 336 bp, Glycine max
tagctacacatacctctctaatagctaagctcacctccttgagatgagaagctagagcttagctacacaccccctataatagctaagctcacccccatgaggaaaaacatgaaaataacaaaaaaagtccttattacaaagacaactcaaaatgccccaaaatacaaggctaaaaccctatactactataatggccaaaatacaaggcctagacgaaggaaaaacctattctaatatttacaaagataagcgggctcatacttagcccatgggctcgaaatctaccctaaggctcatgagaaccctagggcctttccttggatctctagcccaatc

SEQ ID NO: 57233 - DNA, 521 bp, Glycine max
  unsure (1)..(521): unsure at all n locations
tgctgcatgcaagcttctntcgtccaatagaactggtagcattacaactcttcattcgnttttacntaagatattctnttgtgatttgacaaccttaacatgagcatcttcaagctttatatagacttcanagtttcgattcattgagagatctcaaccagtcgttgtctaatagctggcgcgctctacacaatgtcgttactatgcagagagagagtgtcagaaccacaaacactgtctgcagcatatattcagagaagtacaacttgccaatgtcgtcttttgctcatagttgactttcattgtaccaatcgaatataacgttaacgacataagacanaatatanaattaagaatgtcaagacaagacaanttgaatcttcccttttgtgggctatggcatgaactgtntactaaacctatggatgtactntctgatgatacttttagacttgggatcgagtactgtccatttctttgtctatgaccaagtgtgagcactatctcttatgactgacgtg

SEQ ID NO: 57234 - DNA, 327 bp, Glycine max
tcttttggaccttgaacaagcaatcttctcctctttcagaaccatgctatgtgctcgcgactggtccctttcttccctttgcaacttgagttcactattgctaccccatagagctccgcgaaatttgttccggctatactcttccttgcgagccctcttggtctcttgttcaagggctcttgcggtaattgcattctcttcccgtaacccggcacactccttccgaacgtgtgtagcagccaacttgaacttctccttggcgagttttgcctttcctaactcgcttttgagagcttggacttcttcgtcctcttccggtgcttcaaa

SEQ ID NO: 57235 - DNA, 499 bp, Glycine max
  unsure (1)..(499): unsure at all n locations
atcctcttagtcacctgccgcagcaagcttttatccaggctcatcttgttgttaatcttcttcntccatggctnattccttaatggatggcgcctcctctcacctcctttcctttgtcttccgctgcatctccatggtggaaaatcaccattaaaggaccccattgaagctcaaagatccagcctccatagaagctccacaagcaagcttccatcaggaagtgtgccttattgttatctataaaaaccaatgtcaatatattacttaacatctggtttctaggaaaaccgatgtgattgtatagattaacatcagtnttctatagaaaaccgatgttaacgaatatattaacatcgatcttactagagaactggatgcaatgtccatcatctatacacttagtttggtgaggtacgtatatataacatcacgtatttataatcacccgatgtaacgtttgatgttacatccgtatatataatacccgtgtatgagaata

SEQ ID NO: 57236 - DNA, 337 bp, Glycine max
cttgatttgtgagttgaatctatttctattttcactttgggtattaggcaattgatcaaaggaaacttccaaagaaaaacgtccaattgatttttttttattattttattcaaagatatttttgattattttattattatttttgctttttttggtttaaccgaggttacaacatgaacgatcgattagattttgttttaacagtgattaaacgagattacaatgcaaatgatcggttgaaattcattttatcatttattaagtgagaaaacggcttaaaggataggttaaagctcgttaaaaacggaagaaaagaaactgaaggtgaacgaaataa

SEQ ID NO: 57237 - DNA, 354 bp, Glycine max
  unsure (1)..(354): unsure at all n locations
agcttcaacctagaggagacagaccattccaagngttgtttaagatcaacttcaatgcctacaagaatgacttgcctagtgagtataatgtaagtgccactttcaatgtatctgatctatctctttctgatgcagatgaaggagccttggatttgaggacaaatccttttcaagaaggagggagtgatgaggacacaactaanggcaaggaccatgaagcacttgataggcccatgaccagaggcagacttaaacaggcccaacacagtggtgaggacacaactaagggcaaggaccatgaagcacttgaagggtccatgaccagaggcaaacttanacatgcccaacatgtca

SEQ ID NO: 57238 - DNA, 338 bp, Glycine max
  unsure (1)..(338): unsure at all n locations
tcttgagtagatttgnttttaattttttaatctatgagaagaattgggtctttattccttcttaaattccatacgaagaaacaagataaagctaacaagagagacttttgtgtaaactaataaaaatatagaaaagaagaagaaattaacttttttatatgggtgtaaatcaagctgtaaaggtagatgttgcgaaggaaatcaatgaattattatatgattatcatggctttaaaatcaaaatatttagaggacaataagttttaatgtataaataactctgattcttatatttttatattatttattattatttctcttttttttttaaggtttat

SEQ ID NO: 57239 - DNA, 341 bp, Glycine max
tgttttaatgtgttataagaaccatttctcctagcaacaggcaaattccatgaccccagtccccaaacatcaaagcaaataagtaagggaatataatagttgggtaaactataggatttgcttcttggtatcttgcaacactgccaagtaaaagggctaattaggaatctaatcagttgtcatggatttattatataccgagaagaaatggatagtaagctagataatttgtatccaccctggaaaaacaatgcactataaagcagtcctaaaatttacttcaagacatttaataattcatgttgctgctagtaaagtaactaaacactgtatgcatcacc

SEQ ID NO: 57240 - DNA, 384 bp, Glycine max
  unsure (1)..(384): unsure at all n locations
tgccgctgcagctgagaatgatatatgcctatcaatcctacgttatttccanactcgaaggtggaggacacatgaacgataacacaattcatggcgctccgataaaggcgttgagaatggagaattacactaagcaatcactactcatagctccatactcgaaggtggaggacacatgaaagataacgcaattcatggcgctccgaaaagatngagaatggagaattgcactacgcaatcactacgcatagctccaaacgcgaaggtggaggacacatgaatgacaacgcaattcatggcgctccgaatagagtgagaatggagaattgcactaagcaatcactacgcatagctccaaactcataggtggaggacacatgaaca

SEQ ID NO: 57241 - DNA, 416 bp, Glycine max
  unsure (1)..(416): unsure at all n locations
atcctcttagtcacctgccgcatgcaagcttctcaagtgttggtggtcttacacaactacatggttgataattaagagtgactgccacatacgggtaaaatgtataccgatccccaagctcctaactccaaaaattatagccttagagctcgtcaagggtagcaaagtgaggcctatgagttcccgcgccanaaggacgcaccanatgttgagtagtcaccactcgctaattcccctaggttctttgaacctctnttccgatgataccccaatgttccttataaatcatctatttctcaacatanaccttaacatctcacagatggaacataaccacatacgtcaccatctaacagatggaccataatcacataccttactatctcataggtagaaacataccacataccttaaca

SEQ ID NO: 57242 - DNA, 475 bp, Glycine max
  unsure (1)..(475): unsure at all n locations
gctattgttgagttctgcttaccacccacagactgactgtcaaaccgagctcaccatncaatccttagaggacctctcgagagcctgtgtgttaaagcagaggggtagttgggatatgttcttacccttgatagagtttacatacaacaatagttntcactctagtataggtatggcgccttacgaggcattgtatggtagaagatgtangacacctttatngtgggtagattccagtgagagcattgccttangacctgaagtagttcagcagaccactgataaggtcaagttgatccaagataggatgagagcagcccanagtaggcanaagagctactatgataagagaagaaaggatcttngaattgctataggtgatcatgtatttttgagagtcactccgtggactggtgtggtanggcgttgaagtcccgtaagctcacacctagattcattggtccnntttgaatct

SEQ ID NO: 57243 - DNA, 462 bp, Glycine max
  unsure (1)..(462): unsure at all n locations
ctagtatatcactgngnnaatataaanncattccttcttccagctaataaaagggtccatcttttgcagtgttctattgtaagaggaaagaatatcgatctaccaaaagaaattctcactatgattggcacatacctttttttntctggaaaacaaaactntgcattttaagatctccccagaagcttccaaaaacaatgcatattgtttccacagataagctaatccaaatatgcactataaaactctttttttatgcacaaactgtatcagtatcacatgattagtgccttctttcccatcattgctaaaatgccaaaacaaggtgacactcanagattgaaatgttnagaataanaaccagaaaacagataanananaaagtccttacattctgacagtcttctgaaagtccaccaatgtccagcattgagaaccagcacatctgcatctcttcactta

SEQ ID NO: 57244 - DNA, 338 bp, Glycine max
tcatccatagatccctcatttaagactattcccgatttagagagccctcttaggtttagactaacttaaactgagtttcgcccacagatccctcatgtaagactaaacttagctcaagtagcttactaaagtttagcctaatttagcctaagcttcgtccgtagatccctcatgtaagactaggcataaactaaacagcactattgtaacagcataattaaaaccaaaacttaacccacagatccctcatgtaaggctaagtatcaatcctgcttcaatcaagttctaaggcaacagtacattccccaatgctaaagtcacctaactgtgcacacaaa

SEQ ID NO: 57245 - DNA, 426 bp, Glycine max
  unsure (1)..(426): unsure at all n locations
catgatacatgtcanggctttgtttnggttcaatgataaaagggatgccccacattatttccatgacacaaatgcaaaaatgatgatttggaaattttatgcaaaactggtcatgcatgcacctatgcgaacgctcaagtatcanatttgtatggtcatgtgatgctaaggctcaagatctcatttctctattttagtcaacccaatgtctccaaaatatgttctattatccatttgtgcattcatccaagtccatttcgggcgtctgggaaaatttcacagcattcacccttcacgtgtacacacannttttttttccaaaaactagctatgatcagcgatattttcttcacagaagagttggaagtcatctcttttcacagcatgttggttttcagtagacaactaatttcttttactctcttt

SEQ ID NO: 57246 - DNA, 340 bp, Glycine max
ttgggagaatcaaatattattgggttgtattaatacatatggatcatctatgagaaaaattaggaccaaggacataaaagatataacttgttatgatgatgtatatatacgtgagatacatggttacttgggttgcttaatgtgcaatacatacaaaactttcacacatatttctaatttaaataaatccaataaattttccaaactaattatttgtagatccgttttagttattttaaattagtataaaaatatataatgttgcaacgagttgcaaacacaaatattaagactatagaccaaaatagaagctaacaaaatcaaatactaatttatttat

SEQ ID NO: 57247 - DNA, 370 bp, Glycine max
  unsure (1)..(370): unsure at all n locations
agaacaatgacaanggattagtctatacattttttctttgatgagtctaatgccattcttccaaggataggatttntagatgatatttcagattccttagaagatacacatattcatggaaatgactctaaagannaagatgaaggaagcaatgaagattctcaagataatggagttagaacaaataatgaactctcaagagaatggaaagcctcaagagatcatccnctcgacaacattattgctgatatatcagaaggggtaacaactagacattctcttanagatttatgcaataatatggcttntgtatctatgatngaacctaanaatataaaagaagccataatagatgataactggatcattg

SEQ ID NO: 57248 - DNA, 339 bp, Glycine max
ttgaaaaatgttgatttcaccttctcgtttagcctatatgctggcttagcaagcatccgctaagcgcaacactcctgggctaagcgcgaggaagaatccataagaagatgagttgtacaggttcgctaagcgcaccgcttcagttcatccgctaagcgagaaagacgcgctaagccaaaaatcactaacatgcgctaagcggtccatacgtgcgctaagcgcacgagcacgaacaaggccacctatatgaagagagtttggactgggatttagagctttgcatgcctagggtttttagagagagaaaggtccaagttctagagagttttgagagatttt

SEQ ID NO: 57249 - DNA, 286 bp, Glycine max
  unsure (1)..(286): unsure at all n locations
gctcccactcggaggcccgattcaagcgcataatatatcgagacgctcgtttatgaacaactgaagctatcgagaaattcaaatggtcaatacttctaactcggaggtcctattaaggtgcataatatatctagacgctcataattttacaatggaagctcttnggctatacaaatggtcataactcttcactcgaaggtccgattaaggcgcataatatatcgagacgctcaaaattgaacaatggaagctcttgagcaattcatatggtcataacttgacactc

SEQ ID NO: 57250 - DNA, 344 bp, Glycine max
tgctgtggtacaactcccacaaaaagattttctacatcgtcatcaccaatcatgacaatggtgcttaggaccaacattgtgttgacccaatgaactctaaagcaaaatttgaaacttgaattagctgccaaaagaccatggtcatgctcaaacccgcaaggttgtgctgatgctacagagatagttccatttaagccattataaatagaaaataggaaccctcaattatatgatatttattcaattttttaatttgagagttgtgtgggagggcttctgatggaagcttgcttgtggggcttctatggaggcaggatctttgatcctcaatgaggtcctttaat

SEQ ID NO: 57251 - DNA, 520 bp, Glycine max
  unsure (1)..(520): unsure at all n locations
atcctcttagtcacctgccgcatgcagcttcgggtgctcaattgctcaatgttgctgcatggtttggcanangtctgtatggggggcagtagaggagcacaaaccacagacccttgcaacagatacagatttctgattcaaggccagctgggttaccaagttaaccaatgcatctagnttgccttcaagcttcttagtctcagatgatgcagctgagnttgtagctacctcatgcactcctctaatgactatggcatcatttctggcgttaaactgctgggagttggaagccatcttttcaattaaatttctggcttcagcaggagtcatgtttccaagggctccaccattggcatcatctatcatacttctcttcatattactgagtccttcatanaaatataggagaagaagctgctccgatatctgatggtgagggcaatcggcacatatgtttttaannattctccagtactcatacangcnntctctcactgagtgctaatacctgaatatcctt

SEQ ID NO: 57252 - DNA, 335 bp, Glycine max
ttggtgctggctttaaatgcaacttctgtttgtgggaggtaaagaaggatctgggggacacaaatctgagggacaacagcattgataattgcacgtttgaaattacttgatgctttagaaacacaattgggtaagatactaccttctataaatcacattgaagagaccagttaaatagttacaaaaacaaatggaaataaaatagtgaaggaaagattagcagccaattaggaacctccttgccatagaaaccagaacagataaaaaataagatgataatcaacgatttatacttcatgttagctcaggcatttcatcgaataggtcataggcaa

SEQ ID NO: 57253 - DNA, 528 bp, Glycine max
  unsure (1)..(528): unsure at all n locations
atcctcttagtcacctgctcgatgcnagctctggtcgagggtacttacccgttgttatatcgaagttctatgaagaactaatgaagaacgccgaagaacggttgataccttngcgatattcttcacagnaaacgttgcggaaacgtttcggaagcgcctcggcttaaattttcttcacggaaacgatttttccaagcaaattctaaagagagagaagtgcctaaggggctgaacctttttcttcttcacttcctcccctatttatagcanaataggggaggtggttgccgcccagctcgcccaggcgagccaggttgcttcctccagaagcaacagccttctggaggaatattctggatggcccaagtgggcctgggtgctatntgcacccncatntttactaagtacaccccctctgctttgtttggtgatcttttttcganagtaccgnacttacgaattcgaacgatcttgtttctttcgtatgtacagaactgngatacataatcatccttttgactacgatgt

SEQ ID NO: 57254 - DNA, 333 bp, Glycine max
ttgacttgagttatcaagagattatttttatgtggccatgacatgaatttcaagaatcaataatctgtctttcaatcttttctcatcatcattcaatatctttcaactctttctacacaattttctgattcatttctcttcatctttctaaaagtttttgttcaacactttctcttccgagaaaagttctttgttcaaaaacttgtgctattcatctttttcattctcttcttcctttgccaaaagaacgaaggactaactgcctgaattcttttgtgtctctcttctcccttacaaaagattcaaaggactaacagcctgagaattcttttg

SEQ ID NO: 57255 - DNA, 362 bp, Glycine max
  unsure (1)..(362): unsure at all n locations
tgcccgctgcaagcttcttanncncacctgangaattatggctactttagctctcctctaatgacaagagcatcacttctgacactaaattgctgggagttcgaagccatcttctcaattaaatttctggcttcagcaagggtcatgtctccaagggctccaccactggcagcatctatcatacctctcttcatgttgctaagtccttcataaaaatattggagaagaagctgctctgaaatctggtggtaagggaaactagcacatnaattctttaatctctcccagtattcatacaggctctctccacagagttgtctaatacctgaaatatcctttctgatggtcgtggtcctggaagc

SEQ ID NO: 57256 - DNA, 324 bp, Glycine max
tcaacattcaatttcgagggtttctatatattacgggattcaatcagacatccgagtaaaaagttattggcgtttgaatttgctcagagcttcggcattcaagtcggagcctctcgatatactacgggactcaatcagaccaccgagtaaaaagttattgtcgtttgaatttgctcagagcttcggcattcaagtccaatcgtctcgatatattacgggactcaatcagacatccgagtaaaaagttattgtcgtttgaatttgctcagagcttccaaaatctatttcgagcgtttcgatatattacgggactgaatcagacat

SEQ ID NO: 57257 - DNA, 169 bp, Glycine max
  unsure (1)..(169): unsure at all n locations
gagtagaattaccaacatacaaagacagtgcttataaaacccatcggtgggtaatccagaacagtgacggtgcctattaaacgcgtcgatgtaattaggaaatgacgtcgttntcagtaaaaacgtcgttgaatgaagcgcatatttactataatgtcattgcttgtta

SEQ ID NO: 57258 - DNA, 338 bp, Glycine max
tgcttctacactcttcccctttttgatgatgacaacttctgaaatcaagaaacacactcacacattttttcctagtcgatcactcacataaatttccattctccccctttgtttttgagtttatgcttctcttgaaattaagttaattacttatgtgagttcttgatttattccctatttctctccccctttggcatcaacaaaaagccaaagtgcgtaacaagtataagacaaacatatactattaatcattcacaaggcatacattgaaggatataaaccaatcatgaagcaagaaacatgaatagatcaaatatataaaaaacacagtcatatag

SEQ ID NO: 57259 - DNA, 236 bp, Glycine max
  unsure (1)..(236): unsure at all n locations
tcagaannatatnttcaagggtcatatctgttcaagtgggtnttacatggccatcacaggtctatttatatgtgacttggaacacgagtttgctcagaagttttcagaacagaaaggtcttatcctctcaaaaagaaaaatcatcttatcctcttaaaaattccttggccaatacacttgcaattcaataaagaattatttgagtgctcaattgtttaatctatctctttcaagag

SEQ ID NO: 57260 - DNA, 298 bp, Glycine max
aactcaagctttaacactatattttctcacagtttttatatttgggagccactccaaaccttgtggtcggactatcagccaattatgatagccgccgatgctcccattactgctgcccctaagcgatttgtcctttcttcacgccgcattccaagccttgcgaaatccttggagtaccctcgcgttgtggtcactaaaaacccgtgcgaagaaaggcgtgaatctttcgtctaatggcgctcctctatggggtagcccaactgtcttatggggaaaacgggattataattaatacaac

SEQ ID NO: 57261 - DNA, 351 bp, Glycine max
agatgatcacaaaaagctcagaagtcatgatcacttcatgataacaaagatgatgacattcaagaatgagttcatgattgagtcaagaacactctcaggatcaagaggaaatctgatttcaagaatcaagaatcaagattcaatattcaagattcaagaataatcacgatcaagaatcaagactcacagattcacgagtcaagagaagacttaatcaagatcagtattaagaaggttttcaaaacatttgagtacacaataatgtttcacataatcattaccagaggagtttactctctggcaatcgattaccagaatatagtcatcgattaccagtggcttaacacgtaa

SEQ ID NO: 57262 - DNA, 372 bp, Glycine max
  unsure (1)..(372): unsure at all n locations
actatganggcngangggtggactgatcaccctangagaactctcattaatcttcttgtgtattagcctacatggactattttcttaaggtctatngatgcttcctaagcttctaaaactgctataatattgttcaagctcttcaaggagatggtgttatatgttggagcagaaaatgtcattcacattgtgaccggtaatgttgctggtagggtattggaaaaagaagtttctaagttatattggtctccttatgctgctcactcgcattaattgatgttgcaagaacttggaaaatatgaggaatgaagtgagaatggttcacatgcctaaaaacatactangtacatatataatccattgtatgcatat

SEQ ID NO: 57263 - DNA, 506 bp, Glycine max
  unsure (1)..(506): unsure at all n locations
tcacaaccacatanaacttatctataaaacttaacctcttattattgtaacacctaacactntctcacaccatanaaaaggactaaaacttgaaattggttaaattaatctttagtgctagcaaaactaacaaatgacttgttntcccattgaaccttctccatgggatttctaatcacaaatattgngttaccactatttgtttgttttaagtggcataagtctcattccccttgatgtttaatgtaaatatgtaataatcttatccttaggggtttaagtcagaggattggccaaatccgtcattgatttcacataaacataagatttatatcattntaagcaaatgctctatcgcattatttcttaatntatattccaacggaatatttgcttaagtgtaattttagccactaagtctcaatcaaaccatctatagagcaataaacctcaacttaattattatntagtgtggtgatctctaagtaatgaccataaccaaagta

SEQ ID NO: 57264 - DNA, 337 bp, Glycine max
  unsure (1)..(337): unsure at all n locations
gagantatagaatacctccgctttgaggcaattcaaacgacaataacttttttactcggaagtctgactgagtcccgttatatatccagacgctcgaaattgaatgatgaaactctgagcaaactcaagccacaataacctttttactcagatgaaagatacagtcccgtaatacagtgagacgctcgaaatggagaaccgaagctcggagcaagacaaacgacgataactccttactcgcatgaacgagcgcaccccgctaaatgacgaaaccctcgaacccgaatggagcagctctgagcaatattcgacgacacctgatcctactcggaggtcc

SEQ ID NO: 57265 - DNA, 356 bp, Glycine max
atattgacaggtcatccacatattgacagtgttagaggccaagatgtcaatgtcatcaagctcatccatctagtcgtcctacatttgaaaataaaatcttgaggttatgcctgactatagttcagatacaataccaaataaattacaaaattcatctacatattttcatgcttatacaagagggaaagggaagtccaatagaaaacagattatagtgaatacaatcaagtcttaattatagtaaaaacaaattatagtgaattaacatatgtaccattagacgattaagaagatgttcaaattcaaagtgaatacaatcgtgccttaattatattgaaaacttgtttatctcagct

SEQ ID NO: 57266 - DNA, 361 bp, Glycine max
gagactataaaatacccacgcttgcctgcccgatgtagcagaaatgatgtgtttgagttatgttggggaatggttacgaacccagaataggtttaggcaaagacaacagcggcataactagcctgataaatgccaaaggaaatcgtgggaagtacaagttaagctataaacccactcaagcagatattaagagaagcatctcgggaacgaatagcggtagtcaaagcacgcggttgatacaagaaggtgaaggaagcccaccctgccacataagtcggagctttataagcgcgggtctgggggactaaagtcaagtggtcgcgatatactaagatgatgttcccagtacattggatgtggt

SEQ ID NO: 57267 - DNA, 333 bp, Glycine max
  unsure (1)..(333): unsure at all n locations
tatcacatgcttatgctcaatngttagtcgnggctatacgagacatcttgccaaacaaagtcaggttaacgataactcgcctgtgatttttcttccatgctatatgtagcanagtcattgatccagtcatgtttgatgagttggaanataaggccacaattatactgtgccaattggagatgtattttccccctgctttctttgacatcatgattcacttgattgtgcatctggtcagagaaatcanatggtgtggtcctgtttatctacggtgaatgtacccgattgagcgatacatgaagatctanaaggggatacaaagaatctatatca

SEQ ID NO: 57268 - DNA, 342 bp, Glycine max
taaagtatgcccgagtcattcatccctatgagatgttgttgaagtattggcgatcagaattgccattccttggattatagggttgaaccaagctcatgcttttacaaaaaggttcatcaagtcaagttgaaatatggaagtaaccgtcttgcaaaattggggcaaaagatgaatcgagtcacatcactgcttcatctactgccaaacatatttaggattgttgatgtccttgttacttccagtttcactttgacaaagatgtcatggaccatgttgaaaatctaaactgattcaaccccatatcctgtgtaaaaattcgcaatacttcaactgtacaccatt

SEQ ID NO: 57269 - DNA, 399 bp, Glycine max
  unsure (1)..(399): unsure at all n locations
aagtgttgtttntcaccttctcgttaagccaatctgttggcttatcgagcgtccgttaagcacaacactcataggctaagcgcgaggaagactctggaagaagatgagttgtacatgtntgctaagtgcaccgcttcatctcactaagcgcaccgcttcagttcatccactaagcgaganaggcacgcgctaagccgaaattcactaatgtgcgctaagcagtccataagagatacttcccagagtccaagactgcggaagggaaagatgcaatctctttatttcatcagtttcctgatgaatctttgagtgaagcatnggagaggttcagaggcttggtgagaagaactctcactcatgtggtttccaagcccatccaattgaatatgttatagatgg

SEQ ID NO: 57270 - DNA, 358 bp, Glycine max
gagggaataaactacgcttacgttatgcgcgagctggctattttttatttactcgattgaaatttttaggctaccgaacctggctgggatgagttatgtatacacatatacatgatgaactattagctatctacgtaagaattgttgggtgcacgtgacacgttcattgtttgatcgttacatatcatgttcattaactcgaaacatagatgtgcattaaacacccgtatatcctatcatcaacttaattagtttatcagagaaagtcaagtcctataagaactgataaaaaaaaatagttcgtaaccaagcatatgataactcttttttgggaataccaagcgtacgttaactgaat

SEQ ID NO: 57271 - DNA, 459 bp, Glycine max
  unsure (1)..(459): unsure at all n locations
ctttacagaaactcagaatagcgcagatacaaattatataanagaagaatagtagcctagtacaatagggatataataacctatcttctaacattccccctcaaactagagcatatatatcatatgcaccaagcttggaacataaaaattgaatcttacgtccccccaatgacttagtctaaatatctgcaatntgatcattagagctaattttttcagtactaatttccttagttaacaacttttctcaaacaaagtggctgtcaatttctatgtntggttctttcatagaatactgtattagaagcaatatgaagtgctgcctgatcatcccaatatagttgcatcagctaaacttcacaaaattcaagttcttggagttgttgacccacatcagttcacaagtggctaaagtcatgttcctatattcagcttctgcactagatagaacaacaacat

SEQ ID NO: 57272 - DNA, 279 bp, Glycine max
  unsure (1)..(279): unsure at all n locations
tatgcaagactttcttttgattattttttatccgaaantgaattccactgagctaaatggcggggtttttttttgctttttgtccgcgggaggagttgggctgaccttacccaaccctacccggtgttttattcaactaaaagacccttccacgccgctctatgattcagaacaggctttcatctaaaagagaacccaaccgcgagccttccctggacccagccgggttccttccgtaccccggcgcaaccaggcgggttccttccgcaccccgcacag

SEQ ID NO: 57273 - DNA, 205 bp, Glycine max
  unsure (1)..(205): unsure at all n locations
tatcatcaaatatnacgcagctggctctgatatgattcattccttcacacctacatcctgagatctgatgatgtgacactgttggtacactgcgattgaacaatccatatggagatttcttcaggatgcgtcgtattatatgccctatttaagatgtctcatgcactgtgtactgcttatatccaagatggttgaggaagacgag

SEQ ID NO: 57274 - DNA, 332 bp, Glycine max
tgcatccattagaagagaatgagcatgtgattggaagtatgactgaatatgttagtcagtttgtcagattgattgtgaaggaatgcattgagcgtatcccagtgacagcgtgatatttaaattttgagagaaacgactgtcatttagtactgatttttgcatgaatctctgaagtatggactgaatgcatgaaattgattgtgatagccacttagccaaaaagttgaccacgtgctagaatgatttatcccatgcacccagtttgagctgaatgaattattaattgattgaaccctgagcctatatagtgttatctcctgctaccttgactt

SEQ ID NO: 57275 - DNA, 471 bp, Glycine max
  unsure (1)..(471): unsure at all n locations
aactaagctagccaattttagtgtagtctctcttttcatcatgttcttggatatgcaaaactcgaatctgagatgctggttaatggatctaaactccgtttcacttgaaccaacataatgttggttgagattcatggtttaaatttatttctagaatgaaaaanttaaaaagaattataaatataaaattaacacatctattaattaagatattaaattttattgaaaaaattaaacaagtttaggtatacatgaataatatctagaatattaataatggtttctattattgacctttataataaatagtcaaagacatgtccaaaaaatggttntgatgaaaaacaatactactcattaaatcaataataaaatattaatacctttaacananatagttgataactatcaaattnntaaataaattattaattaataatgtacttatcanactatttaaattaatatcag

SEQ ID NO: 57276 - DNA, 336 bp, Glycine max
tattgtccaaaaagaaaaccttccatatctacgtaaaccaagatttattttgatacttgagttttgcggattaaattatcaggtaaatcttacaataatacacagctttagatttcttcagaaaatttaactttcgtaaatacccttttgacgttgacgtgtatttaaggaaattaaaaaattcaacatacgatttaaactaaaaactaatgacgtaaggagtaaccataaactaatgttgcatgttaccgaaaaagaaaaggaaaactaatgttttcattttatccaaaatgagatttttggttttaactaaaaatatattgaaaacgagatttt

SEQ ID NO: 57277 - DNA, 462 bp, Glycine max
  unsure (1)..(462): unsure at all n locations
agcttcaccttctggtcctcctcatatttgttgcatgtttaaacatgctctantttcatctcccactccaagtaggcctccggatcattctttcctttagatggaggaatgttgagtttaataccatcaattcggttntgtctatgaacaccatcattccctcttctcctcctttcttcttcattatgatctctattctccatttgatccaacctctcatggagcgcatcatctcgttgtttcattaacctctccaaatgttgcatcaaagcttgcatttggaattgcgaaagccccactccatcattaggattagtacctgacatctcanacaaacaaatcatacgtaacaagacaattatagttgctgtttgaatacctcacccactcaagtgtatcacacaattatgggctttctctaatgaaacactcttgcctttaccactctaattcccttgagtc

SEQ ID NO: 57278 - DNA, 283 bp, Glycine max
cacacaactcataggtttccggatgtaactatgaaaactacacgcaatccatgcttaagagagaggcctatttttggctgcggcgtacatttggggaccgggggccattaagacgcttatggcagcgctttttcatttctaacacgttcctgtgatctgcaacccatctgcgtggaaattcttaaaaacctagtaggtggaacgggcacggtgctaactattcagggctcacacgtcacgacggtcggcaataataccgcacaagatcccgtaaataccgaga

SEQ ID NO: 57279 - DNA, 345 bp, Glycine max
  unsure (1)..(345): unsure at all n locations
ttcccttatagtcctctcacanggtagagggtgtgtcatgttcttagaatgttcaaaatcagaatgttcaaaactataatgctntaaatcaccaataacagaatgctcacgatgctcaaaagatactaaatgatgtctaactaatctatgaaatgtcctatctatctcaagatcaaagggttgtaagtcagatggattgcctctagtcatacactatattcagcatgcacaactagttgccttcttatgctagtaacagtgtaggtntgaactacagctaccattaaatgatatccaaatgacttgaagatttgttccaaccttataaatgatgagaagatccac

SEQ ID NO: 57280 - DNA, 338 bp, Glycine max
tgcctcaaagaggtccaggaatgatttgcagccgaaggaactagttccgctccggagtatgacagtcaccgctttaggagcgctgtacaccagcagcgcttcgaggccatcaagggatggtcgtttctccgggagcgacgcgtccagctcagggacgacgagtatactgatttccaggaggaaatagggcgccggcggtgggcatcactggttactcccatggccaagtttgatccagaaatagtccttgagttttatgccaatgcttggccaacagaggagggcgtgcgtgacatgagatcctgggtaaggggtcagtggatcccgtttgatgccga

SEQ ID NO: 57281 - DNA, 368 bp, Glycine max
  unsure (1)..(368): unsure at all n locations
atctcttagtcacctgccgcatgcaagcttgtgtanatcatgcanngtttgatgatgtcaaatttattattntgataatgagtgtcatcatgagagaaggggagaatatggatcaagcacgttttgataatgttgaaaagaanttgcttgataatgagtgtcatcataaaaaanagggagaatgtggatcatgcttantttaatgatgtcgaanagagatcacttgattgtcgtcatcaaaaagggggagaatgtgaatgtatgatgatttngatgatgctaaagaagaatcaaacaaggctgctacatntgcttcaagataatacaagattgcttcaacaaacanagccttgattcaagatttcttc

SEQ ID NO: 57282 - DNA, 447 bp, Glycine max
  unsure (1)..(447): unsure at all n locations
atctatgcgtattctagtaccttaagtttgttgagaaattntacaaacaagagggaattggtgagacatgctattactagatgtgccacttcttatctaatcttagaaaggctccacanagagaaagccaatattagaaagatgtttacttcagatgaatggaccttgaacaagctatctaaggagcttaagggaaaagaagctgcaaatgtgtggatcgagtggcctcanaataattaagaagggggggttgaattaattattcctaaacctttactaattaanaatntactcttctaaggcttctacttatgttgttaagagaataaggagtagaagagaaacttatcagaaagtaaaagaggaaattaaatgtacagtggatagtaaaagagtagggaagagaagacatacacacaagagttttatactgggttcgcacaaccc

SEQ ID NO: 57283 - DNA, 324 bp, Glycine max
tcggaagccccgaatacccttttccatcaaaacgtggaggatcttgataagttcacccctccccttttctaaatgcactcctttttatttacacaccccattttgctaaatacactcccgtttttgtgtttttttaccggtttcttcccgaaactttcggattacataacgacacccatttcctttccggaatgttgcgaaactttacgaattatgcaacaaggctcttcttgacttccgaaatgtcgcggaactttatggattgcgcaacaatgcctctttttgacttccggaatgtcgcaaaactttgcggattacctaacg

SEQ ID NO: 57284 - DNA, 409 bp, Glycine max
  unsure (1)..(409): unsure at all n locations
tgccgcatgcaagcttataaggatgtgatcttagtcatgagaggngtgtgtgtagctaagctctagcttctcaaagaagtgttctcaaagaagcttctcaaggaagttntctcaagaaagcttctcaaggaaactacctagtctatatatagaagcatatgtaacacttgccgtaactttgatgagagagagtcttgtgagacacaactcanagttcaacttctctccttgtttttcttccttcaatttcatgctcccccctctctctttctctccctctgtcttttcctccattgaagcatcctctccaagcttcttatccaaggctcaacttggtggtaaagctccttcttccatggcttattccctagtggatggtgcctnctctcaccttttctcctttgtcttc

SEQ ID NO: 57285 - DNA, 269 bp, Glycine max
tcctaaagaactagctccgctccagagtatgacagtcaccgctttaagaaccctgtcaccagcacgcttcgaggccatcaagggatggtcgtttctcccggagcgacgcgtccagctcagggacgacgagtatactgatttccaagaagaaataaggcgccggcggtgggcatcactgggtactcccatggccaagtttgatccacaaataggccttgaattttatgccaatgcttggcccacaaaggagggcgtgcgcgacatgaaaa

SEQ ID NO: 57286 - DNA, 320 bp, Glycine max
caccttctattatttgaagccacacagttcagcagaaccacaatgaacaccacgaaatattaattgatttaataccaattcatctgcttgcgggagatcattctatcatagcgaatcacaagccgatgaaaatgctaataacaattggctgggatcagatataaaataatacaatggttcttcaacaataaatcaagttctgatcacatcttactctggcaatccctcctcgagaagtcacttcaacacagaggcgatgcaaatctagttctcttcctccaacaatgggaatcctgcaacaaaatttcaaatgccacaaa

SEQ ID NO: 57287 - DNA, 416 bp, Glycine max
  unsure (1)..(416): unsure at all n locations
cactggtggtgacttgaaaagagaggggttttccattgaggtatgagtttttatgatttattggtgtgttcataaattactgcattttgttgtttttatgatttttcacttcctactacttttgggtttgatgttgtgataactatcttaaggattacatagtagctaagagtggatttgactgttgatcaaacacaaaaggtatttgataggatcctaacaaagttaggtcgtactgccccaccagttcttggcactactacaaaagttatgttttacgacactatttctaaagcggttctctaaggaccgtcttagtaagtatcgtggtgacaattttgtaattagtgaaataaaanaagctttttacgactgacattctaaggcggttattaaaaatcgtcttagaatgtata

SEQ ID NO: 57288 - DNA, 486 bp, Glycine max
  unsure (1)..(486): unsure at all n locations
gtgaaagaattagtatgggcagaaatgtctccgcattgattggtaaatttgttcctcaaattcctgaaaaatgtaaagatccaggtacattcagcataccttgtattatagggaacaataagttttacaatgccatgctagatttaggagcttctgttagtgttatgcctctgcctatttttaactctctatctctaggtcctttgcaatcaactgatgtggtaattcatttagctaatagaagtgttgcctatcctgctggtttcatagaggatgtcttagttagagttggtgagctcattttccctgttgattnttatattttaaatatggaggagggattttctaaaggatcagttcttatcattctaggcagaccttttatganaactgctagaactaagatagatgtatatgtacgcacactatctantggagttggtgatataactattcattntaatattcttgatgctataaacacca

SEQ ID NO: 57289 - DNA, 180 bp, Glycine max
atatgaattcgagaaattcaaatgagcgtctattggggtagacttgacatgaatgtgttgtctacaaatcagtatatcatctcataaagaaaggaaatcgtcatattatctgcaacaatccatttattggaaatgaaaaaataaacgatctatgttgacgaaaacgagaagtttatcata

SEQ ID NO: 57290 - DNA, 409 bp, Glycine max
  unsure (1)..(409): unsure at all n locations
tctatggaggctggatctntgagcttcaatgaggtcctttaatggtgagtttccaccagggagatgcagcggaagacaaagttgaagaggtgagaggagacgccatccactatggaataagccatggaagaaggagcttcaccaccaagatgagccttggataagaagcttggagaggatgcttcaatggaggaaaagaaagaggggggagcacgaaatngaaggaagaaaaagggagaggagttgaactttgagttgtgtctcacaagactctcattcatcaaagttacaacaagtgttacacatgcttctatttatagactaggtagcttccttgagtagctntcttgagaaaacttccttgagaagcttctttgagaaaacttccttgagaagcttctttgagaaa

SEQ ID NO: 57291 - DNA, 531 bp, Glycine max
  unsure (1)..(531): unsure at all n locations
nagatgacatgacttngcggacccttnnatnancccccctccggntagagaatatagagtgtcacgtgctcatgcgactattgttacccgtggctatacgagacatcgggcctaacaaaaccacaatcacacaccacgcacctgtgctctgtcttacatgctatatgtagcattgtgatagatcctctattgtatgatgactcggaccgtgaagacacccttatactatgccgggtggacatgtatnaaaccactacctggtgtgacatcatgaaagactcgattgagcacctggttcgagagatataacgctgcggtaactgtcttctacagaggaggtacccggatgagctactcttgaacatctatgggaggtctacaacaaatctatatctgccagaagcatctattgttgagaggtgcagggcataggacacctgngaatactgttcacatacatagataggctagtactgtgggctatctgagtgcnacatgatacagaagctgagtccggtcaaatgactgccg

SEQ ID NO: 57292 - DNA, 467 bp, Glycine max
  unsure (1)..(467): unsure at all n locations
ttagtcatgctggttggaatntaatcaatgaatcaatcatgtcactgaaatttggaacataaatgaacttctcccttactatcattctctntctctagattttctctctctctagctgccttgttatgttatatatctatctgcatatacaaatgatactctctttttacttcatggtgaataattaacctacctaggtctagaatgagggactgaaagttccaagagaagagtttgaatccagagaatattagttgtggcagcaactaaacttctatattttgctgcaggggccacttctatatcagttgtggctttgtatctattgatattgccattagaattaataatgatcaagcaaaaaagagaagagacgttatttcatatacattgacctatagattgatctactaacccgtgtgcttaaggaccatatacactacatctggtaaaagcaaatgttgtat

SEQ ID NO: 57293 - DNA, 172 bp, Glycine max
  unsure (1)..(172): unsure at all n locations
agaaattcgcccctcatgggcaaattctctcggcagcacggtaaatccgtcattacacccttcaatctcgaacatcacatctctccatgacaatttgttcattgtgtcccaacaattgatcaccctcctaaaatgcatcttcgcaggggagctactgattaaggcactctan

SEQ ID NO: 57294 - DNA, 368 bp, Glycine max
tgctgggaacgcctctagttcaacacccgtgctttctaatgcacccacccagagggaagcttcccaagttccaactccgaacacggctcgaccggccggtaattacaacacgacaaggaacttcccttcaaggccattgccggaattcaccccgctcccgatgacgtacgaagatcttctaccatccctcatcgccaatcatttggccgcggtaactcccggaagggtcctcgaaccccctttcccgaagtggtatgaccctaatgcaacttgcaagtaccatggtggtgccccggcgcattccgtcgaaaaatgcttggcccttacatacaaggtccaacatctaatggatgccggatggctgactt

SEQ ID NO: 57295 - DNA, 345 bp, Glycine max
  unsure (1)..(345): unsure at all n locations
cctcattgtctctcacagtctntagaattgggagccaatccaatccttgtgtccggactctcagccacttatgatagccaccgatgatcccattactgcttcccctaagctctctgtcctttcttcatgccgcatcccatgcctcgcgaactccttggagtacctttgcattggggtcactgaaaccccgtgtaatgaaaggcgtgatgctttcgtctaatggcgctcctctcatggggtagccaagttgtcttatggcgaggacgggattataattaatacaaccccatgttcccatccagggaacatttggacatccttcgcatgaagatacaatcctgattc

SEQ ID NO: 57296 - DNA, 486 bp, Glycine max
  unsure (1)..(486): unsure at all n locations
ntgagaagcatgtgatccttnggcatcatcaaaacattcagcttgatcctttgtctacaaaatcgacgttaacatataaatgttaacatcaatttttgaaaaaactgatgttatccaagtgatattaacatcggttttcgaaaaaccaatgttaacattgtctcgttaacattggtttttcaaaatcagatgttaatatcttcatgtttattacaattatgccccacccttttctaacatctatttaatcaaaaaccaatgttaaatatctttttttctagaagtatgttttgatgaatagatatctgcctcaattaatataggatcccaataaataagaccatgataacactgagaaggtatcatacttttatttgaattaattatctacgaaggagatgaatcaagaagatattgttgatttcatgttgcgcatggatattcaagactaaaggccaattctagctctatcataatatatatctc

SEQ ID NO: 57297 - DNA, 483 bp, Glycine max
  unsure (1)..(483): unsure at all n locations
tactcagctatcgaatatatataagagaactatgactatcgaagaatctattcttgtttcttggatgagtctaatgctattgctgcaagagaggatattctatatgatatcgcagaatctttataacaaatgcatatttatggaaaagattataaagganaagggaaaggaagcaatgaagatcctccaaaagaagccaaatcaaataatgaacttccaacagaatggaaagcttcgagagatcatccncttgagaacattattggtgatatctcacaaggggtaacaactagacattctcttaaagatatatgcaataatatggcttttgtgtctatgattgaacctaanaatctaaatgaagccataatagatgatcattggatagttgctatgcaaaanaaactaaatcagtttgagagaaacaatgtgtgggaactagtagagaaacctgaagactaccccatcatatgaacacaatgg

SEQ ID NO: 57298 - DNA, 375 bp, Glycine max
  unsure (1)..(375): unsure at all n locations
actaagctttcatccagacactctcttggtggtgaagnttcttcttccatggcttattccctactggatggcgcctcgtctctcctattcttctttatctttcgctacaactccatgactgagaatcaccattgaaaaacctcattgaagctcaaagatccagcttccatataagcttctcaagccagcttcaatcagtccttggtcttatcactaatctaacttagtttattggtagttcagtttacttattgttgaggacaaccaaagctttaaatttgggggagttgtataattggtgtgcatgtttactttttgcgcttaattttgacaacaattatcctaaatcttctcatttattgcttcgtttgatca

SEQ ID NO: 57299 - DNA, 479 bp, Glycine max
  unsure (1)..(479): unsure at all n locations
ntatgatcatattacgcactatgatactcagcttccgtgcttgatagaacttatttgggccaaaaggcatctttatatgaaagcttaataaacttttcttggtaggaatatgaacttatcataccaaaatgcggggtcattggccgccatattttcaattaaagtaaattttgtgcctgaacctctggccgccgaacacttgagaaatattgcggcactgaagtacttgagttatcttccaaggtcactcgtcgaggttgctctttagccatgacttcgacttccaattctgctgtctgagttccctggatgttgtgaattaaagatgatgactcaaanagtgagctctttaggatgatgctactgttatcggcaaagctttttttcttttgtgtgttcttctaaagggttcattctaatcaaggacctatccctgcgaaatctacctcaacctacagacatagtaccatcagaaaaat

SEQ ID NO: 57300 - DNA, 433 bp, Glycine max
atatagatgtcttcctctaaatccccatgcaagaatgcagttttaacatctaactactccaagtgaagattctctacagctactatgctcagaataactctgatggtagtcatctttacaactggagagaagatctctgtgaaatcaattcctttgttctgctgaaaccctttcaccacaagtctcgccttgtatcttcttctacctttagattcttcctttagcctatagacccacctattctgtaacgccttctttccttctggcaatttagttaaagaccacgtcttattcttctgaagggatgccatctcatctttcatcgctagctcccactcaatagtgtcattcccctgtgtagcctcattgaaacattctggctcaccagcatcagttaacaacaaataatgcaatgaaggggaatacctatctg

SEQ ID NO: 57301 - DNA, 413 bp, Glycine max
  unsure (1)..(413): unsure at all n locations
taagatctgtctgaaattgcacacggtggtcaatgtctcaacatatctgttatacaggtgtggattctgtaagtcaatttaaattatcgttaattacttaagttattgttgtaaattcatacataattaactttgtgttaataaaaataggcatctgactgagacaagtatgcgagcggcgaattccgatgtgtatggattcctcgagccacagtccatctagagatctangcaatcggaatttgaattagaaagttacatgataaattggatgcataattcanaacgcgatgtttacctacgagcctacctgaatggataagtaaaactgaacaactgaatttaaatagtgtataatactacaataacccatattggtctccactgcagtgcacactggcaaatggtcgtca

SEQ ID NO: 57302 - DNA, 298 bp, Glycine max
ctcgagagcttccgttgttcaatttttagcgtgtagatgagttatgtccccgaatcggacatctgtgtgaaaagttatgaccacttcaatgtctcgagagcttccgctgatcaatttcgagcgtctcgatgtattatgaccccgaatgggacatccgcgtgaaaacgtatgaccattcaaatttctcgagagccttcggtgatcaatttcgagacgcctgacgaattatgtgcccgcatcgaacgttcgagtgaggacttacgaccaagagaatttctcgagagcttccgctgttcga

SEQ ID NO: 57303 - DNA, 342 bp, Glycine max
  unsure (1)..(342): unsure at all n locations
ctttaatctccgcctgcattggcattgagttgagagcttgggcaattattctttaaagctggaagtggggctgaagtagaggatgcanggatgccanctattggtgcaaaggaagagggaacatcaattgctctgagcttggtcttccttgcctctggataattaactgtttggtcattcgcattccaacagttccttatgatataagctaagtaaatggttggccttaagttttcatatgaggtaagggcatcagatcccactcccctcgatctacacaaggttgtgactaaagctggaaagcctaagcgagaagagttagactgagccatcatggtcatt

SEQ ID NO: 57304 - DNA, 446 bp, Glycine max
  unsure (1)..(446): unsure at all n locations
acacttatttggtaatcgattaccagtgtctgtttctgataaatcaaaagatgtaactcttcaaaaaggttttgacttttttaaatggtctctaagtttttctaaaagttataactcttctgaatggtcttcttgaccacacatggagagtctataaaagcaaagctgtattttacatttcaaaaaaaatcttgaatacttttgcttttccaatcaatcctttacaagccttgaaatctctttgaactttctcttcttctttgtatcaaaagctttctgaagttttctggttttccaaaccttgaaaacttgtactattcatcttttcattctcttctctctttgccaaaaagaattctccaaggactaaccgcctgaattctttttgggtctctcttctcccttttccanaagaacaaaggactaaccacctgaattcttttgtg

SEQ ID NO: 57305 - DNA, 313 bp, Glycine max
atactcccgctgatgaccttatcaaccgcgtcaccgccctcgaatccaatctttatttctcttcgtcctcgctcactaacccttctcaccacaacccaaccccttcaccccacatgctcaaacttgatgtacccaggttctatgtgtcagaccactctggctgggtattcaaaatctcgcaattattttaataccacggagtccctgactcatagcggctcacagtcgcatcgctctacatggatggacctgccctcgcgtggtttacgtggatggtctgcaaccatcaacttcccacctggacagggtttct

SEQ ID NO: 57306 - DNA, 396 bp, Glycine max
  unsure (1)..(396): unsure at all n locations
tgtnatcgattacacacatactgtaatcgattaccagatgagtttttcaaanaacattctcaacagtcacatctttntatctgattcttaagtggccatcaaaggcttatatatatgtgactagagacacgaatttaacaagagtttttaagaacaaaaaggtcttatcctcttaaaaagcaaaatcattttaccctcttacaaattccttggccaaaactcttgtgattcaataaggaattatttgagtgctcaaattgttcaatctatctctttcaagagagagttcttcttttcttcttcttcattctgaaaagggattaagagaccgagggtctcttgttgtgaaagaattctaaacacaaaggaagggttgtccttgtgtgtttagaactt

SEQ ID NO: 57307 - DNA, 325 bp, Glycine max
  unsure (1)..(325): unsure at all n locations
ctgtgcacggctggacatgatatatgtcaggggttggtttattttaatgataaaaggggatgtatcatgagatgtctgcggnggtttgacccatgcgggcgccgaagtgacagcgtgggcatctccctccttactctttgcaccagntgctccaattcttttagcattggcacttgtggaggaaacgtaatcgaacttccctcttttcaaccatacttcaattctttcctcggcgaatacttggtccgcgaagctggacggcatgtaacctaccaacttctcatagtaaaacactggcaagggtgctaccatcatcgtgatcatc

SEQ ID NO: 57308 - DNA, 380 bp, Glycine max
  unsure (1)..(380): unsure at all n locations
agtgtccatattatctcttagtttatgtcatgaanatattataaaactacaaagcacatttaaataataacagcttccaaagttaccagatatcatcatatctatgatatgatgatccaataacaagcaaaactgaaaggtagtttcaattgggtataagttgcataaaaaaatttaaaaacactaagactactcaatacttgactggagcaaggatatcaagttgggaaccgagcttgtcttcagcaaccttctcggctttcacccttaatttgttgagctgcttctttctctcataaaccaattgtgtcttttcctttctcttcttttctagctcctatgagcaataaaacaattactcacatcagcaaacacatcta

SEQ ID NO: 57309 - DNA, 450 bp, Glycine max
  unsure (1)..(450): unsure at all n locations
agtttcttcaaaaggtgccaaatgaaacaaaaaattattacactgctcatgatcccaactaattttcatggaatacataattaaaattttcaacttactataaagaattgtgttacatggaaattaactggcatagttgtccccaactatgtaatataatttctccaaaataaaaacacctcatcgcgtgtgtatgtgtgttgtgttgtgatatttctgcatatataaatagcgtttacacatatgacaaccgttgtatgaaaattgtgttacatttgccaatgcagatctagaactcaattctatgatcaaatagccttcagggcgtgtgttaataaatagtttaaattatgtgtacgcacgtgcttgttataattagaacttttgatcatgagttaatntttacgaacataacaacgaatcttagtgtgctggaagggggaaattatg

SEQ ID NO: 57310 - DNA, 319 bp, Glycine max
atcacgagcgtcgtctccctttacatcattgggggtaccacctgggccggcagatccctacaccttttgggcgtgttctttgaaagatccgcccccctttttgcaaatgttctgtagttgcatcctatgcggaaccatatcaaaattgtactgatactgcctaacaaaggcaaccattatgtgcttccaagaatggactcgggaagattccaagttagtgtaccaggttacagctaccccagtaagactttcttggaaggaatgtattagcaattcctcatctttagcgtagttccccatcttctgacaatacatcttt

SEQ ID NO: 57311 - DNA, 427 bp, Glycine max
  unsure (1)..(427): unsure at all n locations
agtctatatatatagtgccttttcttataattatcctaacacgcaggagatcttattagtttataacatgtacctctaccaggcaaccatccaatgactgtggacacttcatttgttcagttaactgctgcagtgccaaacttggtggtactatagctgcactaaaattgtgctgcggtaatcagatgcagatgcaatgcagtataaggggggtaagacaatatattactacaattatgtgaacagaataccattgcacgcaatcaccattataggaattgtgattcattatgaatcacagtagcatgaccgaatatataatagccgctgtgtaaaataacataacaattgtctcacatacaggagaaaagagatactcctacgccatcattagccgttntacttattgctgtctctaaaaaaatgt

SEQ ID NO: 57312 - DNA, 486 bp, Glycine max
  unsure (1)..(486): unsure at all n locations
gacatcaaagatntagctaagggtaaccgtatccaccatcaccaaacctcatctttccatgcaatctcatgtataatttaatttaaaaattagaaaaacaagtattatcagcaaattaacatgatttgccacacaccaagcattctgcacataattcaagatgaatatgaagaatacaatggtgcaagggattggagaaaatgcataccgcgatattcttgtctgctactcttggtcatcttcacttggttccccaatgatgtcactagggagcagtagactctctctatacatagcagacagtagattgaaacagcaccaatctccacctccagcatatgtgagaaactcaaggagttctcctttgtgattacgtttctctaatcttcttccggtatttgatcccaaaatgtgaccatctttagtgatgcatatggnggaaaagtgataattacgaatttataaataggttaaccatgtcttagt

SEQ ID NO: 57313 - DNA, 447 bp, Glycine max
  unsure (1)..(447): unsure at all n locations
ctgctagtctctgcgtataaagtgtcttcatatatctcagtattccttactccgctgagagtgtggcttgcagatctagtccaatctacactacacgcttcttgatttaactgtcaaagaaacaaattaaatcatcataaggcactaaatcagataataataataataataataataataataatggactgacagcccaacatttaagcaagtgcacgcacctgcttatacagagcataaaagttcacatcatgttcagagtatatcatgtgtgcctgaaataaaacattaagttaattcaataacttccatttatcaaatagacagttctattctatgatcaataagaaaaaatacgtacgatcaataagaanaatgatacttccagtgcgtggtatagcttacaagttcatgcagtagaagtttcttgatactttcatatttcct

SEQ ID NO: 57314 - DNA, 423 bp, Glycine max
  unsure (1)..(423): unsure at all n locations
ctcatgctcgcaccccttattctaatctagtataggtagccactntgataccaccaatgaaacccacctttaatactatgcctattaagaacttcactctgtctcaaaagcaagagaggtacacaaagggcttatgcttctactttgatgagaagtttcacaccagtcattgttgtcaggctaaacaattcttgctcttgttattggacaaggaaccttctgaaggctccccagaatatgcaacttctgtccaagagtctaatgaccttgatccttttacaactctntttgaaactctctattgaatgagttaaggactactatagctctttccatgaatcaaatgcagggtgttgaatgccattacaattagggttcgatatcatcaattctagtttgccggagataccacaaatgacttga

SEQ ID NO: 57315 - DNA, 467 bp, Glycine max
  unsure (1)..(467): unsure at all n locations
tacccatcacatgtggtactaagtgtgttgtcttcgatggtgcacaacaagttttccacatccacaatgcgcgcataaacccaccatcccctgttgcccaccttcaactgaactcacgtactcccacgtagcccatatcctcgtttctctccacccgggtccccatcaatcctcccaagcttccacaacatccaagcaaaacaacattcaaacagcacaagctatcacagccaagcaaaacagagcanaggcagaaaactctgctcaacacatcaaccaaaatcacaacttttctctcttaaggaccacagtaacaattccttcgatccaattcgttaaccgttggatcgactccaaacttttactggacgtctatagtgcataagcctacattagtgaccgtgggatcgactatcanacatncagaactcattctgtactactctttgcacagccgaccacacaca

SEQ ID NO: 57316 - DNA, 304 bp, Glycine max
  unsure (1)..(304): unsure at all n locations
tatactcaacagacacagctttttatgtggttcttgaatggcttccaccgcctatatatatttgacttgagacacgaatttgctaagaggttttcagaacaaaaaggtcctattctcttataaagccataacggtttattctcttacaaattctaggcccaattacttgtgattcaattagggaatatttgagtgctcacaatggtcaatctatctctttcaagagagatatcntcctttcctcttcttcattctgaaaagggattaagagaccgcaggtctcttgttgtgaagaattctaaca

SEQ ID NO: 57317 - DNA, 360 bp, Glycine max
  unsure (1)..(360): unsure at all n locations
tctaaactntatacaagaatgaagctctgataccacttgttagacaagtggcctcaaatatcttaagaagggggggttgaattaagatattccaaactacttccccaattaaaaatctatttcactttcttttcaagttataaattcccttaacaatgaacttcttaaatattaattcaaataaaaacaatttgaatatgaatataaagaaataataaacaaaggagtttaagggaagagaaagtgcaaactcagatttatactggttcggccacacccttgtgcctacgtccagtccctaagcaacccgcttgagagttccactatcttgtaaattccctttacaagttctaaacacat

SEQ ID NO: 57318 - DNA, 548 bp, Glycine max
  unsure (1)..(548): unsure at all n locations
aaacgttgatacgtgcatntncagccncccctcantattttngctngctggcggagcttctatggaagatggatctatgagcntcaattattgttttttatggtgattcaccaccatggagatgcatcgcgacgacnatcgataacacgtgagaggaagcgccatccactatggaataaaccatggaagaaggagcttctccaccaagatgagccttggataataaacttggaaagggtgcttctatggacgaaaatatacaagggataaatagagaagggggagctcgaaatattatggaaatataggagagagattgaactttgacttgtgtctcacaagactctcattcattagacgtacaacaagggttacacatgcttctatgtatagactatgtatcgttcttgagaagacttcttaagaagactttcttgataagcttctttccgagaaacttcttgagaagctatagcttatctagactcacccctcttaaaacatagcgtacgttctgacgaaatcatgaaatacacaaagaagccctt

SEQ ID NO: 57319 - DNA, 441 bp, Glycine max
  unsure (1)..(441): unsure at all n locations
aagcttataaaanaactataataagtcacaagttacttggatcatgaattgtttgtgttaaataaattcatatttaattaaatttatctagttattattaaatatattctatgtagcatttcttttacatgccataagtatcctttgagtatttaagagaaatgcatactcaagatgctactattaattaagataaaaaaaaatagaaagaataatttagaatttaagataaatatcacaagtgtcccatgagtattatcctatattcaagatactataattattaatgtttccattatcaataatattgacatcacatatatatatatatatatatatatatatgaggtgctgtattattatcactatcattaatatatatcactattattgctactatcaatagtactactatatcattgatcacgctcacatcacccc

SEQ ID NO: 57320 - DNA, 404 bp, Glycine max
gtcatggctgtgagcattgcaatgcattaacttatatcttatctaaggtatactgccaagtgttttgctctaactctaagtattgagttttgggatatgagaagcatgtacgggaaaaaacttcattttggttatgctgacatgggctcaagacagataggagagagacaaacgttctcatggcacttgatgtggcaatgtccatagtaagctgttactaataacatatcctaacctaatgattaacttaagtgacaaaatgtagaataaaccattttgctatattcatataaaatctatgaattgcgattcacattaatatatcttcttccctcactcctactaactaagaattacgttgtgtttaaaatactttttcaaaactaagaaacaaaaatacaatg

SEQ ID NO: 57321 - DNA, 352 bp, Glycine max
  unsure (1)..(352): unsure at all n locations
cactcatactttcatcatatagcttatcacttcaattcggcgtttcatcctaaataaaatgtagctcaaaacgtgctccacttattaattctgtcatatctcaaaacttaagtcagatgagtgttattcctcgtcattataagaagaaaaggctctggttctatctatctatattgggtttgcttttcaaagcatcctcccgattcattagatgcatgagttatccttgtctcttcagtacggcgagatatgatgtatcgggaaagtaatgtaactcaaaatggttaaataaaatgcatcaattggtgttaatctaatatggcacgtatnttctattcttacgcatagataa

SEQ ID NO: 57322 - DNA, 247 bp, Glycine max
tatgagctgctgttctcgtagttcccatgagcttggagagttttgatgtgagggggaagagtcttgggtgaagacaatgttccccctccacccctttatatattcgtacaggggttgctcgcccaggcgagctaacctgtacccttattttatattataaggggaacattaaccatgtacgcttcttccttatgggttagcattttcccacatgaacctacttaatgtataattatgtgtctattac

SEQ ID NO: 57323 - DNA, 358 bp, Glycine max
  unsure (1)..(358): unsure at all n locations
gggacttacaagggttgagtagtgaccctgcttggttcattgcccagtggtgggaatgttctgtaattctatgtgtcacttcctcgtatctattacctgattactgagatctaaacttcactgtaaattagacacaacatttatatgccaagtagtgcaattgtttaatttgttatcttgcttattgtattataatgttaatattaatgttgatttggcaggtccttctgacgctccaaaagtaccttctgatgctccaaaaatatgttacaagtgtaagaaggcaggtcacttatctcgggattgtaaggagcaaccagatggtcttttgcatangaatgcaattggtgaagctgaa

SEQ ID NO: 57324 - DNA, 399 bp, Glycine max
  unsure (1)..(399): unsure at all n locations
cctcatcgtctctcacagtctgtagatatgggagctaatcttattcttgtgtccgggctctcagccacttatgatagccgccgatgatcccattactgcttcccctaagctctctgtcctttcttcacgccgcatcccatgccttgcgaactccttggagtaccctcgcgttgtggtcaccgaaaccccgtgcgatgaaaggcgtgatgctttcgtttgatggcactcctctcatggagtagccaagctgtcttatggcgaggacgggattataattaatacaaccctttgttcccatcaagggaacatttggacatccttcgcatgaagatagaatcttgattcttccttccttctagcgagggaaccaattaacagacgcccncccatgctagccaa

SEQ ID NO: 57325 - DNA, 396 bp, Glycine max
tctgattactgccttccttatgcagtatcagtacaactctgacatggctcccgactgaacccagttgcaaaacatgagtaagcgagaacacaagtcttttaaagagtatgctcagtgttggagagacctagcagcacaagtggcccctcccatggtcgagagagaaatgattactatgatagtggataccttgcctgtattctactatgagaagttagtgggctacatgccctctagcttcgcagacttggtattcgttggagaaaggatcgaggtgggtttgaagaggggaaagtatgattacatctcccccgcaggtaccagtagtaggaggaccaaaacagctggggaaaagaggaaggaaggagatgcccatgctgtcacttcaacgcctgt

SEQ ID NO: 57326 - DNA, 460 bp, Glycine max
  unsure (1)..(460): unsure at all n locations
tctgtcatcttcttctctggaccaatttgaagccatctctggatctgttcaacacacctaggcactacatgtatgtagaatatggactcttctgcttcattaaaagccttctcaattgcaacttcagaaaaatcaatggaaagacaattagggtcatttccaagaactatagaacatatgttatcgtaggagaagcgattgaagacatcttgaagatccacaactcttccctgttgctgtacatgatccaatattggaaggagaccattatgcaccttgacgtgaatggttttcactaaaaacacctcgaagcttttctgcttaaagagagaatggaagagaatccctgtgtacttccatgcttcataatcagcggagaaaataccgtctccgaacgcctganaaatgtgacgaaactcgggtcccttgacgtagttgaggaaattcttgctcagcatgt

SEQ ID NO: 57327 - DNA, 130 bp, Glycine max
  unsure (1)..(130): unsure at all n locations
tctaaatattcttttaacaggagntaaatgaactatccttgtctcaaaatcttgcacgtaggcatacactgaacatgatgtcaagtttgaacaccattagatatatgagagacgctatcattgctctata

SEQ ID NO: 57328 - DNA, 364 bp, Glycine max
  unsure (1)..(364): unsure at all n locations
tatgctgaatgtacctggatctttacattntcagtgatttggggaacatatttaccaatcaatgccgagacatttctgcccatactaattctttcacttcctttaagcttttgcttattagtgcccagctccttcaagaatttaacatatcttggaatttgctttataacatccagcagaggtatgtttacctctactttcctaaatgtttccaagatctccttctctgcctcttccattttttgttggaaattgctcttggagggaatggaaaagggatatgttgcttctctctatagtcacctgcatagaaatngttaggtaacttactctttaattatttgtcatcatctttttctggagt

SEQ ID NO: 57329 - DNA, 358 bp, Glycine max
  unsure (1)..(358): unsure at all n locations
tagtatccatcttgggcctttttcccacaactctttgtaatgggagagaaattttcatctaaagcatacaagtccctaatgttatcaaatcctaaaatttgagctccttgggagcaaaacaatgtgtgtctcctagagagagcatcaactaccacatttgtttttccctttttgtatttgataacatantggaaatgctctangtactctacccattttgcatgccttttgtttaactcgctttgccctctaatgaacttaagtgattgatgatcactatgaatgacaaattccttggaaacaaggtaatgttcccaagttcggagtgctcttattaatgcataaagctctttatcat

SEQ ID NO: 57330 - DNA, 377 bp, Glycine max
  unsure (1)..(377): unsure at all n locations
gatactttaagtcttaatgtcaatttcggtccattatattntgtagttgtttcgctttggaacatttaagttttaaaagtttcattatggttctttacgtttttgcaatgtatcattttggtccttttttataattntctgttagaaacattaatgttctgttagtttttaaattttaaaatgagttaatgtcacttttggtccatcatgtgttaaaagtttcattcatcctttgtgttcttgaattgtatcgntttagtcattttttcaattttttgttagaaacattagtgtgttaaattttaaaatagttaagttaacataatgacagctaataaccactactatctttttcatattcaaaanattaaaactca

SEQ ID NO: 57331 - DNA, 555 bp, Glycine max
  unsure (1)..(555): unsure at all n locations
cggggnccatatgttgtatccatcttctatgccgacactctcnanntactaagctcatctgaccgtgtgtgcatatataagtgtcgtctcaagaaactattcttgtatcattgcagtgcaatataataaaacatattttttattattcacaacgaagccaataaaagactctgttataaaacatgagcagacacacggtggaatatttttggaacagactatctttccaagaacaagagatatcatatatatgataatctaacatgatggctacgcatctccggctggtataaaacgcataaaacacatgatttgtacagcacgtgcagtatacttgacggctgcaagctagaacttattcatttttagaagactcaccgatctcttgtatcattacgcgacagacccttgaatctgacgacactcgatgactacatagaagtattgctaacacttgcaatggaagagaatangatctatattgcattcttngtatgccaacattaatacatagagtacaacacatgtgtgtcctagatgcacgctcttgaacan

SEQ ID NO: 57332 - DNA, 521 bp, Glycine max
  unsure (1)..(521): unsure at all n locations
cggcactgttagctcttagcgcacttnaaactcagctccgtgccttgctccaatgtgcaagaagacaatatctttttgtgatcttcacaataacataaaacacatactcttgccacacgtgttgatttcttattcatggcgagctgagatacttggttgacccaagcatcaagatctccttcaatctttttattctcaggagatgaagatgaatctgtggccacctcctggactcatcttagaacaataacatcatttcttgcactgaattgttgggaagtagaagccatcttctcaatcaaattcctatcctcagtaggagtcatatcaccaagagcttcaccactggcagcatcaatcatactcctctgcatgttgctaagtacctcattgagatattgaagaagaagtgctcagaaatttggtggtgagggcagcttgcacacaatatcttgaatcatttccaccactcatacaagctgtctccaccaagatgcctgatgcttgagatgtctttctcg

SEQ ID NO: 57333 - DNA, 159 bp, Glycine max
  unsure (1)..(159): unsure at all n locations
gagaggttgtgcattccaattatcccactaacattctaacaaaaactagcaactagcattggctaataagaaaattatttaattagaaaaaattaccaaaattnggcattatataacttgattatatatatgtagggggaggggttactaacatagatc

SEQ ID NO: 57334 - DNA, 134 bp, Glycine max
aacacgaccgaccacctttggtattttgcacaggtcctgtgaagggaaagagactttctcttaagtattgccctacgcgccttcttaaatggcatgacagtgcgccatggttagctggagggagtgggtctact

SEQ ID NO: 57335 - DNA, 283 bp, Glycine max
gcgaccgcgtctacaacgcgcaaagctaaaaactggccattaatctagatgttgaagttgatgaatatgcttcatggaattgagatgacaataaagtggataacaacgttgttatacccgctcttctacctctttaataagctgaggaagaagacccacgtgaaccagccttatctccatcacaacaacgaggtcaagaactatcatcgccagagtctactccaagacgagtaagatctttggtggacatatatgaaacctgtaacttggccatacttgaacc

SEQ ID NO: 57336 - DNA, 375 bp, Glycine max
  unsure (1)..(375): unsure at all n locations
atgagaaaacattctctatnttcatctcccactccaagtaggcctccggatcattctttcctttaaaaggaggaatgttgagtttaataccatcaattcggttttgtctaggaacaccatcattccctcttctcctcctttcttcttcattatgatctctattctccatttgatccaacctctcatggagcgcatcatctcgttgtttcattaacctctccaaatgttgcatcatagcttgcatttggaattgcgaaagccccactccatcattaggattagtacctgacagtctagacaaacaaatcacacgtaacaagacaattatagtcgctggtagaatacctcacccactcaagtgtatcacacaattat

SEQ ID NO: 57337 - DNA, 357 bp, Glycine max
actttcacatatgcgcttctctatattctattagagttgaattttcgcaataaaactcccattctgatagaactatgaaaacatctaagaaactgtatctaagttttgtccgtgatataacatgtaacatgtaaaatatgaagatgagtacgtgactcacgtttacttttaaatccaacgtgggtggagagatggaatgatgatcattgtctgtgagagaggctgaaccagccgcagcaacgatgttgttgtcatcatctttggtactggtcttgttggagaagaagtacatctcggctctgctacggagagatgtaggtgaatagacatcatcatgatcgtctgcagaagaacagc

SEQ ID NO: 57338 - DNA, 158 bp, Glycine max
gacacctagcactaagtaggaatgacttctttgtggctgtttatggacttagattgacatcttcatgaatgggaaacacagcatcaagagcttgccacctagcactacgttggataattctaataaggcatgaaactgttatggacatgatatgggga

SEQ ID NO: 57339 - DNA, 456 bp, Glycine max
  unsure (1)..(456): unsure at all n locations
gtcatacctcacacaatatatgtatgtgtgtttatgtagcaagataccttatatatgcatgcatgtagcaaaaagatatctcacaaaatatatatatgtatgtttaggtagcaagataccttggatatgcatttatgtaacaaaaaaatacttcacaaaatatatatgtatgcttaggtagaaagataccttagatatgcatgtgtgtatcanaaaaatacttcacaaaacatatatatgtatgtttaggtacaaagataccttggatgtgcatgtatatagcgaagatatctcacaaaatatatatatgtatgtttaggtagcaagataccttggatatgcatgtatatagcaaaaatacctcacaaaacatatatatgtatgtttatgtagcaagaatacgtggatatgcatgtatatagcanatatacctcacaaaaatatacacatggtacg

SEQ ID NO: 57340 - DNA, 533 bp, Glycine max
  unsure (1)..(533): unsure at all n locations
ccggatangacccattctcgcaagccacctattaatactcagctttcatatatttcataactntcacagcctctcaaataattaatttatcttcgagaacacattctctaatgactactattaatcccaaagatgggtgtgtgctgaataactatatttaccttgtgttcgaattatacacatgatccaatgattaatataatctataatcattatttttaaaacaagcttaagtatctgcgcgggaggagagaatgtttgatgatcattatatttcagagacgatgtgaaagagagatcatacgtcgtttatgacatataagatactctcgactatgatggatactatttccttattatattatgctatagtaagaagaagttatattaacttctatctgatgaatagatgaagaacatctnttgaagagacagatagatatgtgtgtatcatttgtggaacatgttgtttcatgtagtagatgatttatctactatatccactcagtgttgttgtgaatgctattatttan

SEQ ID NO: 57341 - DNA, 404 bp, Glycine max
  unsure (1)..(404): unsure at all n locations
actggatctgatgtcctctaaagatttgtcaaatatcttgcaagtgatcatttgagctgaccaattccatactgactccttggatatctggttcttcctaaccaaagggccatcaatctctatatngttggtgtctttcatgaaacactgcattngaaagcaatgtgaagagctgccgggttgccactattacaatgtttgactgaatgtcgtgtgtcaaaataaaccacacttcatcttatcacagaatgaaaaggaatcagtaattgattacacaatcaatcaattactgattaataaaaattacaataattcctaataaatacaatatctgatataatctcacactcccncttgagctggagcatatatgtcatatgatctgagcttattacanatgtgat

SEQ ID NO: 57342 - DNA, 408 bp, Glycine max
  unsure (1)..(408): unsure at all n locations
aaaattaatattaacagaattgaataatgtgtaattagagaatgctattttgtaaatttcatttcatttntatgtgtaaaattagtttaaaaattagaaaatatttgccagttagatattgaaacaatttcaaaanaaaaaaagaagagaaaaatcttcgatccttaatatcctttaaaagatttcttaatctgtctctggcgcagagacctacaaattttttataattaacctactgtttagaaaggcttatatcagcatctttttaaagagtgtctaataaatttcatgtgtttttatataaaaagtcttactacacactagtacttaataagagaagacaaaataaagatgtataactttttagatcttaattactattatacataacttatttttacttcttat

SEQ ID NO: 57343 - DNA, 130 bp, Glycine max
tctaagcttcgccttctgtggtgcgatcttgttacgctcttcaaatttattctgattggtgatgaacgatgatagtgttgacttgactggcggatgaaaggggagcgcggtgatgtgatcatgccctgtg

SEQ ID NO: 57344 - DNA, 299 bp, Glycine max
  unsure (1)..(299): unsure at all n locations
actcgagactaaagagaggaattatcctacccatgatctggaggctgctgtagttnttgcccttaagatgtggaggcattacttgtttggctccaagtttgagttatttagtgaccataagatccttaagtacttgtttagtcagaaagagctgaacatgcgttaaaggagatggttagagtttcttanagattatgattntaagcttagctaccatcccggcaaagccaatgtagtggctgatgccttgagttggaaatccctacatatatctgccttgatggttagagagatggatc

SEQ ID NO: 57345 - DNA, 462 bp, Glycine max
  unsure (1)..(462): unsure at all n locations
ctaaccattccaatccactcaaatcatacttttgctcattcaaatcattctcaaacactcatttcatgcaaaacaatcaatccactgcaatcattttccaccaattcactgttcaaacacgcttttggtacaagcaaaaaattcaaagtgttgaaatttaaataactgaaacattaaaaatgaaattaaaatgactgaacataaatcataaaataactgaaaataaactaaaatgttcaagatgcacaaatttaaatgttctgctcatcctgtggctgatcttcattaagatccagtgctggagctactgatgaatccatgctcataatggatggcaagcccaagcctgaaggctctgcatgatgatggactacccnctgtgtaggctctatagcatggaatgcagcatctgtggtgtaaatataaagtctgaaggtctcgtacataaaggaactggaagtg

SEQ ID NO: 57346 - DNA, 552 bp, Glycine max
  unsure (1)..(552): unsure at all n locations
agtgtagctgattaagcgnactacttannactcnngcctgcgacatcgtgatcaaggtgctntgctcttgtcccggctacaagttttctttttctnatgatggccttttctatcgtgccttctttttcaaagaaataaagacggcaatacatctactctagatcccgttgtgattatgattaatgtgcctgctgcgagataaatgaagcttctagttatacctgtcatttaacctaacgtgtactaccttaattatatatggaattgatatctttctcttctaatattccatattcatattatctatttagtaattgaagcaatactcttactacttactcagtgattactcttgatgtgaacgagtccttcaacatgtttgtgctaattcttaaaataactcatgttcgctcacaagaaaggtctcactacatacatacattttaacaggcctatacaaatataaactctgccgcctgcatgtagttaccttcatagatacaaaaggtnggtacgccttctgacgcttggagatgtcacccatgcacaccg

SEQ ID NO: 57347 - DNA, 422 bp, Glycine max
cccgtacaaacttggcagcgacgtccaccttgactctctacaacaactattactatggctaaaatctgggtgtgatttaaaacattatactaggctaagccctttctattctagacttggtgatctcctctgtatataggggaagaaaagcttggcagtaataaagtcccttatttgaatgattttctttatcaaaactgaatctgatgaagaagtattgtaattccacacattgcttcctctgaaatagtaatggtgatcaccaaagagctaagtatggaagatgccaaaataaggatttaatcttggagcaccaatgaacaattgcttgttggcaaagtctatgaatacattagaggtgtcaagcctactgttagttggtgctctgttatatggaacccagcaatcccccataagatgtc

SEQ ID NO: 57348 - DNA, 178 bp, Glycine max
  unsure (1)..(178): unsure at all n locations
tctagcacaatggacttaccttgaattaattcccttgatagcctctttgagccttgtttccctttccttgttntgaagctcactacaagccttaaatgaaaaaccatgatatcaccatatccttaaggaattttggagctttggaattgttttgggaataagtgtggggggggggggg

SEQ ID NO: 57349 - DNA, 386 bp, Glycine max
  unsure (1)..(386): unsure at all n locations
aatgtaagctcgctangagccgctaggattgttattttatctgttacatgctgttacataactaactacatgtataaaagccatgcaagaacccgtgaatggtgatctggaaataatactctcttttttacgttcagatctcctttctctctcctctcctcttccccttacccctcgaatattcagttatgataagcaacacctaacattgaggctctcattgcatcctctccgccatggctgacgctacgcgatcgaagaaaagtatggagcgttgggaagacacgtatgcgaagctgtctgcatccatgacgtcaaagttcgatgaacttcttgctcgtatgaaccagctagaaacctctcacgccaccgttcacgctccgcca

SEQ ID NO: 57350 - DNA, 361 bp, Glycine max
gagcttctatggagactggatctttgagcttctttgttgtcctttaatggtgagtttccaccatggagatgcatcggaagacatatgagaataggtgagatgaggcgccatccactagggaataagccatggaagaatgagcttcacctccgagatgagttttggataataagcttggagaggatgcttcactgcgggaaaagaaagagggagagaatgagagaggggggagctcgatattgaaggaagaaaaagggagagaagttgaacttttgagtgtgtctcacaagactctcattcatctaatgtacaacaagtgttacacatgcgtctatttatagactatgtagcttccttgaga

SEQ ID NO: 57351 - DNA, 364 bp, Glycine max
  unsure (1)..(364): unsure at all n locations
tctagtcttctttgacatactccccgaaagagcatctgaaggtggaggggaacttcctgngggtgttgacattagtcctatgcaaaataacaatgacaatcagcaaacacaaagtaattaaaattacaaataaactctcaaaatgcacattagcaaatatataaaatgttaaatacttaattatgaggaactaaacatgttttccgtgtttaccgtagttaaataggttcattttcccataaaccttcatcatgatcgctatgatttgcatgtacatcgtcttcttcattttcagcatttatggaaggcatttggggggataacgtggccatgtcgttaacatcaagtgttgaagcatacatgt

SEQ ID NO: 57352 - DNA, 309 bp, Glycine max
  unsure (1)..(309): unsure at all n locations
atagattgattcttggggggactaacangctgcttaatatatgtactggatactttgacctccatattggactcatgattgacaatgtgggtgttcttttcatatgccagctgatctttctcttttgaatctgccacaaagatattcttattgaagcatgtcactcttgtgggcgtgatttgattctctaaggctgctagaataatatgatttgtgtatgtgatattattcacaaatcaaatatttaactgaatgccttatatcaatgtgcagatattcagcaattacaatttgaagcccaccatcgat

SEQ ID NO: 57353 - DNA, 491 bp, Glycine max
  unsure (1)..(491): unsure at all n locations
tactaagcttctccaagtcctanatgacatntcaagctaatattaactcactttaacctncatttaccacagaattcagacttaacctcattctaaatttcactttaacctccatttaccacagaattcctacaagtcccaaatcatgtatcaatcatgtctaacccaaaatcaagcttcaaaacacaccaacacagaatctaggtgtccaaaacccctcaattcaatggggtttctaggtttgaaaagtgaaatttagaatgaggtaaatttgaagcaaactctcacctcacacaagtccataacatcaatctaaactcgctcaaactgaatttacacctaatattcaaccgaatcanaatttgactcctccacacccaattttgccctagaaatggctctttgttcactttgatcatntgttcttctctctagcacagtccaagcttttctccaagtcctaaatgacatttcaagctagtattaactca

SEQ ID NO: 57354 - DNA, 199 bp, Glycine max
ccttttcaaaccccagagatatactgtgacgacgcaagtacagtaccaatcactcataattcaagttttcattaccacactatacacatggaaattgacattttgcttgttagggagaaagtcttatctaaaaagcttaaagtgtatcatattgctgctatagatgaattgatgccctcactaagcctctatgaccaac

SEQ ID NO: 57355 - DNA, 405 bp, Glycine max
agcttagctacacatacctttataatagcttagcacacctccttgagatgagaagctagaacttatctacacaccccctataatagctaagctcacccccatgacaaaaaacatgaaaataaccaataaaagtccttattacaaagacaactcaacatgccccgaaatacaagggctaaaccctatactactagaatggccaaaatacaaggcctagacgaaggaataacctattctaatatttacaaagataagcgggctcatacttagcccatgggctcgaaatctaccctaaggctcatgagaaccctatggcctttccttggatctctagcccaatctacttggagtcttgtagccaatgcccttgcggggtaggattgcatcattacttttcactcagat

SEQ ID NO: 57356 - DNA, 469 bp, Glycine max
  unsure (1)..(469): unsure at all n locations
ttggacacctatttagaatctactatgctgtactctacnttcntanancngtcccaccatctcaattgttacaaaatcatattcatacaccattggggcatttcaccaagcacttggtgagcgcatgtttggacatgaattgcaagagaatgggagcaatgtggcatgccccattgcttcagaatacaacctatgcctaagaccttttcattcaaatcctcaattcaagagaacaagcaccaaagcaaaccaaaactgcctcacaaatataagcatgttctcacaatttaaggcaccaaaagatgaagaaaacacatcattgggaagcataancntcanggatggaatacttacttgttggagtgaatngaaacaccaaaaatgaaagcaaaggcaccaaaagtggctgaggtggaagaaccacagcctcgtgtctttctttttgaatgaagggggaaagtttggatca

SEQ ID NO: 57357 - DNA, 425 bp, Glycine max
  unsure (1)..(425): unsure at all n locations
ctcagcttaacatcgggttttcaaaaaccgatattaatatatacatacttcttcagtttttagtaaaaatcgatgatattttctggatctttatagtgtgctggctttcttttaataacctcagattaatctgcacatttaaaagcagaaccatagcagataattttcattttgttttcaaacagcttttatgagaaatttcataaaaaattgattatttgctatgaatttaaagaatatttaatgtgcatataacatgaattgtaaaaaaatgtaaattaactaaactacaattccaaaattaaacactaattatntcattnttaactttcaaataataagttgcccattggatgcgaagcgccttcaatcactttggttccaatggtctagcatcattgcactactgcatgatataataaaac

SEQ ID NO: 57358 - DNA, 410 bp, Glycine max
  unsure (1)..(410): unsure at all n locations
tgacccactaacctagaattaatataacttaatgccattaacctagggaattaaaaaaaaacttaatggctgagtgtaactgaaaatgtggcaaccaaaagtcacccccaacagccaataagtcagccaccatttggtctcccaaaaggctgatgcctatgttgccaattgggcccttattacaacttgaactaaacctaactaaagcccttttagttgattaacccaaaacatatttttggtcagccaactntagagggattgggccattatttagacaaactatacactctaaaattgaaacaaagtggtgtcatttagtcctcctccatttgggccatgatacaactcacaaccttggacttttctccttgaaacttgngctngtattcaaatagtatggacagcac

SEQ ID NO: 57359 - DNA, 394 bp, Glycine max
  unsure (1)..(394): unsure at all n locations
tgggaagcttcaaatatctttgcaacatctgtgatttagtcctttcggataaagctctcataacagatttactttataatcggatagaagatacaggaaattgttcttcaagaatccacaaaagaccctggaaaacgaagtcgaatatggtaacctaaggaagcgctcgaaatattgaaatataaaagggtaagaggtatgttcaattgtttattttttaacacgtgagtctctttagaatatagctaatatgatatgatagtcttgctaactattattctaaattttgtttgtcagggaattcatgttggtgaagacataattntagatttggatacattaactaagaatctaagtttgagctctgattccctatcaaggatgactcatgtga

SEQ ID NO: 57360 - DNA, 531 bp, Glycine max
  unsure (1)..(531): unsure at all n locations
ncgctgggtgcatgctctggacccancngtcactatanaanactcacgcttctagtctcaattntgaacgtctcgatatattaccctattctttcttacatgccacncanaagatagcgacgcgtgaatgtactattaacatctgtcttctccacgggacgactctatacatcacctgactcaacaagacctccgagggtaaacatcttgacaactggagagtatacaccgcggatctatatctgagcgtgtcgataccctattgacccagtcgcaccttggagtaaaaagtactctcgatagaatcagttgccacacacaccccttaatctggagcgccactctgtattctgcgaatctatgtcacgaccacggattatacgtcctagcggctgccatcctataatagatagctcgctcccactccagcgtgtcactccactgtcgaacctcatcgagacaggtggctagcagcttacgtccaacaagtatgcactcacggcgatccttctcgtggtctgaattctgtcn

SEQ ID NO: 57361 - DNA, 424 bp, Glycine max
  unsure (1)..(424): unsure at all n locations
gggncactgtgtgctgcatnctcacggacacttaaaactcagcttgtgcacgcgagattacgtcacttttggctcacaatatttgtatactgcatttgatcacggtgcgggcggagatccctagggttatccgtataacatctttttgctgctgaaaacaaaagctgatgctgcaagacaacgtcgctttgccccatcgcatcgcggcgacagcccgtgaccgcaagattacgtcatttcgcgccacagactgcatctgacttgagcatgctgacgcggaaacccagggatatcgataacatctttttctgcgtaacaaagctgtacaccaagactacacgttttggcctctaatgggcacagcccgtgcaccagaattactatttccctccaactgatctcttgatacgcgcgcgaatccacg

SEQ ID NO: 57362 - DNA, 410 bp, Glycine max
tgtctcagcgtttatgcgagaccgaggccaacatgttggccatcatcagcatgtaccaagaggaattaaatctagccacggcccacgagcacaaagtggcggacgagtatgcccgagtgtacgccgataaagaggctagaggaagggtgatcgactcgttacatcaagaggcaacaatgtggatggaccgatttgctcttactttgaacgggagtcaagaacttccccgattgctggccaaggccaaagcaatggtgaacacctactccgcccgcgaggagatccacggacttcttagttattgtcagcatacgatagacttaatggcccatataattaggaacctctaggaagtttgtattgtcactcagatcttgactagttataactgtctgaataaaatgagtata

SEQ ID NO: 57363 - DNA, 474 bp, Glycine max
  unsure (1)..(474): unsure at all n locations
cgctgtgtgagtggantgcagcctgacttgcacctagcgtatgtgtttctttatcgacggaggcctcctaagaagagcgaaccagctaggagtttgcatcactttatccaaagatatttctgagtattttatgagtaatgttgcttgtggaggtttaaccgagggtagcacatgaactaccgatcatacttgtgtttcactactgatcaatacgaggatactatgcagacgaacggttgaaacgcatggtatcatggattatgcgagataacggcttataagatagggggaagcttgtttaaacggataaatgatctgtatgtgaacgaattatgagaatgctctcaaacaagaatgaattgaagtgtcatagtcaaaacagacctgttgatgagcgatacggttgagaatggtgaaagcaacgaaatctcccgtgtgtatttgacccgcaaagaaaaaccctttaccataaaa

SEQ ID NO: 57364 - DNA, 530 bp, Glycine max
  unsure (1)..(530): unsure at all n locations
agcnccttgtgttctattagcgactttaatctatgctcgtcttttggtctatgtaattaagacgcccttgttttatctatcaggatgaacgccctgatcgaagagagactcgcatacagtgtcgtcgtgcatatctcattacctctctctgcatgattacgaggcaccttctgaggagatgaccgatgagtatcacaggttgcacaactactcatggggctggaacttaagcacttatatactatactgataccgagagcttctgtcgccactcgccggcattccttatagttagttgactagaaagaaatggttgacatgagtaaggcatacaggtcatatagagataatgtgttctccagaacactcgtggaatactgagcatcaccatactgtattatagcgacgatgcatgagactattttatcttagagaacatcacaaagctcgctgtgatgatggatcacttaataagtgctattgtatattacgatcatgattttcgatacttactactgcatcaaacatcg

SEQ ID NO: 57365 - DNA, 413 bp, Glycine max
  unsure (1)..(413): unsure at all n locations
acctcaagatcctctagaccacacattgcaaccaagttttgttttccttgccaatctcttgaaagtgaacaagaagaagctgatccaacataccaggacatacccaattctaaattgtcataacaaatactacaacagcttatttcatatgtagctcacagctatgatggatggataaatgaggaaagtctcatttatgattaattgattagtgaattattttgaaatttcagcatttggtgacaatttgttctcatgttgcgctaatgaataatgaattttatatatgtngcttgggccttattttgatatactattaattatctgacagggatctggttggaaaattgtctcttgttttgaggggagatttcctgatagaatgaagcaattacctttagataggcagtttg

SEQ ID NO: 57366 - DNA, 414 bp, Glycine max
  unsure (1)..(414): unsure at all n locations
ctcagcttgacattcaacttcgagcgtctcgttatattatacgactcaattatacatccgagtaaaaagttattgtcgttcgaatttgctcagagcttcaacattcaatttcgagcgtctcgatatatgacgggactcaatcagacatccgagtaaaacgatattatcgtcttaattggctcagagcttctacattcaattttgagcgtctcgatatgttacgggactcaatcacgcatccgagtaanaagatactgtcggttgaattggctgagagctncaacattcaatgtcgagcgtctcgatatgttaccggactcaatcagacatccgagtgaaaaggtattgtcgtgtgagttggctcatagcttcaacattcaatttcgagcgtctcgatatatgacgggactcaat

SEQ ID NO: 57367 - DNA, 456 bp, Glycine max
  unsure (1)..(456): unsure at all n locations
tcanaaccctagcccctagaaacaagacanattcaaggctctatgaaatttaacaaagtatgtttgtcaaggaaatttttacataacattgaagacaattttctcatatttctaactaggtaacccaattgagtagcaaaaatctacaaaaacaatcctacaaatttctcatatgtagcaagatagagtgtttgctagttttgacatagttcaaagatgtgtaattttctccatctttccaaaaccaaactaaatgctactttttacagnttgaagctaactgaaatatctttccaacaaggaaaacattgacaaaaattagntctttattatntccttctatatttggtttcaagcccttttctagactctaaaaatagtccttccaacaaccactctattttgctttacccttaaatttgatggagcctctatatttttcaatatcatggaaaa

SEQ ID NO: 57368 - DNA, 388 bp, Glycine max
  unsure (1)..(388): unsure at all n locations
atgtattgcatcagtaataataaaggctctttgttttccctcccgtggatgtagccttgatcaaaggtgaaccacataattctgtgcgttctttctcatctctctctctcattcattntgctgcaacatctgtgtgtatgacatttctgttctactgcatcttgtactactgttcttgcttgttcttcatcacttccataacaaactagtatcaagagctcaagttgtgatcaagggaattcaagattctcgtatgaatatgaagatcaagttgtggggagtcttgtttctggtcctttcgctgcttctttgtgatcaagaacactcaaganatcatgtcaaacacaatcaggattgagaaattcaatggaaagaacagcttcaatct

SEQ ID NO: 57369 - DNA, 451 bp, Glycine max
  unsure (1)..(451): unsure at all n locations
tgtctagagtttctagagagagaaaggtccaagttctatatagtnttgatagatattgctgtgtgaagatctgcagagaccaaagcttgaagcnaggaaccagttgagagcttgagatgagtttgtgagtgattgtgagatcctagaggtgaaggagacatcctcaccacttgtatttttgtaatctttcatcttgttcttctctttgttgtaaagaaggctttctagtatggaaagctaaatcctctgttggatcttccctgtaggtacttgatgtaaatatatttttatctatttaatgatgtcttgtgtgttctctatgctatctgcttttcactccagtatgcctttacctcgattaagtagatgcatgctttgttagggtcattcaacagtggaaactggtctgactctaaagtccttgatagtacagggctaagttgtcatacta

SEQ ID NO: 57370 - DNA, 458 bp, Glycine max
  unsure (1)..(458): unsure at all n locations
ttattgagctatagngtgcttatggtggcgntctgcttgcttttgtgtagactcgtgccgatagaaaatgggattaaacaaagacttgagacttgcaccactttgaaaactttagctgagttagtgactgatgtgtagataccactggtgccagagacattcacatcacgtggcttgatggagccactaatactgtttctcacatgaacatgcaaagcgcatgttgggatggagaggtgaaacacggatggatcttactgaccgtcgtcgtgaaaaagaatttatcttttgagaatagcgtgatgagattctgctatcaggtgtgcactccagcagcatttacctcgagaatttaatgcctcttcgttgggcattcacagaggatacggcggactctaagtcttgtagacaggctaattgtatacttcacacgaattcgggcatcattactgttgtgc

SEQ ID NO: 57371 - DNA, 280 bp, Glycine max
cagatttctgattcaaggccagttgggttaccaagttaaccaatgcatctagtttgccttcaagcttcttagtttcagatgatgcagatgagtttatagctacctcatgcactcctttaatgactatggcatcatttctggcgctaaactgctgggaagtggaagccatcttctcaatcaagtttctggcttcaataggagtcatgtctccaagggctccagcactggcaacatctatcatacttcgatccatattactgagtccttcataaaaatattg

SEQ ID NO: 57372 - DNA, 104 bp, Glycine max
aggagatcgggcgatggcgcaaatcaacctctccacttccacgagtcaaacataaacacaccattcccagttgcccacctattagatgagctcacgcactccta

SEQ ID NO: 57373 - DNA, 484 bp, Glycine max
  unsure (1)..(484): unsure at all n locations
tcaagagcatcaatccagcaaagagattaatgagtagaactttgaatctttagattcgactgctaaagaaatagtgcaagaagtaaaagtgaaaatacctaaaacacactaaaaggagggttgaatagtgtgatggataaaacttagtctttaaaaaactataaaaaaaaaatttcttatagcaagtatcaatgggcgaagggttntatccaaaggggtttgaaataacttgtgcttagaaaaccatnttgcaaaacatggatttgattgtgtagaagtgacttaaagaaaagaactagttatatagaagcagtaatgaaaacacaaaggttttatactgattcaccccaactcttgggttacatctagttctctttcaaaccttgaagggttccactaatcaaatattngattacaaccaagtattctttatgccacttctggctacaacatgtactctctatgccactcctggcactacact

SEQ ID NO: 57374 - DNA, 275 bp, Glycine max
gatatgcgacttctcccactcgtgttatgatttggagggaccgaagaacttgtttgacagctttgagtgagtcaacccggcgaatgagcgttgccagaaaggtctgagcttaacataaacccattgacctatagtaaacgtgacatcctcgtgcttggcgtctgcatagtgtttcattgtatcttgtgctttctttagccggcgttgcagctttgcatggattcattgacgagaacttaccagagaatcaactgcttcggtgttggtcattccct

SEQ ID NO: 57375 - DNA, 412 bp, Glycine max
  unsure (1)..(412): unsure at all n locations
atagaactaagtatttggaatgtntaaacttcaaataattcttttgaaatatattcgattatttggtgctcttacacattgttattttttttacaaacgtgctcttttttttatcggcaaaataactatgtattatattaattagtaggtataagttatacccaatcattcagatacagttgtacaagcgtgctcttatactttaagggctttaaattttgaaatttggaatagaataatcaattaccacaatcatcgaaaataataatcaaataacttacaaatagctagaaataaaaaatcgctatcatgtcaactagatgaatgagaattctttccaataatcaattattcttaacagaaggctaanatatgaattgaataattgatggcaacgacgatcaattataga

SEQ ID NO: 57376 - DNA, 335 bp, Glycine max
  unsure (1)..(335): unsure at all n locations
agtactagatgaagttttagtctatgtcataggatactcagaatagagaaaatattactaaattactaaagcttataaaggttcaattcataatcaaagacttttcctggtctttaattctgacatctggtaaaatttggtcacgggaaagaactatgcttatcttcctcttcttatactaatgtcaagctatagagaaacatactttgtttataaaggtactatgttgtacttgttgggaagggcatcttttaagagagacagtgagttgtccacatttgacttctatgaatcttccttaatacactnttagtcatgcttcaaattgtatgtgt

SEQ ID NO: 57377 - DNA, 244 bp, Glycine max
tttatgatggttaaagatcaattttgtagatgaaatgttcaaaacattagaagctccagatgggctaaaaaaatgtatacttggcaggatcgacataaacggtattattttcacaaagcacaagatgacaacgtcaatgcagaacagggcgcaccctaaggctgatctcacactgtgcagtgtaatgacgccatccctgtgagcttcatccttacttgggtattgagaaattgggagctaacta

SEQ ID NO: 57378 - DNA, 433 bp, Glycine max
agattaatgagtagaactatgaatctttagattcgactgctaaagaaatagtgcaagaagtaaaagtgaaaatacctaaaacacactataaggagggttgaatagtgtgatggataaaacttaatctttaaaaaactataaaaaaaaaatttcttatagcaagtatcaatgggcgaagggttttatccaaagggtttgaaataactttgtgcttagaaaaccattttgcacaacatggatttgattgtgtagaagtgacttaaagaaaagaactagttatatagaagcagtaatgaaaacacacaggttttatactgattcaccccaactcttgggttacatctagttctcttcaaaccttgaagggttccactaatcaaatatttgattacaaccaaatattctttatgccacttctggctacaacatgtac

SEQ ID NO: 57379 - DNA, 445 bp, Glycine max
  unsure (1)..(445): unsure at all n locations
agcttataatatatcgatacgctcgatattatatgtcgaanactcttgacaaattcaaatggccataacgtttcacacggatgttcgattcgggcgcataatatgtcgagaggctcaaaattgaacaacggaagctcttgagaaattcaaatggtcataacttttcacacggatgttcgattaacgcgcatcacatatagagacactcgatattgaacaacggaagatcttacgaaattaaaatggtcataacttttcacactgatgtccgattcaggcttataatatatcgatacgctcgaaattaaacatcggaagctctcgagaaattcaaatggtcataacttttcacacggatgtccgattcgagcgcataatatgtcgagaggctcgaaattgaacaacggaagctctngagaaattcanatggtcataacttttcaca

SEQ ID NO: 57380 - DNA, 471 bp, Glycine max
  unsure (1)..(471): unsure at all n locations
tatgcacggaanatggtattatgaaaatgagatgccttattatacaccatatcctagttaaccatgcattatgtaccatgttcaattattttgtttttaagtgaaacgggtttatgaacccaacatggttggctcctaacacatgaaactaagaatgtagtgtgaagtttcacgcttcccccttctttgtttttgttttgtagaggaaaacgcaaggatgagcaaacatgaaaacaaatggtatgcaattttgcagatcaaaaagtttgttgaacgcatatgcatgatgatgccatgactcatgcaaaatgtgaggctggaatatgataacggacaaatgcaggatatgtccattatgatgttatgaagagatgcttatgcgatgcatgatatgaatgcattttacggacacgagagcccggaaaattatctcttcttacttgcgcatttgggggcgcagtgccccatgtg

SEQ ID NO: 57381 - DNA, 396 bp, Glycine max
  unsure (1)..(396): unsure at all n locations
cttacacaagaagggggatccctcctcctctccttagcatctcacaatcactctacaactcactgatctctctctaattacaaaacctaggtctctctgcaaaagctgctccttttgttgcctccagagctcctttcccaaaataggcactgtggtgtgctctggaattctctgcaaatcatctatataccctaattatgcacaagacatgctntanataggctctgaatccgcgacgttgtgcttagtgcaagtaagtggatttgagcttagcgccagtcgtgcgctgagcctggctgaagacaaactgttgcgcttagcacactgatctcacgcttagcgcacaaccttgatattgattctctgccagattcttctatcacgctaagcacactg

SEQ ID NO: 57382 - DNA, 465 bp, Glycine max
accggatgttcttagatcgaaatgatatggtctttgttgatgtctctaactcaatctcaaaccgggtttaattggtgaaactcaaacctagtcgtacaattatctagttagctagttggaaaatgattttacccatgcagaccaaggcaacaagttgttgtggtggaaaagctctttatgcatgccccaagacatcacatgttgttgcactaacatggagtggtcttgtaacattatttataggtgtcagcttttttttttttttacaggtgtcatcttttaatttgtagagtcctaccccaggctatttcaatgaatatacaaaaaagagaattcattgcagtgacttgagtatctctaaaaaaatgaacttaccactagactattatatatgtagctttattacatgcaaaatattacatatttggatcttcatttatttacattattaatgccaggcactaa

SEQ ID NO: 57383 - DNA, 383 bp, Glycine max
  unsure (1)..(383): unsure at all n locations
agcntttgcatgtntaggaagttctatatatataaaggtctgagattntgctgngtaaagatctgcagagacgagagttcgaagtggaagccattctgagagcttgagatgagtttgtgagtgattgtgagatcctagagatgaaggagaccacttcaccacttgtatttntacaatctttcatcttgttcttctctgtgttggaaaggaggtttccagaccatggaaagctaaatcctctgttggatcttccctgtaggtacctgatgtaaatatatttctatctatgtaatgatgttttgtgtgttctctgtgctatctgcttttcattccagtatgcctataccttgatcatgtagatgaatgctttgttaggggcattc

SEQ ID NO: 57384 - DNA, 438 bp, Glycine max
tactctgcttcacagtggtggacatggtgaatcaagggagattattatatgtaaagaataagacaacaaggattaacgtaaatttgatgtttctacaacaatgaagataggctatttaaggtgtaagactcgtgcaacttgacaatgatgcttaatcactgtcaaaagcactaatttatccctgcattttgtagtatagggagtaacctaggtcaaatctcaaacaaatcaaaaaattcaaatttaatctcaaacaaagggggaaggaatttgcaacaaattgaatagaaatttgaaaatacagagaaatcaatgcaatgcaacaagtattcaattatgcaaaactataaatcttagatttcaattcatgtggcagaaatatcattggtacaattggatttcagattcacacacatccgtattaactcgcattcatct

SEQ ID NO: 57385 - DNA, 409 bp, Glycine max
  unsure (1)..(409): unsure at all n locations
cacattcacaatactcatttttggtgtgtgagtttctggagatgggcgacgtcaagaagattttgaaggatgatgaacaagcaattgcgtttgattggaataaaagggtggatgttgttaagggtgtaacaaatgctttatgctatatgcatcatgattgctcacctccaatcgttcatcgtgatatatcaagcaagaatgttcttttggattccgattatgtagctcatgtctcagacttcggaacagccaagtttcttaatccagattcatccaattggacctcctttgcaggaacctctggatatgctgctccaggntaatttcctttctctatactatttgagtaaatcatgatattntagtttgtcttcggtagccatttacanatatatatacatcacaatta

SEQ ID NO: 57386 - DNA, 293 bp, Glycine max
  unsure (1)..(293): unsure at all n locations
gactcttgcaatttcttcaaactattctctataattattgcgactntngaaaaaatcttcagaaacaagtcacttgaagaattgtgactttctnaaatgtatttttcgaantacagcactggtgtgtaatcgattacaccctcccagatgtgacttttcattttgaattttgaacnttnncagggttagaagctttggtaatcaattacaagtattgtgtaatcgattacacaagtttnnnntccgggaaaacttgttaaacataagttgtaactattgaaatttgaaatctt

SEQ ID NO: 57387 - DNA, 378 bp, Glycine max
  unsure (1)..(378): unsure at all n locations
gaagcttccgtgagaagctagagcttagctacacacacccctctaataactaagctcacctgcttgagaagcttccttgagaaacttccttgagaagcttccttgagaagattcctagagaagctagagcttagctacacacacctctctaatagctaatctcacctccttgagatgagaagctagagcttagctacacacccnctataatagctaagctcacccccatgccaaaatacatgaaaatataaaaaaagtccttactacaagactactcaaaatgccctgaaatacaaggctaaaaccctatactactagaatggccaaaatacaaggcccanaagaagaaaaacttattctaatatttacaaagaagag

SEQ ID NO: 57388 - DNA, 340 bp, Glycine max
agacactatacaagactacagctgggaagaagagtaaaactaaaccttactctctcttgatgaactcgcgcaaaaggaggcatgatgggttcaatttttttatctcgtaatgaacattagaatgtggtggaagcttcaggaggacacgctcctcatgacactagaatgacccccctagctggccatttcaacacgaccagccgtgagtcaataggagggttataatctctgcttcactaccaacattggatggatcagatatggcgttaatgactatattctgttttttaccaaaactagtaactctatctagaccgactaatctattgtactaagcggc

SEQ ID NO: 57389 - DNA, 375 bp, Glycine max
  unsure (1)..(375): unsure at all n locations
taaacacaatctctgtatgggctaaagcaatcccccaagccatggaacaagagatttgatgacattatggctcacataccggttcatagaagtcactatgaatacttgtgttacttcaaattttcttctaaatctgagtttgtgatattgctattatatgccgatgatataaattacatggaagggtatccatatgatatatgctganggccactgatgtatgctatggtatgtactcgccctgacatagctcatgcactgagcttagtaagtaggtctatgggaaaatcaggcaaatgacattggcaagcccctgaatggatactcagatatatcagaggatcacttggaagagctattgtctatgctttagct

SEQ ID NO: 57390 - DNA, 458 bp, Glycine max
  unsure (1)..(458): unsure at all n locations
gctntgtatgccctctcccctcggcggtgtatttttcttctgcaaaggcgagatangtgntggcagtgatattattgaccagccctccgaaaccttctaccgagatgtcttgggccacatgggcctcgttcagaaccttcactagtagagcccgatgaggctcggagctcatgagtaactccaacagcgagactctggccggagttttgtgagctgttcgaaaaccttgaattcgctctgctgaattatacggaggaactcactggcttcctctagcgacacctnctttttaccatctcttttctccggaaggccttttgccgaatatctttattcgaagcgtggggtgcttcgccatcttggtcctcccccactnttcctttttccttgacgtccgcgggttggactggtaggtccggaggcgcgaacacacgaccactacgggtcacaccactcag

SEQ ID NO: 57391 - DNA, 398 bp, Glycine max
  unsure (1)..(398): unsure at all n locations
cacttcataataacacagatgatgatctcaagaatcaaagaatgagttcaagattgaatcaagtacacttcaaggatcaagaggaaagttgaattcaagaatcaagaatcaagttccaagaatcaggataccgattcatgactcatgattcaggaatcatgagaagactcaatcaagataattattaaaaagtttttttacaaaactgaatagcacatgaatttttctcataaccttttaccaaagagtttttactctctggtaatcgattaccagattattgtaattgattaccagtaacaaaatggttttcaaaaaactttcatactgaatttacaacgtcccaattgaattcanaatgctgtaatcgattacaagtagttggtaatcgattacct

SEQ ID NO: 57392 - DNA, 219 bp, Glycine max
  unsure (1)..(219): unsure at all n locations
tgatatgatcgctcatgtgggtaanggctcggctgncgtaaaagagctgagaaagttccttatagatgattcatttggaagaagtgaacaggaaactngacaagttctacatgatcctcattctgaggagcttacattcagaacttgatcatgtgcgtgatcaagtacctgctggggaccaagttccatcaatggattccctcatcactagacttctct

SEQ ID NO: 57393 - DNA, 458 bp, Glycine max
  unsure (1)..(458): unsure at all n locations
ctcttctcanatggtcctttcanatntctacattacatgataaanaaaacccaagatcaagcataaaaagtagaaaattagaaaattctaaacaaactaagcttttattcaaaacttaagaggaacacaaagctcaaaaacataaaagatagttcataattgcccccaaaataacaacaaaatgtaggaatatatgacaattatcactctccattctcatatancatttatcagttcagaaattggcttaaagacataataatgataaaaaaaaaaccattttccctcatttaaacgaatttagctnttagttcaagtggttcgttggcaagttgcaagaaggaaaccatttagattgacctgtattaacttcatcaccacccaagtgaaatagctcaaatgggaanatctttctcatatctacaaaanttataaaaagagaaagatagtcagtttat

SEQ ID NO: 57394 - DNA, 462 bp, Glycine max
  unsure (1)..(462): unsure at all n locations
tctntgagaaaacttccttgagaagctagagcttagctactctcttccatctaaaaactaaactcacctccttgagaagctagagcttagctacttacacccatctaaaaactaagcgcacctccttgacaaaatacatgaaaatacaaaaagaaaagtccctactacaaagactactcaaaatgccttgaaatacaaggctaaaaccctatactactagaatggccaaaatacaaggcccaaaagaaggaaaaacctattctaatatttacaaagaagagtagatccaaccttgatccatgggctcaaaaatctaccctaaggttcatgagaaccctagggccttctttagtaactctagcccaagcctcttggagtcttctatccaatacccttggggattaagattgcatcagatatggacctcccggcttcccgtgacaaaagacgagaccaatatac

SEQ ID NO: 57395 - DNA, 460 bp, Glycine max
  unsure (1)..(460): unsure at all n locations
agcttaagacttcaagatctgaacctttctttcttgacaatttcttgaaagcttcatttaaggtaagggaagtctttttcacttcttaaaccctaacattgttgtctttggaagctaggcttcattacatgttgtgatgtttaaaatttcgtatatgctgccatgactggaactggatgatatgttgttttttggaagttttaaggctaaatgtgntttctttgagtgttaaaacatatanttagccttanatttcacttanatcggcattttctagcaaaagttacgaataaaacaagttttagaacattttactggataaaatctgtcacaaaaataatttggcagtgagagctgtatggcctgtttttcttaaagttttgacctcaaaaatgagtttattaggtgtgaaaatgtagggtagcatataagaattttgaanaattgatttttggaacac

SEQ ID NO: 57396 - DNA, 369 bp, Glycine max
  unsure (1)..(369): unsure at all n locations
gtttgtcatttcaatttctcactatttaaaatggatcattttcaaggtccaacgccttataatgatcacctcttaaggtaaaaaagaatcacttgataagcaagaactacgtaggtctgatttcctcatcgcaattgtggatacgtaggagcaaaagccctgcttttgtcgaccaccccaagagatcgttaatggtccaatgccttaatgtttctctcctctcanaaaaacaagagatcgttaatggtccaagctcatgcttttataaaaaggttcatcacgtcaagttgaaatatgaaagtnaccgtcttgcaaaattggcgcataagatgaatcgagtcacatcactgcttcgtctactggcaaaca

SEQ ID NO: 57397 - DNA, 401 bp, Glycine max
  unsure (1)..(401): unsure at all n locations
cacttcatattatcacnnntgatgatctcnnnnntcnnannntnnttcaanattgggtcnngtacacttcaaggatcaagaggaaagttgaattcaagaatcaagaatcaagttccaagaatcaagatcaagattcaagactcaagattcaggaatcaagagaagactcaatcaagataattattaaaaagtttttttaaaaaactgaatagcacatgaatttttctcaaaaccttttaccaaagagtttttactctctggtaatcgattaccagattattgtaattgattaccagtagcaaaatggttttcaaaaaactttcatactgaatttacaacgttccaattaatttcaaaatgctgtaatcgattacaagtatttggtaatcgattacctgtat

SEQ ID NO: 57398 - DNA, 463 bp, Glycine max
  unsure (1)..(463): unsure at all n locations
agaataaaacaatccanaatcaattgtacctttcaagtaacgaagaaattcttttgcggcttttagatgaggagaggtaggagcctccataaagcgacacacaactcccaccgcatatagaatatcgggccttgtattggttagataccttaaactccccacaagactcttgaagatcgtgaagtctaccttctctccttcatcaaactttgataacttcaagccaccttccataggtgtgttcacgggattgcaatcaagcatattaaattacttcaacacttcttttgtgtacctttcttgtgagacaaagataccattctccgtttgcttcacttccattcccaagtaatatgacatgagtcccatatctgtcatatcagattcacgagacatggactccttgaagtcttcanacaaatttgggttattggccggaaagataatgcatccacataaagac

SEQ ID NO: 57399 - DNA, 291 bp, Glycine max
atgcaatactagactcagaatatgcaacaaacactatacctaaatcagtgtcacagaaactggaagaaaatactttatacaagcacaaacttcaagccttattccatgtattgtggggaagctatgactggccatatgggttgaggtgttatagaggagcacgcatggcggaagggaccttggactgctgaataggacaggtggcttgtagagtatgtcaggttgcatggagaacgcagacggaactctgtcgctatgctcgcaatatataaacacgcacactttttcact

SEQ ID NO: 57400 - DNA, 408 bp, Glycine max
  unsure (1)..(408): unsure at all n locations
cattcttctttctctttccacttctggtcttcctttttcttgcaccaaattttgtggcttttcactagtgatgatcatggaagactaaatactcaatcaatccaagtatccactccaagcacggctgaatntgagctctagtttagtatttctatctttgtgaatgttcacttttttcttctatcctattttcgattntcatgattatgattatacttaggattgaaaacggattaagttatcgattcatttcctaatttcaaaatttaatcacagattggttgtatgattnttcaacctaatttgcaatctcaaataatttagggattgattncgattaactatctcanatgcatntgactgaacttttacactctgaacatcattcgtagtaactgtgataattca

SEQ ID NO: 57401 - DNA, 372 bp, Glycine max
  unsure (1)..(372): unsure at all n locations
tccaagagttgaagaggcggttgacaacagctccattgttatatttttccgaccctaagagaccatntgaagtgtattgcgatgcgagcgggcaacgcttggggtgtgtgttaatgtangagggaagagtagtggcttatgcttcacgccaattgcatcctcatgaagttaactatccgacccatgacttggaactagcagcggtggtctttgctttaaagatttggagaggcactattaatttggtactcgttttgaagttttcagcgatcacaagagcctcaaatacttgttcgaccagaaggaactcaatatgaggcaacaaagatggatgaagttcctcaaggattatgattntggtctttcctacca

SEQ ID NO: 57402 - DNA, 443 bp, Glycine max
  unsure (1)..(443): unsure at all n locations
agctnttaatggatataaatgctactttctgtcacgatggttataaggctcattcaaagaagaatttggatcgtacttaaaatatcgtcttagaaaaatatacatttctaagatggttgtgaactaagactcatcttagaatattactcttctaaaatagtttctcaagtgaaaatcgtcttgacatttttttagcatacaactgtcttaaaaagacactnttcgaagacggttgtatgctaaacaatgtcttagaatgtatttaaaaaaaattatgaattctaagaaggtttttgaaagaaccgtcttagaatcattttttttaattntttttacttgggatgtattgtttaattacgtacattttcttattaaattgtactattataaattataaaagcatatacaagtattaattatgtacagattccgcttcacccact

SEQ ID NO: 57403 - DNA, 394 bp, Glycine max
  unsure (1)..(394): unsure at all n locations
gcaatagcaccccacctgacgtcccattgtcttcttacccccgcgacatatctccaggtaccactctgtggtcaacaaataaaagtaggaagactgactcttccacgctgtctcacaccaagcttattggattatggggcacccgtcatatgtggtactaggtggcaatcgggtgatggcgcanaacaaatatcccatcttcacaagtccaggcataagcacaccatcctcaattgcccacctttaaattgagctcacgcacacatacgtagcccttctcctcgttcctctcagcccggtgatgtgccatcattttcttctattttctaaaccctttttgcaccattgtaattactgattggtcttaattgtcaattaatcacgcaagtttatt

SEQ ID NO: 57404 - DNA, 249 bp, Glycine max
ctagagatatcatcccctttgatatcaaacattgaggcaggagcgcgactactaaccgacacacaatcatccaccgagataaactctatatgacgttgcactggcttcatacctgacgctgacttcacgtgaccacagaatcgcctacacttcctatgttcccatggacccatgtgtatggcccttaacaactcacatagtgtgcaacacgtgattgcgtctcggctgccttaaatgaataaacacttg

SEQ ID NO: 57405 - DNA, 427 bp, Glycine max
  unsure (1)..(427): unsure at all n locations
gaaaatccactatctcactagatacatagacattgaagtagtcaatgaatctagaggcaagcacaaaataaagaaattcatagtccactaatcgatgactctataacataatatcttcaatcaaaagtacccaattcatcttgataccagactntagaccatatacaatctgcagatcatcattagttacccgagcgtgattacttgacctcaaagtgagaatgtaggtaatgaggtacacaagcattctgtcctctacagtcagaccacctactcttgggtgattcctcanattccttggtgggttaagaagcatccccctataggtctgcatcttattggaaccatcactgcttcttcgaatntgcgggctccacccatgttcagttcgatgacttccttccatactttagcatcgataaccatt

SEQ ID NO: 57406 - DNA, 303 bp, Glycine max
tgaccattctgcttggacgaatgatagggcaaatgaagagggagagaatgactgagacacccatgctgcgactatcattcctacatggccaaactcccctaccatctcaacagcatcattactcagccaataacaacccttcgccttacacaccacccagatatacacaaaggccattcctgaatgaaccacaaaacccacctaccacacaatcaatgccaaacaccacctttagcacgaaccaaaacaccagccaacacatgaattgtgagcacaaaagcctatagaattcgcccccattct

SEQ ID NO: 57407 - DNA, 367 bp, Glycine max
acattattccaatgataatcaatgaagcttataataataagtctactaaactaagtggttatgtcataagttcttctacaattaaagttttcattaaataaatccttaattaaattattcaagcttaaatatgtttttatttttaatatatagtcgaattttgcgtctgatccctgataaaaaaaattttccgccaatattcctgatatttgaaaatttttgttttagatctttgtcatcaactatatgatgacgtattacttaaatatttgataacacgatttgtgacggctcacaaatcacccatatttgtttcagaatcaaattaagaatgaattgctttctctctctcatatctcacccttat

SEQ ID NO: 57408 - DNA, 424 bp, Glycine max
  unsure (1)..(424): unsure at all n locations
cctgcgaaggcaaacatttagagagttagttttaccaagaaatgctattcttaaaacgaaaatggcatacgacctcccccaataacacaaacatcaatgtaaatttagagcgaactcatgcacatacttcctttcgaacattcactcgcaccagatattcttctaactaagaaaaatgcacccaggcacaatcaaggcaccttcgttacctagatcacttatatgtacttccaaggtgtatttgctacctacatcacatgcacttcctttgctaaatttacatacatgcatactcaaagaattttggctaccaaaaattgcatacgtgcacattctggtatttctaatacctatacatatacaaactntgtgatgaatctttgctacctacacaataaggtgctacatttcatgctttattcaa

SEQ ID NO: 57409 - DNA, 393 bp, Glycine max
  unsure (1)..(393): unsure at all n locations
agacgatcacaaaagatgatgacaaaggtgatgacaaaaggctcaaaggtcaatcaaaggatgagttcaagatgttcaagaaggaatcaaagaacaactcaagtgaatcaaagatcaatcaaagaacaactcatgtgaatcaagaacatttcaagagttcaagataagaatcaagaagaattcaagactcaagaagaaagtttagagttaagaatcaagattcaaggttcaagatctcaagaatcaagatcaagattcaagactcaagattcaagaatcaagagaaggcttaatcaagataagtatgaaaaggttnttctcaaaaattgaatagcacatggnttntctcaaaaccatgttaccanagaagtntactctctgngtaatcgatac

SEQ ID NO: 57410 - DNA, 372 bp, Glycine max
  unsure (1)..(372): unsure at all n locations
ctgatacgagacataactctacaagtttatttaatttgtgtaatcgactatgagtaggctctaatcaattgaatcagagagttttgccttctgaagaaattttctaactttagaaatattcttctcactcacacatgatgatgcatgatgcacaaatgatatgttatagactaagatgcaacattcgatatcagaaccaatacaaatgccacccaagagagttaggcatgtaaaagaaaaaactttntctagctcttctgtaagcttcctacttaagtcttcatgttgcaagttgaaatccagaccccacaccttttcccttnttggtaggcctactctgggtttgccaccatagaaacccacatgaataag

SEQ ID NO: 57411 - DNA, 235 bp, Glycine max
gccgcatggtcgtgaagggcaattgaatgtaacattcaatgatattcatttcatatgattgaatttttctatgaaacaaacaccattttgatttaccactgcattctgccacttgaggacaagtgaactgttcattcttttgttgaggacaagcaaaactctaaatttgggggagtttcttaatcgtcttatacgactaacttttgtatagaaaacattttctaaaacttgtata

SEQ ID NO: 57412 - DNA, 398 bp, Glycine max
  unsure (1)..(398): unsure at all n locations
tgagctcaatgagaaaattttgaacttgaggtttgnngtcttgtcttgtcctctcgatagntccagtatggtttaaattgcatttagctagcataaatctgagtattatactaaggcgttctctcatattgattgagcattcaagatcaagtctgcagataacaggatacttcaagagcaactgcagttgaaggtatattacacaattgtatgaccttttaagggaacatgttggaattcctgacatttgctaaaattctacagaattcagagaacattgagatgcaagagacaattatttcactaacgaaacagataaatttgttgctggataaaacctcaactaatcatcagcatgttgctgataatgagactaactgttctacagacatattggg

SEQ ID NO: 57413 - DNA, 264 bp, Glycine max
  unsure (1)..(264): unsure at all n locations
atatttggtgttttaatttnaggaatctacggttgggcagttggaatcatgtaactgaagtggagataaaaatacttttgaatcaagttgattagggaatcttactggttgtaaggagactatcatactcagttagtgaccatataacgaatatttactgccttttatgctataaactatttaaagttattataatacatttgccacaagtttcatgaaaataagtttatacatattggacaacatcattttaagctttgagta

SEQ ID NO: 57414 - DNA, 190 bp, Glycine max
tcttactaaaccttgggtgctcaaaacaatttatttatgaccctctaatgagattattaaggtgacttcgtctttccaaatcccaactaccggttggttccgtacccgaatgactattatgataccatgctactacacccataatcatataaaggacacaagcagaagcaactttaattatgttcacaaa

SEQ ID NO: 57415 - DNA, 130 bp, Glycine max
  unsure (1)..(130): unsure at all n locations
acgataaagaatttccacataattgcttacggaagcgttacngaagcacctcggcttggattttattcacgaaacacatttttcacccaaaacagccgaaatgcatagccaaggggtccggaatattttg

SEQ ID NO: 57416 - DNA, 366 bp, Glycine max
  unsure (1)..(366): unsure at all n locations
tgaatgntattggagctaaatcttgtatcctaaccagcctgcactaaggtcgaatctgcagtcacacatttaacttaaaggtgtggaggctntgaaagcccaatatttgaccacaatcagtctttgcaaagactaaaacaactcacaatcttgtaaacatcacgcataaaattatgaagggcttggaaactcaacctctaaccataattaatatttacgaagatcgaaaaacctacaaagcattntgtacaacctcataacaaaacattgtgtttggttntacctcatagctcgattcattattattagnttaatattaaacgtatacaaagaacttgattataataaaaaatcatgatatcaatg

SEQ ID NO: 57417 - DNA, 426 bp, Glycine max
agctgggtgggagatatagcatcttgctgttgttagtttttcaaaaatcgatgttctagtaaaactgcagctgttggccgctctgctggatttgttttaaagcagcacctcaagaaatctttaccctcagatgaaagtgtttcatgtataggaggggtctccttcataaccttaaacagagctgcagcctgcataattagagaagatgtttatttagcaagataaaaaaaaaggacccgtatacagatagcatctctgcctaatccacaagttgcaaacagaaaaaagttggctaacagatgccttagctggttgtaaattgatggttgccaaaataagttaaaagctgacacattatcctacattaccaaacgttagaatctcatattctcatagaagcagatataaaccatgtctaataagaat

SEQ ID NO: 57418 - DNA, 411 bp, Glycine max
  unsure (1)..(411): unsure at all n locations
ctagttgaggtttcccgacagacttaaccacatgtccaactttagttattactactcatcaactacctgcgtaaagggcacatgccctacaattcaacaaagggatcgaggaatctcctatatgtgaccaaattgacatacgactgtctctggtagatacgcacaaaagtggttgccaagtcgaaggaaaccagaaaagtatggcatctcgtgaaacacctgcaactatttatgatcctcanatgacatcatctagtcggagagagtacatgatctccctcgagggctcaaaatgtccaaatcccctggcttccatctacaagcatgaggcttngtgtcagtggcggaactacagtcatgtgagggtgtgcacttgtacctnctcattttgtaaaatgatcaaatttataa

SEQ ID NO: 57419 - DNA, 432 bp, Glycine max
  unsure (1)..(432): unsure at all n locations
nttggaaatgatttctatacaaaagntagttttattagctattaacaaactcccccaaatttacagttttgtttgtcctcaagcaaagaaagaacatttcacttgtccttaagtgacaaagacagtggccaatcaaaagaaaatggtgtttgattcatcaaggacatcaaccatatgaactgaataccatggaatgcttaaatcaattacttctcacaagcatgcagttntttcaaagataagagcacaagtattagagtcacaactgaaataatctagtaagcatgacagaaatcgaggaaggatcatcaaccaaaacctcacagtcattgtttcactcaaactcaagtgtttaggcttattccatcatanacaaccaacacaagttccaacctttgcatttcatctcctatcatacagtaatgaacacac

SEQ ID NO: 57420 - DNA, 179 bp, Glycine max
catatggataattatattaaacccaacgacaacaccttcaattccacaaaaagattaatacagtctttataatatagatgacttgaagttgattacaaattcagccacaaggagacgattcaaccctaacagccgcatctttatcaacaaaatatggggactgatttaataaagaaatg

SEQ ID NO: 57421 - DNA, 300 bp, Glycine max
  unsure (1)..(300): unsure at all n locations
acggacagagaagctctangttgtgttcttatgggggaatcttggaacccacaccattcttgggaagggttcaagatcgcaatctcccagaggtttcaagcgtctaacctatggaatccttttcaagcattgctggtgctggaacaggaataaacagtgcaagaattcaaaggccaattcaagaaacacatttgaatggtgaatgggttggaagaaccgtttctggtggaggtgtttctcaaggggctgaaagaagagatcatcactgaggtaaggctccatgaaccataaaacttgatg

SEQ ID NO: 57422 - DNA, 197 bp, Glycine max
  unsure (1)..(197): unsure at all n locations
aaattgtccaattgaggaggtttggggatgatatgggtagacagcacaccacgaaagtgttagacagtagtaaaaccgtaaaagaggaaatgaatttaagaataagcaaatctatgtgtgttggtgcttaaagtaagtgtcttatataattggggcagttcaatagaaagtgggaataaaaggaanagatgtgatct

SEQ ID NO: 57423 - DNA, 371 bp, Glycine max
  unsure (1)..(371): unsure at all n locations
tattttaaaagggccctcatttcggtaaatttcttacatggggttgatggcgatgttattaatcattttacctatctaacatnaccaatttaaagtatttttttatcacactggttgtctggctaaagtcttttgtttgctacacttatctcttgtgtattcatacatagataatatgtcatttgatagtatggttttggtgtgggtggngtagaaatacttgcagctgactaaagagtattggagttactatatccattggctaaaatcaaggttatcaaactagaaagtttacgtaaactcgtgagaattttatagactcgactaataaactcaattcgtagattcatacgagttcacttcatataaaa

SEQ ID NO: 57424 - DNA, 349 bp, Glycine max
  unsure (1)..(349): unsure at all n locations
cgcgtaacagcaccaacactntttttataagtatctcatattatcaacggtaagagttcattatttcatgtatgcatggctaatatgaagaatcttccgctattatacataataataataatacaaaataaatatacattctataataaaataatttaaataactcctagaagtatntacccaccaagacacgaatatgaactccagcaggctcaacagggaagttcanaatattttagcaccaaggatttcgctataagctntggcgaaacaaggaacaaggaggaagaaggcaaatattttcaacacccaagcatcacgaanatggcgcgttaaataagcacacaca

SEQ ID NO: 57425 - DNA, 380 bp, Glycine max
  unsure (1)..(380): unsure at all n locations
ctactataatngngaacatctctttctctgtcattggaggtgccacttgagcttgcagatcccttcaactctgggcatattccttgaaggaatcatgccctttttttgcaccgtgtctataagtgcattctatccgaagccatatccaaattgtactgatactgcttaatgaaggcaaccattangtccctccaagaatgaactcgggagggtccaagttagcgtaccaggtaacagctacccattaagactttcttggaagaaatgtattagtagttcctcatcttttgcgtatacccccatcttccgacaatacnatcttagaatggtcttggagcaagtagtccccttgtacttgtcanagtccgacacccttgaac

SEQ ID NO: 57426 - DNA, 425 bp, Glycine max
ctttggctattgagagccaaagaattatttctctctgacctttcgtcttgctgaagttcttgttcatgaactttgagagtaccaacaagttcttcaagggacataaaatcaagattctttagagcccttaatggtggtacccatggtctctattttttagacaaacttctcaagattttttccatatgatcatagttatcataagttctgcttagagatattaattcattaagaatggtttgaaagcatccaaacatactctgtatgtcttcgccttcttctatagagaagagttcatatttacgagtaaggagacctagtttggtcatctttacatgtgacgttcattcacgtgttatagctaaagtgtctcacatctggtttgcactcttgaagctaagtactttggtgtatctttctctcat

SEQ ID NO: 57427 - DNA, 359 bp, Glycine max
ctcagtcttcatgtagctccggccatctctaatatgtagttggctggcgatccacacctcgagtattacagatttactctgatgtacgagagttccaccagggatgactatgagaaagtagcggatcaaatctcctctaagtgagctttatggaaaagaacgattctgaataaactaagtagagtaaccttggatattttgcgcttatcatcaatgccattctatcacatgccgattcaacgatttttgcaggatttatgtgattctattgataacatggctcatagatttatttggaaaatggtccgtacatagagggatgcatatggtgagttaggcttccatgaccaaacatcaca

SEQ ID NO: 57428 - DNA, 215 bp, Glycine max
ggaatcttggaacccacaccattcttgggaacggttcaggatctcactctcccgaaggtttcaagcgtctaacctagggaattctttttatgcattgctggtgctggaacaggacgaaacagcgcaagaattctaaggccatttcataaagcacatctgagtggcgaaggggttggaagaaccgtttctggtggaggtggttctcaaggggctga

SEQ ID NO: 57429 - DNA, 431 bp, Glycine max
  unsure (1)..(431): unsure at all n locations
ctattatnnnnatnggaggtaaaattgagaatggagaaaaagatcttcccacagacccagtccaacttctagcaacagagaagattacacagatttttacttcaacacaagagcttcttgggagaaacagagaataactatagacaacaattgtatagtgcagataaataagcatttctcacgtatgaaagaagaattagatagcatctgtatatacaattgtgcaggtggtgtgtatattatatgtaatttctaagaagttcaacatactatcacgcagagtctactcacatgctttcgtagaaggttcctctgactttcttagaaattcacatcccctaatcaacatgtctcatatctggtgactntttgactatttgcaatttagggcgtgcacaagtgtagaacatagaattntcgcccttcattta

SEQ ID NO: 57430 - DNA, 239 bp, Glycine max
ggtttgaaacagctggttcagaggtcttaactacttttcagaaaacagagtcctgtagccccaatcagccctaccaagcagcggaaatactactagctaaaggaagagcgagaaacaatagctaagtatcagctggtatcttaagaacttttctacctccctttttgatagatcacctcttaacctaaggaagcttatgtataagtaacctcgtgaccacatagctgaagacatatcta

SEQ ID NO: 57431 - DNA, 461 bp, Glycine max
  unsure (1)..(461): unsure at all n locations
tatccttatggcctgcctccggacttcacccnccgtttctttcgttttatttaagccaagcccctactttcgaggggcaactcccaccttatgaagactatcccgggcaagacgatggggaaggagatatccatcttggccccctgctccacctcaaagatccgtccccgcatgaactaccccaaccgaacatagtccgtcataccccggcctcacccacacccgttaaagaatctgttccctttgcggaagataagggaaagattgaggcgcttgaagagaggttgagagcantcgagggcctcggcaattacccattctcgaatttagcagatttatgtctcgtgcccaacatcgtcatccctcccaagttcaaagtaccggactttgataagtacaaaggaacggcatgtccgaaggggcatcttcggatgtattgccgaaagatgggggcgtattct

SEQ ID NO: 57432 - DNA, 335 bp, Glycine max
  unsure (1)..(335): unsure at all n locations
agcttggcgatcccagttntatggctctgtcttctttttgaagtacggatattcatcatccctcaactgcccctgtctctgtctgaggaatgaccatcccttgatgggctcgaaacgctactgatgttccgcgctctggaatcgaggtttgtcaaagcctgtgtcgacttgtggggctgcacaagaaccctcttcaatggtgccctttcaagacctcttcgccggggaagcttcttcgtagacaattctaggttgcctcctagtagtgcttctttaacatcttgagctggacgcataatgatgacctatcgatcacgggcctagtacatgctcgt

SEQ ID NO: 57433 - DNA, 411 bp, Glycine max
  unsure (1)..(411): unsure at all n locations
ttgatgtttgcttttataactcttcatacgcttctgaaggtggatcaagttactaagaagaagaatgaactaattatcacgtaggaggtggaaataaacataacattaaatgacattcttatatagcgtatcgcttatgacaagcttattttcaccttgacaaatgaactcattcaagaaactagatcaagatttaaaaatcaagaaaggattgtgaggatacgtgaaaaaaaaaacatttatgagatggaaaatntgatgagatatctaatatgtatccaataattacaaattaatttttttgtatatcaataaacaataaatataggtactaaagaaattacaacaattaacaccccttattcaaacaatngggttagattcctaaatgatattacaactattagcata

SEQ ID NO: 57434 - DNA, 401 bp, Glycine max
  unsure (1)..(401): unsure at all n locations
aatcaacacggaggtagtaccctctcatacacaggagctactcttttccttggcgagaaatcaacaaatacttggaattagaactggccctaccaacattacagatagcctaataacagccaggaaggcagtgaaggctatctcccttcatagacaccgaagcaacgtggttcgaactgtgtgctttgacctctcgtctgatttaggccacttcgattcaaagattaccgacatcctctcagctctatgctgaggtgaaaggtatggaatttcatcaatcttcaacggtgacttgtaccctatactcagcaacgggtttatccaaatccaaaaggccttggatattgcagaagctgnagcaaagccacgaacgttggatttgcatatagntttgttcctca

SEQ ID NO: 57435 - DNA, 470 bp, Glycine max
  unsure (1)..(470): unsure at all n locations
gatgcacgaatgcatacgaaatacatgtgttaatataatatgggttaaaagttaaattagaaagaaaaaaaccatgtttaacatagatcatggtgaattggcttatatatgttttcttacaaaaacgaattcgtactccaaaacatttttcttaaaacttgggttacaagggtcaactaatttttctcaccaaatagacatattatattanagtagtatcttctgttatgattccatatataataaatatggacatgagaatttaaacatttaaactcctcgccatcacatgctcaatgaacataattattgatcaattatatgttacaccgtattggtaaaaaaatgaaactgtttcacacgtgcataaataaatgaattcaaatcacacataatatgacgttgccaatgaggcacatcttgtgctnntttggtattattaaataaaattaatattagcttacaaaaaa

SEQ ID NO: 57436 - DNA, 484 bp, Glycine max
  unsure (1)..(484): unsure at all n locations
ggacctataaaactcagcttggaaatgttggtttcactntctcgcttatcctatcttctagcttagcgagcatccgctaagcgcaacactcctgggctaagcgcgaggaagactctggaagaagatgagctgtacaggttcgctaagcgcaccgcttcagtttatccgctaagcgagaaaggcacgctaagccaaaaatcactaacgtgtgctaagcggttcatacgtgcgctaagtgcacgagcacgaacaaggccacctatttaagcccgaaatcagattttgtgaggggagtttggactggaattcagagctttgcatgtcaagggtttctagagagagaaaggtccaagttccagagattctgtgaaggattttaccacattggcaacacctctcaatgaagtgctcaagaaaaatgttggtttcanatggggagagaaacaagaagaagctttcaatgttcttaagcaaaagctaacta

SEQ ID NO: 57437 - DNA, 430 bp, Glycine max
taatagctaagctcacctccttgagatgagaagctagagcttagctacacaccccctataatagctaagctcacccccatgacaaaaaacatgaaaataataaaaaaaaagtccttattacaaagacaactcaaaatgccccgaaatacaaggctaaaaccctatactactagaatggccaaaatacaaggcctagacgaaggaaaaacctattctaatatttacaaagataagcgggctcatacttagcccatgggctcgaaatctaccctaaggctcatgagaaccctagggcctttccttggatctctagcccaatctacttggagtcttctagccaatgccctcgcggggtaggatggcatcattccctccaccttggaaagggattgacctcaaatcccgaggttcttcatactctgggctcctt

SEQ ID NO: 57438 - DNA, 383 bp, Glycine max
  unsure (1)..(383): unsure at all n locations
ctgcagcttgccaagatcaaagaaaacagaattctcttattacaggcnaccaaggagctacaacagatgtaacgtggttcatcaatgtgcctacatccacgagaaatggcagctcatcatcatcacattgatcgtgaaaaattacaagttcaatacaagcagcagctagctagatctctctcggattctcttttgcaaaacctctctcaatctcatagctctctttttatttaaacactctctctgctcttctgcagaaaaactctctgaattacatgatcaagagtatgtatatactctagctgctagctctaggcacacaggctatactttggtgccaagaccaattctgttatgacaactgaattcaggtatgacaacac

SEQ ID NO: 57439 - DNA, 448 bp, Glycine max
gctagagcttacctagttctacttctctaatagcaaagctcacctccttgagatgagaagctagagcttagctacgcacccccgataatagctaagctcactcccatgacaaaaaacatgaaaataataaaaaaaaagtccttattacaaagacaactcaaaatgcctcgaaatacaagggtaatactctatactactataatggccaaaatacaaggcctagacgaaggaaaaacctattctaatatttacaaagataagcgggctcatacttagcccatgggctcgaaatctaccctaaggctcatgagaaccctagggcctttccttggatctctagcccaatctacttggagtcttctagccaatgcccttgcggggtacgattgcatcattccctccaccttggaaaggatttgacctcaaatcccgacgctcttcatactct

SEQ ID NO: 57440 - DNA, 333 bp, Glycine max
  unsure (1)..(333): unsure at all n locations
aaataaggaaatacacaaaacttgagactttagttaacctaattattatcagatgtgcttgtgggtaaatattagaaaggaagctaaactcagctactanttggacataacttaatttcaaacatatgctaaaaatgtaaattacttgtggtggtgcttatttccttatctattctaaaacctataatgcatgatgctatttttactgcttatcctaatactttntattttccctctcttggtggctttccattagctganagtaaatcaactaatgatactagtagagaccaaccaacagccccagcagtctcttctacaaccactagtaat

SEQ ID NO: 57441 - DNA, 432 bp, Glycine max
  unsure (1)..(432): unsure at all n locations
atgagttttatttcgcatgagacatgaaacatgtctganaatccgttgagaagtaaaagctcacgtctaggatattgaagttagaattattagcttcttagtaaacttaaaaaatcacgtgtgagacgtggaaccaaacaccttaatagtagtataatactactatatttgaaaataatccaatggaaattttaaattgagttggggaaaaagataaatatttgccaagtaacaggggtgacctcatatccatgataggaacaggggagccaaaaacacctcaaacatatatgtatatatttatatgtttcttacttagtttgcacattctttctcttacacacttgaatttctaacaatattataatataaatcatatagtaaacttactacatatatgcctactatgtcttggtatcaaaagaaatgcat

SEQ ID NO: 57442 - DNA, 463 bp, Glycine max
  unsure (1)..(463): unsure at all n locations
ctcgaccggatcttaagtcacctgcngcatgcaagcttgtccaattgctgaagatgagactctgctttngaggattctacggcgagaactttcatatgtccagctgaactggaagccttcactctttgctgtcattagaaaagaacaaaaaaacaattcaaaaggatataaagtgcttgctcaaaaccaatagataatatcagtatattataatatgatgtgaaatgtaccaaccttttgtacaaactgtcttcttcttctggaaaaaaatgacgctcacagcaagggcaaacatgattagctcttgcaaccctctcaaaaggatcaaacatttgccgcataccatcagcaatattatatttgctgcaagcaatcaccagacaaagtattattacatgagaccagtacctactgacaacacaaacaacactttgatatggtcacaaagatgacgtcatgaatg

SEQ ID NO: 57443 - DNA, 370 bp, Glycine max
  unsure (1)..(370): unsure at all n locations
cttcatgttagcaaaaaagttcacatatgttattaagaaaggctcaacatatattttttgctttaggactcacttatagttagtcagtgttatatgtcccactctagaatgagagaaattgctcacacataattatgaacgatccgcaagaaaacataaattgaagaatatatagtgtcaattgaagacgagaaaagttaagaaaattcatagcttgtgctaagttgtcaatactcgaggttcagaacctaatatagaacataaagttcctattttaagtaaccggccaaacatgatctaacccagtcacttaaaatanaagtaaagagcaattcaatctcgttgtggcaatgcacggacgtgcggattt

SEQ ID NO: 57444 - DNA, 468 bp, Glycine max
  unsure (1)..(468): unsure at all n locations
gctttacatgcatgttcacaccatatttactatatcttcgatcaactgatgcaatctatttgattgaaaagataatttatattactcttctaatgtagtcgacaacaaaaaaaaaatataacagaaagtaatgcttaggccaatctaatcaagtcattttgaatctcgtcattactatcatgcatctcanagagaaggagaatcaagcatcgtaatgcatagcacaacaaaacattaaaagaaaacatgccttccaaagccaaccaaggttaaaatgtattcatatttggtgaactttttcaaaataataacacatatatataaacatggtggaacaatctgaccacatgcacaacacattccacacattatttctgaaaatgagtggcaagggaatataataaagcattgttattaaaattgtacatgcactaagaataacagggtgtcatgacanaaggaacacat

SEQ ID NO: 57445 - DNA, 424 bp, Glycine max
  unsure (1)..(424): unsure at all n locations
gtacgtgctaaggtttctggtttagtttcttctattgttgacaattaacttgngttcctaccttagtgatcttttagtttaatgtgctaagttgtttcaagtttggtctttggcaagtgtgtacaaagttagtccctaatgttaaaaaggtaaaaaatagctattatttagttatttctattttggtaggggaaagttgataaacggaaangtgttagtttctcacgaaattaaaatggtaaactatgattntcatgtttggtatgcaattaataaaaaaatattattaggaaactatgactcccgataatagcaaaatactaaacacattcatgttaataaatttttaaaaaataattgaaatctattggtatttcaaaataatgtgaatgtcattcgttacttaattaaaccatatacatac

SEQ ID NO: 57446 - DNA, 418 bp, Glycine max
gagcacaattcaagggtgggctatgtcttctcgaaaatcattctattgaaacccaacaaccagtgcagcgccgacaagcgaaacacctaataatgctgagattctctcgaaatcaacaagagcctgcgagaaacctctctctcttgaccatcaaacgcatccaagatacgcagatacatgctcaaaacgacatggcacagaatagggtcaaaggaatgaatcattccagacaactgcaccttcagcatggaaggttgcaatgtcaacgccacagcaacgggaattatcatacacacagactccatcattccgcaaggagtcatcacttgcggtcactccagcaaaaacgctaacgccctcctcaactccttcacattcaatcccgaacctatatccgaacccgaacccgaatccgtca

SEQ ID NO: 57447 - DNA, 467 bp, Glycine max
  unsure (1)..(467): unsure at all n locations
aagattcctaaagaagctagagcttagctacatatacctctctaatagctaagctcacctccttgagatgagaagctagagcttagctacacaccccctataatagctaagctcacccccatgacaaaaaacatgaaaataataaaaaaaaagtccttattacaaagacaactcanaatgccccgaaatacaaggctaaaaccctatactactagaatggccaaaatacaaggcctagacgaaggaaaaacctattctaatatttacaaagataagcgggctcatacttagcccatgggctcgaaatctaccctaaggctcatgagaaccctagggcctttccttggatctctagcccaatctacttggagtcttctagccaatgcccttgcggngtaggattgcatcattccctccaccttggaaaggatttgacctcaaatcccgagggtcttcatactctgggc

SEQ ID NO: 57448 - DNA, 351 bp, Glycine max
gctcccgagtatgacagccaccgttttatgagcgctgaacaccatcagcgctttgatgccatcaaggggtggtcatttctcctggagcgacgcgtccagctcacggacgatgagtatgccgatttccagggggagatatttcgccggcggagggcatcactggttacccccatggccaagttcgacccagacatagtcctcgtattttatgctaatgcttggcctaccgaggagggcgtgcgagatatgagatcctgagtgaggggtcagcggatcccgttccatgcggatgctatcagacaatacctaggatatcctttattgctggaagagggccatgagtgcgagtat

SEQ ID NO: 57449 - DNA, 468 bp, Glycine max
  unsure (1)..(468): unsure at all n locations
gtatgcccgagtcattcatccctatgagatgttgttaagtattggcgatcagaattgccattccttggattatagggttgaaccaagctcatgcttttacaaaaaggttcatcaagtcaagttgaaatatggaagtaaccgtcttgcaaaattggggcaaaagatgaattgagtcacatcactgcttcgtctactgccaaacatatttaggattattgatgtccttgttacttccagattcaccttgacaaagatgtcatggaccatgttgaaaatctaaattgattcaaccccatatcctgtgtaaaaattcgcaatacttcaactgtacatcattcgcatacatccatgcttttcattggttgcattgctcattgcattctttcgttganaaatanaataaaataaaataaaatgaacttaatcattgttatcaaanagaaaaagacacgctttacggcaccctta

SEQ ID NO: 57450 - DNA, 350 bp, Glycine max
  unsure (1)..(350): unsure at all n locations
tctagggcattttagagaatcaagctttggagcttgaggatcagnttacnagctcagaatggaactagaataagacagttcattgtaaacaggtgacccatttgttgctagagaacttgattatctttgattcactggattcactctggcagagttggctttaacaatatacaaagtcttcaagccattattgacaatgaaattaatatccggtacatgatcaagtctctcaacattttatctgtacaaatattggcttcacgtgaagatgatccgnatcgaagatatcaatcaaaacatggatgactggaacattccagatatccctcaggatcaactatacgctcctg

SEQ ID NO: 57451 - DNA, 451 bp, Glycine max
  unsure (1)..(451): unsure at all n locations
agcttgtggtggagaaagggggganncaatttaaactggagatatttttttttattagactccattgacatctgtatgaggaaatttgttgtgatgaaatctcctgaatctcctatatttatgttatgatgaaagcttgtctctaatttatgacacaagtgtgatggtgatgcataaattgaaaccatgtttctttatntttttttctatgtctggattgcttgaaagttttgttgagtattgttaagtattattactttttagtaaaaattttcctaaaaattaccttcaagtaagactatgattaccagtgaccacacactcaaactgtagtctgttcctgattgatagcaattgtagcaagtggatatattgttcctgattggaccacacactcaaactcaaaactaggtgtctaaatattcagnatttctttttgggctatgtcttt

SEQ ID NO: 57452 - DNA, 405 bp, Glycine max
  unsure (1)..(405): unsure at all n locations
taggcacgacaagatagtcctctttactttatttgatggaacactagtgtgtatcacaacacaatgttcttgttctcaattntggacgatccctgcatattaaaatatccagaaatttataatataatatgatatgtcttcaccggtcaaattaggtaccaaattcaaattcatattatatctaattttcaattagtgtctgatctaagcaatttaatttgaagaagaaaaaaaaagcattatgcgagtgagcgcaggttgtccaacttgtgtttattgagtacatggattttttttcccataattctttntattcttatttagtggtcctatttccaaagtggtgagccctatgtgaatttcaattaatagtaaaaaatgtgtaagaaacgtgtatggactaat

SEQ ID NO: 57453 - DNA, 460 bp, Glycine max
  unsure (1)..(460): unsure at all n locations
gattcccgaccgagacatgttttctttcctggtctcaagagtgctattgatccaaatattctcctccgttatgatatgttggggntaaatttagattnttaatatgtcttgaccctgtttgatattatttgaaaattcatttttttttacttgaatatatgtcctgttgtgctatagccagtgatcaaatacattcattttcttntttgatataggtttgcgcaagttaaatttttttaaaagaaaatgtggactttcatatccttttatagatcttttcttatacttgagaacaagttgttgtgttgttctttattaagttgcttctacaaattctgtggctaatttattggtcttaaactgattatattcttttcaaggagtatgattcatgactattgcatcttttttgcaagttntaattcttcctctttttctatctgataattattctatcttt

SEQ ID NO: 57454 - DNA, 372 bp, Glycine max
gcttattgctgccaatgttgacaccttttctctactcactcacccaaacccacggatgaaggatcccccataaccctcacacatttcactaatctctcattatctctcacatgcaaaagacacttaaaagaattttggaacaattctcttccattttggagctgctggcccagaccacaggaaggagaagaaggaggattcttcccttgcatgcaaacttggagtgttcactacaccaattcaagttaccctttctcattttcatctccttgcttgctccttttgggctttggaataaggtaaggaatattctttcatgtgaactcaaactcatggttgtatttgagaggattcagccatagtattacatgc

SEQ ID NO: 57455 - DNA, 393 bp, Glycine max
  unsure (1)..(393): unsure at all n locations
ctaattacatgcaatgtttttaacacatggttggccatgcggaaggaaataggaaccttcaagataggtttcgatactctggagaaactgtaagcagacatctccataaggtattacctgctttccttaagttgtttatggaatatattangccactatatcctttgtttcgtgacagtcatgccaaaatagaaaatgatacatgatattgactattttttatgaatgtcaagctagatttattggaaaaaatggtattccaacacaaaatataatggttgtatgtgattgaaacatgtgttttacttttgtattagctggatgggaaggtactgcccacgatgcttgattctttgatcatgctctcacgacttttaacatgaatattctaca

SEQ ID NO: 57456 - DNA, 305 bp, Glycine max
  unsure (1)..(305): unsure at all n locations
ctctaaattgggggagtgggctcaaatatatggngcaattttgatttgttttcttgcttgattangttgaattangggttggtatgagatggccctacgcctataatgcattntgaaacaataggacatgccacattgtccccgttctcttgctattgatgcctaaacgcgcgcccaccaagtgttcggtgaaatgcctcaatggcattagcgcgtgacttttgtaaggagacaacccatggngtattttggtttgtgcatattttctatttttttggaatatgtatttgtcgcaacctaccctt

SEQ ID NO: 57457 - DNA, 263 bp, Glycine max
tgctcttcctcgcgagccgtactggttgctagatcaagggctgtagccgcaactgcatggccttctcgtgaccgggcccactcttgccggacgactgtagcgaccaacttgaattcttcctcgaccgggcacgctactcctacctgggtgatcaaagctcggactgcgtgatcctccttcggagcttcgagagtctctctgcagatactcttgaactggaagagccatactaaaccccgtgtacgaactttcagccattcatg

SEQ ID NO: 57458 - DNA, 285 bp, Glycine max
agagaccatacaagtctcctaacgatttctaattatgtgggcgcattaaggctatcatatgctgacaatagccgagaagcccatgaatctcttccggggcggagtaagtgtctgccatcggcctggccttggctaacaatcggggaagttcttgactcccgctcaaggtaagagcaaaccgatccatccacatggttgcctatgggtggaaagagtcgatcacccttgctctatcctctttttccgcgtatacttgggcagactcatacgcgagtctatgctcgt

SEQ ID NO: 57459 - DNA, 325 bp, Glycine max
aatcgtggaatctttcaaaaattgggctcccacttcacaagacacttgttccatgatctgaccgttgggaactttgaaagaggatgtgagatgctagaagtctctaatgaaacctctggatgagcctcttaatgaagcttctagagaaaactacctgtagctgcctcgggtaaaaacactgccccatccttcggtaaccgttgcatcttctcaaattttttttgaacttcacaagaacaattttccataatctaacccgttgggatctttgagaagctatctggagtatgctagaagccttccgtcccgagagcatctcttattt

SEQ ID NO: 57460 - DNA, 445 bp, Glycine max
  unsure (1)..(445): unsure at all n locations
agtgtattttgttattcaatagtcaatattttgaatgaagaacttaagcttttagaatttgttaaaagattctcctcctaacaaacttaagtaatttaacttacaatgaatcagaaatctatcatccatcgtatgtaaaatgtacacacataactatcacaaaacacatcttatngtatggttgtcctacacttactaaacacacataattgtcatcaaaatcattacatttcanaattctctataagatacatgataattatctacttttgaaaataattacctttntatttgctttntatttgcagttactcatactggtctgctatggctntcctttgtggatggtaaacttgagctttagacatacactgatatngggcaagttgcttttggtactgctagacatatngccatttttgtaagttcaccctgatctctattt

SEQ ID NO: 57461 - DNA, 479 bp, Glycine max
  unsure (1)..(479): unsure at all n locations
catgcaagctnggagaggatgcttcaatggaggaaaatatnattggagagaaagagaggggggagcacgaaattgaaggaagaaaaagggagagaagttgaactttgagttgtgtctcacaagactttcattcatcaaagttacaacaagtgttacacatgcttctatttatagactaggtagcttccttgagaagctttcttgagaaaacttccttgagaagcttctttgagaaaacttccttgagaagctagagcttagatacacacacccctctcataactaagctcaccttcttgagaagcttccttaagaagattcctaaagaagattaagcttagctacacatacatctctaatagctaagctcacctccttgagatgagaagctagagcttagctacacacccnctataatagctaagctcacccncatgacaaaaaacatgaaagatacaaaaaaaagtccttactacaaa

SEQ ID NO: 57462 - DNA, 462 bp, Glycine max
  unsure (1)..(462): unsure at all n locations
tactaagctnttctctgtacacctacattcctatacacgaaaactttttctgtatacacacgcattaaaaaactctntctctttatatcaacatggtctatataaaacctttattccttttcaaagatttcttcttcctttttcagcatacgctcgttgtttatacaaaaattttctttatatacactcattgctcacacacaagaatttcttttcacacattatttatacacaaaatcttttcatacactttttatatacaaaaactcttttcttttctttatatacatatatgacattttgttcacaacgcctctttctttttctattcttggggttatcatgatgtttggtcgttntattttaggatgacgttcctaaatgaaaactctacacgggtccagaatttcaacaaacattattgacaataacgaagtaacactaatgaacagtccaaacaaa

SEQ ID NO: 57463 - DNA, 440 bp, Glycine max
  unsure (1)..(440): unsure at all n locations
ggatcttaagtgactgaggctgcagcttaggctagcccaacaactttttttttntatacaacatacaatgacactaaccactcaatacataaacattaaactaacaataatcaaagcatacacaccaaaagaagcaaataaactacacatgtcttctaccctagggttttacataaacagaagttggaaatagagaagaagagaacttacttggaatgtagataatggatgaacaatgcaatgctagcaaaatgcatatgatgagggtagagaagcaaaggcacagttatagtgagaattgaaagtaactgccctaacgcagttatgtcttctttttgcagatacaatttgctcgctaagcgcgagtgtcgcactaagcgagcactatgtgacgtttaaattttcaaaatttaaaaacacgtgcttagggagacatgctc

SEQ ID NO: 57464 - DNA, 472 bp, Glycine max
  unsure (1)..(472): unsure at all n locations
gctcactggtgctgccccacaatgctccacggaatntttcacggccatgctcttacttgcgagccctcttggtttcttgatcaagggcttttgcggtagctgcattttcttctcgtaacccggcacactctttccggacgtctgtagcgaccaacttgaatatttctttggcaaggctcgcttttcctaattcggttatcagagctcggacttcgtcatcctcctccggagcttcgaagttctctcttgcgataatctttaactagaagagccaatctaaaccccgtgtacgaactttcagccattcatgataacccccaatgatgccattacgaatgcccctaagttctctatctttccttagcgggctttcccacgccttatggactctctgtataaccttgaaatttgcgcgccagaatctctcacaaggaaaggagacaggctttcttccgtcggtgctcccctcatg

SEQ ID NO: 57465 - DNA, 456 bp, Glycine max
  unsure (1)..(456): unsure at all n locations
ctgcagcttatgtgatgaccagtattttgtgttgttctatgcccaagtaattgattcaggattgattcaagacttcaagatcaagcatcaagaatccaatccaagattcaagattcaatagaagaaatcaagaagcaacaagtcaagacttcatataggataagtattaaaaaaaaattcaaaaaccaaaagcacagtttggtttacaaaacaattttctcaaattttctaagttaccagagtgattactctctggtaatcaattaccagttggcagtaatagattaccagtgaccagtttggttttcaaaatgtnttcaaatggtttacaatgttccaaaatgaatttcaaatattgtaattgattacactatattagtaatcgattacaagtgaatctgaatggtggaattcacatccaatggtgaagagtcacatacttttataaaacacatt

SEQ ID NO: 57466 - DNA, 457 bp, Glycine max
tgcgtcaaccatgaaccatgtcataccaggcttgtcaatttatatttgaataaaatatccttttaaatacccattacacaacaaacaggtggattcaaaaatcaaaggcattgaattgaatgacccacacaaagccacaagagaaaaagaaatgacattttggcacaacccaattgaaaatcttaccaaccccagaaagaccaatccggaaaagggatgtcaaagtgttcctttgtggtgcaataccgaaatagaggcaaaggcattgcttggtgttcagtcttattaacagaaggtttatccatgcaatcaaacatcatatccacatctggcaccatcccagggtacctcctcataagctgcaacaacccccacagtgtaaacattgccctactctgcacacaagcatagtaccaatccacaaacaccttcccttcaacaatcaccactctgaacg

SEQ ID NO: 57467 - DNA, 373 bp, Glycine max
  unsure (1)..(373): unsure at all n locations
tcatagttgatataggtagaaagaagctgganatgtttttttaagatcagaanattgattntgatttgtttgttgaagacaagcctactccagaatgaaatgtttgcttacaggtaatggaagtgggtcaagaggttctggaggtaagaaccaaaacatgatatcacccattgaggtaaaatcgtcaagctaatgacattaaagaagtgcttcctgcgaggcaacccagatttaattattggtatctttggttttcctgcattatatcatgtggaacttgctttataatatgtacattggagtatatcagcctatccttgaatgctagatataaggggttcaatttcttgagaaagggactgaataataactc

SEQ ID NO: 57468 - DNA, 421 bp, Glycine max
  unsure (1)..(421): unsure at all n locations
cctgaatcggacctccgagtgagaagttatgacctattgatnttcctaagagcttccgttgttcanattcgagcgtctcgatatattatgcgcctgaatctgaccttcgtgtgaaatgttatgaccatttgaatttctcgagagctctcggtgttcaatttcgagcgtctcgatatattatgcgcctgaataagttcttcgagtgaaacgttttgaccatttgaatttctcgagagcttgcattcttcaatttctagcgtctcgatatattatgcgcctgaatctgacctccgtgtgaaaatttatgatcattngaattactgctgaacttccattattcaatggcgagcgtctcgatatattatgcgcctgaatctgacctccgtgtgaaaagttatgaccaattgaatttctcgagagc

SEQ ID NO: 57469 - DNA, 457 bp, Glycine max
  unsure (1)..(457): unsure at all n locations
ttaagtcacgcgcgggcatgcaggctttgttggctcttcctanatccttattttttcttttcaacacattntntagagccaaagttatagatctgatctcatgggaacagntgaagagacaacaacatgtattttcttttcagtctttgcgtgaacctttcagcaactgtgatttccttgattaatcctgttttgtggtttccactcccctgcctcttcgataanaaccttttattgaaagatatggttatttaatttatgaatgtcgtntgtttattttctttttccgttcactttcactccattattcaattggtgataaaggtatggcaatggaccgtgattgccatgtaaaggaagaggccgtgcatgaccgcatttgcgcccaggaacaaaagatgagtttttcattctcaagcgcaaataacaactaagaangcctttcttctttggtttt

SEQ ID NO: 57470 - DNA, 439 bp, Glycine max
  unsure (1)..(439): unsure at all n locations
tttcctaagttctgtaacaagctcttatttataatctnggccttctcttaataggctttgggcttggcgaccacgatcaataaagtactttcggcacctactatatgttgacttcaccaacgctgttattggaatgctgcgacaatctttcaacaccttattcacacattctgataagttgtgtgtcatgtgaccatatcgtcgtccagatgtatacgaagccatgctccatttttcctttgagattcgatcaatccatcttgctatagctggactcaattgacgaaatttttgtaagttttgatcaaacacatgcttgcaaggagtgtacgcttgcatcaaattgttatcatcaacagttgtacgtagacatgaaactcanactaaattaatgtataaaataaaccttacccaatttcttgaacatctctttttggtt

SEQ ID NO: 57471 - DNA, 401 bp, Glycine max
  unsure (1)..(401): unsure at all n locations
tgataatcctgctcaatatatatggaccaagggtttcattgaacagaatgttatctgttatcttccgattgcaaaactgaagccctaagccgcgattcagattgcgatgctatccattctactttgttcttcagatccctgcaaattcaacaaaaaatatatcaaggaataaatatgtatgcacaattttggaaaaaaaaattgaatgtaggttgtgaaaaatacaagatctcatcactaatcataccatccatatattcataatagaatccaataatccatcaagctcttcaagagacagcagcattaatctagagatgcacccatgaccaaagaattttgttntaacaataagtttatggcaaactgaataaattattggctgagtcgccgacaatatc

SEQ ID NO: 57472 - DNA, 422 bp, Glycine max
tcgcgtgcatgaaatccactccacaacgtttgcagtaaaggagaccttcaatcctattacacaacgtggcggacaaaagtgggcagttaactagaatggtcattattgtcaatgcagaacgtatgttgcgcttcactatccatgataacacattattgcagcttgtggttacgtgagcatgaactattaccaaaatatagatgttgtttacacaaatgagcacattataaaagcttacttcgcacaatggcggcctcttggaaatgaagcggctattccttcttctaatgacgcatggacacttatccctggcccaactaccattcgtgcgaaaggtctgccataatcaacacggataacgaatgagatggattgtgtcgaatcatctaaacaccgatcaacatgtagtacatgtggagcat

SEQ ID NO: 57473 - DNA, 358 bp, Glycine max
  unsure (1)..(358): unsure at all n locations
agcttgcttgtggagcttctatggaggctggtatctttgagcttcaaagaggtccttcaatggtgattntgcaccatggagatgcaaccggaagacaaaggagaagaggtgagaggaggcgccatccactatggaataagccatggaagaaggagcttcaccaccaagatgagccttggataagaagcttggagaggatgcttncatggaggaaaagaaagagggagagaaagagagatgagggagaacganattgaaggaagaaaaagggagagaagttgaactttgagttgtgtctcacaagactctcattcatcaaagttacaaaaagtgttacacatgcttctatntatagact

SEQ ID NO: 57474 - DNA, 471 bp, Glycine max
  unsure (1)..(471): unsure at all n locations
ntctcataagtcctaaatgagcattagaactatgattaactcattntaacctatatttaccactgaatccagatttagccttccaactctcaaagcctcactctttttccactcataacaccacattctcactttctaatcctaggttaactctacccttcatctctaacagttttccataagcaatttcagcacacaaacatcacaagcatcatcataaaaaccctaaaacataatgggtaagcttgactcacaccaaacatggcaagttcaacatgctttcaacaaatctcttcacaaataactatcataaagcataaaccaagtaaaactacccatcatatctcccaaagctccatacccacgaaaatcaagtgagaaggaagtctacccaaacctgaaatttcgaggtnccacacgtagagatggcgcttacgactccgaanatggccttctttcgcgaattggagc

SEQ ID NO: 57475 - DNA, 191 bp, Glycine max
  unsure (1)..(191): unsure at all n locations
gtctgtttagctttgatgtgtgttgaaatgcctgaaaagaatttggaagaaattcttgattgatttgatttgcttacctctaaaccaaattgatgntattctangtatggactagttatcttctaaccatgtcttactaaactattttgataaaattgtggtggttggtgattctgaaatgagtanggata

SEQ ID NO: 57476 - DNA, 214 bp, Glycine max
tcatctctattcaagtgccccatgggtggacaagatatcttgaatgaatgccagtcgtctatgattgcacttgctacattagaggagagtcttcttatgcaatttccttttagggcatcccgcttcggacaaagactttctacgtggatctattacatattttgattggctacttaaagaaaaactgtgatgtaaatattgactccttggggta

SEQ ID NO: 57477 - DNA, 379 bp, Glycine max
  unsure (1)..(379): unsure at all n locations
cccgagttgggtcgggaataaccaagcttaattttgggcaataacaccccttctgacgttcccaaagtcttctgaccttcgcgacatatctncaggtaccactctgtggtcaacaaacaaaagtaggaagactgactcttncatgctttctcacatcaagcttaatggattatggngcacccgtcatatgtggtactaggtggcgatcgggcgatggcgcatatcaactcttccacttccccaagtcaaacataaacacaccatccgcagntgtccacctttaaatngagctcacgtactcctacgtagcctttatcctcgttcctctcagcaccgggtcctcatcaacccctccaagcttcaacaatatccaaacaat

SEQ ID NO: 57478 - DNA, 397 bp, Glycine max
  unsure (1)..(397): unsure at all n locations
aagggatgccccacactatntccatgacacanatgcaaaaatgatgaattggaaactnttatgcaaaactggtcatgcatgcacctatgtggacactcaagtgtcaaacttttatggtcatgtgatgctagggctcaagattcatttcctccattttaaatcaacccaatgtttccaaaatatgttcttttatcaatttgtgcattcctccaagtccatttcgggcatccgggaaaatttcacagcattcacccttcaggtgtagacacgtttttttcaaaaactagctatgatcagcgaatttttcttttaaagaannagtggaaatcatctcttttcanaagcatgtncgatttttagctagacaacttaatttctcttttntcaccttttttct

SEQ ID NO: 57479 - DNA, 427 bp, Glycine max
  unsure (1)..(427): unsure at all n locations
gaaatagagaggggggagcacaaacatgaatgaagaanaagggagagaagttgaactttgagttgtgtctcacaagactctcattcatcaaagttacaacaagtgttacacatacttctatttatagattaggtagcttccttgagaagctttcttgagaaaacttccttgagaagcttctgtgagaaacttccttaagaagctagagtttagctacacacacccctctcataactaagctcaccttcttgagaagcttccttaagaagattcctaaagaagctagagcttatctacacatacctctgtaatagctaagttcacctgcttgagatgagaagctagagcttatctcacccccctatatagctaactcacccctatgaanaatacatgaaacacaaaacagtcctactacaagactact

SEQ ID NO: 57480 - DNA, 372 bp, Glycine max
aactagatgccttggtaacctggaacccatctggttcataatcacaaatctgcacttgccgccagactctgaggtttatgctcctctaccgaccaccacacagacctttgcctttctgtgcaacaatctgaagcaattgaacaacctgaagcttatgctgcaaacatctacaatagacctcctcaacctcagcagcataatcagccacaacagaacaattatgacctctacagcaacaggtacaatcccgggtggaggaatcatcccaaccttagatggtcgaattcttcacaacagcagcaacaaaaacaacaaccttattttcagaatgctactagccctaggagaccatacgttgcttcactaattcca

SEQ ID NO: 57481 - DNA, 459 bp, Glycine max
  unsure (1)..(459): unsure at all n locations
gcgagctctgagcaaattcgaacgacaataacgtttatcttgttgtccgattgagtcccgtaatgtatcgaaacgttcgaaattgaatgctgatgctctcagcaaattcaaaagacaataacttttatctcgggtgtgtgattgagtcccgtgatatatcgacatgctcgaaattgaatgttgatgctctgagcaaattcaaactacaataactttttactcggatgtctgattgattcccgtaatatatcgagacgctcgaaattgaataccgaaactctaagaaaattctaacgacaataactgtttactcggatgtctgattgagtcccgtaatatatcgagatgctcaaaattgaatgctgaagctcttagcaaattcaaacgacanataaatttaactcggatgtctgattgagtcccgcaatatatcgagacgctcgaaattgaatggtgata

SEQ ID NO: 57482 - DNA, 464 bp, Glycine max
  unsure (1)..(464): unsure at all n locations
tactaagctcagaatcaattccgcgttaataatacgggacttcttttacatccaagcaaaacattattgtcgtttgaattagctcagagcttcagaattcaatttcgatggtctcgatatattacgggtctcaatcagacatctgagtaaaaaagttattatcgtttgaatttgctgagagcttcaacattcaatttcgagcgtctcgatgtattacgggacttaatcagacatccgagtaaaaagttatcgtcgtttgaatttggtcagagcttcaacattcagtttagagcgtctcgatatattacgggactcaatcagacatccgagtaaaaagttattgtcgctggaaaatcctcagagcttccgtattcaatttcgagcgtctngatatattacgggactcaatcagacatccgagtaaaaagtattgtcgttgaatttgtcaagcttcacattcaatt

SEQ ID NO: 57483 - DNA, 225 bp, Glycine max
  unsure (1)..(225): unsure at all n locations
atcgagtctagnggttcttctaatgctcctttagaagcgaaatacaaaatatcttaatctcattcttggttatgagaaaattctatctttgtgctttcatttttcattcgtcgcattggttctggaaacatatatgttttgaatggtttgggggtttgatttctataccaagaatgttcgcatttgttggattgagtggccttagaataattaagaggggggggg

SEQ ID NO: 57484 - DNA, 467 bp, Glycine max
  unsure (1)..(467): unsure at all n locations
atgcttcacggaaagaagctaacatttagagtgctgaagatttaatgccttttatctgcaattgttcaagaattaactcgataaattaaaagacttaaaaaaagtgatagatgatgtcataactattcaagtcacccatgggtggacaagatttcaagattcattagcaatgaatatgattgcaattaccaagttagaagaaagttttcttaggcaatttttttttatgtaatttgttattgaagagagactttatacttggttttattacatattttaatttgctacttaaagaaaaactttgatttaaatattgacttttggtggttgtcaagtgttttttttttaaacaatatatttatttatacaatttataattaggcattggactaatcaagttaattaatagtgtgggttataagtgacatttgttatgtacaagttaataggtgatattaactntagtg

SEQ ID NO: 57485 - DNA, 377 bp, Glycine max
  unsure (1)..(377): unsure at all n locations
attattatttcctaatattttatttttaaaagaaataactcctatctattacttctaaaaaaatatttttttttccaaaaaagaaatagtttaaacaaaccaactcaatatttatgaatcatatgctgaanatggtagtaattganagtgtatcgtggatgtttagtaaagcggatcttatntctatttatttatcataacatattaagacttatttgggattataaactagttagtgttaatgaattaaattattaatgtttctagttntaatttgacttattaatagcatttttggtcttttaagatcataattatgtggatttgatcctttaagtttcattatgcaaaattggatcttttagtattggatatat

SEQ ID NO: 57486 - DNA, 450 bp, Glycine max
  unsure (1)..(450): unsure at all n locations
ggacactatgaatactaagcttctaaggaggtgagcttagttatgagaggngtgtgtgtttctaattctatcttctcaaggaagntntctcanagaagcttctcaaggaagttttctcaagaaagtttctcaaggaagctacctagtctataaatagaagcatgtgtaacacatgttgtaactttgatgaatgaaagtcttatgagatacacttcaaagttccacttctttccctcttttattccttcaatttcgtgctccccccttctctctatcttttcctccattaaagcatcctcttcaagcttcttatccaaggcaattcttggtggtgaagctccttcttccttggcttatttcctagtggatggtgcctcccctctcctcttctcctttgccttccgctgcatctccatggtgaaaaatcaccattgaaggacctcattgaag

SEQ ID NO: 57487 - DNA, 439 bp, Glycine max
  unsure (1)..(439): unsure at all n locations
agcttgtaatcgattaaaacgatacatcattcttctatgcaagcttcagacaattgggtaatcgattacgaacagnctataattgaataaaatagagaagtttaacttcaaaagaatttttctaactttagaaaaatttcttctacattatgatgcatgatgcacatatgaaaagatagatactaagatgccacacacaatattacacttaatacaaatgccattcaagagagtcggacatgtaaaagacaaaacttcttctctcttcctcagaaacctcactgcaccttaacctattcttctctcagtcactcaaaaaacttgaaaccctaattgtggccaagaaatagaaccaaccctcagttgtccaagtcacacctaactatagaaacaaccctccctctacatcattcgaggacgattccaccatttagaatac

SEQ ID NO: 57488 - DNA, 422 bp, Glycine max
  unsure (1)..(422): unsure at all n locations
gtcatctagccacaattatacaaaggtgttacacattatcttaacgattcctaattatatgggccatcaaatctatcatgtgttgacagtaattgattagcccatgaatctccttgggggcagtacacacttcggccatggcttttgctntggctaatagacgcgggaggtcttgactcccattcaaggtcaaggcgaatctatccatccacatagtcgcttcttgatgcagcgcatcaatcaccctccctcttgcttctttntcggcatacacttgtgcaaaatcctccactagcttttgttcatgggccatggactggttcaattcttccttgtattgccctatgataggctagcatgcttgctccgtggcttccaagtgttgagctaaactccttttggacctcgcgcaagcaactaac

SEQ ID NO: 57489 - DNA, 464 bp, Glycine max
  unsure (1)..(464): unsure at all n locations
agcttcattctacaccttgaaaagaggatgatatatgttcacaanagagaaagcttcctaacaaaaattttcatgcaggtggaccttcttctagtaattccgacttacagcaaccttctaatcctttttcatccccacctagagcaattccaaacaaaaaagatggaaagaagtggaaaaggagatcttggagaccttcagaanagtcagattccaagatatgccaaatttctaaaggagttgtgcacccacaaatggaagctcaaaggcaatgaaaggattagcatgggcagaaatgtgtcagcattgataggtaaatttgttcctcacattcctgagaaatgtaaggacccaggtactttctgtatacctttgattatttggaacaantaaattgagaatgccatgctagatctangaagcatcagtggtggcatgcctctgtccattntcaattctttatc

SEQ ID NO: 57490 - DNA, 386 bp, Glycine max
  unsure (1)..(386): unsure at all n locations
agcttgtccaaaanactggttatgatgttcttatgtanggatgagggcctgaaccacattaaacaaatttgaggtcgtggatgtaagcatgagagtctgaaccacgttaacaatataaattgtgtggatgtagggatgaggacacgaaccacattaaataaatttgtgatctttttctatttaatcttatggtgttgccctttgtttgtggtgtgttttctcatcaatatgaataaagagatgtctgtgttctcccacaacagaggagagagaggggaaaataaaaggacaagtggcatgagaggagtgaataatagggattctgctactgattgagaagagcagacataaaggaggatgaatggaattgcaatggatattcacca

SEQ ID NO: 57491 - DNA, 431 bp, Glycine max
  unsure (1)..(431): unsure at all n locations
tccatcaagtggtatcagagcacaagagctttatgtangttctccttaaaccttcattaattgtcagctttaccttctcctccattgttgtttcttcatttatctccatgtatctcctcacatgtcttgtgctaaatgttgttaacatgattttttagaatttccaccgattaaacttactatagaagctagatttgattttctatggttcanatttcttgttcttgttcttgaaccatgaattgtgttgaatttaggttctttgagttttattttgctattttttgtggctgaaacctaaatcataaaattcttacaaaaacattaaagtataagaaaacctcanaaatctagagtgacttattcacctattgtagttttgtcatagaagtcatgtccagtcatgaaacttgtcacataagaattcttat

SEQ ID NO: 57492 - DNA, 470 bp, Glycine max
  unsure (1)..(470): unsure at all n locations
tgtagacccaagtattgagagtaaaagaatgaagattatngttctacttattcacaataaataatgtatacaattattccttttataatcatttaagagttgtattgacttttttttaatggtgtctttgattgactttttatctcaacttttgggtggtttctatgtaagtgttgatgcaacgtatataaaaattaaatttgaagaacaatatttatatatggtaagatgacacactagaatttcaatttcttttttatctatctatcttctatatatatactatatactatatgtaaaagaaacttgaacttcaacaagctatcanataaaatttttaatttgtaaagaaccattgacttaatatactatatgtaaagaaagtctgaagttttgacaaatcgtggatcaaaattattaattttcaacaaccattgattngatatactatatatagacatatgtaataa

SEQ ID NO: 57493 - DNA, 439 bp, Glycine max
  unsure (1)..(439): unsure at all n locations
agctnttccttaagtttaaatttttttttgctatcttccttanatctttaaattttcatgttgtaatattgtcacgaatggacagtttttagctacatttctttcttttctctgctttgtattattaaatagaatntattgttgagaggaagcagagaggggtgttatcgttgagaggatgcacagaggggtgtggcaaaatgacgtangcgggttccttttacaatctatttatcccacagggtctatttttaaacaattgtcgaagagggtctgttttttaaaggtgttccaccacttggactggcggaacccttgcttgcataaattcccatgcatgcatggttctgccagtggtgttagcgtanatcaacccanagggtttcgacaatcccactagagagataccccatgccattcatcccatcatccatcaacg

SEQ ID NO: 57494 - DNA, 474 bp, Glycine max
  unsure (1)..(474): unsure at all n locations
ggaccttgaaactaagctggctgatnacattctccccttctcattaaattctttattcttcttgacatcatcaaaatcttcatgatttacattctccccctttttgatgatgacaaccacctgtaggttaggagcaacaacaaagaaaaaaatatttatttgcatatagtttactcccccttggttttgcaatgattgcttatatgagacagttgaagatttcatatttttcatatgtaaacaaattgtctcataaacaataatagatagtttttcttactattttatcttttatctttctctccccctttgtcaacatcaaaaacaaatcatgaatagagaggagaaaggtgttaccacttgttgcaatgtatgagaaataagtgataccaaaagacattaaaacaatcattcaatattaatcaagccaaaacaactaccataacccatcaatcaaacacaatccaataccat

SEQ ID NO: 57495 - DNA, 416 bp, Glycine max
  unsure (1)..(416): unsure at all n locations
gatgaatcatgaatgcttattgactaatttgaggagagtttgtttgggaatctggttagatagctcgtgtactagtggtaattattgaagaccttgttttatactttcaaaaaactacaaggatgtgttgctagtttggattcaatgtgtaacaccctaaggggtattgctttannattacattntagtcatcaaatgcagataataaaaacatatatgatttcattactcaagaatttcaaagttatgtgtcatacatcattttcaagtaaatcatcatatacatatcanagggcatttatgaacatacaagactctatccttaagaataggtagatattcaagtatctcanaagtaataagctaaaagtcactaatatacaaaacatagcaccttcatggacaagagtcttcat

SEQ ID NO: 57496 - DNA, 450 bp, Glycine max
  unsure (1)..(450): unsure at all n locations
tttatccactcttttttgttttgtatccggatattcaatcaatcctttgttgtttgtgaaagtcagtagtgacttagtgttaaacaatacttgattgttcttaaattcaaggaaagtctaagggatctaccaaaagttgcatagagagtactattgtaaccaggagtggcagaacaaaatacttaatcaagttttgattaatagaaccttttactggtttgaaaaggataactagaggtaactctatttgagtgaaacaatataatcttaagtgattctattcattgtgttgattntgacacactttgtcacacaaatttgcacttggaaacctttgagaaaagnttggttattgcatnggatgagtccacgtctggtattaaagaaagctggnttttcattcatcggatgatantaagttgaataacttatgagattcacactcttatt

SEQ ID NO: 57497 - DNA, 434 bp, Glycine max
  unsure (1)..(434): unsure at all n locations
gaatcaatgacaatgcttacaaagttgagctgcccggtgagtataatgttagttccaccttcaatgtctcagacttatctctntttgatgcagatggagaatccgatttgaggacaaatccttctcaagagggagagaatgatgaggacatgaccaagaacaagggcaaggatccacttgaaggacttggaggacctatgacaagggctagaacaaggaaagccaaggaagctcttcaacaagtgttgtccatactatttgaatacaaacccaagtttcaaggagaaaagtccaaggttgtgagttgtatcatggcccaaatggaggaggactaaatggcaccactttgtctcaattntagagtggtttaattgtctaaataatggcccaatccttggtaaagtggcagaccaaaaatatgtttggtgttaatc

SEQ ID NO: 57498 - DNA, 440 bp, Glycine max
  unsure (1)..(440): unsure at all n locations
cagcaagccccaagtactcatcataaggatgcacagaccaaagttgcgtatgtaaaaaaattgtatgaccaagtgaaggtgcaaattgcaaagaagaatganagctatgccaagcaagcccanaagaaaaggaaggaagtggtacttgaacccggtgatgatcttggacattngaggacaaatgttttccaagaaggagggaatgatgagaatcatgaaacaggccaaatacagtctaaaggcccaagtggagaaggacgaaggcccaagtggagaaggacaaagcccccgagtggagaaggatgaaggcccaagtggagaaggatgaaggcccagaggcagagacactatcaagactattaatngatgctgaaggccaagaataatttgaaggcccataatanatatgttctatttagtntataattttatttaatgga

SEQ ID NO: 57499 - DNA, 459 bp, Glycine max
  unsure (1)..(459): unsure at all n locations
agcttgtaaacatcagatttatattctcaagttacattngaactacatcattgatgtggagttcaatacatcaaataaaacaaagtgtcatagttaacagtggattgctaacaaaaatgctactttataaatttatcaagctactgatcctctggaatactgtctaaagatggcttccaagaattcactccctcatcatcaaattcaccaacatctgaaactcttcctcctctcaacttcacagcatgtaataattgctccaatgaagtgtgttcatccttgaacctcaacatccttttcaactcttcttgagtcatcaccactctaatcctcacacttctagaattgccatcacttcctctctcaccttcataagcactatcataattntgcgtcttgaacctcaccttcttcttgatggcttgttccatccttggtggttcttccatcttggacaat

SEQ ID NO: 57500 - DNA, 433 bp, Glycine max
  unsure (1)..(433): unsure at all n locations
aacaatatacttggccttcatttaactgtctttgggtgtggcggccacgctcaacaaagtactttcgactcctactgtacattgatttcaccaatgctattatgggaatgttgcgacaatcctttaaaaccttattgatacattctgagaggttcgttgtcatgtggtcatatcgacgtccttctctatcgtaagccatcgtccattnttcctttgagatgcgatcaatccatgttgctatggctggactcagttcatgaaatttttctaaattttgatcaaaaatgtgcttgcaaggagtgtaggctgtataaaattagttatgaataacaattttaagtataaatgaaagtaaaataaacgtgaccatcanatatgaaatcttacccaatttcttcaacattntctttttgttggtattatntaattttcg

SEQ ID NO: 57501 - DNA, 384 bp, Glycine max
ctggtctgcactccattgaaaataacacaataaagttctgatattaaaactcattttacaggggctcaaactgtgcttaaaccttactttattctttgcggaaaggaaaacaataattctttttgtagaaaaaatacaatatgtcatgaattcgcggcatcccattcttcttggttcatgcattctttccttttctggtcaatggcaaaatcacttttctctgttggacctaaatggctctctgtgtggttacagctatggcaagaaaaatatacatggaaggcatatataagcaagcttctgatagccgatattgggacctcatgaacaggcaaaaagtgaatcagaacttgagctaaagcgacagcatatattgagtctgaa

SEQ ID NO: 57502 - DNA, 473 bp, Glycine max
  unsure (1)..(473): unsure at all n locations
ntcttacatacttcctgcaccatctgaccaatttgattttcagtgaatgttctgntctacacgcttccctttaatgatagaagatgcagttactgttacaaattcactgctggcctcaatggaaacacactcatggcccatcattatttttttgtcacaagactgttcatttccttccaagctttcaggcgcacatatntggaagcctagattttcaagtctcttgagtagtaacatagttagcttgtactgtgagaagtgtgcaacagagactgggctgacaacatgctcaagatctgataacaagtaccagatatatgaatattctaaaactcaatattggccaaaatcgacaatatcatgcagtctatgtgatgatatactgcatattttgaaggctatgtataaatattgtcaaaactacacttgaaatagaaatcttcctactgctatcagactggaaattggctctc

SEQ ID NO: 57503 - DNA, 444 bp, Glycine max
  unsure (1)..(444): unsure at all n locations
ctcagctataggagatggagccttggtggagagataagccttgtttgcttatttanagcattngaattacttggacttgagcggcaatagatntcttggacaaggtatgtcaattccttcttttcttgggacaatgacttccttgactcacctcaacctctctcatactggattccgtgggaagattcctcctcagattgngaatctctcaaatttggtgtatcttgacctgagttatgnttttgccaacggaacagtaccctctcagatcgggaatctctctaagcttcgatatcttgacttgagcgacaatgattttgaaggtatggcaattccttctttcctttgtgcaatgacctccttgactcacctcgacctctcttctggattcatggngaagattccatctcagattgggaatctctccaacttgatctatcttga

SEQ ID NO: 57504 - DNA, 281 bp, Glycine max
  unsure (1)..(281): unsure at all n locations
tcgaccatctcgatatattaccgtacttattctgacttccgngtataaacttattgtcaattcaattttctcagagcttcggatcaaagatttgagcatcttgatatattacgggactcatttagacatccgagtaaaaatatattgtcgttagaatttgatacgagcttccgttttcaatttggagcatctcgagataaattgtgacactctgacgggcatccgagaaaaaggctattgcgggttgatagctctaagagttgacggtctcaattcggagc

SEQ ID NO: 57505 - DNA, 345 bp, Glycine max
taatatgtataaactatactctataggaaacgaatcttcagatgaatatgtgagctcatactaatatttcatcagaatgaggttgtcttgaactttaccgttgtcacagaatttttggtctatattcattgacatagccactttgtatgtgcgatgtaaagtcaatgcactccccgtctacctatgatcgttctataaagtaagcgatcaaaccttttaaaggaactataacatcgtctatatgcgtatctttcgattgaggaagttgctaatagaatcgacatgtaacaaaatatcataccatatattcgtttctaataagaactcataatcttcaagttcatg

SEQ ID NO: 57506 - DNA, 365 bp, Glycine max
  unsure (1)..(365): unsure at all n locations
gttatgtaagactattgtaatctttgaaagcacaatttattttgtttcactcttagagggcngaagctataacacatttctcactcaaagatcttccacacaatcagtggcatagcttcaactaaaattttgggagagccaaaataaaattggctaaaatagaagtttggttatctattatattttaggctttagtttggctccttgggtttagaaagttgtattattgcatatgacaaanaaaatattcattatgctaaattggtcttttttgtgaatctgttgcacaaatgtgactaacttgatgacatatgacacattggtaaaaatatcatgtcagctaaccttaacacaactagtcgtca

SEQ ID NO: 57507 - DNA, 461 bp, Glycine max
  unsure (1)..(461): unsure at all n locations
agcttaaggttaaattagaccttttgtggagtttattaaaaatagcaagggttaaaaaatgattaccatataagtaactgaattatgatatggctcttaggagcttattcttgagcttcttgcagttttgctgcctatatatttaccatgactatcacttactaatttattttgtggcatcactcanatcattcgtggtgaagagcaacgtatttcttgtgttcacacacaaatcctagaggcgggttgtggcttaagcttagaagtttggtccctcatatatttcaagggattgttgttcagtggatattcagatggatcaatcaaggcaaggatcatatgggaggtcccaaaagcatacaaaggtctaattcaaaattaagcattcttaatgattatcataagcataacatgaaattattaatggtgtggacatgcatcatanattctacctcacacat

SEQ ID NO: 57508 - DNA, 439 bp, Glycine max
  unsure (1)..(439): unsure at all n locations
ngtagataacattgcggctgcaatgctgtctcttttccattctttgtcacccttgntgcccaatttcctttgatctctaagtacatcagccaatacacgttccatttccaaattccatgtaaaataacttcttgtttcctcgttattttttctaaaacttttcttttgtccgtcattttttcaaatccattttgctactggtaatcgattacaataatctggtaatcgattaccagagagtaaaaactctttggtaaacatgttttgagaaaaatccatgtgctactcagtttttgaaaaaaccttttcatacttattttgattaagtcttctcttgattcttgaatcttgagtcttgaatcttgatcttgattcttggaagctngatccttgaatcttgattcttgattcttgaaatcaactcttctcttgaatcttg

SEQ ID NO: 57509 - DNA, 337 bp, Glycine max
gaatgatatcatgactttcatggtactagtaacctaatggcttaatttgattatgatagtagtatgagggagaaagccttctactattggattggtaaaaaaattacagtagggagtgtgaagtaataaaaaataaaaagggtaagtttggaaatttagatgtaaatctacgctagggttgttttcctctcaatagaagagataataaaattttagggtatcccacactaagttatatctctactatatttcttttcccaatccaactatataaaaccactaacatatcattggtctaagtggatctaggttagaatccctttagtaagatctcatg

SEQ ID NO: 57510 - DNA, 395 bp, Glycine max
  unsure (1)..(395): unsure at all n locations
gggaatanaaggaaaagagttgatcaaggattatgctctttataacctaagttntgcatcctagaaaaaccatgaattatttgtagctcaacctcactacaagccaagaaagtccttaagattcaatttgtgtgtttgtgattgtatgcatgagatgaaatgcaaaagttgagacttgtgttggttgttgatttgaagaattaccttatacacttgcgcttatgagagaaatagtgaccatgaggattacgctgaatgaaccttcctttatacctatcttacttgtagcttatgtcatttgtgttgcttaatgatcatgttcatattttaaaattttgcatatctttaagaagggttattgtgtgaaatattgctcgccacttatgttcatgtga

SEQ ID NO: 57511 - DNA, 418 bp, Glycine max
  unsure (1)..(418): unsure at all n locations
agctncacatatatnnnntatggaganattttgtaaaaantatntatgcaaaagggtgattaattgaaccatgtattggcattgctcttaactcccacattcatccaaatgaggggtattgtgagaagagtgtaaaaaacgcggttttgtagattaaaacaaatgccattggagctaacgtggaaagacaaagaaattaacaattgcatataaaaagggggtttctgttggtagacaatattgtaagagaatagtgttggaggaaaataccttaatttgaagtaaacatggtatccaaacctgtggccaactcgatgctttttctgaggattgttgctctcgctgcctcagctgcaactgtggccttactatttactaacaaggtcaaattngatgatggaacaaagttgagatttca

SEQ ID NO: 57512 - DNA, 296 bp, Glycine max
  unsure (1)..(296): unsure at all n locations
caatgacnttgaggtttgaatcantagtgtgggctttaaaccctaagctaagtcaccaccggttctccatccccaatcttcgtcggaatccccactctctattcgcacctccctcttcttctcgcattcgcactttcttcctcgcattcgaagaaggaagaggaggagaaatcgaaccggagaaaaacgaaaacaacaacgataaccgtaccggtggcgaagaatcgtggaagccagctctggacacgttccgagaacaggcctcgaagattcgagatgcttctcaagaagcgtac

SEQ ID NO: 57513 - DNA, 310 bp, Glycine max
attaactacattgatcgaacgatatttatcaattccaagaatacaatacgacaaatcttacatacacgtttttggttcatgatgatttgatttccaataaataatggagttccacttcagacatccgtataatatatacacttgcattaaaggatttcatggattattgaaattaaactccaattctaactgaaaaacagtaattcgacctaaagaactgtgtaagttttgtccaaagatatataccttgatacttgcaacaaccgtcaatgcaagatacaaacctcgatgatgaatcatatccaaccaa

SEQ ID NO: 57514 - DNA, 401 bp, Glycine max
  unsure (1)..(401): unsure at all n locations
catctgattatgttnngtggaagttctttatttctgaatcactgttctctggcttcatgagtattcatactatcatacagataacagctttcaagtgtatgtatgcctaaactaatntgttcataccacaataaggttcatgtgtctnttctgtaatcgttccccaattcatcgtggaacatacatagactgcaacatcattctaataacttcttacctgaacaacttgtcaaatatttgatatgttggttaatacttgtgtaaagtaatgatcctttgcatttacattattcagcaattgcctcttaaatattattgctttaattatgtaacatatactctcgtagtaattttgttacacaattgtatgtttagttatctttgaattcagttatcacata

SEQ ID NO: 57515 - DNA, 362 bp, Glycine max
  unsure (1)..(362): unsure at all n locations
actgttcagaaagtatatgcaagctaatgcaactccttaactcccgaaacatcaaacatcttatggtctcacgttaactagcaccacttttgctgatatatatntacataacaaataaatattctttaattaaaaaagataaaattaatattttattcattgagaaatgctttccagtgtagttccacaatttcattcccgttccttcctctcattttatttcactcttaacaaaagaatataacaaagtatccatactatatagaacataaacagtttacaatagataattatatatgtgtctcttgtctgtgggatgtgtcacaagtgcgtaaagagattatgggattagaagtgacgat

SEQ ID NO: 57516 - DNA, 432 bp, Glycine max
  unsure (1)..(432): unsure at all n locations
agcttcnataccnaatcttactggcggcgctacacaaaagttaatgagaatatcaaagctatgtgcattggttaaaccataatatttctccatagcttcaagcaattgccatgcttcatcaattntaccattcttgcatagacaactgagtaacaaattataagtacttacatccatatcacaaccacttctcttcatctccttaaccaaatcactaactcttttacaatcaccacttttgcacaatattctcattaagacatgataagtgctcaccttcctcccagccgttcttatcacaaactcggctatctcaaaagaacccgaagaccaaacatctctatcaacaactgaacaccacatacttgatacattccaccaaccttattgaacacagccataactttcctcacacactccatactagaagcc

SEQ ID NO: 57517 - DNA, 403 bp, Glycine max
  unsure (1)..(403): unsure at all n locations
ctcagcttgctccttcgcaagcaaaaggaaggatgatatggccacccatcttctatatttacgtgttcaatgttttctagcgacatttttccctgtgtccgacaattagagcaatcacacggaacacatattttcactgacaagataacttcaatccatggttttcgtaattacagtacagtacagatggtgacaactgctaagcacaactaanactcgctaaaccaaaattgtgaccgaataattatccaanaattgaataatggtctacaatgaactgttacagatgatgagaatgcatggctaaatcttcctggagaggcgaatattggcactcttcgctaggacaggtgaatacagaaatgtccaaaatatcagaacatgaaggctcattacattattc

SEQ ID NO: 57518 - DNA, 421 bp, Glycine max
  unsure (1)..(421): unsure at all n locations
ctatatccttcactagcacaccatagctcctggtaaagaagattcctangcacctncttcatgagatcaagaagaactntacatttgacttcatgaggccaatcccttcnggaaatcactctcttgattcctttctctttaagtgcaggtatgatcttcccatataacatatcactgngacggcgaacatgtggaggagctgacgattttgtatttgcagggcccaatgccaaatactgtgctagctggacacgggtttgccaagctttaaatacactataaatacttactacattgcccacccactggattatgccagcccgaccactgattggagtcacagaataatagcgaatgctaagagaattgctacatgcagaagaagaagaatgcagaacaccatttatagcctgcagtaatt

SEQ ID NO: 57519 - DNA, 221 bp, Glycine max
tccctttcatatgtgacattggctttcactaggttaattactatataccctgcgatcactgagtctgaattaccataaataccaactcaatgatcagcaatgccttctttatgtgatcaaataccaatggaagttatggaagaagcttaaaactacatcacttatatatgaatcaatgttttccaaacttatgacaattaactaacctacactcatgtata

SEQ ID NO: 57520 - DNA, 372 bp, Glycine max
  unsure (1)..(372): unsure at all n locations
tatgctgcanacatntataatagacctnctcagcagcanaaccaacaacagcaaaataattatgacttttcaagcaatagatacaatccagaatggaggaatcatccaaatctgaaatggacaagtgtcataccctaatttcttccggggaccattgtttgatggcatgcaacctttggttgaccgcttcgaggtacttggcaccctttgctgcacaatacttgaagtttcgagacatgccggatatcaaaaggaaacattgttacgcaatccgtgagattccgtaacatgccgganatcaaaaggaagtatcattacgcaatccgtgagtttccgtaacattctgaaagctaataaaggagtaattacatg

SEQ ID NO: 57521 - DNA, 426 bp, Glycine max
atgactgattggcttacccccaccgaccttatacgcgctcactagatgtttctctcagcaactatacgagatttggtgaacaaaaacccgtgtggctactcaatgcttttgagtactctaaagagggctacgtgagccaatctatcgctctgtacatacttaacgactgtttgacgctaagcgcagttgcgccccatcatattagaaatgctggcgctcatgttctctgatctttgcttctcatcgcatattacaatcccaggagttattgatttctttgcttgtattcatgcttcacaccttaggaaatgaatctgttttgaacgacactgtgtacgtaactactacttcggggtagtattaggactaagttttcaatccatatagaaagggttaaagggtaaacctgttacttctgatcgtacg

SEQ ID NO: 57522 - DNA, 400 bp, Glycine max
  unsure (1)..(400): unsure at all n locations
atgtctgatcgagttctctattatatcgagacgctcgatattgaatgctgatggtcctcgcaaactgaaaccacaataactttttactctgatgtctgaatgagtcccgtaatatatcgagacgcctcaaatcgaatcttgatgcttctgagcaaattcaaacgacaataactnnttactcggatgtctgatgagtcctgcatatatcgagacgctcgagattaaataccaaagctatgagcacactcaaacgacaataactctttactctgatgtctgatagaggctccgaatatatcgacacgctcgaaattgaatgtcgatgctctggctgaatcaaacgacaatattattccgcaacattgcagaatattnacaacactggtcatatattctttat

SEQ ID NO: 57523 - DNA, 347 bp, Glycine max
  unsure (1)..(347): unsure at all n locations
tttaactcactttaaccctcatctaccacagaattcagacttagccttccaactctcatagactcactctttttccactcataacaccacattctcactttncaaccctangttaactctatatttcatctctaacagttttccatgggcgatttctgcatacaaacatcacaaacatcatcacaaaaccctaaaacagaatgggtatgtctaactcacccaaacatggcaatttcaacgagctttcaacaaaagtcttcacaaataatcatcacacagcagaaacctagcaagactacccatcatatcttctcaaaccctatttccacgaaaatcaaaggagaaag

SEQ ID NO: 57524 - DNA, 346 bp, Glycine max
  unsure (1)..(346): unsure at all n locations
agcttcanaattcaatntcgagcgtctcaatagaatacggtactcaatcagacattcgagcaaaacattatttgtcgttgaattagctcagagcttcagaattcaatttcgatcgtctcgatatattacgggtctcaatcagacatctgagtaaaaaagttattattcgtctgaattgctgagagcttcaacattcaatttcgagcgtctcgatgttttatgggacttaatcagacatccgagtaaaaagttattggccgttgaatttgctgagagcttcaacattcaatntcgagcatctcgatatattaccggactcaatcagacatccgagtaaaaagttatc

SEQ ID NO: 57525 - DNA, 289 bp, Glycine max
  unsure (1)..(289): unsure at all n locations
agttccgtaatatatcgagacgctcgaaattgaatgttgatggtcgttgcanattgaaacgacaataactttttactctgatgtctgnatgagtcccgtaatatatcgagacgctcgaaattgaatcttgatgctctgagcaaattcaaacgacaataactttttactcggatgtctgatagagtcctgtaatatatcgagaacgctcgaaattaatacgaaagctatgagcaaattcaaacgacaataatnttttactcggatgtctgattgagtctcgtaatatatc

SEQ ID NO: 57526 - DNA, 309 bp, Glycine max
  unsure (1)..(309): unsure at all n locations
agctatgagtgtaggtgatatnntagtttatttaaagttttttatcttgtccaatatataaaatagggaaaaataatttaatttacacanaattactttaataataataanatgtatcaaaagaaaatacaatatttanacataatttaaaaatgtcaaaattcatatagtaatagacaatatttaatgataatttgcatatgtttacaacggatgaaaagtctaatatgcaaatgcctttgacagacaagatggcnaggtctggaatgatacgttccaaccaccttcgatccatacatcttgctcgtg

SEQ ID NO: 57527 - DNA, 195 bp, Glycine max
  unsure (1)..(195): unsure at all n locations
acatactaagctacctcttnctctgaccttactccaattcttctacctctntctncactttttctggttcatcanaggntaagtgttggaagaattcaggataaccatcacattctaatcgttcaaaggtgatgacgtgatggatgtcattatggagagacagcatattattgacatctttgtgacacacaagcg

SEQ ID NO: 57528 - DNA, 474 bp, Glycine max
  unsure (1)..(474): unsure at all n locations
agctctgataaanaccgagcagttctaataagatttgtttatgaatacccttacgctctgcagatatataaggtgacattttaggaattccatttctagtaccgcggccaaaatgaactcctgcttccatcatctctttcaagattatgttccaatatctttttgtcatttatatttatccccacacttttctttcatttcaaaatcgaaattctataaattttttgaaatgaaagaaagagacccggtatactgaaatagaaataagtgttcaaaagaaccttctcttctaccgaagaatggcctttgataaatgatcgggccatcttttctatttaatatataatatgagtattctctttaattatcttctgttattatacaaaataaaatgaccgaagatgaatccgctcttaagaaatcattatttagggaatattaaatactagattgctgcgatgtatcgcataaatt

SEQ ID NO: 57529 - DNA, 523 bp, Glycine max
  unsure (1)..(523): unsure at all n locations
tcttacanagcatacggctntctggatgtagatgatgatatctatacagatggatcttatatatctatatatctatagatagatatatagatatagatatatagatatagatcatacaatgaagtaccgcacgagtgggtatatatgaatccaaatctgccgaatcactcatgttatgatcttctacatcctaagtcttcccgttccttcatctggcttatgttcttcatgtagcattcagactgaatgactctatngaaatacgtcgctacttccacatggtacgggtaacgtaggagacatcatctattttcccggngggaatccttagaattaccacagcttagctttcaattcgcctctgaccatcanatganatgtgaataacccgtccctccctctttganactatgaaacanagggtgcttccggttctgtcgggtgcttgaaacaatntgtcttctncatattactatatctcgagagtgcaataatttatatgaggagactactgactcaatca

SEQ ID NO: 57530 - DNA, 442 bp, Glycine max
  unsure (1)..(442): unsure at all n locations
agctagtgatattnttactatatatgtgtgtgtcttcgtttatctctaccttgttaataatgtgataattcactcctcatgtgttgtttatgtttggatcatgtgatgatcttaaaccttgtgtttgtgagagcaaatggctaggtgaattactttaagaaaccttgtgatggaggactccgagacacaatattttgataggatgtaacattggaacaagagtttttattttatttgcatgacgtatcaaacattgtcatttactttatttgataaacttgaacagtcttgttttaagtcataaatatttctaagaaattttatttggtaacagtgaagcgaatgtgagcattacccacgtcgactgatttacgattntattgaataaaatngatttaattagattccgcatcttatatagtggtttttttttcatttatat

SEQ ID NO: 57531 - DNA, 453 bp, Glycine max
  unsure (1)..(453): unsure at all n locations
tgcactcagcataatcatgttcaaccacaatgtttcctataaattttgtgggaatgagtaactaanaagtaatgacaaaattgattagtttattaattaatggatgccttcttttatcggttaatgaatatgtacttgttgcatgcattactctaagtaagttggcataggacaaaataaataaaaaagaagcacaatcattactctaagtaataattatgtccacttcaagatggagttggatggaattatggaaaacaaagtaagaaaagatcaagagaaaataaagtgatggatataatattgtaatgaaaagatttaaaagagaaaataatgcanataatatgaaagtgtaaatagaagtatcacgggtctaaggatattaatgcccttctccaccccactaagcatcaacaaaaccactcctttctttatccaagaatgcccatatat

SEQ ID NO: 57532 - DNA, 386 bp, Glycine max
  unsure (1)..(386): unsure at all n locations
tgatcgaatatcttatcttatattctgataatatattctatcacatacatactgattagttaggctaaaaatactgatataatatcttatcatatattctataactcgtaaattaccccacaaaaattatttacttcgaaatcttctagctgaaatttcttggacaaatttccaaattcaattgtaagcattattatcacagtttcagataaaacaaaaataacattacctctctactcttataatccatacnaaaattatcatattaaggctatgcaacttcttctgaattctttttaaccacttgatcaagcataattaaaatatccaatatccaatgtcaatggataaaacatgtagaatggtagtataatctacatgtttta

SEQ ID NO: 57533 - DNA, 446 bp, Glycine max
  unsure (1)..(446): unsure at all n locations
tacctgcggcgtgcaagcctagttggaaatattgtgatatgtgcaatcattatcttcataggcccttgcatgcagctgcacattatcttaatcttcgtctgcattatgaacctactttcagagatgatgacccttaagtgaaagaagggttgcacatgtgtatgacaagattggtcaacgatcgtgcataaaggaaaaanaacaattcgccacttgttgagtatcattttgctagacggcttttctctatggaagaggcaaaggacagtagaaaagtcatgccacctcgagaatggtgggaaatgttcgatgatggaactccacagttgaggagaattactattcgtgtatgagcttgacttgcgctcttctgggtgtgagcgtattggaactcattgaatggaattcattcacctttgacttatttattcgttgaaatttactta

SEQ ID NO: 57534 - DNA, 435 bp, Glycine max
  unsure (1)..(435): unsure at all n locations
agcttgtaagaccacagtattattagtgttgtaggagtggagaacanccaaccccttattgtagccccacaatatgaattattgcatgaataagaatgaagcatataagacaaacacttgataaaagatatcatcatcaaaatactatagaatatgatttatttaagcagtttctgcttgagcaacagtgaaattgtctctcgcatgtcctagttcatgaaagggataaaatatttgataaacattaacttacaagcaatagcaggtcaaagacaaaattgttggtgcatcattcacaacttgtatatttagttatatatctttaattntagtaaatacaccgaagtgaactttacataagttgatcatacatatagacaatntatattctaaataaacagaataatgtataanagaacacattaaatttacata

SEQ ID NO: 57535 - DNA, 429 bp, Glycine max
  unsure (1)..(429): unsure at all n locations
taagctctntcaactgcacaaggctcttaatatttgaagagtattcttgtggaaccttcacccgacgaagacactgacaaaaacttatcttctccttcttggacaaagtatggcaggctgggggcaagtaaatnttcttcccatcagaccttggatgcaactgtgatcatatacccatatcagctagatcttgacgggtattcaagccatccttcgtattgccttgaatgttaaggagcgtcccaatcacactgtcacaaacatttttctccacatgcataacatcaatacaatgtctaacgtcaagatcacaccagtacggaagatcaaacaaaatggacctcttcttccatattcaactctgactnttatccttncttttgggtcttccaaatatagtattcaggtgtngaacccactgatatacct

SEQ ID NO: 57536 - DNA, 348 bp, Glycine max
  unsure (1)..(348): unsure at all n locations
gcatattagtctggagatggaaccctacacactaacatgcttttatttacgaacctttcgctcataaaaaaaggcccgatatcatatgctatgtgctggagtgcctaacaagattgtgtgacagattgtactttggttgtaatagcagatctgtggagtctgataatactcacaagagattgaatccataggattncagatgcagtactcagccttaattctggactaggccgctatatgttgtctcttgagccactataaaattaaattcgtgttaagaatatacaagcacctaaagaggaccttttatcaatcatctattaatgaggcctagttngcatcacataa

SEQ ID NO: 57537 - DNA, 482 bp, Glycine max
  unsure (1)..(482): unsure at all n locations
tcatgaatattcttataatcanagatgatatttagtcttgtcataccatgctatgtctaatgtatataggcctatattggtttattaaacatacacctaagcttgacctattatctattataggctttattctgtgtctagcctaaccctcttaatagtctcatatgacctattagcttacttaaaagctcattctatctattttctcaagttaaactcacaccacatattatttttcagcacataagatactactaatcaacaacatatctgcatatatgatccattgatcacccgtgcaattggataaaataatatatgcatacatgctatgttccttcttacgatatagatgcttcatctattaattaagtctatgtctagatctatcagaataaggatacatcancattcatcccaagatacttaacctaggactatataattaacatgagacattagaatcctcacattacatactt

SEQ ID NO: 57538 - DNA, 341 bp, Glycine max
  unsure (1)..(341): unsure at all n locations
agctnggataatcctcacctttacaattcagtttctggtgttgaattaggtcctaagcctagatgctaacagtaaggatacaaggctagccagacttccaacagaagatgcccatcctgtactactatcaagagcacatttcctctcataatatcaagctgacacatgccgcattgttattcatagtagatattcattctcaggaatctcatgcacattattgcataaaaagttatacactccttgatcagttagataagacatcataagctgctttactgtcaatattaaacgacagagtttctttttattggcttgaattacacatagcataacagctt

SEQ ID NO: 57539 - DNA, 475 bp, Glycine max
  unsure (1)..(475): unsure at all n locations
ntaagtanactcggtagactctctagcttactatcgagtcaatgagtctgtcaagttaaaaaattagaccaaaatgaaagtcattttgggttggtttttatctgtttagtgttcaacataccttcattatgtatatgagtagtggttggccttcccgatttcatttgggaaaggcacacgttgtaattgcatgcatgtaaggagttcaaagtgctcgaaattgtccgcaatcacacagccattcattcaatntgacatgtcatacctttatctttcttataatgtgagtttttggcctaactcaaccccaaaagctagctcaaggggtgagggtttcccctcacttatatatatctaattgtctctatctctagccaatgtgggacttgtgtgtttgccaacacacccnctcacgcccaacacttcttgagcttaatgtgtgaacaacaatagtgggtgaccctttgaatggatc

SEQ ID NO: 57540 - DNA, 358 bp, Glycine max
  unsure (1)..(358): unsure at all n locations
agctntctcaagaagattctttgataagttaaagctttaactactaacacccttttaataactaaactcaccttcttgaaattaattgcggataaaataacacaacaaatataattaaacatcaaacataattattaataatatatagatatatatcatggtgttacacatgaaggcaccactgatgtgaaatcgatacaacgcttccttggtgcttataaattcaaatttcagaaatcatgagattgcacaattgtctctctttgcgaaaccttattcccaaatttttttctgcataactactcattcttatcaaatacgtcccaagagccaaaatcatctttttatcctcttcatt

SEQ ID NO: 57541 - DNA, 385 bp, Glycine max
  unsure (1)..(385): unsure at all n locations
ggatgtctctcttagtgtcgttgccatgagaactcctggattcagtggtgcagacctagcatacctaatgaatcacgccgcgattcttgtctgttgataggggcaaagataaaatcacaatggaagaagttgatgactccgtagatcgcattgtggcacgcatggaaagaaccaagatgatgataaaaataaatcttttatctactgaaaattaactctaaaagactactaaaagctatataagacggaagagaataagatanaactcgagatatttcattcatttgattgatggcaaaagcanaattctggtggcttaacatggttcataccacgtgaagatccatctctcatctctaagaaccaactacttgctagaatagtt

SEQ ID NO: 57542 - DNA, 400 bp, Glycine max
agcttgaacgatccaccatagagtgagtcaattctgttacacatccttcgaaccctactatcaattggtatagtggaagaaactccatattggagaattataattgtgtgctcccattattatctttaattactaagtgtctatctttacttcacgaagcgagaaagaccaagtttctccatcactttttactagtgcggtacaacgagaagtcacatacacaatatattaaatacttggtagggtttggtctaatgaagacactaattgtacatctagagattgtcgagcatcactcattatttcaactcgttcacaaagagcgacatcagtgttataagagctgatgtgtcagtgcttgctgacacaccatatatattaataataatagctcaatttg

SEQ ID NO: 57543 - DNA, 490 bp, Glycine max
  unsure (1)..(490): unsure at all n locations
cgtcggaagttgaatgctaattccgtatgtggctnagtgtgtgtgtatatattacaaaatattgaatggtaatagtacccactctttcagtactggagtatcataaatgaatcccgccagtcggaccaattggtaggaaccaagtcttgaaatgaggaagaaaatatataactttattgaatagtgagaaaagaacagaaaataggagataaaactctcctccaagggttttctcttcacactcttcacacaggatntcttctttcacaaagagctaatgcccgatctacagatgataaagggctcctctctcctatccttcttccccttgttatatctaataaaccgctctaactaactaactaactaatcaatatcctagctgtaggaactaactcttccttnctcatagttctagcagatgccgaggtntctccccttattttcttctggtgtggctntattaatttatcaacaacttgggtcatat

SEQ ID NO: 57544 - DNA, 308 bp, Glycine max
  unsure (1)..(308): unsure at all n locations
agcttgagtgagccaccatagagnngagtcaatttgtaaacacatccttgtaatcctactatcatnttgtatagtggaagaatcttcatattggagaattataattgtgtgctctcattactacctttaattattaagtgtctatcttaaacttcacgaagcaggaaagttcgagttttcccaacaactagtaatatgacaaccaaagtagagtatacaagtgagaggatgggcccaataggaagtgaggtctaaaacaaaagttgaggcctcttagtcaacatgtngaattaaagctcaagttttag

SEQ ID NO: 57545 - DNA, 315 bp, Glycine max
  unsure (1)..(315): unsure at all n locations
ctacaatcctatattgacnaatttcataatcagtgtgctcccattntctactccaattcttgtacattggccaaacctctccttcctggggataaatcatataatgtggcctagntgtaccttgctcatacttgagcaaatgagagaattgngacatatcaagcacaacattaccattgccaggtttaaatgttccacaagcaacaggtagatcttctctccatttgttcttatcttcaccaactagntgttcatgttctaaaatgggtacccaaacttgcctatcagaaaccacactatttactagagcatatt

SEQ ID NO: 57546 - DNA, 292 bp, Glycine max
  unsure (1)..(292): unsure at all n locations
ctcaatcagacatcctatcanaacattattgtcgtttgaattagctcacagcttcaaatacaatttcaaggactcgaatattactgcgctcaatcacacatctgagtaaaaagtattatcggttgatttgctggaagcttcaacattcaatttcgagcgtctcgatgttatacgggacttattcagacatccgagcaataacgtatcgtcgtttgaatgtgcgctaagccttcacattcagtttagagcgtctcgatatattacgggactcaatcagacatcctagtaaaaa

SEQ ID NO: 57547 - DNA, 486 bp, Glycine max
  unsure (1)..(486): unsure at all n locations
gcttctccatgcaatttcctgtatacaaagcgtggatctcatatgtgtaaatacatatgtctgcttacactatgagcatgttcgcataatcggcatataattaatatagaaaaggacgtctcttttaaaataacttcaaaggatgaacctcatctgtgaaaatgattatttaatgtgattttgaaaaaactagtcttgttgggataaagatgagatttgttacaagtcacaacaatatgaattcaacctcatgtcccaatgctcacatgggtaaaacgattcacatgtccattcttgcccatacctcataatcacgggaggcccaagtactgggattgcctttttttgtgttatgcttggatggtgttagatgaacactacttttgaaatatatagtttgacaacaatattaaaactagcattgatatgctatgaatgacaacatatgtgtaatactatgagcaagatatatcanaatctattctt

SEQ ID NO: 57548 - DNA, 514 bp, Glycine max
  unsure (1)..(514): unsure at all n locations
tctgatcgataatgtgaggaactgcttcctgggtgttacactccaactggtggagaagcatgccagaaatacggaagtatttttaggcgtcctcagggtctatatatcagtttgaaggagaagtaagctnttttcatggcactgctctttntgttttttctcttggctntgagaaaatactaagtatttgaattcttcagaggcaagatccttgaagtactgaaaaactggccagaaaagagtattcaagttattggtgtgactgatggtgagcgtatattatgactttggagatcttggtgccaggtaaaatatagtgttagtctcttaaatctgcattacacacaaagacaattagagtaacatatattttctaanattttggtanggtatggngaattcctgtgggaaactttctctctatacggctntaggaggtgtccgnccttcatnctgtagaactactaaatgctggtttctctattcctttttccttccctccctcatagttatc

SEQ ID NO: 57549 - DNA, 203 bp, Glycine max
  unsure (1)..(203): unsure at all n locations
agcttgtcanaagtctataccgctgatttaatgaattatatcctatagatntcctttctcttcttgtttctgaaatctacctcattaaataaacaaagagatcttgtttcatctgttcttgcagctccaccttttctcatatcatttngcattgttttgtttctttggtctcgcttggtatagatatgacggtcgattctttg

SEQ ID NO: 57550 - DNA, 159 bp, Glycine max
ttaactagctgctatacttgttcccctctttaagactgtcttttattccaacttgtacttgccttttaaagtggtgcttcttggagtggaattcgaattgtgaaatttgttaaacctcaactccaattgtgggaatccgtccagctttgatttggagac

SEQ ID NO: 57551 - DNA, 566 bp, Glycine max
  unsure (1)..(566): unsure at all n locations
attgtgccatgagacctgagaactnttgaagnacccgggatgctntanagcctacctgcaggcatgcaacgctctagtngagaattacatttatttctattgtacacattatctccaaaacgattttgagatagagagcgctcctcttgatataaatccatcgagagtctatgttccaacacgaacatatatgtggatatatatatatatatgtatatgtatgaagggagtgactactttataataagagaaagattgagtctaaaatagctcttttacaaaggagtcttttatattataaaacgatgattttgaaacatattagaggattctgtgacaaaataattttgttatatcttgctgagacacaaatatatacaagcagagcacagcaaaagctcctaagataggactatatagagtgtatgtccaattacaactctaagataactgctagactaatcaagtgattacattatcacatacaatataccgatgacattgccacagatatattatctctgtgagcttttatccctgcagtagagcatgtaatacatattgcg

SEQ ID NO: 57552 - DNA, 329 bp, Glycine max
  unsure (1)..(329): unsure at all n locations
agcttgtctcancgtntatgcgagacggagaccaatatgctatctatcatcgccaagtaccaagaagagttaggtctagccgcggcccacgagcatatgattgcggacgaatatgcccaagtatacgcggaataagaggctagaggaagggtgatcgactctttacaccaagaggcaaccatgtggatggatcggnttgctcttaccttgaacgggagtcaagaacttcctcgattgttagccaaggccaaggcgatggcagacacctactccgcccccgaagagattcatgggcttctcggctattgtcagcatatgatagacttaat

SEQ ID NO: 57553 - DNA, 486 bp, Glycine max
  unsure (1)..(486): unsure at all n locations
tcttttggaccttgaacaagcaatcaactcctctntcagaaccatgctatgtgctngcgactggtccctttcttcccttcgcaacttgagttcattattgctaccccatagagctccgcgaaatttgttccggccatactcttccttgcgagccctcttggtctcttgttcaagggctcttgcggtaattgcattctcttcccgtaacccggcgcactccttccgaacgtgtgtagcagccaacttgaacttctccttggcgagttttgcctttcctaactcgcttttgagagcttggacttcctcgtcctcttccggtgcttcaaaattctcttcgctgacgactattaacttggcgagccaatctaaacctcgtatgcgaactatcagccattcgtggacccaccaatgatgccttacgaatgccttagctcttgatcttcttaacgngtttccatgcctatggattcttgatagtctggattt

SEQ ID NO: 57554 - DNA, 481 bp, Glycine max
  unsure (1)..(481): unsure at all n locations
agcttgctaatanaatataatacttatgttgttagagtgaattatctccatgacctgcaagattgactagtcctcctcctagatgaacactttgataaaangaaattataataacatgtcacacatgttttacaattatagaataattaactgctctctctcgcaatttttagcactccaatttgattcgtcaaagtgttgtttctcctggtttacaatgatggtaagcaactacatcttataataattctccaagctaaatcattgtagtgattattaattaaatgtattactacaattacattttcgtgcattatttgtatatggagaggttattactcttattattggcagggagatttaatgaacttgttatgatctctgatgcttatcataattgntgtagagatacaatgtctttgtcctagagacttcagttatattaatgaactcgttctgatctgtgatgtcgtctaattaa

SEQ ID NO: 57555 - DNA, 381 bp, Glycine max
  unsure (1)..(381): unsure at all n locations
cgacaacaagtactatatctatttttgtacaaaagtaactgtttatctttcactaatatatacaactacaactcaaaaggaaaggatggaccttgattaagcctatctaatctacctaattaaactaatcacatagcagagcctaaattcacaacccaattattcaagtgcaaaggttctgactttcatgcccaagcttatttgtgaaaaaattgaagatcactttcttagctttccaaggactgctcacaagatccatttgaagttctttagtgtcctatangccttgcacaaggcagatatgttaggtaagcacaaaaatccanaaataagccacaactatcaattaaactcaaccatnttcctaagacccaaaatgaa

SEQ ID NO: 57556 - DNA, 421 bp, Glycine max
  unsure (1)..(421): unsure at all n locations
agctngagatgaggaagtgttgtatggtggaacttcctgcttttattgttgaccacagagaggtacctggagatatgtcgcggaggtcaagagaccttggcgatgtcatgtggggtgctatataccagaaccaagcttgaccaatcccgacccagcccgggcatagtcagtcagtgagaacctgggatgtacctaaacaggcgagttcctggccgtaacatatttaaggaaccaagaccacaaagcaaggaggcttgtggcggctggccagctgtgaattttgtgtgatatatgggttgtggcctctggtaatcgaataccaagggtgggtaatcgattacaacgcttaaaaatgaagacaggaggctaagatggtctctggtaatccattaccacggtgtgtaatcgattaccacgcttg

SEQ ID NO: 57557 - DNA, 370 bp, Glycine max
  unsure (1)..(370): unsure at all n locations
ttctgttataacgctattgtttttgttcttaatgcacatatctgtgttctgcttctaattacaaattcgntcttgcttcttcttctactttcatttacaggtctgtctcatttacagntctcgttcatttacatttatgtgcatttacagttctgcttcatgtatcatttgcgttgtctgtttgaatctatggaaagctaggttttctggagatgtttccttttgaggacgaaacccaactctctttgaagtttcgttgtgatgtggttttctggcagttttcccttcaccagctatcccatattcgtgaacattaatcaatgcacccttcgtgttcgattaattgcctctgagcctaacttgcgttcat

SEQ ID NO: 57558 - DNA, 252 bp, Glycine max
gatccttaagcactgagctgcactgcagctgcgacacaacaattatctgcttacatgttgacaagcattaccttgcttcttgagcaccaaagatggtgttgtcaaaatttgaaaacatacccagtagtgcttttcctatcatccttatcaccacaccaatctgaatcactataaccaataacttctccttctatattcttctgactgtaaggatataaaatgccaagatccaatgttcctttcacatacctt

SEQ ID NO: 57559 - DNA, 330 bp, Glycine max
  unsure (1)..(330): unsure at all n locations
catgattgatacatgatttgttacttgtangattcaatctgggcaaaattggatgaggggaaagtgtgatttcnaaaatctgcacttatgcagaattttgctgtcaaataggtgccgcagaactttggctttgtgcagaaaatgttatgtatttgttgggtgtggaaagagtagtacagattcggctctggacgttttctagcagatcccaacggtcataatgtagacttatgtactagagacttccagtaaaattttcgagtcgatccaacggttaacgaattggaacgaaggaaatgttactggngtatatgtatgtgaaaagctgtg

SEQ ID NO: 57560 - DNA, 450 bp, Glycine max
  unsure (1)..(450): unsure at all n locations
nganatgacaccaagaangtgtctgtctttaatataactaaataaaccggaacatgtagcgtcccaatccanagaaacatgtacacatacccaaaatgtaattataaaggatgatagtgcaaggtaaagcaacaaaatgctaagcatttaatcagtcccctcccattgtctgatcaatcaatttgcaatgtcctaatattttntaatgagtgttcattatatgaattgcattcagcgtctcattnttttactgattgatactctcacactgtgcatgcaaaacttgagcttctcatagttgacattcccatctatctctctgatagacctctggtgattagacgtatatggngaaagggtagaaaaggaagcagttanggccacggatacagtaagtgcatgnttgattaaccatntaanggactgtanggctttacaacatactttaca

SEQ ID NO: 57561 - DNA, 416 bp, Glycine max
  unsure (1)..(416): unsure at all n locations
agctntganggattggtctttgccagtgaaaggatcgatgtgggtctgaanaaaggcaaatttagtcatcctgcttggacgaatgagaaaactggngcaaatgaagagggtgagaaagaaggagaaacccatgctgtgactgccattcctatacggccaagttntccaccaacccaacaatgtcattactcagccaataacaaacctcctccttacacaccaaccagttatccataaaggtcatccctaaatcaaccacaaagtctgtctaccgcacttccaatgacgaacaccacctttagcaaaaccaaaaacaccaaccaaaaatgaattttgcagcgagaaagcctgtagaattcaccccaattccagtgtcctatgctgacttgctcccatatctactagataattcaatg

SEQ ID NO: 57562 - DNA, 425 bp, Glycine max
  unsure (1)..(425): unsure at all n locations
tcagcagcataatctatcacaacagaacaattatgacctctccagcaacagatacaatcccggatggaggaatcaccctaatctcagattgtctagccctcaacaacaacaatagcagcttgctcctttcttccaaaatgctgctggcccaagcagaccatacgttccttcaccaatccagtaatcgcaacagccccagaaacaacaaacagttgaggctcctncacaaccttcccttgaagaacttgtgaggcaaatgactatgcaaaacatgcagtttcaacaagagaccagagcctncattcagagcttaactaatcaaatgggacaatnggctacacagttaaatcaacaacagtcccagaattctgacagaataccttctcaatctgtccagaatcccanaaatgtgagtgccattacat

SEQ ID NO: 57563 - DNA, 348 bp, Glycine max
  unsure (1)..(348): unsure at all n locations
gcttagatagaaacattgaacacatganaataacctcttatagatnataaaaatatttacatcaagtactcagtagaaattcccaacaaaggattntagccctccattacaagggagcagctttcacaaataggagaagggttttagagaaaataccagattacaaagcagtggagatgtctccttcacctctaagaacctagaaaataactctaaaacctataatctacctaaaagntaggacctttgcttccttgcttagctntntcctctgttctctgcacacaattcacagtcaattcagacatctttcacgtcatcacgctttctctttttttctacacaaat

SEQ ID NO: 57564 - DNA, 449 bp, Glycine max
  unsure (1)..(449): unsure at all n locations
ttctggtgttcctgttgcggagatgatggtacagctggtgaaccagaagcggaagtttcttttggtgaggaagccatggaaaaacagagcgtttggaatgatttcgtaaatctcagaanactattgggaaatgctggtaaaaacacgaatgccaagcagatataaatttgaatgaagaatgtagaggggcgtgtgaagcaaccggtcgaattgctttgtggtgaacgtgctattaatgttaagtgattcgtttgggcacgttcagattgcagtagctgctataattcctctagcagacaaatgcccagcttgccccttcagtnttcaaactgatttgcatccaaagcctttgtganaatatctgctattttgtcctcagtgtcaacatgcttcagtgtgatcactttatcatcaacaagatctctgatatagggatgtctaatggcaat

SEQ ID NO: 57565 - DNA, 448 bp, Glycine max
  unsure (1)..(448): unsure at all n locations
gcttgtanaattcaccccaattccagtgtcctatgctgtcttgctcccatatctacttgataattcaatggtagccataaccctagccaaggttcatcaacctccatttctccgagaatacgactcgaacgcaacgtgtgcttgtcacggagaagccccggggcgttccattgagcatggtaaggctctgaagcgtaaggtgcaaggtctaattgatgcgggctggcttgaaattgaggaagaatgcgtgtaaatcctgacattgacaagagatgccacacatggggcaattntgaaagctgttgtaggtgtccctaatgactcatcanggtntccaagtctatgccattattgtaaaccacagctacaatgttaaatgaaatggataaattgatatctttgtccctcatcctctcacaaacgcatgttngcttattcaactttcatc

SEQ ID NO: 57566 - DNA, 368 bp, Glycine max
  unsure (1)..(368): unsure at all n locations
agctnggaaggtagtcatacctcacaaagtatatatatgtatgattgggtagtgaatatacctaagatatgcatgtatgtaaacaaaaatacttcacaaaatatatatatatatgtatgtttagatatgcatgcatgtaggaaaaatacttcacaaaatatatatatgtatgtttaggtagcaagatacctcggatatgcatgtatatagcaaaaatatctcacanaacatatatatgtatgtttaggtagcaagatacattggacacgcatgtatatagcaaaataactcacaaaaatatacgtatgtttaggtagcaaattacctcatgaaaaaaaagagcaaaaagagagtgagcaagaaaggaa

SEQ ID NO: 57567 - DNA, 582 bp, Glycine max
  unsure (1)..(582): unsure at all n locations
aggggnaaacgtganaccatctcgtacccgcgatccttatagtcacctgctgcgtgcaagcttcttagcaagcttccatcaacttcttaacattgtactatttattcattgtgtgaaatatgagtcgatacatgaagatttatgagtgtgtttgtttcacagaataccaatgtatttctgaaaatataagataagaatgtatcattcctatgtttggcggttttggttaagttattaaaaatgatttagagacacattttttctcccagggcatgtgcctgtttgttttattgcnccaatagacttcttggacacaatgatgtttattaaaacattcacattttttcttttgtaaaagtaagttgtgaacctctaatttatcttggaatttatcgccaccttatgaacgaanattccaacatagtctatattatacacatgattnggtctctttttattttctcagagaaagatgagaataataaaanaacttttcatctccaattatcttatattattctttatttttattgaaataaatatttaaatatttcangagatattangattgtagaaaaattg

SEQ ID NO: 57568 - DNA, 409 bp, Glycine max
  unsure (1)..(409): unsure at all n locations
agcttcaaaaaatggcctcatcaacttcttattccctgaatgaaattcaataaatacgcctcctatatttaatggagagggttaccactactggaaaacccgaatgcaaattttcactgaggcaatagacttaaacatttgggaagccatagaagttggaccttatatacccaccatggtggctggaaatacaataatagagaaacctatagaagagtggtctgaagatgatagaagattagtgcagtacaatttaaaggctaanaacatcattacttatgccctangaatggatgaatattttacggtttcaaattgtaagagtgctaaggatatgtgggactgatgtgtcattattttctcctattatcttaacccttttgtcaccaatttaattactgattaactc

SEQ ID NO: 57569 - DNA, 184 bp, Glycine max
aagacagagtgttggcactatactctatatataaaaactatttgaaaaggacgaaactcgtagacaggccaatcatctatccatatatggtgaatcgagcatgaggctacgattacgcacgtgaatctcataatgctaccgtcactggatacattcaaacccctattgggatgatctccaacta

SEQ ID NO: 57570 - DNA, 460 bp, Glycine max
  unsure (1)..(460): unsure at all n locations
agcttcttctagactcatcttctccttgaagtggcatcttctctctctcttccttctccattctgctgccattcatcttccaagaagcaaaggaatccattgatgaagaagatcctatgcctacaagctccagtggagcttacgtcttgtggtatcagagcatcttcatctaggtgatattcttttgcttcctctatctttntgtttggtgaattctctttaattccttgttcttcatcttattctccatgtatatcctccactgtcttgtggtttggtgctgtttagagtagattcaaaaaaaagataaaccgattaaatcttagatctacacttgttcttgcatttctatggttcanattntgtagatctactcttgaatcatcgttttgtgttgattntaggttctatcattnntcattcataatattcttgggctgaaccttggatctaaattttc

SEQ ID NO: 57571 - DNA, 426 bp, Glycine max
agcttcttacttatacagaatgaagctctgatcactgtaacaagttcctcatatatcttaagaggggggggggggtggtttctttgggagaaccatgaaaaactacgttggaatgagttctaatctagaaactctggaaatctggtaaaactctatgcccacaaataaatttatgaaaatgtcacggcgtggaacacggtcgaattgtttgggtgacggctataatgtaaatgatcgttggcacgttaattgcgtactgctatattcttacaacaatgccacttccctagtttcaactgttgcatcaaccttgtaaatatcgctttgtcctatgcacatgctcagggaccttatattaagactctgatacgtgcaatgacaggctgttcgtggtaacagtttaaaattatacctatgtgccatcat

SEQ ID NO: 57572 - DNA, 475 bp, Glycine max
  unsure (1)..(475): unsure at all n locations
acttgtganattatgtctagtcaccaaacaaatattctacttgttacgaagntntatatatatatatatatatatatatatatatatatatatatatatatattacatttacaaaaataagttgcactctcacaaattacttggtcattacttaatattagagattgcttctctgtcatatgatgcatgtatgtatgttaataaaatgatagtttatcaagaccaaaatctgtaatttcagctgtatttaaagaaatacatagtttatcaaaatgatagttaaagggtaaaatgaaggctatacataaaattaaacttagaagggaacaaaaaacaaattaacttatttatttatntatatgaatcacattcaggaacagaatatttatataactcattacacaactcnctaactaagctttagtaggagattagttatgaaaaaaacctttaagaatcagattaagaatcagag

SEQ ID NO: 57573 - DNA, 408 bp, Glycine max
  unsure (1)..(408): unsure at all n locations
agcttcttatccaaggctcatctcggtggtgaagctccttcttccatggcttattccatagtggatggcgcctcctctcacctcttctcctttgtcttccactgcatctccatggtggaaaatcaccattaaaggacctcattgaagctcanagatccagcctccatagaagccccacaagcaagcttccatcatattcctccacccgggattgtatctattgctggagaggtcataattgttctggtggtggaatttgctgctgagtttgaggaggtctattgtagatgtttgcagcataagcttcaggctgttcaattgttccatatagttgcacagaagggcaaaggtctgtatggtggtcggcagaggagcataaaccacagaatcttgcgatatgtacatatt

SEQ ID NO: 57574 - DNA, 376 bp, Glycine max
agcttataaatatgggagcaatctttctgatgagttaatatatgaaatcagatttatcctttcataaagaacaactcgagtgataagctaagcttccataacatacttaatggataaatcacagaactttgacgagaattaagtgtttattttcaaatgtatttcaaagcattttaatactctacctttcacatatttttatatgtgtggaatctttcctcaatttaaggataagcacgtatatttgatgacatcagttctgatgtgtaatagcactgcagattaagacattaacgtattggcttgtattttagatgtcattagattatgtctttgagagaattctagccgctccatggtataataatacatgtca

SEQ ID NO: 57575 - DNA, 68 bp, Glycine max
ttttttttttgacacttaaaccctgaacctaaaatggatcaaacgatttattttattttaatcaaaaa

SEQ ID NO: 57576 - DNA, 371 bp, Glycine max
tgatgcagctgagtttgtatcttcctcatgcactcctctaatgaatataacatcatttctggcgctaaactgctgggagttggaagccatcttctcaattaaatgtctagcttcaataagagtcatgtcttccagggctccaccactggcagcatctatcatacttctctccatattactgagtccttcatcaaaatattggagaagaagctgctctgaaatctgatggtgagggcaactagcacatagttttttaaatctctcccagtattcatacaggctctctccactgagttttctaatacctaagctatccttcctgatggctgtggtcttggaagcaaggaaaatgctttctaagaatactctct

SEQ ID NO: 57577 - DNA, 402 bp, Glycine max
  unsure (1)..(402): unsure at all n locations
aaatgccatttcttcttctttctttcttccanatccatttctgaagttacaagtactttctccatcacccacatccaccattagccaccacaaaccatcattgttctccattgaaaacccacaccgagaggaacccttcaaccgaagcagaaattccaacttggcttgcgatttctgaagagaacgaataccctaatctgatctttcgtttctttcgaggaaccatggttctatgcttggttcttggtagtttcatcttgtctttgcatcttttctaactttgcaaccgtcattgcatgtcttatgcttcctttgaaataccttagagaaagagactntgtaagcgctatcctntcatganatggcatgtatnnttcgaacctacactgaaccccgatcaca

SEQ ID NO: 57578 - DNA, 350 bp, Glycine max
  unsure (1)..(350): unsure at all n locations
tctagtctttgtggtcacaaaatcctatatatagtgnaccaaattggaatcattgtacatgcactcatgtttgtggtctcatcaccctcatcacatacacacacatcacacacacaccaaccctaatctgacacacacacacacacaaaccctaatcacacacacacacactctaatcacacacacacaaattctaatctgacacacacacaccctaatnacacacacacacacactctcatcaccctaagtacacacacacacacacatctgctatgggtnttgctttgatgcataatgcagtccttataaagaaaagtggaagtctaagaagttggcaccatgttgta

SEQ ID NO: 57579 - DNA, 476 bp, Glycine max
  unsure (1)..(476): unsure at all n locations
agcttcatctgatgtgttagtggngtaatttctaattgcatattaatcattatagaataaaatatggtgtatgctnttgcgggacaattntagatntattatcttctttttctaagtagatgtgattaactacactaaacattggcattggtgacaaataaattgttcaaccttcgtacctgtttctcgcggacaatgattttagccatggagatgaagttacattttactggaggtattattattattattattattattattattattattattattattattattattattattattattattattattattattattantttagttgtttcatggttttccttcattactgatatttgctgttttttttccttttctgatctcccactcgcaaggtaatccacgaaaaaacatccagctcgccagtttctttctttggtgcttgnnttatgcatgtttattattattattat

SEQ ID NO: 57580 - DNA, 386 bp, Glycine max
  unsure (1)..(386): unsure at all n locations
aacttaataattaatatatatattgtattttatatgtttctttatgggtaaatgctcttagagttatgttttattattgatcatgaatcttacgattcaattcgtgattcggaaaatgggttntataactcacaattngtatccagattcaactaccttggatgattaactggttccaatccccacctcacctaactcctgatagtaactatgcaattgacctagctcatattagtatggtgggtagtggcaatatttaactgagcttattggtgtccaaagggaaactataaaacaatataatctattggttacattaagtcacatcactgttcgttgaatatctaatttttggtcagtacagagtaaaagcaataaagaacttt

SEQ ID NO: 57581 - DNA, 448 bp, Glycine max
  unsure (1)..(448): unsure at all n locations
agctntctccccaattntctataaatagggggagaagtgtagtaganaagggtccatcctcttaggcacttctctctctcgaaatagctgaggaaaattagttccgtgaagaanatccaagccgaggcacttccgtaacgtttccgtaatgtttccgtgagtaattacgcgaaggttctcgaccgttcttcaagattcatcgttcgttcttcgttttcttcagtcttcaatgggtaagtacctcaaaccaagcttttcaattcattctatgtacccgtggtgggccacattttgtttcatgtatttttaattctcgtttcatttaacttttatacccctttttgacgtgcttaagccatttatttaagtcatttctcgcttaatctaaaaataaaaataaatttccaccgatcgtttgaattgtatcatccgttaatttcgggtaaaa

SEQ ID NO: 57582 - DNA, 347 bp, Glycine max
  unsure (1)..(347): unsure at all n locations
ctaagctgtcggttagcttaattaagcgctnggggcatcccatggactgagctaaaatgctcatgtcatcaaatacctacgcatttttaaagcacaaagcgaggatcggaacctcaaccctacattcttttaatagactgcgatgagaaaattacagaggacaggaatcccttggggaaaccaagaagaacacacaaaaataaaaacaagtagcgacttcctcaattgccccagatcttaagcgtagtatcgcttgacaacgtcggagttcacgggtgaaggtagctcctcgtcatccaagttggcgagcaccagggcccctccggagaaagccctttgtacaatga

SEQ ID NO: 57583 - DNA, 452 bp, Glycine max
  unsure (1)..(452): unsure at all n locations
agcttatagagggaagctcaatggagganaagaatgagatgtggggcggcacgatattgaaggagaaaaagagggagagaangtgaactttgaagtgtgtctcacaagtttcacattcatgaaagttatgacaagtgttacacatgcttctatntatagcctaggtcactaactaaatgaaagcttttttgagaagcttccttgagaagctagaacttagctataaacacccttctaatagctaagctcacttctttgagatgcttccttgagaagctagagcttagctacacaccaccctctaattgcttagctcacctccttgagaagagaagctagagcttagctacatacactcctctaatagctaagttcacccccatgacatattacatggaaatacaananagtccctactacanagactactcaaaatggccctaaatacaagg

SEQ ID NO: 57584 - DNA, 254 bp, Glycine max
  unsure (1)..(254): unsure at all n locations
tggcagacacctactctgcccncgaagagatcatgggcttctcggctattgtcagcatatgatagacttaatggcccacataattagaaatcgtaagaaacttgtatggctctcagaccttgctagatatgatntcttttttttgaaaaaaatgaagtggtcccatgtntctactccanaaagcttgtgcanatcanatcactcctacatctcatctctagcatgcattntctntctttacccactccctcacg

SEQ ID NO: 57585 - DNA, 501 bp, Glycine max
  unsure (1)..(501): unsure at all n locations
agctntgtgtggagcttcaatggagaatgagggagaagtttgcatcgtgagggagatggagagagaatgcttctgctatgttttctgctgagagaagagagagagagcttgcttttggtttttaaaagggcttctcctcttttcttattattttattcaagctctgccacacgttcctatttgattggagcaaaagggcccactttctcttttngactgtgacccatactcagtcacaaaagtgagaaaaatctgacctttgaacgctaaaatctgcctcggttttcgtgccatttctctggttcagttttcgcgttttctgcgncgtcgggccagttttcgaagcaagcatatgtatataaaacgctcataataaaccccgagcgtggtcagagggtggtttcgtaaattctaagcgcaccgcaaacgatgattttaactaattaattaggaataacccataaccttccagtttggattctctccttaattacctacccg

SEQ ID NO: 57586 - DNA, 300 bp, Glycine max
  unsure (1)..(300): unsure at all n locations
caagtaaaatgttgttctactactaaccccttgaactaattcatatggatttatttggaccatcaagaactatgagtntaggtggcaactactatggcttaataattggtgatgattattctaggttcacttagactttcgtnttgagaaccaaaaataatgcttttgatgcttttcgcaaacttgccaatgttattcaaaatgagaaaggtcttaatattatttcaattagaagtgatcatggaggtgaagtttaaaatgatcattntgaaaagctgtgaagaanatgtaattcaacac

SEQ ID NO: 57587 - DNA, 131 bp, Glycine max
  unsure (1)..(131): unsure at all n locations
agcttctttgttagacctctatctgtcatctntccacttctatgtcgaccgtcatttttttcgatccatattcggagaataatattttcttgccgagatgggctaatgttttcctggccgaataaatggga

SEQ ID NO: 57588 - DNA, 296 bp, Glycine max
agcttctctttagacctcgatcggtcaactatccaggccgacgttttctttttattttttcgatcaatatctgatatgaaccctcatggcacaagggctgacttatgatcgtctaagattaaaccttgattggaaaatgcggaaattgattaaagaaaggatggaaaataaggcggataatttcgtgggtcttaataacggaggttctggcatacaatggatgaatgggatggtgcaacgtacgctaagtggtggctggacagaaatatagaaatggccataacggaagctacagg

SEQ ID NO: 57589 - DNA, 234 bp, Glycine max
ctggagtgataacatgacttatcggatggaagccatctgatctattaaggccgatatatcggccttcatctgttcctgcgcgccctcttcattatacatttctctggatcgagtgttataagggcgccgtggcgttatcttatttatgatgaaattcctaaagaaataaacaactgtgagtatgccaccaagacatgagtatgcaaatggatgatcggatcacttggatccacc

SEQ ID NO: 57590 - DNA, 357 bp, Glycine max
  unsure (1)..(357): unsure at all n locations
cttcaatgcaagaaaacatacttatgactatgtaacccaaatttggctttagaattagaaaagcatgaagatagggatctgcttgtaagaatttgtgccgccccatgattggtactttgcacctacataatgtgggaaatgcttttcgatggtctgtagatatatgtgtaaatataaggggcatagaattcctcgccaagcatgaataattgttttcttaaatgaatgtatgatagcgtggaatgcctttatgaatgcaaatatgtgcaggatgtaattagctntccaatatgcatataaataaatatgagtgaaacagtgaaacattgtatggggtacttcatatgtatgtaagta

SEQ ID NO: 57591 - DNA, 431 bp, Glycine max
  unsure (1)..(431): unsure at all n locations
agccttcaagaattaagatcattattcattctagaatcatgagaagacttactctagatcagtattaacaagcttttttcaaaaactgagtagcacatgaatctttctcaaaacctcttaccaaagaagttttactctctggtaatcgattaccacattattgtaatcgactaccagtaccaaaataattttcacatatctttcaactgaatttacaatgttccaattgatttcaacatgttctaatctgatacaatgttttggtaatcgattaccagtgtgtttgaacgtcgaaattcaaattcaaatgtgaagagtcacatcctcttccaaaagagctgtgtgtaatcgattacactaatnttgtaatcgattaccagtgatagtttctgaacatattaagagatgtaactcttcaaatacgttttaac

SEQ ID NO: 57592 - DNA, 318 bp, Glycine max
  unsure (1)..(318): unsure at all n locations
gtgattggnttaaagatacaatcctttgctatgagaatgcttcagaaacattaataaagctatcacatgggcctaaaagaaatgttataacctggcaaggatacgacataaacaggtattcattttacacacaagcacaagatgacaaaagtacaatgcataacaacggggtcaccctaaaggctgaatctcaacactatgctagtgtcaatgacgccaatccctactgtgtagcttacatcccttactttgngttcattgaagaaaattgggagcttaattatgtgaaatttacagtatgtgttntcaaatgtaaat

SEQ ID NO: 57593 - DNA, 136 bp, Glycine max
tatatcctaatgtctcatcctatcagagggttgttgtcccgtgtcacttaacatgaggatcttcatagtcatacacctattcatctgctcccccgaacataaatgtcaatataatcacaggatccaaacacaatca

SEQ ID NO: 57594 - DNA, 228 bp, Glycine max
  unsure (1)..(228): unsure at all n locations
ctcagcttaaatntgattaaacgtcagcactgtggaatctttccttatggtatcataccaggacttgactccttttagtatgaattttgcctggaacatctcttgacatccaagaatctgaaaatttagtaatgtgccaccttgtatcatggatcctcataaatcctttaaactttaaccgctgacatcatctaaattaaatgttgtttgataacttggacgctggat

SEQ ID NO: 57595 - DNA, 439 bp, Glycine max
  unsure (1)..(439): unsure at all n locations
aaagcccagtcaccttcctcagaaaccacatcttaatttcaagtccaatttagagaaaattgtagctcctccaatttcatccgacaactctacaatcaccagaattggaaaattgctaggaagggtaatattggttaaagtactatagtcaaaacagaatctccaccctcgtccctcttcaccaaaacaataggaatgacaaagggacttacacgtggtctaatgatgcctgtcatcaacatctcattgactacttttcaatctctgccttttggtaatggggatatttacatggccttatatttggaatttgagcatctgctttcagcactattgcatgatattgtctcctatgtgaaggcagactntgagggccctanaagatgtcttgatatttatctaaatcaccctatatgaatgtngcaacttcaatctctat

SEQ ID NO: 57596 - DNA, 491 bp, Glycine max
  unsure (1)..(491): unsure at all n locations
agcttgagcagaacttanaaactntgaataggaagctcattctgtggttcacacatatcatcctctnaaactaataccaacacaccaccactccacttccacttncacttcgtaccccattgcccagaggctcttcactatgtgaaggtatggngaagggatattgtacgcagccttactcttgcatatgcaaagaggctgtttccggattcgaacccatgaccaacaagtcaccaaggcacaactttaccgctgcaccagggctcgccctcaccaatacaccaccactgaacaaaaaanaatgcaacataatccaccactttactttcatcaattgtgagagaatgtgtcgccaatcttccaaaaccacttaaagtanagcatcagatgatcaactactatcatnttcatcaattataaaagaantttatcatacagagtgtgaagggcaaccaatatcacagagtgtgatggtgtcatatatgatatgt

SEQ ID NO: 57597 - DNA, 496 bp, Glycine max
  unsure (1)..(496): unsure at all n locations
aagaagaatggcagtagtacccactctttcagtaataagtagttctgtatgatacccactanggtcgacctagtggtggnggttttgaacaaaatgcatgagaatatagattctaatctcagtgcaaccatcatacaccaataaaaataanaagtagcgaggggactacaaattttccaaagagaaaggggagcatcacacacctagcagctaggagtttcccagaatatatagctaactacatcattcatacagggcccatcanacatggngaccanataaaccatattagggcccangttgaataaccagacccacataaacatagagaccttgaaaagtcaaaatgattataatttaagaaataacacacacaanaatgacacccatacagatgccttccttgaaataagttattaactgaattaacactaatctacctgagttctaattgtgatctgtangcttatgtcatctggattacagagtcaacata

SEQ ID NO: 57598 - DNA, 216 bp, Glycine max
tctgaagaactcgctaagctcgctgactgtgctattcgagttcatcctttgaggattatcattcattctcttgctgaactacctgtggctaagcgaggctgaatcgctaagcccgggtaacttaaccatttttgtttgtgatagccacacgctaagttgagcattctggagccaagcgcaattggttgcggcatccgctgagctaagcgagcttca

SEQ ID NO: 57599 - DNA, 329 bp, Glycine max
ctgcacattagtttcaccagctgaccaaattgacttcttaaaatttctcatgaaagtgacgtgggtttcttatgttccatgctattacccagaagttcaagcacccacagtgtgagagacacatgaataatccccaaaattatgttgatgctgaagaaaacttggacacgatacactatcactgtatatttgacttacaaatccacattcttccattgataacattgttctgaaaaaagggagggggttgctgattaacttatgattaatgactggggtacttgccacataaaaattaagagatcaatccaaattccttaataactctt

SEQ ID NO: 57600 - DNA, 440 bp, Glycine max
  unsure (1)..(440): unsure at all n locations
tattantgagtacgattaaccaatttcctttattattatcatccaagtgccaatattgacagcaggctgatgccaatgtactttgtatctagattgaagtttcagtgtcttggaattctagcaatggcgtatgaaaagacccaagagctagcaagagatctacaagctgtaagatgcggtgacttggatgttgatggtgtaatgtaagtggtagtctaagtgttctagtcttgcttcatggcaactttcaagcacgatatctgactctattaatattatgtaccttacccatcttataaatatgtggcaatagaatatatgcttcattcttgattatgtatttattccctctaatgataacaaccagttttaaataaggtcattgtcttatagcacatggcttgtgtggataaaatttcaaatgttttagtgactataaa

SEQ ID NO: 57601 - DNA, 482 bp, Glycine max
  unsure (1)..(482): unsure at all n locations
caaccacaacctcacagtcattgttttactcaagctcaagtgtttaagctcattccatcataaacaactaacacaagtcccaacctttgcatttcatctcatgtcatacagcaatgaacacacaaaatgaatccgaaggactttctagtcttgtaatgaggttaggcttccaacaaattatgtgttttctaggattcaaaagcttatgttctacgagagcattcatccatagataaaccttcacttttcattcattcacaccccaatactttccttgtacttangcactcaactctatttcattattttgcagcatacacacttattattttcatttgtatttacagtttcttttaacacaatatatacaaagacattatgtgtatatacaanaatagtgtgtgtatgctctatagtttgaccatctcaattcttacccaatgcctccccgaaattggaaacaaattaccttgatatttact

SEQ ID NO: 57602 - DNA, 415 bp, Glycine max
tacttacccgctgaagatcgaagaactatgataaacgaatgattaacgtctaagaacggttgatacctttacgaaattcctcacggaaaacgttacggaaaacgtttctgaagcgcctctgcttagatattcttcacggaaacaatgtttccaagccaattcgaaagagagagaagtgcctaatgggctgaaccccttctcttttgccatcctcctctatatataacacaataggggagggggttgccgcccagctcgcccaggcgagctcatctcgcccaggcgagcatggttgcttcctccagaagcaaccgtcttctggatgaatattccggatggcccaagtgggcctgggtgctatatgcacctccattcttactcagtacacccccctctgctgtgttctggtgattct

SEQ ID NO: 57603 - DNA, 509 bp, Glycine max
  unsure (1)..(509): unsure at all n locations
tctaaggaagtttctcaaggaagctacctaggctattaatagaagtatgtgtaacacttatggtaactctgatcattcgagaattatacttcanagttcanacctcatttgaggcacaaaattttgtgttccttctctccctgtccctccattaatcttcttctaccttcaagctcttatccatggcttcctatggtggtgagcttcttcttgactcatcttctccttgaagtggcatctccaataatctttctttcttctctattccactgccatgatcttcaagaagcanaggaatccattggtgaagaaaatccannncctacaagctccaatggagctacatcatgtggtatcaagagcatctntgtctangtgatgttcttttgcttcctctatctttnntgtcanncaactcactntaatcccttgtcttcatctattctccatgttatactccattgcttgngggtgggctgttagatanaatcaaaataaccgataaatct

SEQ ID NO: 57604 - DNA, 295 bp, Glycine max
atcacatgtggtactatgtggcaggcgggcgatggtgcacaacaagattttcacattcaccaatcgcgcataaacccaccatgctctgttggccacctactactgagctcacgttcttccacgtagcccatatactcgtttctctcaacaccgggtccccatcaatgctctcaaggcttcccaacatgcaaagtgatcaacattcaaacagcacaaactatcacagccaaaaaaacagggcaaaggcagaaactctgccaaaacaccaaccaaaatcacagtttcttctcacttt

SEQ ID NO: 57605 - DNA, 438 bp, Glycine max
  unsure (1)..(438): unsure at all n locations
cctattgaatctatctttctacattganataaagatataacaatgganattgtaacatctcattntcttaacactaattntaagaaaatgttatttataaataaatagagttttagaaaaatgatgagaatttcgtaattaaatgaataagaagaaataattntattaaaataatggtttgagagaaaataaaaaggatacatttgataggaaataaaatagagtgtttgtttataaagtaataaaaaaatagagtaaacaatagactaagagtatctaactataaatagagacatgctangtcattcttaactntctctccctctcattatggtntcctttctcctcctctaagaccctttctcttcccgcataccaccaatcttatcccagaagaatgatgatctcgaactcattcatncgtggatcgtcataata

SEQ ID NO: 57606 - DNA, 107 bp, Glycine max
agtgtagtgtggtcgatactcttaactgccatccaagagcctatttctaaagtttagaactttgtggatcaatccctgcagtattatttcatcatagttttgatact

SEQ ID NO: 57607 - DNA, 286 bp, Glycine max
ccgtataccaatctctgattgttgtagaagttcgattagcttacacattccactctataaagagcactggccagttgaaataccaaataccaacaaacatttcaaccattcattgcctgccatgatgacatgaagcactctgaccaaaaatattcagcacatcagacaagaataaagcacagatgcactctgacaaaggaattgaaacatacactctgtcttctaagcctttcattctcttcttctaattgagaaactttaatctccagctcttgtgtgtaagcct

SEQ ID NO: 57608 - DNA, 479 bp, Glycine max
  unsure (1)..(479): unsure at all n locations
tcttcttaattgccacattaattngtaatgtaatatttacattntaattattgtttctcacaggtggngaaatgaagatgcgttatgtataanatgtatggacttaacttggatcttacaagtgaataatactatgcaagaatttaatgacacagaaggtgaatctttgatatgtataaaatagatcgtttgtgtagaatcttcccttttaataaatgtatgtccaaagcatctatgtaaagatgacagaagagatatccactctgcactctccctcctttctgctgtgtcattcataanagttcttactatntactaaactacttgtcaaaatattaaagttaagaggatatttgaaactcacaagcaagtcttattatgtctctactgacgtgagtgngtggttcttgagaaggatagtangcatatgagtattgaacaacgtcaacgtgtatcattattaaatntgagcataagta

SEQ ID NO: 57609 - DNA, 440 bp, Glycine max
  unsure (1)..(440): unsure at all n locations
agaagctactaggccaactcaccaaagcgagtatgcactcgccttggtgagttggttgcttaatgctaaaggtactcactcgcctaggtgagctgtaactagccctggtgagttggttgcttaggcctgaagaaacttgattagcccatgcgagctggttgctaggctgggtgaatggttgtctgacatcttggaanaatgatcattntgcccatccttttaactttgattttggatccaacaaacaaccatcataacctacaagatcatggatgagtcttccatatttaaacaaagatattattaagtgtacaatatatatatatatatatatatatatatataacacctagatttagtgggaagttataananaactattcaatcgaaggtgagtgctacatttaatccanaataaccgaatatgcactatcatatgg

SEQ ID NO: 57610 - DNA, 303 bp, Glycine max
  unsure (1)..(303): unsure at all n locations
agcttgttgngtggcaaaatataccaataaaatcaatatattatagttttaaatggtcatagacagtgccaaatcatgtaaatagttgaatgggaaaaaaaaaaggtaactgtctgctttgatggtggttgaatttggttaggcagctggtgacgtttctcacatttattgcataacttccttagttgtattatacatgaaagctaacgctnttcatgggctggtgtctattagcacantttagtcaggctctcacagaanactaatagtcaaggtacaagtgatgtgatgtacacctcattg

SEQ ID NO: 57611 - DNA, 112 bp, Glycine max
gttctcagaatggttaaaattataatgctctatatcaggatgctcaaaatcaccaatgagagaatgctcacgatgcctcaaagggaccagaagatgccttacttatctatga

SEQ ID NO: 57612 - DNA, 340 bp, Glycine max
  unsure (1)..(340): unsure at all n locations
ccttcacctctagaacctcacaatcactcacagacttcatctatgctctcaggataggttcctcttcaagctcagttccctgccagtcttcgcacaacaaaagctctgaaaactctctggaacttggacttttctctctctagaaatctcttaacatacaaaagcttcgagatatgcccaaactccnctttcatttctgatttcatgcttaaataagtggccttgtagtccttgacgctttgacaactccagctcgcaagcatgcgtaatgaatatcggctattgcccgacttctcgcttacgatgcatgcagtgggcacttacaagatagctctcctta

SEQ ID NO: 57613 - DNA, 154 bp, Glycine max
  unsure (1)..(154): unsure at all n locations
acttcaagaattatgccttcttgatcacaaaattcttgaaattatgtagaaacatattcaccaccaccatctgttctcaatatctngatcaatgagccactctgcttttctgccatatatttgaacttctcaaagacttcaaagacatcactct

SEQ ID NO: 57614 - DNA, 360 bp, Glycine max
acacagtgcatatctcagttgagacatttgctggaatataaccaaaacccagaatattattaatacagacaatttaatgctaatacctaaatttaaccaattttcttaataagcataaagcaaccaacaatgtcttatgaataaggatgaagagagtattgtttaaaataaagtcacatcacaaagttactaataagatacactaacaacattaaatgcacatgcaaataggctaacatatgccagtgacactgacaccactcattaaaaaaactatttagcgagagtttacataattccaaatgcatataaacagagacatataccttatcagcaaacatctctgtgtgagaagttatc

SEQ ID NO: 57615 - DNA, 515 bp, Glycine max
  unsure (1)..(515): unsure at all n locations
tctagtatatataggcctcatattctagtgtctattgtctcacaacgtgtataattcttcacttgttcttagtcctatgaatgtggtcgttggagcatntattgcttgcattanatgaacctnctttcttcatgttgagagtccactctttgttgttggcatgttgaacactacaacaggaaattacttcattttttgtcatagcacagttttgcaacaaagctctttttttatggcaattgaggaatttcatanttgacttcatttattctccataagattcgatatcctaggagaatgtttctgccaaataaatctcagacacataatattaaataaagtcttanatatcatctntaatgtntgatcatatcatacttatatatgactatcgtttgacacatcattataattataaatataaattaatataacacactatatactataatatataattataanaaactatattctattacatagtaagtattttatatannataatacatata

SEQ ID NO: 57616 - DNA, 292 bp, Glycine max
tctgaattggtccagagcttccttgttaagtttcgagcgtctcgatatattatgtgtctgaatccgacatccgagtgaaaagttatgacaattttaatttctcgagaacttccattattcaatttcgagcgtctctatatatcatgggcctcaatcatacactcatgtcaaaagttatggccgtttgaattgaccagagctttcttgtttaattcgagcgtctcgaatattatgtgcctgaatctgacattcgaggaaaagttatgaccatttgaattctctagattccatt

SEQ ID NO: 57617 - DNA, 639 bp, Glycine max
  unsure (1)..(639): unsure at all n locations
tttgtctccgttttttntcatatttaatatttttcntnttttntnnttannnataagtnnnnnnnatatagacctctggagcttgagctcttagtcancgcangcttcannncttttccattatacaataactccanaccattcatatcactcatactccaataacctacagtaagcacatctaaatcatggatattgatatggaagatgagagggtgacatgataagtttcttaccactaaactagccctccaactcaaaataagttttgcttcatatgtccctttgagcaaaatgaattcaatggtctcaagctcctctcgtgaaaggctgtcattgtgaggaagaatatcgccacatgagagggttcaccatcctcttaattatgtcagattacttcaaatcactctattcggacattatgaagaatatagtggtccctgaaatatatatctaaatttaaaactccagaatctagtttgactgctaaaaacaccacacaatatgatacgggttaccatgccacactaatatattagtgttgtcttgatggacggaactagtatattcactcagagactaatatatgtatattctatttgtgagacttacaatgatagactcctatatacattcgcn

SEQ ID NO: 57618 - DNA, 573 bp, Glycine max
  unsure (1)..(573): unsure at all n locations
atgtaccatccgacnctgganctcttagtcacctgctggccgcanagctataanaacacaattgcctttatcattctaaatattcgtgtggatatagacatatcaacaagaatcaagcccatgctatagtgcaagcactcnatggggaaaaacacaccaactgatgattatgatggatggctgaaattctcacagaggtagaatcatcactttcaaaccgagctttcataactatcatgacgtgtagagaagactcaacgatttcaagtcaccaactgtctataacttctattttcaaacaattacacatttctttgacatatcctataattcagagaataacatgcacagtcgtatgtgcacactaaattgacctaagatattaaactgtaaatccgacgatactaacaacattaacgatataacacagcttacaactttatcataacaaaccgagcttgcctaaccaaagaacacttccgcctcatacttagacaacagagttgccctcagcgtggcacaattaccatgataacatacactaaatcattaaagagaatcggcaagtgtacg

SEQ ID NO: 57619 - DNA, 323 bp, Glycine max
  unsure (1)..(323): unsure at all n locations
gcttcttagtttcagatgatgcagatgggcttgtagctacctcatgcactcctctaatgactatggcgtcatttcttgcgctaaactgttgggagttggaagccatcttctcaattaaatttttggcttcagcaggagtcatgtctccaagggctccaccactggcaacatctatcatacttctctccatatttctgagtccttcataanaatattggagatgaagctgctccgaaatctgatggtgagggcaactggcacatagtttcttaaatcgctcccagtactcatacaggctctctccactaaagtgctaatacctg

SEQ ID NO: 57620 - DNA, 460 bp, Glycine max
  unsure (1)..(460): unsure at all n locations
tcttgaaccctactatcactntgtataggggaagaatctccatattggagaattataatcgtatgttctcattactacctttaattattaagtgcctatcttaacttcacgaagcggaaaagtccgagttttcccaacaaaaataattgataaatacctttctcccaaatactgactctaaaactagagttaaaccaaacaatgcctcanacttaatgatcttaacaatgtaacacacgggtactcgtaagccctctagctagtctcttagtctccattagagacctattatttctgatacaccaaatagttttgcgatagagtgtcttaactaatagcggctagcgaactgaggcataatattttttttgaaaatactatatatatgtgataaatttttagaataaggatatataaaaaattctatttatttcatacttacatatagactattcatatt

SEQ ID NO: 57621 - DNA, 271 bp, Glycine max
  unsure (1)..(271): unsure at all n locations
tatcaccccacctgacgttcctatgtctcctgacccccgttacatatctccaggtaccactctgtggtcaacaataatagcaggaagtttcacccttcaacactgtctcatctcaagcttgtaggagtatagggtacccatcacatgtgggactangtggcggtcgggcgatggtgcacaacaagttntccacattcacagtgcgcgcatanacccagcatgcgcctgatgccaccttcaactgagctcacgtactcccacgtagccgata

SEQ ID NO: 57622 - DNA, 352 bp, Glycine max
  unsure (1)..(352): unsure at all n locations
atatattacgggactcaatcagacatccgagtaaaaagttattggcggttgaatttgctcaaagcttcaacattcaaattcgagcgtctcgttatattataggactcaccacacctcgataaaagttgtgcgtgagatgtgctaagctcacattcattcagcgtgcgttatacggacttataacatcagaaaaagtattgcgttgaattgctcgagcttctcattcaattcgagcgctcattatacggactcatcnacatcgagaaaagtgtgcgttgattgccaacttacattaatcggcgctgttatatagatctcgacatcaaaaagtttgcgtgattgtaacttacat

SEQ ID NO: 57623 - DNA, 347 bp, Glycine max
  unsure (1)..(347): unsure at all n locations
tacttggatcatagatgcttagtggagactnggtaaggatgatttatgtattcttaatgcaatgcgaaagntntacaagaaagacggtgtaagacaagctcaagatttntggtgtaagtgtgagtgcactactgttgcacttcactaaaccgaatttcgaataactcacttagcgagatgaaccgctaagtgagagagatgtttggctntttgcctcctttcttggcgggccaacatgggcccatttaaaattctttggctaaacgagccatccgctaagtggtagcgagagacgattggtttcttaacacgctcgcttagcggttataattattatgttttataac

SEQ ID NO: 57624 - DNA, 154 bp, Glycine max
  unsure (1)..(154): unsure at all n locations
tctcttgaactaggaagatgttgtccatcatctttctgctcttaatgaaagcagtntgaagttccccaataatagtctcaagcactggggctatgcggttagccagaattttagatacaatcttgtataacaaattacagcaagatatgggtct

SEQ ID NO: 57625 - DNA, 403 bp, Glycine max
  unsure (1)..(403): unsure at all n locations
agcttcctcggggccattttttgttggtgatgaacaatatctgcaaacggaatcaacacatgcgaanaaggatgaccctatggctgcaaactcgtcaatcccgtgggtatggcttttgaaaggggggaaaagaagtttttgaatgcaaaaaacgtcccccctttcatcattcttataatttggtgcaggggtggctcgcccaggcgagctaacctgcacttttnnttttttttttttttgaagggaatattaaccatgtcccctcccttcttatggattagcatcttgcctaacttgaacttacttaggttagaattaggtgttgattacttatttttactttttaaaacaaacaaatagtaaaagaaagctgctaaatacaaaggatacggtgctgccttgc

SEQ ID NO: 57626 - DNA, 472 bp, Glycine max
  unsure (1)..(472): unsure at all n locations
actcagcttcacatcagaccacttccagggtgctggaactacttcacatggattttatggngcctatgcangttgaaagtcttggaggaaagaggtatgcctatgttgttgtggatgatttctccagatttacctgggtaaattttatcagagagaaatcagaaacctttgaagtattcaaagagttgagtctaagacttcaaagagagaaagactgtgtcatcaagagaatcaggagtgaccatggcagagaatttgaaaacagcaggttcactgaattctgcacatctgaaggcatcactcatgagttctctgcagccattacaccacaacagaatgggatagttgagaggaaaaacaggactttgcaagaggctgctcgggtcatgcttcatgccaaagaacttccctataatctctgggctgaagccatgaacacagcatgctacatccacaacagagtcacactgag

SEQ ID NO: 57627 - DNA, 458 bp, Glycine max
  unsure (1)..(458): unsure at all n locations
cgctcgtangantatggggtacccgtcatatgtggtactaggtgtctatcgggcaatggggcaagtcgactcttcacatncacaaatcacacatatatccaccatccctagttgcccaccttcaactgagctcacgtactcccacgtagcccttatactcgtatctctcaacaccgggtccgcatgaatccatccaagctttcacaacatccaagcagatcaacattcaaacatcatgaactatccaaaccaagaatatagggccgaggcagagaactctgcccaaaacacattccaataccacagttntcctcactcaaataccccagtaacattctcttcgtgttgatttgctaaccagtggatcgactctaanattttactggagggccgtagacataagtctacatttgaccgtgggatctgtataaacgacataaccatatgacaacttttac

SEQ ID NO: 57628 - DNA, 370 bp, Glycine max
  unsure (1)..(370): unsure at all n locations
tagatgaagatgaattcgtggccacctcatggactcttctataaacaataacatcatttcttgcactgaattgttgggagttggaagccatcttctcaatcaaattcctatcttcagcaggggccatatcaccaagagctccaccactggcagcatcaatcatactcctctccatgttgctaagtccctcatagaaatattgaagaaggagttgctcggaaatctggtggtgaaggcagcttgcacacaatttcttgaatctttcccagtactcatacaagctttctccactaagtngcctgattcctgaaatgtctnttctgatggcaatggtcctagatgcagggaagaatttctcaagacaccctct

SEQ ID NO: 57629 - DNA, 79 bp, Glycine max
cctgctattcggccttgatctactctaatataagttgagaaataaagctaacttttattgtcttcgaaaacaaaaaggc

SEQ ID NO: 57630 - DNA, 493 bp, Glycine max
  unsure (1)..(493): unsure at all n locations
aatgtcaattttngctctttcantaactccaatatttattttaagacnnnnaagtgaacgcgagactttacatttgttcctctctccccggatttnataacccagcgtgcacttatgtgttttatttactggagccttcttactgctctttaattacatatttctgaagtattatggctcgacgacacaagtggagctacgatgggtggatatacattgagatctcaaagaactgcttcagaaaatcactcgttcaacagcctttaactttaccatgaaagcaatatcgatcatgagatctgttaaccgttgcgtcctttctcatataaaagccancctcttggttctggagcctttttttccctaattcacatgaacagttattccgaccgtgatacacgagtgattccttaaaaaaatagcgactttcatcaatataactctggacaacttcaagtgaatcaaggataaagaccatgctgtgctacaactt

SEQ ID NO: 57631 - DNA, 304 bp, Glycine max
cctaactctcaccatcccaaatcctgtttagaatactgatatgtttctgcatcctttgaagctgcccatgataactgtgtgttctacggaggctgaactgaactacataactgctcgaatatacatgtgctgcgttcctagcattgcatattccgctactctatgctcatctgaatcaacattgttctccgactatccgacttatatcagctaagaatgacaggcggcgcctcaatagaactttacaaaagccagcgactatatatcatgacaatgacaattgatcattaacgcatgcatgact

SEQ ID NO: 57632 - DNA, 491 bp, Glycine max
  unsure (1)..(491): unsure at all n locations
tatgaatgatatgagtcgaactcattttctatattcaatntctaattataattattatccatactntatntatgtatttattctataaacaacatttaatgtgaatntaattaattaaaacacatcacttaataaatcactaacaattataccttaattatattcttgtattaaattaaataatataataatgaaggaaaaatccctcgagaaacacatatattgtagaaatgaaccactcctctcacattatagttctaccaacacatgtatggngcgtgtacagatattgtttttatcaagcgtatgagaaatggtctatagtacccttctgagatcctatccattgctatccatattgatgaatccattttgtgttcaagagctactcatattnnttatactagtaatangtataaatttattttgtatacaatactcatacnatgataaatggtttatagaataacttntaatgtattaatataata

SEQ ID NO: 57633 - DNA, 107 bp, Glycine max
ccgaacctagacccgttttaatttttttaaaagggcgctaacacctatatcaaattgaggtatggggtcaaaaacggcggaatgcggaggaattcgatcttaaatgt

SEQ ID NO: 57634 - DNA, 460 bp, Glycine max
  unsure (1)..(460): unsure at all n locations
gacaatatgactttgtttctgaatctctttgaagctccaccttgataatactggtgttgtttacaagagtgctgagactgaattacataaactggtgtaatctacatgtgctgctntcctagcattggatattcccctactctctgttcatctgaagcaacattgttctcggactatccaacttatattagctaagaatggacaatcttgatcgaatagaactttactaaagccagtgactatatattatgacattgacaattgatcatcaacgcatgcatgactcagatttaatcttttagaagcacaatctcgattctggagtattcacgtgaactcttgtgcttatatctggcttgaaataatatgaacacatcaacatcattaccattaagcactgcatgttctaaataatacagtgcaaataaatgcaggagttttagcgactatctataactct

SEQ ID NO: 57635 - DNA, 576 bp, Glycine max
  unsure (1)..(576): unsure at all n locations
tagttcaattcattatantattttnancttttnnnttaataaggnnnnaaatatcgtctgacggacccttatacctcagcatcactttacagtgtcatcaaagaatatagttatgaattattgaacatctacattcctatcttaataacagtcattgttcggtggctaataaaagacagactacctacaacgatgcatcttcatagagacaattgcaactgcatgatctacactgtccttttatcacagaacctgaagaagagtcatctcatttgttcttgcattgggtatttatccaacccacttcgttggaatcgatgtcttggttgaatttacaaagtgccttatctcttgngcctaaacacaattttctacagcttattttcttcaagctgaatgttaaggaataatagatggagatactggtggaggcagtaacttttgccattggaaattcgaaacataattctgtttctatcagaattgatgctacatatgtctgatgaactatttctgtactgaactgcttagacattagagaactttctaactcattaaccatggcaacatatatcg

SEQ ID NO: 57636 - DNA, 556 bp, Glycine max
  unsure (1)..(556): unsure at all n locations
tggtccatttttataattttntattttttttattaggggnaaaggacatcggctgatctttacacccgcctcactttcaacaccatatatataaatttgacagcccttcttatcttaaagggtattaacggaaggagtccactgataccaaatgtctgccaccaatataaatatatgccttctatacaaaatactctctggaaattattactagaagaatgtatttatcacctctggcaatactgattaccacacgtattacgattgaactcaaatctagccttgtgtcaatctatactcatatatacgtattcgattactcaacactttctgaacggtacatattacaagtatccatcttgttatcgattactcatatactgatatctatgacctgtactgtatatttagatatactctcatacaatcacatactttntatgtggtgcgatgaatggctaccaaaagccttcatatatagtatctgatacattaatttcctatatcttttctgagcatacagctttatcctcttacaaagtaaataggttaatcg

SEQ ID NO: 57637 - DNA, 462 bp, Glycine max
  unsure (1)..(462): unsure at all n locations
ttgcttaggctgacctatcactttcttctgaacttaaccttattgtctctcacagtctntagatttgggagccaatccaatccttgtgttcgaactctcagccacttatgatagccgccgatgatcccattactgcttcccctaagctctctgtcctttcttcacgccgcatcacatgccttgcgaactccttggagtacctttgcattgnggtcactgaaaccccgtgtaatgaaaggcgtgatgctttcatctaatggcgctcctctcatggngtagccaagctgtcttatggcgaggacaggaaatataattatacaaccncttgttccgattaagggaacattnggaaatccttcgcatgaagatagaatcctgattcttcctttcttctagcaagggaaccaattaacagacgcccctccatgctagccaagaagtggcccaatttccctttccttt

SEQ ID NO: 57638 - DNA, 544 bp, Glycine max
  unsure (1)..(544): unsure at all n locations
ttgggtnaaagtaaccatctgacctgtaactcttatacaccccgcgagcattctagctntaacattataatnccagcttgaataacaaatacaatataattctaatttctttatcatgaaacactttcaacatctaccagatgttgctccaaaagagcaatatatattgattgtagcaataactacaaatgcagtttgaattctctctggaatctaatttattgaaaggagaatcaaaagagaataacatggtttggccatcattattcctcatcttgattatagactaaaaaaagtatgacaggatgtttataatataacatgccattctttatcattcatatggctgggtaaataaccacgccatccagtgcaaattaactctttattccaattatgctgatcacgaacttatttcctgttaatacactgctatttctgcctattaaaatatattttctatataaagactggtcaaaacataaaaaatttttttcttgaataaacatactcctgtttgtatcacgtcgcaattggaaattan

SEQ ID NO: 57639 - DNA, 55 bp, Glycine max
gttccccgtaggttttctttgccagaattcttgcctgtttgtttgatcctctaag

SEQ ID NO: 57640 - DNA, 297 bp, Glycine max
  unsure (1)..(297): unsure at all n locations
atggcttataccttaatggatggccctcctctacctcttttctnttgtcttcgntgcatctccatggtggaaaatcaccattaaaggacgtccttgaagctcataaatccagcctccatagaagccccacaagcaagctttcatcatcatgtgtgccaaacgaaccctcatggacttcctcgatcatgtggggtgcctctttggcatctacacatcccatgaaggtcatgttatggtttcatttgcacacggcggttccactcacaaagaaaccagtagtcaatcttcttaacattc

SEQ ID NO: 57641 - DNA, 214 bp, Glycine max
gctgcttccatcttatggtgactcaattgtgatgtgtattgcgtctttattatcacaatcgacgatcacaatagatgatgacaaatgtgattgacatatgctctacgatctttcaaaggaccactcatgtgaattaagaacaagtcgcgaggtcgtgatatgaatcgagaagaattctgaccttataagaaagttaagagtgtagaatctagat

SEQ ID NO: 57642 - DNA, 290 bp, Glycine max
agtaccactaacaatccccggtagtattaattgtccactatcatgtacttccaacttaccattacaatggctcattaagttccaccaaccatcataatgacttaggaagttcaaaaacactaaaaattgacctagaaaatatgaaaagacatttgaacttattcccccaaaataaattaccaaaattatattaaaaatagggagaatgagggtgagtaactcttcaacctgaatgctaaggaattcactcaaataaactccagtccacaaatgcaacttgagtcttaagt

SEQ ID NO: 57643 - DNA, 132 bp, Glycine max
  unsure (1)..(132): unsure at all n locations
gctatgtcatagattcatgacacttacctatttnttttttgcctgcattctatgcaccanaagaagcagcttgtcagggggctgaaagatatgtaaaatgctcaaactaaactttttagttggatctataca

SEQ ID NO: 57644 - DNA, 310 bp, Glycine max
  unsure (1)..(310): unsure at all n locations
tactcagctgctttttgggctaaatgctgcaaaaaaaatagtttgtgtcatgaatctctgacataagcttcaaccaattaacattgtttgtatgacaactgttgtagttggacagcaatcacacagtttgtccacccatggatgctntatgttcctatcggttatagttntagtatgctttatgttcctattggttatagctctggtgctggaatgttcaatttggagtccacaaaaggaggaactccatatggtgttggagcttctgctggagatggtacaacacaagcaagtgaaatggagctggagc

SEQ ID NO: 57645 - DNA, 443 bp, Glycine max
  unsure (1)..(443): unsure at all n locations
tcacatagtccgcctttgcttgaccttctttattcttaaaaacagaaacattatgcatatgcaaaagatcaagaggagttagtatgttaaaaccctcttccatttctaaaggagagcaattactattgctatgaacaactctattggtagcaaactcaacatggtgtaaacaggcttcccaangttttaaagttcttctctaaactgtcataagcaaagttcccaatgtcctattaacaacttctcgtttgcccatcggtttgtgggtgacaagtggttgaaaataacaatttantgtccaacttgccccgcatagtcctccataaatggcttaggaacttaaagtccctatcactaacaatgctccttcgcanaccatggagtctcacaatctccttgaaaacanatcaccacatgggaagcatcatcaacttttttacatg

SEQ ID NO: 57646 - DNA, 444 bp, Glycine max
  unsure (1)..(444): unsure at all n locations
agcttgtcatggtggctgattgttcttcaaagatatattgtggctttatggattaccgaggagcattgtcagtgatagggatgcaaaattccttagtcacttttggaggaccttgtggngtaagattggtactaaattgttgttttctactacttttcacccacaaactgatggtcaaactgaggtagtcaatatgactttatgaacactgcttangactgttttaaagaaaaatcttanatcttgggaagcctgtttgcctcatgttgagtttgcttataatcgagctgtccatagcacaactaattgttcaccatttgagatagtatatggatttaatccttngactcctcttgantttgtgctatgcctaacattgctatgtttaagcataatgatgcacaggctanagctgagtatgtgaagaagttgcatgagcaagtg

SEQ ID NO: 57647 - DNA, 421 bp, Glycine max
  unsure (1)..(421): unsure at all n locations
ntacagcaaatgccactctactccaagtttttttaggatatgttaacaaggaaacacacgtatattcaccaagaaaaaatttttgtggaaggaaattgtantgttgtgattcaaaagatcctttcacccaagcataaagaccatgggagtgtaaccatttcttgttcaattggagaagtcactatgggaaagacacttattgatctgggagctagtattaacttaatgccactctccatgtgtagaaggttgggagagttggagatcatgcccactaggatgactttgcaacttgttgaccgctccattaccagaccatatggagtaattgaagatgtgttggtcagagtaaaacattntatcttcccggaagactttgtggtaatggatatctgtgaagataatgacatccctgtaatat

SEQ ID NO: 57648 - DNA, 471 bp, Glycine max
  unsure (1)..(471): unsure at all n locations
gctgctatggagctttatggaggctggatctttgagcttctttgatgtccttcaatggtgattntacaccatggagatgcagcggaaggcataggagaagaggagaggggagacatcatccactatggaataagccaaggaagaaggagcttcacccccaagatgagccttggataagaagcttggagaggatgcttcaatggacgataagaaagagggagagaaagagagaggggggagcacaaaattgaaggaagaaaaagggagagaagttgaactttgagttgtgtctcacaagactctcattcatcanagntacaacaagcgttacacatgcttctatntatagactangtagcttccttgagaagctttcttgagaagcttctttgagaaaacttgcatgagaagctagagcttagctacacacacccctctcataactaagctcacctncttgagaatcttcct

SEQ ID NO: 57649 - DNA, 419 bp, Glycine max
tctatagaagggtcgttcctaatttctctacatttgcatcttctctcaatgagctggagaagaagaatgtggcatttacctggggtgaaaaacaagagcaagcctttgctttgctcaaagaaaagcttactaaggcacctgttctagctcttcctgacttttctaaaacttttgatctagaatgtgatgcctctggagtgggagttggagctgtattgttacaaggtgggcaccctattgcttattttagtgaaaaacttcatagtgccaccctcaactaccccacctatgataaagagctttatgccttaataagagccctccaaacttgggaacattaccttgtttccaaggaatttgtcattcatagtgatcatcaatcacttaagtacattagagggcaaagccagttaaacaag

SEQ ID NO: 57650 - DNA, 378 bp, Glycine max
  unsure (1)..(378): unsure at all n locations
cacctgccgctgcagcttgatcggacatccgtgtgagagntatgaattanttattntctcacgagcttccgttgntcaatttcgagcctctcgacatattatgcgcccgaatcggacatccgtgtgataagtcatgatcatttgaattactcgagagcttccgatggttaactcctagcgtatcgatatattattacctctgatctgaccttagtgcgacaagttattaccatttgaatttgactagagctcccgttgttcacttccgaatatcactatatgtgatgcgcctaaatcggacattcgcgtgataagttatgaccatctgaatttctaagagcttccgtggttaattctgagcgtattatatgttatttg

SEQ ID NO: 57651 - DNA, 347 bp, Glycine max
cggaccacatatagagaagctcgaagttgaataacggaagctctttgagaaattcaaatggtcataaccttcacaggcaagtcaaattcaggcgcataatttgtcgagacgctcgaaattgaacaacggtagctctcaattaattcacatggtcataaatcttcacacgtaggtccgattcatgcttataatatatcgagacgctcgaaattaatcttcggaagctctcgcgaatttcaaattgtcataagctttcacacgaatgtccgattcgtgcgcataacaaattgaacaacgaaagctctctgagaaattcatatggtcataactgttaacacagaagtctt

SEQ ID NO: 57652 - DNA, 434 bp, Glycine max
  unsure (1)..(434): unsure at all n locations
cttacagcacgcagctgcagcttaagaagcatgcataccccnatggattttgcaatgttagaagaagtgaattctattgagaagaattcaacatgggaacttgttaatctgcctcttgacaagaaacccatagcactgaagtgggtttataaagtgaaggtgaaatccaaatgaggccagacttgtggcaaaagggttcttatgaaaacctggagttgactatggtgaggtctatgcacctgtggcaagaatagaaacagtgagattggtggtagcaattgcaaatataaaaggttggtctatgcataaactagatgtgaagtctgctttcttaaatggacagctagatgaggaaggttatgttggaccaccactctttgagaaattgcgacaagaagataaggtatacagattgagaaaggcaatatatggtc

SEQ ID NO: 57653 - DNA, 390 bp, Glycine max
tctactgatgtggcagggcagggccccttctgtttgttgttccacccgcgagccttggcctctgttcttcctttcggagatacttttccttatgtcagtttgcgtaggtttatagcctaacccaaacttcccgtggtttcctctggtgcttaccaagttggttctgctgccgttgttcttgcccaaacccattatgggctcgtagccgtaccccaacatcacccgcgcgaccatcattgccgtattggataggcaaggctgcccagagagggaatctatagaggcaatgcttactacctcaaaagattggaaagctgtttccaatgactcctccgcagcttccacatatggcatagaggaagggcaacttaccaagacgtcttcgttctt

SEQ ID NO: 57654 - DNA, 388 bp, Glycine max
tctacttgggacgggcaatatttgactcttttttccacttcttcctcccctcctactacatccgatggcgtaaagatgttcttaacgggagaccttcgatctgactcctgagcttgaggctggtgattcttctagattactatgctctctcatatctgtgactggcagctcgggttctgtcatatatgacgagtgggatcattcacgacttcacgataagctcattataagtgtctttagctcagacatactgtatcccaaagtatttgcatgttgtgcctgtatgcagtcggcagatctgattcattcaaagaatgctgggacattctggaagctggcatgtgctggaaattctgcttcaacttgagatagacttctccatcatgac

SEQ ID NO: 57655 - DNA, 321 bp, Glycine max
actcagcttaataaaaagcactaatgctaaatcggcactctatggtgttcctcctctttcctgaaaatacctattgaaccttatctctggacactaggtcacttacaactactccacattacgattcacaaaatgcacaccctagtttttgaatgagtaataatttttatgtaacgttacgattcatttagaaattctattagacataaatattagtttctaatttgttacgagaccaaacttgtcaatgtataaacttttgatagctttctcacaattcaaaattacatggaccaagatcatggacataaaaaagtaagg

SEQ ID NO: 57656 - DNA, 230 bp, Glycine max
atgctgtgaatcaaaagatcctttctcccatgcctatagtccatgggaggagaaccacttcctgggtaatcggagacactacatggggtgcctcaggagctggtttgtgagcggacattaccctataggcgctctccttgggatcaaggtaggaagaggtggaaaacatgccccctcgggagacctagcaacttgtatgccagctcttctgaagaccctacgcactcatt

SEQ ID NO: 57657 - DNA, 435 bp, Glycine max
  unsure (1)..(435): unsure at all n locations
agctaangtatgcccgagtcattcttccctatgttatgntgcngaagtattggcgatcagaattgccattccttggattacggngttgaaccaagctcatgctnttacaaaaaggttcatcaagtcaagttgaaatatggaagtaaccgtcttgcaaaattggggcaaaagatgaatcgagtcacatcactgcttcgtttactgccaaacatatntaggattggttatgtccttgttacttccagtttcaccttgacaaagatgtcatggaccatgttgaaaatctaaattgattcaacctcatatcctgcgtaaaaattcgcaatacttcaactgtacatcattcgcatacatccatgctnttcattggttgcattgctcattgcattctttcgttgaaaaatanaataaaataacataaaatgaacttaatca

SEQ ID NO: 57658 - DNA, 410 bp, Glycine max
cttgtgtcttttgtttttgaatttataatacaatgatctttcttcatctgttcctggtctctacccattctcattcattggcatgtttacttcttttcctaaaacggcagattcaatgacaagtcccccgaaggtactaatacctgggacccgtctatcaacttcgagcaagaaatgaatcaaacggaagatgaaggagatgaggatgtgggacttccttcggaactagaaagaatggtcgcccatgaggaccaagaaatggggcctcatcaagaagaaacagagctagtagacttagggattggcagtggaaagagggaagtaaagataggtacaggcattaccgcacctatccgtgaagaattaataaccctgctaaaagactaccaagacatctttgctgggtcata

SEQ ID NO: 57659 - DNA, 461 bp, Glycine max
  unsure (1)..(461): unsure at all n locations
ctgcagctacctagcatacaatggatttcattncgnttataacacagctcgggcagttgctgtggtggatgaaatggggcatgtctcaatgactttctggtgcacccaagaaagcaagtctgccagcattcttaacagaatatctatattccagcgctctctctcacccaagacacggagatttgactcaatggatcctccaaccccagagagatgtggacaccgctgcagaatggggcaagaatctccacttagaacaaaacatatttgtcagaatgaaattctcaatcacaatggagcagtgacagttcatagacaacacataccagggcagaggttacaatatgagaaagcacaactcttaaaacatgatctaagttgttccgccacttaataactagctggaactaattgctgtgagagtaggttctcaccgaccacgtcttgatgagtcacatacc

SEQ ID NO: 57660 - DNA, 403 bp, Glycine max
  unsure (1)..(403): unsure at all n locations
tcaagctgagcgagacgacaactctcgcattttataattttgcccntgatacttggaattgaagtgaaatttacattaaattcatatggaaagctactactgagcaaatataaaaactaaacaagatatatgtacaatcctaccaaaaagaaccataatatgggggaaatatatacatttgtaaaaactcttctatgcaaaaattacgcgtaacagacgactaacaatatacattgttgtttaatatgaaacaaaactgtttacacagatatgtatttatatactctaataatacctaaccacaaagtgtcattgtatgccattatggagtcttaataataacatgccttgaccttgagaaggggtaaacttccttaccacaaaacttctatgaacctaaaaa

SEQ ID NO: 57661 - DNA, 365 bp, Glycine max
agctcccacttgcataatgcgatctatagaaaagttttctgctctctcctcacgtggaagcagccttactcatggcgaaccacgtaaatctgtttgctgtacttctctcattcttcgctttaatttgcagaacatcgcgtgtgtgacataactctctgctgcatctgctgctgctaatcttgatgtcctcacacatcccaacaatcttgatgaccgattatatggatgtacaaatttagtggctgccaccgaatgcaccataggccaacacttgtacgatctatgcaatcttaacaccaccggcatcctctacatggatatgcacacccacacgaactacgtcatgcattcaatccgcacacaac

SEQ ID NO: 57662 - DNA, 416 bp, Glycine max
  unsure (1)..(416): unsure at all n locations
tttaattcagcatggcacattacattattcttgttcatnttatgaaagagaaaactgtgttgaccagtacagagtgcatagtgcatgcaagacatgagagcaaaactggtggaattttgacatatatactatcagcatatgatacaatttgcttactgtgttgaccaacatgagagtgcaggctagacaggagatcaaaattggtgtaattttaacaaacatacaagctgcctatcatacatctagctactgtgcactgcaaagaaacaattatcaaaagcaaccgtgtttaagccataattcacaggataatgtagtaacttaactatattttgttatgatagttaaaaataaaacaacatgaaagcttaactaaataaaactatttaccttatgctactgccgaattttcacga

SEQ ID NO: 57663 - DNA, 385 bp, Glycine max
  unsure (1)..(385): unsure at all n locations
agctggccgccacggagttttcttactatgctcttgtgtggnggaacacgctacaaaaggagagagcaagaaatgaagagcctatggttgatacatggacagagatgaaaaagatcatgaggaagcggtatgtgccggctagttactcaagggacttgaaattcaagctccaaaaactaacccaaggcaacaagggggttgaggagtanttcaaggaaatggatgtgctcatgattcaagcaaatattgaagaagatgaggagggaactatggctcgatttcttaatggttcgactaatgatatccgtgatattggtgagctgcaggagttttgtgaaatggatgatttgcttcacaaagcaatccaagtggagcaacaaataaa

SEQ ID NO: 57664 - DNA, 415 bp, Glycine max
tgccgcccagctcgcccaggcgagtaaagttgtttcctccagaagcaacaaccttctagaggaatcttctggagggcccaagtgggcctggttgctatttacacccccttttttactaaatgcacccccttatatatttttttgtaattctttttccgtaacgttacgaaactttatgaatttcgtaacgatacttattttcctttccgtaaggttacgaatccttacggatttatgtatttactctttttggctttcaaagaagttacggaaactcacggattgcgcaaaaacacctcttttcgatttccgccacattacggaatttcacggattatgcaagcctgcttccttttggatttctgagacgtctcgggacttcatttattgcatgtcatcaagtaataatccccgg

SEQ ID NO: 57665 - DNA, 394 bp, Glycine max
  unsure (1)..(394): unsure at all n locations
taagagagcacttatttcgagtgtctttacctttaaagcctacactgcaaagaatccgnttaggccacaccttcctgatacttgtttaaccccaacgacaaattttgtagacaaacactgttcatgaattatataatacccacgaccttacacttatattccaaacacatttaacatgttgtgctacaggttaacccttcaggatccgaactaggaatcctacatttttcctttaacactgcgcataaaaaaatttctcaaggcaaacacttgtcgggttattgtataactcatagctcacaacacgaagaatatcacattaagtatttgtcacgcactcattcacaaccatatctcatatctacaatttaatatctcatgattttactaatta

SEQ ID NO: 57666 - DNA, 348 bp, Glycine max
  unsure (1)..(348): unsure at all n locations
agctatgagggtgcatagcccactatcttctcatattatagcatcganaatgcgactaccatcacgatcatcgtctccctttccatcattgggggtaccacttgcgccgccagatcactccaccttttgggcgtgttctttgaaagatctcgacccctttttgcaaatgttctggatttgcatactatccagaaccatatcaaaattgtacttatacttccttaacaaaggcaaccattaggtcctgccaagaatggactcgggaagattccaagntagtgtaccatgctacatgctaccccagtaagacttatttggacgaatgcataacaatccctcatctttgcg

SEQ ID NO: 57667 - DNA, 381 bp, Glycine max
tttagaaagctaattgttttgatctatggcattgtgtcgacaaaacaataaacatactagggggagagggtcgaattctgtgtatattaaagatataaacttttgttatattaaagcagatatagatagagatgaatatttgtggcacggtgcccacttaggatagacccaatgtctaatcatgacataaaaggtcttccattgactcgatataagagagagttcgatctatgccgtacccgcatcaatcatacattaataatgaagtatctaataagtgatcctatgtcatctgccaacgagcaatggttcatcactcgttcataatagatagtatgaaactataactaaatgttcgctcttcttacttcctcttccctt

SEQ ID NO: 57668 - DNA, 416 bp, Glycine max
  unsure (1)..(416): unsure at all n locations
gcttatccttatgccttgcctccggacttcaccctccgtgccactccgaaagatntaagccaagcccctactttcgaggngcaactcccaccttatgacgactatcccgggcaagacgatgaggaaggagatacctatcttggccccctgctccacctcaaagatccgtccccccatgaactaccccaaccgaacatagtccgccatatcccggcttcacccacacctgtaaaagaatttgttcccttcgcanaagataaggggaagatggaggcgcttgaagagaggttaagagcagtcgagggccttggcaattacccattctcggatttggcggatttatctctcatgcccaacatcgtcatcccttccaagttcanagtaccagacttttgatagtaccaagggacgacatg

SEQ ID NO: 57669 - DNA, 422 bp, Glycine max
tcaagaacatgaaatggaacttatgagactccttcaacatgtagagaatgataaaaagaggaaaggaatagcattcaaagccttatcatcttctattcaagaagaaagtgacaaagaggacttgaatgaaataaaagaagatgatgatttcatattttttgtgaagagattcaataagtttctaagaaacaaaagaaatcaaagaaaatgaaacattgattcaaagaagaaaggagaagattcctccttagccccaaaatgctatgaatgtgatcaacctgggcacttgagatttgattgtcctgtccttaaaagaagaatggaaaaatccaacaagagaaatttaaaaaaaaaagaaagaaaagaaagcatacctcacttgggaagacaatgacatggattcttcaagtgatttagaaaat

SEQ ID NO: 57670 - DNA, 400 bp, Glycine max
  unsure (1)..(400): unsure at all n locations
ccacggaagaagnacgcatcaatatacctgcctatctcttcgcctgtagtccaaactagccttagtataaatacattcaggtcccctatctaccacattaaaattggggtaatcatattatgataaaaagattggaaccgctgactaactctgaggaggctattttccgttcacaactaactaactctgaacaacaccttacatagggatacaacagaagcaaggaacttctttaactgaaccacgattagcttactccactacactgaactaattgcttacaaaattccctagagagaattctagaatgttgatgaaaactactttcttcaattattgatagagcaaaagtttaagcatgtcttatcttccatgatataggcaaccgtagagtataact

SEQ ID NO: 57671 - DNA, 422 bp, Glycine max
  unsure (1)..(422): unsure at all n locations
aactaagcttcgcaataaaaaaggactctatagtcgtttctggtcnttggcaaaacccaccggaaaggaatgcttatctacgtgaaatcttctccaattcagtataatgtgcctaactgactctgcacccacctagatattatctatgttattcacgaactgattataaatctatctacactaaaggatggctaaatgggatgatgatcactcaaaagagacatatggccgatttctgaaaaattatgaataataggaagaatggaataaaagacacaatattactcatataaagtgactaacgagagagaaaatgcttaacagtaaagcttacccttctggctttaagagccaagtaacgtgcattttcgaaccatttgctaacctgcatattctaacacattaatatcagaggttgaacc

SEQ ID NO: 57672 - DNA, 436 bp, Glycine max
  unsure (1)..(436): unsure at all n locations
cctgcacgcatgcaagcttaaacattcaatttcgagcgtctcgatatattatatgactcattcanacatcttagaaagaagttactgacgtttgaatttgctcagaggttaaacattcaatttcgagcgtctcgatatgttacgggactcaatcatagatccaagtaaaaagttattgtcgtctgaattgtcttagagcttcaacattcaatatctagccgtctcatatgttacgggacctattgagacatcccactaaaaagttatcgctgtttcgactggcttagagcttcacattcaatttcgagcgtctcgatatttgacgggactcaatcagacattcgagtaatatgttattgtctgttgatttttctaatagcttcaacaatcatattccgagcgtactcttatattatcgtactctttcagacatctg

SEQ ID NO: 57673 - DNA, 132 bp, Glycine max
ctgactgaatccggctgatatacgacccccaaattgaatgggcgtcccataatacaccacacaatgactttattcggatgtctgataaagccgatcatatcgagagctgaatttatgtgacgctcgtcccat

SEQ ID NO: 57674 - DNA, 397 bp, Glycine max
  unsure (1)..(397): unsure at all n locations
aaaaacccaagctacgaggtagaaagaagaagcagagacactgttcactttgtacactgctacaacacttccacaagngggatcttatttgtcatccactggaatatatctacaaacgtggaaagatctcataatttcatgcttcctaactattcacagagtgttgaaccccatatgtcatcaaggtactacctcaaatcaagcatgtgaggacagataactttaaatgactgactgagatgataacagcatacacttttctcatatcagatatggcacccaggccatccagagaacgatattaccggggttcacttccccctctgagaggcgaatgataagtacattacatctctccgaaatacacatgcgcctcgagatgcatgactcagcctct

SEQ ID NO: 57675 - DNA, 476 bp, Glycine max
  unsure (1)..(476): unsure at all n locations
ttacagtcacctgangcatgcaagctgggttacctccttcttcactacatcaagaatattctggttgagtcttctctgtggctgtcttactggcttagccccatcatctaaatttatctgatgcatacatgtggatgggctaataccaggaatgtctgtcaaggtccagcctatagccttcttatgcttcttgagaactaataacagcttctcctctagctcatcagcaggggaggcagatataattactgganaactgttgctatcatccaagtaagcatattttatatctgatggcagacgcttcaattctggtgtgggcggctggataatggtagaaagagatggtttctcagcttgtaccatataaagaaagtcaaaggtatgtgtacttcctgaaacatggttagttctatctgactctagaaaatgaatcttaagaggtaaacatctccgacataaatcaatttaattct

SEQ ID NO: 57676 - DNA, 426 bp, Glycine max
gcttgtagatttactgtttgctagtgagaggattttattgttctgaaattatgataattcgattatgctgctctgatgaataggaagcctgatacaaatggaaagaataagaaggagggagaaacccatgttgtgactgtcgttcctacatggccaaatttcccactagctcaacaatattaatactcagccaatatcagtccttctcattacccaccaccctaccagccaagaacacccaatcatccacaaaggccacccctaaattagccacaaaacccgcctgctgcacattcgaggccaaacaccacccttaatacgaaccataacaccataccaggaaggaattttccagaaaagaagcttggagaattcactccaatttcggtgtcggatgctaacttacctccatatctactcaataat

SEQ ID NO: 57677 - DNA, 426 bp, Glycine max
  unsure (1)..(426): unsure at all n locations
agctctctcactgtaaagaactatgtatgtctgttattttcattgcactagaggatacgtangagcaatggcatccatcatccccttgtcgacccaaaaaataaaagatataaaaaaaggaagagttaacaactatcatacaactatcaaaggatgttgtccctttgttaaaggatgttgtcccttgtgacgggtgcgtggggtgctaatacctacccatgagtataaactatcaacccttatctataaatttgaaaccttttttggttttctaacatttncttttgaagacgcacctttgttttccctcccctctgttgagggaggctggacacaaccatatcaagtaattcttcttggcttataatgttatggacgaaatgtagagaacttataagagttgtcaaaaagggggaaggtcggata

SEQ ID NO: 57678 - DNA, 350 bp, Glycine max
  unsure (1)..(350): unsure at all n locations
agctagcnagggagctctatgaacttttatcttttttacacgagacgaccaggaaagtgagatctttcccatcgtgatgctcctctatacaagagtaaagtgacgaataggacttgcatgcacttaggaattatgcatggtctcatatgtgcttgaccaccgatacgatccttgtgtaagaagcttgggaggttgctttaatggaggcattgattcagggagaaaaagagaacagttctcgcttccccctgaatgctttgaatggggacaacctgcgcactttggaatgggttgcccggactcttcataatataggtacaaccagcgtacccatgtttcatttatagact

SEQ ID NO: 57679 - DNA, 467 bp, Glycine max
  unsure (1)..(467): unsure at all n locations
tcctctcagtcacctgcggcatgcaagcttccatcagttatgaccatgtgaatntttcgatagcttccgttgntcaatttcgagcgtcacgatatattatgaccccgaatcggacatccgagtgaaaagttatgaccatttgaatttctcgagagcctccgttgttcaatttagagcgcctcgatatattatgcgcctaaatcgcacatccgacttaaaggttatgaccatntgaatttctcgagggcttcaattttcaatttcgaaggtctcgatatattatgtctcaaaatcggacatctatttgaaaacataggcccatttaaatgtatcgagagcttccgttgttcaattacgagcatcacgatatattatgctcctgaatcggacatccgtgtgaacagttatgaccatttgaatntcttgagagggtttcgttgtcaatttctcgtgtctctatatattat

SEQ ID NO: 57680 - DNA, 368 bp, Glycine max
  unsure (1)..(368): unsure at all n locations
ngaaatagaacaatggaagctgtctagaaattttatggttctatcttctcaaacggatgtttgatttggacacataatatatcgagacgctagaaattgaacgattgaacctctcgagaaattcaattggtcataacgtttcacacggatgtccgattcgggcgcattatatatcgngacgttcgaaattgaacaatggaacctcttgagatatttaaatggtcataactattcacacgaatgtccgattcagggacttaatatatcgagacgttcgaaattcaagaacggaacctctcgtgaaattcatatggtaataacttttcacatggatggccgattaggcggataatatattgggacgctcg

SEQ ID NO: 57681 - DNA, 373 bp, Glycine max
  unsure (1)..(373): unsure at all n locations
aagcntgagacaagcagaatgagtgaggttatgcgcttgctcaatttctgcgcagcgagtcgatcatataagttatagataatcccagttcatccatgaacagggttcttgattcctacgttgggctgtataatacaaaggattggcagcttgcgcacgtaagcatggaggaatttgctggcacattgaaatttacgaaggatttttcggaacataaagttattgtcattctacgacatattctaactgtgatagtatctatgtaaaacacctgaagcatttgttcaacattgctgccaccatatatcatgggaacacaagcaaatatctgaggattatctgcatgaaagtatggaaagtaaatgcactctga

SEQ ID NO: 57682 - DNA, 195 bp, Glycine max
aacaagagggacgaccccctcgctactctacttaaagcgtacaaagacaagctaatcacacttgaaggcacagtaaagagaaaaaggaaaaccatgaaggggacacgcgccgtcgaaaaggagttgagtacgcataggcggcacagcagaagaaccggaccaggggatgtaacatgcaagcgggacactataaaa

SEQ ID NO: 57683 - DNA, 420 bp, Glycine max
  unsure (1)..(420): unsure at all n locations
taaggaccgatgggttcttanattttttaagttttggcttgtccttgacttgattatcactcaaaatcccctctatctgaactacaactattgttaatttcatttttagtcttgggtgaactttggagaagaagagttcttactttggtcacatgctttcttgagtttttgagcttcaagtcttccattcttcaccattctcgtgcaccaattgaggtatgaaggagtcggcctttttgctcttgcttgttcatgaagtattgtccatttagatgtgctgcatgagcataggaagttagccttccataaatcaacaccttagatctattnttactttaaattcatataaacttggtatagctcataaatctctgtcttttggtgtgaatggtataataacatggtgttcgtgcagagatt

SEQ ID NO: 57684 - DNA, 293 bp, Glycine max
aggggagtagaaccttattatgttttctcagacttttcaccacagagccaagcacatgtatagggaagtacatcctaaatcaaatttggctgtgaacgagctccacttattactgctgtaatatgtcaaaacttaagtataatgagtgctattctcgctctttatagaagaaaacgcgtcagctttatctctcaattctggtttagcctttaaaaggatcctcccttccattagatgcatgagctaatcgtgtctctcagtgcggtgagaaagatgtattcggaagctatttt

SEQ ID NO: 57685 - DNA, 428 bp, Glycine max
  unsure (1)..(428): unsure at all n locations
gagctctacattatatntcaggaatgttccactattttanaagnagaagaacctacagccactatcctatggaattaacagaacttaatggctgagtgtaactgaaattgtggcaaccaaaagtcacccccaacagccatcatgccagccaccatttggtctcccaaaatgctgatgcctatgttgacaattgagcccttattacaacttgaactaaaccaaactaaagctcttttatattattaacccacaacatatttttgctcatccaactctacaaggattgggccattatttatacatactaaacactctacaattgagacagagcggtgccatttagtcctcctctattagggccatgatacaactcacaaccttggacatttctccttgaaacttgcgctagtgatcaaatagtatgggca

SEQ ID NO: 57686 - DNA, 422 bp, Glycine max
  unsure (1)..(422): unsure at all n locations
aacnatagaaactcaagctgtctggatgtgcaattcttgaattctaaagtgtgttanccaccnntatcattctcttctccctttgccaaaaagaattcgtcaaggactaaccgcctgaattcttcttgtgtcactcttctccctcttccaaaagaacgaaggactaaccacctgaattctttcgcgtctcccttgtcaaagaactcacaacgacacagcatgagaattcttttgattcttccctttcccataaacaaaagaggtcaaaggactaaccacctgagaattcttttgtctcccccttcacaaagattctaaggactaaccgcctgagaactttgtcttaccacaatggagggcacatccttctggggacaagtagagggtacatccacttgggatgctgggactgaaaacatgag

SEQ ID NO: 57687 - DNA, 468 bp, Glycine max
ctctactatgctctgagttgtgacaacttgtcggagctattggaaatcaattatgaacattcgatacaattctatactggactgtagcttttcgtgggtatggtcattttgatttaaaaatatgactgcagtatgctttcttctgaatgatcgctctattatgcatgcttaacacatgctcaacattcttgccagcctactggaacatgcatttgccatggttatctcttctcattctctatttttttcttgtacatcaaaagtaagacaacttttgttgtccctttcgatattggagaacatctttgacaagtgggtatacaaaatgttaaatgagaaataagaataattgtaatctcattcttttatagtgttactactcaccttcactccatcatcacatttgatatatatcatcttctcattaattttcttcctcaatctctttctctgtcatccactactcac

SEQ ID NO: 57688 - DNA, 486 bp, Glycine max
  unsure (1)..(486): unsure at all n locations
gcaagcttcatgtaatatctgcagagcttgggagtgtcttatccncatcaatgaaccgatgaagttggccatctacatatatggagctcattcctggcacctttctgatacccctactcttaagaaccttcctaagggaattttccttgtctactcttccacacaatgcttacatgtttganagaagaatatgatattctgtgttgaggtgattcatttgaaccaactctctcataatcttctcccccagcctcaacttaccatgtgaataacaagcgcccaaaagggactcccaaacaatttcatttggtggaattggcatcttcttcaccaaatcctcagcttcttccatacgtccagctcagccaagaagatccaccatgcaagcataatgctcaatttcccgcctcaccccatatacagactcgagatcatgaaaatactgcagaccttgttcaactagacccgaatggctacaagaactta

SEQ ID NO: 57689 - DNA, 415 bp, Glycine max
  unsure (1)..(415): unsure at all n locations
agcattctcaacgttatgaaaagaagagactgttcttatttttttcncttttcccttacgagcttatgcttctcttgactctgcatgcttttaactttttcttttttactatatactgatgactgtactttcaatagtattattaaaggttaaattcttccaattacccttattaatgtttaccttccatttcaggatcaggaattaattaattaacatgtttcattcccacttaattagcaaagttttctgaatttaacaaaaggtaaaagggtactatgttttctttctgctctctcttttacacataagagcagtatccttggtcaatactccaactcacgtaaataaagnttcttattgtaattaacctatgaccaccctattaatagcttttatttaagtatatctacaa

SEQ ID NO: 57690 - DNA, 205 bp, Glycine max
tatgctgacattgctgatggaaaactgctagagatgaagggtataaatatcctatggttaaaagcgacaatgtgatcgtatgagtggaaatagagtgattctttaagagtgggaggttaattctgtacctgctataaatggacgttaagtgagtcactctatcttgaatgtcattcatgacttggagaagcttgactgtgcgaag

SEQ ID NO: 57691 - DNA, 478 bp, Glycine max
  unsure (1)..(478): unsure at all n locations
agatgaagcttttccaatgctgcgcagttctatactataagnaagataattatgttgaaataagctcttcctaatagaccctaaaaatacatgtacagactcacggtgtaaaagtctcttacactatcatctaatcacggatcatcatgtatgataagttcattgacttttataataaccaccttacaagtcattcaaaggacaagttcttattgtttgataacataaaaactttaatattgacagcgtttatctattagaactcttttgaatctcgcctacctctacattnggttaaacacaagtgttcttctaaggtctggttactgcttcataatgaaaactcccccctttagctggtgacagggtacatcatgttntgttanaagcacagntgctgctngagtgtaaaccattctgtgcatctagaagagaggaccaagatctctgtctatgatatgtcagccatcatcagatg

SEQ ID NO: 57692 - DNA, 433 bp, Glycine max
  unsure (1)..(433): unsure at all n locations
ctaagctactgaannaaatattaaaanaaattatnnttatcttattttggtttgtttcacagncaagcactaagctttcgaataaattctgatttacccagtttggataaattttttaataattacttatagttgaagaaaataaaatgaattgaacttcacttctcttgtaagttaaaatcaacttaagcacttcgacttctataaaagttctctcatctgacttctccgaaaagctgagatatattatgttttctcttacatgctataagggcttattgagaactttatctaaactgatccattgtatttaattaagttgtttactcaagcactcccgtagtatcagtatgtcaaacagataataaaatcgattttcctaaatcatgttacanaagaagagaactctncaaatatccatgataattgatgg

SEQ ID NO: 57693 - DNA, 479 bp, Glycine max
  unsure (1)..(479): unsure at all n locations
tgcacgctgcagcttataagtgccgtctggagacgaagtatgtgttcgctatatgtgaagattatgttccaagtacttcggatttggtccgaccatgccctcctgatttccagctgggaaattggcgagtggaggaacgccccggcatttacgcaacaagcataatgtaaacctttacggttttaaaagctctatagttgggcctgagctatagagttttcattttgtaacgctttgtgtcttttgtttttgaatttataatacaaggatctttcttcatctgttcctggtctctacccattctcattcattngcatgtttactcctttntctaaaacggcagattcgatgacgagtcccccgaatgtactaatacctgngacccgtctatcaacttcgagcaagaaatgaatcacacggaagatgaaggagatgaggatgtgggactttcttctgaactagaaagaatggtcgccatg

SEQ ID NO: 57694 - DNA, 408 bp, Glycine max
  unsure (1)..(408): unsure at all n locations
ctgaggaccccaagaggaggcgagntgttcacactttcttgctattctactagcatnnagtatagaggaagaatcttcatattggagaattataattgtgtgctctcattactacctttaatcattaagtgcctatcataaacttcacgaagcagaaagttcgagttttcccaacaactagtaatatgacaaccaaagtagagtatacaagtgagaggacgggcccaatatgaagtgaggtctaaaacaaaagttgaggccttttagtcaacatgtgaatttaaagctcaagttatagttgctttactctcgagatggcctctggttgagggttatttactatcactagatccaactgagctgaattggaatgcaataatatgaaaaccgctatctctctattgaaat

SEQ ID NO: 57695 - DNA, 468 bp, Glycine max
  unsure (1)..(468): unsure at all n locations
agtgctctgagacttggggtgtctanttcccttttctgagctctttatttatatctgctggagtgggctntgggcctatgtaggctcgcttagtgcggagcccctcacttagcgcgttcagagtgggcgcttagcgagctcctctcgcttagcatgtgctgcttctgttggatcacgcgcttatcgcgcgctgtgtgtataactgtgttcgctatccagtcgtgtccgcttaccctgtgttgcgcgctgagtgtgagtaacggactctgactctcgtgcttaacgcctcgcttagcgcctgtctcctctggctcgcttagcacgagttgcgcgctaagcgagagaatgggctaggccttactgactctctacttaatatttccttccttttgctttaacacctctaggtttatatctacagccacattcatgaacatcattctctacaattagcacaatactgataat

SEQ ID NO: 57696 - DNA, 263 bp, Glycine max
aacaccacaccccccggtaaatacttaaataactcctcagcggggcttactgacgtatatggcaatacccgaaagcagcttctctatccgaagttcttttttattacgatgctgaagtccagcggggtccttcagcacctgtaggtggcccggaaggaagattagaagaatggtggcccgtgaccgatagaaatgtataaaggtgctgttctatatggtaaggacgcaatatttctttccggtacgttatagaaaaaacagta

SEQ ID NO: 57697 - DNA, 473 bp, Glycine max
  unsure (1)..(473): unsure at all n locations
agcttgtaggattatggggtactctatacatgtgtttctaggnggtggtcgagcaatggtgcaagacaattctccacatccacaaatcacgtataaacccaccatcccctgttgcccacctccaattgagctcacgtactcccacgtagcccttatcctcgttcctctcaacgccgggtccccatcaattctctcaagctcccacaacatccaagatattcaacgatcccatcatcacaaactaaccaaaccaagcaaaacagggcaaaggcagaaaactctgcccagaacacaaaccaaaaatcacagcttttcacatacaaatactccagtaacagtttcttcgttccaattcgttaaccgttggatcgactcgaaaattttactggaagtctctagtacatgagtctactatttgaccgntgggatctactagcanacgttcagaactaattatgttcatactctttcac

SEQ ID NO: 57698 - DNA, 412 bp, Glycine max
tcaatgaaggataagagtgagagttagtcgggttcaaaattgaaggagaaaaagagagagataagttgaactttgaagtgtgtctcacaagtttcacattcatcaaaggtacaacaagtgttacacgtgtttctatttatagactaactaaatgaaagcttccttgagaaacttacttgagaagcttccttcaaaagctagaacttagctacacacacccctctaataactaagctcaccaccttgagaagcttccttgggaagctagagttagctatacaccccccctctaatagctaagttcacttccttgagatgagaagctagagcttagctaaacacacccctctaatagctaagctcgcctctatgccaaaatacatgataatacaaaaaaggccctactacaaag

SEQ ID NO: 57699 - DNA, 485 bp, Glycine max
  unsure (1)..(485): unsure at all n locations
agctngttgcaattcttctagagttggagcgattttatgcagtcctcttgaacctttacctcctactctttcattatgatgagactccaaaatctcatcaggttttgcctttttgatgtactcggaacaaaactcaatagctttttctgcaatgtacctttcaacaatagatgcttcagaacaatgtagattctttgtataccctcttaagatcttcatgtattacttaaccgggtacatccaccgcatataatcaagaccgcaacatttaatttcccttatcatatgaacaattaagtgaaccatgatgtcgaaaacgaaagaggaaaatgcatctccaactaactcaagataatagtagcctttttttccagctcatataactngaaaggatcaatgacattgctacatatgacattgaagaaaaaacacaggcgagttatgggatgcctgactntcttangctaaatgtctcgtatcaccac

SEQ ID NO: 57700 - DNA, 164 bp, Glycine max
  unsure (1)..(164): unsure at all n locations
aaaaccaagcttctaccaaggactagcnngtttaantctttntatttccccnnagagccncgctaccctttccttgtattgaagctcacacacaagccttaagagaaaaaccatgatattaccatattcttaaggaatttttggagactattggaattggtttt

SEQ ID NO: 57701 - DNA, 293 bp, Glycine max
  unsure (1)..(293): unsure at all n locations
gcttcatacctccacaggctttgatacatctttntnttcatgtctctcttgtgaagaaggctattggtgattattctgtgcaaggggatctacccacagagctagaggttactgatatggatgaattttatcctgagaaggtcattggttcacgcactatcactcaaggaggagtatctgtgcctcaaagtcttgatcagtggaagcacaagtccagagatgatgtgacttgngaagatgatgcgttcattataagacagtctacagatcttaaccttgatgacaatgatgtt

SEQ ID NO: 57702 - DNA, 433 bp, Glycine max
tatcggaccaaaacatgacaaagttctattttttcaatctaattctcacgctaatataataaatattgtcttattctttatacaggtttatgattgtccaattgatttaagaacaaagcgcaaccctacatatttatgtggtatcatggagtattatataaaaatctttctgatcatcatcaataagcaaaatacggaggttgtcggtagttaattgaacaataatatattaaaatcaaatagatatcttgtgaaacaaatataatgaaagtgcactcaattcacaataataaagcaattacatgtacaatttatagatacgagaaacaagaaaaagacacacattataatcatagataaatttttaaagcatgaaacaagggaatataacacatcaatttcacaacaatttcgcatcgcgatatcaattggg

SEQ ID NO: 57703 - DNA, 407 bp, Glycine max
  unsure (1)..(407): unsure at all n locations
agctntacaacttattttagtattgacccactatctctataataaaataacttaatgccattaacctatggaattaaaaaaacttaatggctgagtgtaactgatattgttacaaccaaaagtcacccccaacagccaacaagtcagccaccatttggtctcccaaaaggctgatgcctaggttgccaattgggcccttattacaacttgaactatacctaactaaagcccttttagttgattaaccaaaaacatattcttggtcagccaactttacaaggattgcgccattatttagacaaactaaacactctataattgagacagagtggtgtcatttagtcctcctccatatgggccatgatacaactcacaaccttggactattctccttgaaacttgggctt

SEQ ID NO: 57704 - DNA, 322 bp, Glycine max
tcaccttctaggccttctcatagttgtggcattataaaacaagctctattttcatcttccactcctagtatgcctccggatcattctttcctttaaatggaagaaagtggagtttaataccatcaatttcggtttgtctaagaacaccatcattccctcttatcctcccttcttttcattatgatctctattctccatttgaaccaacctctcatggagcgcatcatcttgttgtatcattaaccacttcatatgtagaattaaagcttggctttggaattgggaatgccccactccattctttagattaagacctgacctt

SEQ ID NO: 57705 - DNA, 365 bp, Glycine max
cgagcaaacacagatttcgccttgtataacagactctctctaactgaaaaatttttcttctcacctactcatgatgacgcatgacgcttaaatcatatgtcatggactgagacgtaccattcgctataacagccaatacaaacgccactcaagggacgctggcctgttatagacagagcagcttctagctttagcctacatactaggcaagatgctgcccttacctgtaccaatgtgccccctcccctttcgcccttgaggatgccaaacttgaaatagaaattgagtgcattttgagggcttgcggcttgagattagagacttagctttcttaatctattctgaaggttctaacacttaacaga

SEQ ID NO: 57706 - DNA, 431 bp, Glycine max
  unsure (1)..(431): unsure at all n locations
agctnngtcttggtttagaatgtttttatacatgtattatgacttgtangatctaattngggcaaaattggatgagagcaagagtgatttcgaaatcttgcccaattgtgcagcaaaaagctgtcaaattttgtgcagcagaaaattgtgcttgtgcagaaaatgttgtgtattgctggttatggaaaggatagtacatnatgggttctggacattttatagcagatcccaacggtcanaatgtagacttatgtactagggacctccagtaaaactttcgagtcgatccaacggttaacgaatcggaacgaagagaatgttactgtggtatttgagtgaggaaagctgtggtattggaatgtgttttgggtagaattttctgtctttgccctgttctctttggtttggattgttcatgacgctcgcatgtt

SEQ ID NO: 57707 - DNA, 410 bp, Glycine max
gagacccttgaaactcagcttccgatgatgaatcaagtatgattcaagttgttttgatgttgacaaatagaagcccaaaagaatgatgtcaaaattgagtcaacaagttcaagatcaagattatagaaaagatatctagaaggataaagattcaagagaagatgaattcaagattcaagagaagatgaattcaagattcaagagaagaaaccaaaaagcaacaagtcaagacttcacaagggaagtattgaaaaagatttttgaaaaaccaaacatagcacagttttgttttaaaagaaaagtttttccaaatttttctaagttaccagagtatttactctctggtaatcgattaccaattacctgtaatcgattaccagtggtgaagttttgattcaaagcttttaact

SEQ ID NO: 57708 - DNA, 460 bp, Glycine max
  unsure (1)..(460): unsure at all n locations
ttacagcacctgcggcatgcaagcttctagaganagctacatgaagctgcctctgtttaacactgtctcagccttcattaaccgntggatcttctctaaatttggtctacaactttgcaaaacaattttccaagatctgaccgttgggatctttgagaagatgtctggagtgtgctagaagcctcttaatgaagcttctggaggaagcctcttaatgaagcttctagagaaaactacttgtagctgcctcggtagaaacgctacccagcctttgttaactcgtggatcttctcgaaatctggttgcaacttcacaagacactttaccatganttaaccgttgggatctttgagaaaatatctggagtgtgctagaagctttcgttcccaagagcattctcttatttaagcattcagccttcgctttcttgtagcttaagaaaaatgccattcttcttctt

SEQ ID NO: 57709 - DNA, 389 bp, Glycine max
cagcttcattttaatttcaccatctcgaatagttccggacttatccggacatccatgtataaagttattggcaattcaatttactcagggcttcggatcttaattgtgagcgcctcgatatattacacgactcattcagacatccgagtaaaaagttattgtcgtttgaatttgatacgagcttccgttttcaatttggagcatctatcgataaattatgacactctgtcgggcatccgagtaaaaaggtattgtcgtctgaattttctaagagtttccgttttcaatttggagcgtcttgctatattacgggactgaaacgaacatttgtgtataaagttattggcatttcaatctgctcagagcgtctagtccccaattttgagcgt

SEQ ID NO: 57710 - DNA, 425 bp, Glycine max
  unsure (1)..(425): unsure at all n locations
catgcaagcttcttatccaaggctcatctngggggagaagttccttcttctatggctcattccctaggggacggcgcctcctctcacctcttctcctttgtcttccattgcatctccatggtggaaaatcaccattaaaggaccccattgaagctcaaagatccagcctacatagaagctccacaagcaagcttccatcagttgggcctaggctttaaagtttctttcgttaaggctttgtgtctttggttcctgaatctataatacagagatctttcttcatctgtttctgcatctctacccattctcatccattcgcatgtttacttctttatgtttaaaacgctagatccgacgacgagtccctcaaaggtactaatagctgggacccgcccatcaacttcaagcaagaaacgaatcatata

SEQ ID NO: 57711 - DNA, 425 bp, Glycine max
  unsure (1)..(425): unsure at all n locations
ttaaaacccagctctttggaccttgaacaggcaacaactccttttanatccatgctatgtgctcgcgactggtccctttcctcccttcgcaacttgagttcattattgctaccccatagggctccgggaaatttgttccgccatactcttccttgcgagccctcttggtctctcgttcaagggctcttgcggtaattgcattctcttcccgtaacccggcacactccttccgaacgtgtgtagcagccaacttgaacttctccttggcgagttttgcctttcctaactcgcttttgagagcttggacttcctcgtcctcttccggtgcttcaaaattctcttcgctgacgacttttaacttggcgagccaatctaaacctcgtatgcgaactttcagccattcgtggtacccaccaatgatgcca

SEQ ID NO: 57712 - DNA, 346 bp, Glycine max
  unsure (1)..(346): unsure at all n locations
tgccgcatgcaagcttaataagacgcatgctaagcgggtagagtttttatagcaatttccatatgtcatcaaacataaaaaggggaaagggaatgtagtggctgatgcactgtctaagagacatgctntacttgctatgcttgaaactaaactgtttggtctcgagtctttgaaagacatgtatgtgcatgatgtggaccttgctgaaaattttgctgcatgtgaaaagatttctgaaaatggttactataggcataatggattcttgtttagagcaaataaattgtgtgtgcctaagtgttccattagagagttgcttgtgagtgaatcacatgaggcggggggg

SEQ ID NO: 57713 - DNA, 445 bp, Glycine max
  unsure (1)..(445): unsure at all n locations
gacactaagaaactcagcttcaatacacttctttaagatagcttggccttatctcctgtagtttggtacactaatttggaagcttctcgtatccgtacttggaaggatctgattactgccttcctaaggcaatatcagtacaattccgatatggctcccgatcgcactcagctgcagaatatgttcaagaaagagggcgaaacctttaaagaatacgcacagtggtggagggacctggcggcacaagtggctcctcccatggttaagagagagatgatcaccatgatggtagacactctgccagtgttctactatgagaagctagtaggttacatgtcgtccagctttgcggacctagtattcaccggtgaaagaatcgaggtaggattgaaaagaggaaagtttgattacctntccttcacgagtgcgaatgccaaaagaatcg

SEQ ID NO: 57714 - DNA, 413 bp, Glycine max
gagggtcaaccttatgatgtgttggatcgagtgtccttataataattaagaacgggggggggatagaattaattatttctaaaaccttaccaattaaaaactactcttttaaggcttttacttatgttgttaagagaatatggagtagaagagaaacttaacagaaagtaaaagcggaaattaaatgcacagtggaaagtaaaagagtagggatgaaggaaacaaacacacaaggatttttatactagttcagcacaaaccctggcctaccttcagtccccaagcgacctgcggtccttgagatttctttcaactctgtaaaaatcctttacaagcatagatccacaagggatgtaccctccctttgttctcttgaacctagtggatgtaccctccactagaactgatccaca

SEQ ID NO: 57715 - DNA, 418 bp, Glycine max
  unsure (1)..(418): unsure at all n locations
ntacagcagattntagtaatgacccactaacctataattaaaataacttaatgccattaacctagggaattaaaacaaacttaatggctgagtgtaactgaaattgtggcaaccaaaagtcacccccaacagccaacaagtcagccaccatttggtctcccaaaaggctgatgcctaggttgccaattgggcccttattacaacttgaactaaagcccttttagttgattaacccaaaacatatttttggtcagccaactttacaaggattgggccattatttagacaaactaaacactctaaaattgaaataaagtggtgtcatttagtcctcctccatttgggccatgatacaactcacaaccttggacttttctccttgaaacttgggcttgtattcaaatagtatggacagcac

SEQ ID NO: 57716 - DNA, 478 bp, Glycine max
  unsure (1)..(478): unsure at all n locations
agctngtcactatgttgagtcacttaatacagttttaagnttacttcaatcggcggctttatagaactcgtcttttcttaatacacttaagcaaactcataaataggcattaattgaaaaggcttatgatttgtgtttagaaggtttgtaataattaaagcatcaagggttttggactcaacaaatattccataacataagatgtaaataacaatatcacagagacattggagaacattcaccatacaaggatagagagcatatatgaactaatcaaattgaatggtacacatactgaaataataagggactaaacaataaatatctaaacttcatataaccgtgtaaaattacctgctacaacaagtcaattttggtgattcatcgcgcacttgcccattcanaacatatctaacacttatgatggggtgaaggtggtacattgttgaattcaagaacccgttacatgcaatgctct

SEQ ID NO: 57717 - DNA, 437 bp, Glycine max
  unsure (1)..(437): unsure at all n locations
gactctctagaatacctcagctnttagcaacattntcctaagagtttgtgaaaataatgntacaaaagggcatatgngtagtagtgttgaaagctcaaaagaagactcgaagtgtccttggttgtactgcaatgaagaagtcaacatactcactggatgaagagaaagattttaaaccatgagaagtattcaataactaaaggacaagaagaatgtcacaaacatgaagattttcacaatgaacatgacatgaagaataacattgttgtaacacattcaaaatggaatttcatcaacaagacaagttcattatggacattgtatctagagttccataatgaaattaaggtattcttggtggctatggaaatcttgaagaaagatttttaactttcatgtgcaagtgcgggtctgatacaacctggatcatggacaaa

SEQ ID NO: 57718 - DNA, 170 bp, Glycine max
aggaaaggacggttaacaccccatttgtcccattagtagaaatgaactagtatactgtgcaaaaagatctctggcggagctctctatgcattagaaccttgaagacgcgaacttgggaaaacgcaagatccataagaggatgccgataatcgtgaaggtaaggtcccaag

SEQ ID NO: 57719 - DNA, 458 bp, Glycine max
  unsure (1)..(458): unsure at all n locations
agctngataacacgcagagactattatcgtcttctgttaccttcctcaatcgcggcagacaagatcgttgataggtggagatntatgtcatcttccgcgctcacaagatctgtcatattgacttttgagtcacgctgacgggcggaaatacccgagtggttatccgtataaagatttgctgtctgtaagtcgaaatgcctaatagcacgcagagactaacgtccgtttctgtgccctttgtctatcgcggccgacaagcccgttgacatgcggagatttacgtcatcttccgcgctcacaagatctgtcatactgacttntgagtcacgctgacaggcggaaatacccgagagtttatccgtataaactttttgttgtccggatgacgataagccagataacacgcacagactaacgtcgtcttctgcgctctttgtaatcacggctgacaagcctgt

SEQ ID NO: 57720 - DNA, 417 bp, Glycine max
  unsure (1)..(417): unsure at all n locations
tttcgtcttacagacagcaaaaagttttactgttaaccactcgggtattgacgcccgtcaccgtgactcataagtcaatatgacagatcttgtgagcgcggaatatgacgtaaatctccgcgtgtcaacgtgtctgtctgccgcgattgaagaatggcacacaagacgacattagtctttgcgtgttatcaggcttttcgtcttacagacagcaaaaagtttatacggataaccactcgggtatttccgcccgtcagcgtgactcaaaagtcagtatgacagatcttgtgagcgcggaagatgacttaaatcttcgcatgacaacgggtttgtctgccgcgattgactaatggcgcanaaaacgacattagtctctgtgtgtcatcacgcttttcgcttacagacagcaaaaagttt

SEQ ID NO: 57721 - DNA, 450 bp, Glycine max
  unsure (1)..(450): unsure at all n locations
cctgtngcatgcaaccttcatacaattaatatagattctatatcctattgtcacatcctatcagagcgnngtgttcccgtgtcctctagcatgaggttcttcatagtcatccacctattcatttgctcccccgaacataaagttcaagatcatcacaggatccaaacacatataacacatagggagtgagttatcgcattcctaattaatggagagaaacacaatatcatgtatgtattaatatcatataaggcaaatacaacttacttaagcatcactcacgttatttcaccactttatcgcacaacattacattgcaacaccacacattgtattcattatcacaacatacacgtactctatgatcaaaacacaatatcatctatgtaatcaatatcaatcaatacaccacatgttatgctactgttatgctaagactcaatcttatat

SEQ ID NO: 57722 - DNA, 413 bp, Glycine max
  unsure (1)..(413): unsure at all n locations
tacatcaggaaaagtatctcggattggaatatcttacgcctaggctncgggatgggacaacaagccgaaggggccctgccctgccacatcagtagaagctttataactgcggatttaagacacaaagaccaagtcgccgcgatatgcgaggatgactccctgaggagatcagatttggtacggccatgtcctcctggtttccgactaggaaattggcgagtggaggagcgcccacacgtttacgccacaagcataatgtaaccctttgtagctntaaaactctacggttgggcctagactttagagtttccttttgttaaggctttatgtcttttggttcttgaatttataatataaagatctttcttcatctggttctgcgcctcttctcattctcattcatttgcatattt

SEQ ID NO: 57723 - DNA, 368 bp, Glycine max
  unsure (1)..(368): unsure at all n locations
tacactcacctgccgcatgcatgcttctcatcgtggaatggatgttaccaagcttatgcaacactttgtggngcttcatctcaaccatctcatataacatctttgtaaaacctctcttagagagtgtaactaagacctcttacctctttacaacaatggtttatccatcattctacataaccttataaccattatccaagatcccgagaccctgtgcctcagtcatagactcttagaagttcattcatatgcaattgtgccttattatcaaataacacgacgtccttattctcttccactgtcaccatcaaagtcccctgtacttattctattttcttgttcacactgatgatcacaacatcactctc

SEQ ID NO: 57724 - DNA, 425 bp, Glycine max
  unsure (1)..(425): unsure at all n locations
atacccaagcttgcgaaggagttattagagggngttatgggtttatatanctttaacaaagcacncgagaggaagaaattggcacatgaagctacccacactaatggttcttcctttttgaatttggaaaaactggtgaatgaattgttgtttgtcaagatttaggctacaaaaaaataagttcacattagttagtttccatattactaagttgatattcagatattgtttgtaatgctatcatctaaatgtgatctgaagtatctcccctatggtgataatgtgggattcaatactactactatttatttctcggtgatgctattcaatgcttgaatgctctactcgtttctaattggcagattatttttgcttggactgtctacaatattctactaatggtctattatctttctctgttacag

SEQ ID NO: 57725 - DNA, 503 bp, Glycine max
  unsure (1)..(503): unsure at all n locations
tgcggcatgcaagcttcttgtattgagaaattatacatgttctgttaccaccacatgtttatgattccggtcaattttcacgttagttgaagtttattaattttctagtataaattgaaaatttaagttacgcattacgtaaagattgattatagacgcagttctagacaatacaataatttccccactatttgtcactatcataaacccatcactcattttttaatatggaaatagagaattttaaaggggttcacgtgagttacatacaagggaagatgtccaataaatgaaaggcaaagaatgtgtcacaagattccccactttctaccgagcatatgagagcaatattagggtcatgagagcaatagtcttaaataattcaacaatacacaaaagtccaatgactcccacaacaacctctttaccctggccacttntggtctattcccacatccagacaacaattttaagagtgcatagagtggtcattacacacttgg

SEQ ID NO: 57726 - DNA, 414 bp, Glycine max
gcttcagcaccgaaatttagttaggctacttggtttattttgtaagggaaagaaaagctacttgtttatgaatttgttccaaataaaagccttgattacttcatatttggtaaatattaccatgattagtctattgttgtattacttcagttttggttcatgaaaaaacagccaactacactaacataactctaaaactcatatggctttgacgcacattcagatccaacaaagaaagcacgactggattgggatagacgatacaaaatcattcgaggtattgctcgaggtcttctttatcttcacgaggattcacgattgcgcgttatacatcgtgatgtcaaagcaagcaatgttctcttagatgaagagatgattcctaaaatatcagaatttggtacggcaagactaatt

SEQ ID NO: 57727 - DNA, 443 bp, Glycine max
  unsure (1)..(443): unsure at all n locations
cttacgtcacctgcggcatgcaagctgggcctcatgtatgaggcgtcaaatggatatcttgtctaatgttattntaggcatggcattgagagaagaaccattgtccacaagcaccttggccaccatatgatccgcacattagaccgacacatgtagagccttattatgctccctcccttcaattggcaacttgtcatcagtgaaagtcagataatcaatcgtagtgataataatgattattgcctactaacttctctaccgagacgtcatgcgccacgtgggccttatttaaatattttatcaacaacttgcgataaggcttataatgcatgagcgagcccaacatagagatcctggccgacattctattcaattgatcgattacctcgaattcactctgctgaatggtcctcagatattttgctgctgcctcatgagatatc

SEQ ID NO: 57728 - DNA, 369 bp, Glycine max
ctcaagagcctttattataagcatcaacatgccgactttgtggtaattgttgatcatatttcactacaatgcgataaccctaccgctataaatgtcgtctaaaagatacaatatatgcctcccagaaccaagcatcttctaaattaagcgttatatatctaagagatcatgtatctaatggcgattgccgtcttgaatttgttgatagtgatatgttcttctttattagaaatgagcttggaattctacattaggttagcattgaaagacgtcgagctatggtgagaacatctagatatgtgctctttgaatccgttagtttccgccttgatttccaatgtatgccaacacgtttaccaaagtctcaaa

SEQ ID NO: 57729 - DNA, 419 bp, Glycine max
acataagtataacctacgaagatctacgactcccccatgtggagtcgctctccatcccctcttcagccgaagcttaattggaaggcacattcttcacgctatctccatagtttaaattgagcctcacaaccatcccaataaaatacctggaagaagtataacacccattaacaacatctcagcttgaaggaatatctaacaagagaagactcgacaacatagtgcagatgacaacttaaacgtcaataatattggtgctacgtacatataataaaacaaattcatgagaagttgcacctataataaacctaactcctaaacctcttaatgagctctaatcaataacaacctcgcagcataattgtcctctatcctctatacacaacaaatgacccaccccaactacaaatctaacctcc

SEQ ID NO: 57730 - DNA, 358 bp, Glycine max
taaactggtgggaatcgaaagatttttattggccatgccctttgtactgataaaataaaaaattgaaattattggggaactgacaagggacattttaacttttatctatagggatagaaggatgaacgtgtttactatgttcgcgtgagtgctttgcttagagaatcttaaaccctttggtcattggaccatactaattgcttggtaatttcttacgggacaaagagaaggcaagctgaagcttctcgtattatagagaaatatcctgcataaatacctgtaaaatgcctctggttaagaacccgggggagatatttaatttattcttttaacactctcggtcatatattgcatctgc

SEQ ID NO: 57731 - DNA, 475 bp, Glycine max
  unsure (1)..(475): unsure at all n locations
cacctgaggcatgcaagcttggagccatcgtctccatgctgcatctgattatgaagttcctcaccctgacggnggagattgtaatcgttaagtcaaatttagcaagcatgacagtgctatgcagaaagcttaaaggttgcaccttatcctcaccccacagtggctgaaggtactcaagtcataagtgtggacaaagagcctcaaacccgagccctgaccatttaccagataagcctggatgacaaattcaatataggtttgtgtgacgacacttctgatagaggcccaaagcctattgaagagctcatcaagttgtagctcgagcccaaacccaggcagtgtatgctgctcagtagggacctcaccagccatgagcacaagcgcatcactaatgtcctacacagaaacacagacctgctcgcttgatattcatctaacatgccagggatccaccctagcattatcttccacaagc

SEQ ID NO: 57732 - DNA, 427 bp, Glycine max
tcttgacttcaagtttcatagattagcttttatctttttgtggttattccatctaacgacactcaccaatattctagagtagatcaatatatacacacacatacataactactgatatttagtttcttctttgacacaatcttaacgtgaataaaactgcaggaggtacaatgctagagatagtcaaaagttgcataggtaccaaattcactagtcaatttggggatttagttgctataagtaccctctactccatgggcaagatttttaaatttcaaatttggctttggtcttttatctttattctaagttgtgaaaattcattgcatgaggctcccacctacttggggttggggaagatggatgtacacaaccttaccctatataaataggcccaattcttttagtggttgaaagaatatgtatg

SEQ ID NO: 57733 - DNA, 320 bp, Glycine max
gactttttatacctccccgaaaatttaactgacgtgacctgctattttttattcagtgaataataagtcctaatgaccgactgccgcgtggactttactactgtgtatgtccactgcatatgacattactgaattacttgcactcattcttatattgttaactgtactttttgaaatatccctttgtgctcgcgagctgtcaattactacacagctcccttctgataaataccgtacgtttactcaaatgctaattattctacagaattcgccgaattatttctaattcaaaatgccgagatttggatttccttctcttg

SEQ ID NO: 57734 - DNA, 426 bp, Glycine max
tacccagcttgcgagcggcaggcgacaagagagcgggttctttcttttcacataaagcaccagaaggctaagagagtaattatgcggtgaattacgcgaaagcttgtatctctctttctcttaaacgaaagagaaacctataagaattaacacccgagattatgatatatcaacaaacagtgtaagcactaggcaccatgaagttcgcttgatatttattcaacgttgttgatctcttcttctcttcgtcgtaacatttttattctctttttttaagagaagagagaaatacatttaggtaacactcctttttttactagaaaaaacatgaggtgaaacttcattaatcaaaaccacagtgcgtatacacagatgccccaaacttagatgagaccctattgattcacaattgctctctattcgaag

SEQ ID NO: 57735 - DNA, 377 bp, Glycine max
  unsure (1)..(377): unsure at all n locations
atcctggtgatcggactctcaaccacttatgatagccgacgatgatcccattactgcttcccctaagctctctgtcctgttctttacgcacgcatctctatgccgttgcggaactatctatgaagtacaccctcgatgtcgtgtgacactatcaatccctgtgctgatgtaatggcggtgatgcntctctactataggacttcctgtcatgggcgacccaagctgtcttatggtgagaacgggattataattaatacaaccccttgctcacatcaatggaacatttggacatcctttgcatgaagatagaatgttgactcttcttccttctgcgagggaacctaataacagacgccctcccatgctagccatgagtt

SEQ ID NO: 57736 - DNA, 416 bp, Glycine max
  unsure (1)..(416): unsure at all n locations
agcttaagaacttcctctcactcactcactcactctccctcgncgctgctcactcactctccctcgctcgccgctcactcattctccctcgcttgctccaggtactataatgcctctttctcttccttccatcacatacttctagcagattaactcttctccatgggctagggtttagtttcactttgttattgtaaacttttaggttaataacttctattgcatcgagaagttctctgattttccacaacttgngaggttcactcttcgcactgagggtaagagttagaacatatttcgtgtgaatgtgtctccaatattaatatatgtttcagcggtatgatntattctatcttgcangaaanactgttgccatggaaaaagccactggtctatgaatttgtaacaactttgac

SEQ ID NO: 57737 - DNA, 401 bp, Glycine max
  unsure (1)..(401): unsure at all n locations
ttctaagacgggtntctacataaccatcttagtatgatggttctgtagcaaggtttctacatcgattagtcaaataaccgccttagtatctctaccattctaaatgataaaagaaatggttcatccatgcagagcaatggttcatctgaggaaatgacatcagcccccaactgcaataactcttaaaacaatgataaaagagtcaaattatactcaaggagaggacaacacccttgaagttttatatccaaatcaactctaagctatttaacaagtaaatcataaatatttcatgttagttgcaattcttcagctttcaatcatgttgaagacttcaaaatgaaatggaaaagcctatgttggctatataagaaaaatgctaataataccgacctcatgtc

SEQ ID NO: 57738 - DNA, 317 bp, Glycine max
ttgtgatgggtcagggaatgttatgaacgggagacacaactcaacacaatatgcagaatgagatgatgtatataaaccagagcatgatgtagagcctaacatggtagaatgccgacagccaaacagggaaattaacaatccttattaccttaatgacgtctgtcatgacagtagtggagtgagtattgctgacctgacttgaggtagagctcacgcaacgattcccctgttggttgaggagtacaatgcccgtaggatctgcatatgaattctggtaattattgcctttactccacgcaccatgccacagcactatt

SEQ ID NO: 57739 - DNA, 300 bp, Glycine max
  unsure (1)..(300): unsure at all n locations
aactcagctncccgattaggcttcgccttatttggattttgntggttccaaaagaggcaaattcgatcatcctactaagacgactgccaaatctggggcaaatataaagggtgaggattatggagaaaccaatgttgtgactggcatttctgttcggccatggttcccaccaacccatcaatattcctactcatcctataacatactttttccttacccaccacctagttatccacttaggtcatccctagatctaccacaaagtctgtctaccgcacttccaatgacgaacacctcctt

SEQ ID NO: 57740 - DNA, 444 bp, Glycine max
agcttcacaacaacttcatagtctatttcaccatgtttggcaatttcttcattagattttttgttcagcaatcatttgtagaaaaaatcaacatatccataagaatacatgaatgagaaaaggtcagtgcttctatatttattacatttgaatttatctaatataaagaaatgatctgtctaataaaataataaaaatattccaaatcttagaaagcatatacaaaattgatcttcgactttacaaattatgaaatagtagctctttcaatttctaaacaatatgatccataacataattcgcaagttcatttttcacattagaaacaattcaacaagtgaaagtaaagtcacaatctgatagcggaagggatgtgatacgtatttaacatatgggcttgccttctcatatttttatttaatatgcatagccatgtctataaca

SEQ ID NO: 57741 - DNA, 420 bp, Glycine max
  unsure (1)..(420): unsure at all n locations
tgctatttaaaaaaaaagtgggcttcattntctataataatttaattngaagtaaagggagtatcgttggcttcattcctcacctaccaaatagaaactactgtctctctgacaaaatcatggcctcatgggccataatatgaagggaattcgaaaattaccagattccatacctcattgattaccggaagaccattgattctataacttacaagagcctccagagttgtaatccaaaaaatatataaataaagtaaatcacatgatttaaaactatatagaacattgagttaccttcatcaacggtaatggtggttttgacaacatgcgaatcttgcttctttgtcatgaaatcagcaacggtgtaagttccatatagtagcaatgacgcaaaaatgcaaacacataataaaaagaatc

SEQ ID NO: 57742 - DNA, 431 bp, Glycine max
  unsure (1)..(431): unsure at all n locations
tcacctgcggcatgcaagcttagactttttacacattgttgccacattcaagctctnggaatcgaataccaagcagtgtcattgattaccataagacaattgtgaataatagcttttaaaaaaggatgttgaatttgaattttgaacctggaatcaattaccagatgtttgtaatcgattaccagcaacgacacttcagaaaacactttgaaaagtcatgacccttcaaatataactgtgtaatcgattaccaaacaccttaattgattatcagtgaagaatttcagacaaagctatttgaaaagacacatctcttacaccattttgagaggcacaatgggccatatatatgtatgctaactcgagagcagagagagaattccanagaactaattgtaaaacttttcaacacttaggcaacattgaaatta

SEQ ID NO: 57743 - DNA, 392 bp, Glycine max
tgagatgaggaagtgttgtagggtgaaactttctgcttttattggtgaccacagagtggtacctggagatatgtcgcgggggtcatgagaccttggggacgtcaggtggggtgctattgcccaaaaccaagcttgaccaatcccgacccaacccgggcataggcggtcagtgagaacctgtgatgtacctaagcaggcgagctcctggcagtcaacagataaaaggaaaacaagaccactaagcaaggaggcttgtggtggctggccagctgtgaattttgtgtaatatgtggattgtggcctctggtaatcgattactaagggtgggtaatcgattacaaggcttaaaatttgagacaggaggctaagatggtctctggtaatcgattacc

SEQ ID NO: 57744 - DNA, 468 bp, Glycine max
  unsure (1)..(468): unsure at all n locations
acctctaagcaccgcagctgcagcttttgtttcctctatttntgcaatttatgtggaaaattgttcatactaccatcttatcttatggcaatcaacacagcatcatgatatttttgagttaaaaatatcccatctactngtacaattgactngcaatatctaaagccttcaatgcatgggttataaacccaaaatacacgtttaagaatcatcctataagattcatcctcaccatcctctattaaagatgaagatttgtactttactattgtacttggtacaaagcgttgagcagttgctaaccatacaggcaaataattgtatgattgttcccaactttcatatgtcaagggctttttgtctagttatccatgctctttagaatgaaacaatataatcaaaccgttgtagtatatctgcaatcaacgttttgatctctatactaggattcgtgttcacccaatgaac

SEQ ID NO: 57745 - DNA, 384 bp, Glycine max
ggacacaagaaactcagcttgtgagtctcgattttccattgaagtatatcatagcgttcatatggcattatgccggctgcgagcttatcctgattaacacgatctttgagacgattgccttcatctatgccaacatcggaagaattcataggaccaaagcacatcgttatttcatggaatcatccaatactataggagaatgtaaattattgatagccaaaataagcttctggtttcaaaacgatagagcaatcagtaagctcattgcctaacctaatttaaatttctctaattaggaaacaatgttggatggaggaggctccctttatgtacgaccaaatcatgggacttttaccttaagggtgtaattttttttgttcgact

SEQ ID NO: 57746 - DNA, 390 bp, Glycine max
  unsure (1)..(390): unsure at all n locations
agctngtaagttctaacctacctgttctgacctcttatccacaagcattggtaggatccctgtatctgaggtattattcgcttaggtactcgatgatcatcatgatnttgtccttgtaaaaggtgtcttggtgggttaagaggaaaatgtgtttataaataagagtacctaagcgagagtggcaggggttatttatagacatcatgtcctctcaacccatngagacatcntttacaaggaaaaaatcgtgatggttattaagtacctaaacggataatacctcagatatggtgaccctaatgatgcctgtggatntgaggtcgaaacattgtngttagaaggagagcctaagtcactattgcctctagactcaactggnggaccatgttc

SEQ ID NO: 57747 - DNA, 365 bp, Glycine max
  unsure (1)..(365): unsure at all n locations
agcactcatgagtggtaagttgaggtctaagttgattggttctttngntgntactaatggttttccttatggtacagttgagatcaaaagcgactccataaacaagagcttcaaggtcaatggacaccgacttaagccattcctcacaaacccttctttagtggacgtagtggtggaaaagacttccttactccaccctactcttcctccaccatgacttagggaggtttccttttcctatctccttctttgcttttattacacttgtccgattctatttgatggtttaattgcttttaatcttttaattgtgctacattgaggacaatgtgttgtttaagtaggggggggaaggttttcccctc

SEQ ID NO: 57748 - DNA, 493 bp, Glycine max
  unsure (1)..(493): unsure at all n locations
acctgcggcatgcaagcttctcggctcatgctgngaacgcctctagtattacactcgtgcttcctaaggcacccacccagagggaagctcctcaagttccaactccgaacacggctcgaccggccggcaattccaacacgacaaggaacttccctccaaggccattgccggaattcaccccgctcccgatgacgtacgaagatcttctaccatccctcatcgccaatcatttggccgtggtaactcccggaagggtcctcgaaccccctttcccgaagtggtatgaccctaatgcaacttgcaagtaccatgggggtgccccggtgcattccgtcgaataatgcttggcccttaaatacaaggtccaacatctaatggatgccggatggctgactctccaagaggatcggcccaatgtgaggaccaacccgctctgcaatcatggaggggaagcagntaatgcagttgaatccgatagggcccacaggtccaa

SEQ ID NO: 57749 - DNA, 417 bp, Glycine max
tgcttcgaggtacttacccgttgaagatcgaatatcgatgtataacgaacgaagaacgtcgaagaacggtcgaaaaccttcgcgaaattcctcacggaaaacattacggaaacgtttcggaagcgcctcggcttagattttcttcacggaaacaatttttccaagcaaattcgaaagagagagaagtgcctaaggggctgaacccttttccttctcacttcctcccctatttatagcaaaataggggagatgcttgccgcccagctcgcccaggcgagcaggattgcttcctccagaagcaacagccttctggaggaatcttctggagggcccaagtgggcctggttgctatttgcacccccatttttactaagtacacctcctctgcttttttttggtgattcttttttttggaaa

SEQ ID NO: 57750 - DNA, 501 bp, Glycine max
ctgaggcatgcaagctttcttgaaaagattcctaaagaagctagagcttatctacactttcctctctaatagctgagctcacctccttgagatgagaagctagaacttatctacacaccccctataatagctaagctcacccccatgacaaaatacatgaatatacaaaagaagtccctactacaaagactactcaaaatacaaggctaataccctatactactagaatggccaaaatacaaggcctatacgaaggaaaaaacctattctaatatttacaaagataagcgggctcatacttagcccatgggctcaaaatctaccctaaggctcatgagaaccctaaggccttcccttggatctctggtccaatctacttggagttctttatccaatgccctcgcgggataggattgcatcagattccccatagacaaagatttgtaaaagcatggacaaataatgtgatgaatgtttgacacacaataactaacacgtatg

SEQ ID NO: 57751 - DNA, 437 bp, Glycine max
  unsure (1)..(437): unsure at all n locations
aactcaagcttgagaatatannggaatatgactaagatngtcttgctttttatgtngattatatcatcccttaatgttttcaatggaatattccttgatgatatattcatttgtgatgggctagaaatcctaatgttattgttgctgctaagaaatttgggttgaaagcaaccattctagggtagttagatactgagcaaccattaagaaatttgcggcttcttaatctgtatccacatgaaacacggatgtgctaaggttattggtagagcaacatcccctataagacctgccaaactttggtagaatggcatgtggtaaaaactttaattacatggcagatataatgtgcagattgtaatctggtactcctgtctgcttaaaacaaagcatattctatcacttatcatattcaatacctagaaaatctagtactc

SEQ ID NO: 57752 - DNA, 480 bp, Glycine max
  unsure (1)..(480): unsure at all n locations
agcttcctcgtggcttctntgagaagctntctccttatgcttctttgagaagctagatccttatctatccacacccctctattatataattaacctccttanaaataattacgggtaaaaataacacaataaataatcaaacatcaaacataattactaatattntatatatatatatatatcagggagttacaactctcccacccttttagaaatttcgtcctcgaaatttaccttactcaaacaaggatgggtgagcttctcgcatctgactntctaattcccacgtggcatcttctcctgatgcacctccccaaatcaccttgaccaacagaatctctttccctcttaggtgttttgttcgcctatcctcgatcctcanaggcaatgtttcatatgtcaaattctccttcacttgtacatcatccaattcaatcacatgggatggatcacagataccacttacggagtgagacacat

SEQ ID NO: 57753 - DNA, 429 bp, Glycine max
cttgacacatctttttattatagtacaatgcatttacatcttaaggtgataaacaaagtaagatataacattaaagggttacaattgtatttttaatgatcataaatttgaactacatctaccaattcatacaatgtaactgtagaagcaagtttcatgatgatgaaccaagcaattttgatgatgccaaaagcccaagtgattgattcaagacttcaagatcaagcatcaagaatccaatccaagattcaaaattcaagagaagaaatcacgaagcaacaaatcaagatttcataaaggataagtattaaaagaatttttcaaaaaccaaatagcacagttttgttttacaaaagaattttctcaaattttctaagttaccagagtgattactctctggtaatcgattaccagttattagtaatcgat

SEQ ID NO: 57754 - DNA, 379 bp, Glycine max
  unsure (1)..(379): unsure at all n locations
aacccagcngcttatgttcaattaagggataggaacttcttacttttagcgcctctaaagaaagaaaatgataatagggaaacatattcaataccatactacattatgatacttaattttgatttgtaacagtaccacatgggaaatgcctacctggatctatgattcctgttggaatagatatttataagattaccgaaaatgcccatgtgatatacgacaacatattctggcggaagcgcaaccattccatgggaccgtcaatattgaactttggccgataatacccataattatgtttatatttgattcctgaaatcttgactgctgacaaaacttttacggttgaacaccaaaattgtttagctaaatgttatga

SEQ ID NO: 57755 - DNA, 470 bp, Glycine max
agctctcctgagatcaaaacatttactatatatttgcaacgatacaaaacatattgaaacaatattgaaaaattattctacatttttataactagaaagttaaaataaataacatataacacttttaaaggttgcaacaagaagttatttaaacatttactttagtccatttcttatattgagttagccttgaagcacaaatttacatgtttgaatcataccacaatataaggttggttacgaagagggagattaaaggtgagagaatcgagggaggaagagatgacgagttcaaattctttttattaacatttttaataaaactaataaactattatctgacgacaaaagtacatgtatgaatcttataactttgtaggtatatgataattcctttcaatctcttatattaaattgacaatattacataatgatattatcacaatcagcatatacatcttagtagaatg

SEQ ID NO: 57756 - DNA, 288 bp, Glycine max
  unsure (1)..(288): unsure at all n locations
ataacangncacacggaagcccgattcatgctcataccttattgagacgctcgaaaatggacaacgaatgctctcgcgaaatctatgtggccttaacatgccccacagatgcgcgattcacgtgcattatttatcgagacactcgcaattgaacaacctaagctctcgagaaactcacatgggcatccctctccaacagcagtctgattcagccacatactctatcgagaagctcgaaattgcacaacggatgctctcgggagacaaatttgggcaccacttatccca

SEQ ID NO: 57757 - DNA, 342 bp, Glycine max
  unsure (1)..(342): unsure at all n locations
agctntgacttagttttagcttattatgatcaatttatcattgttttatgcctacatngaagtaaatgactggcaaagacatacaggtcattgtatatatgtacaaacacgtagaaggactacttagtaattaccttcaactcctttattatttttctttttcgctcaggggttgacgcttgattgtaaatcgctaattactgggatactgaaaaataaagtaattgttagactaatatttaaaaagattggataccctaaaacttgaggaacccttggttataaatgatggatcactatgcactgtgtataaatataaactgactagtaactcagttgatt

SEQ ID NO: 57758 - DNA, 405 bp, Glycine max
  unsure (1)..(405): unsure at all n locations
actcagcttacactgtcgcagcttcttccatttggttatttattnattctttngctttctcttatttattcaattccatctgcacagaggcgtagactcaagtgtcctagactcctagccctttggtttttaatcgtgtcgaataaggtggtgtttgattcagtggcataagactttgttgttgtattaagcacctaattagtagtgtctgacaagtgtaaatgtgtccaacattgggaagaagtgtcagtgctcatatcataggttgcaagattttcattatcaaattctgctagtccaatttgaaaattgtgataaagcaaaggttctaatcattataatctgaattctgaatcatcatctggtcttgtctttatcgtgatgtacttgctttacttcaggctt

SEQ ID NO: 57759 - DNA, 210 bp, Glycine max
ttctttgtcgtcagattggtcttatacttttttataggtctcgcagcttatcctatagattctgacacatatccgtcataactactaaatcatgcgaccaatcatcttttaggatatattactgctcttctatatacgcccgccttgccatctctcatcactgatcatatcatattctcctacgaatggcattctctaatcgctatcttt

SEQ ID NO: 57760 - DNA, 426 bp, Glycine max
  unsure (1)..(426): unsure at all n locations
agctntacagtatttattctttgttcttgaaaggttctatgtgggtccaaaaagatgcatattgatcatcctactacgacgactgtaaaaactggggccaatgaagagggtgagaaagatgggagaaaccccttgttgtgactggcattcctatactgtcaagttttccaccaccccaacaatgtcattactcagccaataatcaaccttcttcttactcaccgttcagttatcctcacaggtcattcctaaattaaccacaaagcctgtctaccgcacttccaatgactataaatacctttagcacataccaaaaaacaccaacacagaggaatgttgtagcaatatgcctgcatggtcaccccacattcctttgcatatgctgaactcgatctcattccactcaatatttcaatgtagccataa

SEQ ID NO: 57761 - DNA, 419 bp, Glycine max
  unsure (1)..(419): unsure at all n locations
gcttgtaagattatggtttacccattatatgcggttctaggtggcggncgggcgatggtgcacaacaagttttccacatccacaatgcgcgcataaacccaccatcccctgttgtccacctccaactgaactcacgtactcccacgtagcccatatcctcgtttatctccacccgggtccccatcaatgctaccaagcttccacaacatccaagcaaaacaacattcaaacagcacaagctatcacagccaagcaaaacagagcaaaggcagaaaactctgctcaacacatcaaccaaaatcacagcttttttctcttaaggaccacagtaacaattccttcgatccaattcgttaaccgttggatcgactctaaaattttactggaagtctataatgcataagcctacattgcgaccc

SEQ ID NO: 57762 - DNA, 444 bp, Glycine max
  unsure (1)..(444): unsure at all n locations
agctngngaaacanatgctntggtgaatagtaaattatcatcaacttataaataaatgggataccttanggacccaattagatatagacacagtttcccactggttagatngaactttgtcttgaataaacaacgctagcttttccatgcaaagaacaaaatgataaggagacataggatctccttgtctgcaggctccttgtaggagaanaccttttccaaaatttcattattccacttaagagaaagagaagaagtggttgtgcagctcgtaatcaaaccaataatnttagaaggaaagccaaattcagtcaaagtgagttttagaaattcccagttcacccaatcataagctntctcgaaatcaatcttatataagagaataattagtttatcctttttattatgcatatgatgagcaatctcctaagcaataattacagt

SEQ ID NO: 57763 - DNA, 418 bp, Glycine max
  unsure (1)..(418): unsure at all n locations
tctcactggctgtccccaataaaaaagaagatttggtatatttggagctttgctgcatggntgaggtagaaactttagattctctagattaaaaatggcagatgttggtaatataaacggaaggtaccactgtttgattgaagaataagcctgctatatgtaatgttggtataagatgtcttacaccccgcaagagcttctccaatgggtgaaatttaagcaacccattttgagttctttaccttatgttatttggttcctacaataccacatcatggttaagcaactcatatattttgcatttttgctccaatagtataattttaagtaactcttagattatcaccttagatgatcaataaatgacagaaaaatattcttttactcataagcaatggaggcttaattttagccacct

SEQ ID NO: 57764 - DNA, 484 bp, Glycine max
  unsure (1)..(484): unsure at all n locations
tgcaagctatgaacttgttattcatcaaggcgancgctcttgttggnncatgtcattccgcactacanaaggcgacactgctctcattgggcagtggggaagcaccccttctggacattattgcgtatgctgtgtatactttcaccggcatatgtctagctgttcttggaagaataatattgtgctactcctactactttctgatgccgtggacctgtttatgcatgggagttttcttgtgtgaaacaatgaagagaagtccttttgcagaggtcaggagttatgactcaagcatacaccactatctcttgctctttattgctatgattcagctcccattgttcacatggctttgctacattaccatcaattggcttatgtagggtgatagttttacacttgtctagaagcaatctctagtgaattttttggttgttgatgagagcattgtacatatggcgtgttatttccactgttatatctg

SEQ ID NO: 57765 - DNA, 472 bp, Glycine max
  unsure (1)..(472): unsure at all n locations
ctgcggcatgcaagctanagtatgcccgagtcattcatccctatgttatgttgntattgtttggcgatcagaattgccattccttggattatagggttgaaccaagctcatgcttttacaaaaagggtcatcaagtcaagttgaaatatggaagtaaccgtcttgcaaaattggggcaaaagatgaatcgagtcacatcactgcttcgtctactgccanacatatntaggattgttgatgtccttgttacttccagtttcaccttgacaaaatggatcatgttgaaaatctatattgattcaaccccatatcctgcgtaaaaattcgcaatacttcaactgtacatcattcgcatgcatctcatgctttcattggttgcattgctcattgcattcttttcttgaaaaataaataaaatgaacttaaatcattggtatcaaaaagaaaaggacacgctttacggcacccttac

SEQ ID NO: 57766 - DNA, 426 bp, Glycine max
tcgcggattggtctttgccagtgaaaggatctatgtgggtctgaaaaaaggcaaatttagtcatcctgcttggacgaatgagaaaactggggcaaatgaagagggtgaggatgaagtagaagcccatgctgtgactgccattcctatatggccaagtttcccaccaacccaacaatgtcattactcagccaataacaacctttctcattacccaccacccgatcatccacaaaggtcatccctaaaatcaaccacaaagcctacctaccgcacttccaatgacaaacaccacctttagcataaaccaaaacaccaaccaagaaatgaattttgcagcgagaaagccttagaattcaccccaattccagtggtctatgcgaacttgctcccatatctacttgataattcaaatggtagccataaccc

SEQ ID NO: 57767 - DNA, 461 bp, Glycine max
  unsure (1)..(461): unsure at all n locations
acctgcggcatgcatgctntctccacaaatatcagctaagaaccggggtttggtccaactttttatacggtcctctntgcttatatcggttaacatggaccattcaaaagcataaaatcaagatgtaactttaccgcattcgcgagaactacgtaggtctgattttctcttcgatggaggatacataggagcaaaagccccgcttttgtcgacctcgtgagatggttagaggaacaatgccttagctttcttatcaagtaaaatggatcattttaaggtccaacgccttacatgaccaccttccaagtaaaaagaatcacttgattcgcccctttngaaagaactacgtatgtatgatttcctcttcgatagagggtacgtaggagcaagagccccgcttttgtcgacctcataaataagaaacgaaataaaagtntagatacattatttcacacaattct

SEQ ID NO: 57768 - DNA, 421 bp, Glycine max
  unsure (1)..(421): unsure at all n locations
gctgcttctacaggaaggcaagaaggaggccctctngacttctataaatgtcttgacccctcatggtcatggttttctttgtggggcattgagaggcaatgtgacctctcccaagacatttgaagcatttaatgttgctagtcctttcttggaaactagtcttaggggtgtatttctctatggtcttaaccttatcttccttgggtattgaaggtgcagcccccaaaattccatgggcttggtccttccttggattagagtgagagtcataagattttgaagaaggctttctttgaagttgttgctccactcttatattaaggtggactagctcatctaggtccttatatggaaggagttcaacctttgtccttacttccatattaagccactaatgaacctactatgctggtctttctct

SEQ ID NO: 57769 - DNA, 199 bp, Glycine max
aaaaacggtcaagggctacaattaatgccataaccaaaacagaccctctttggtgctatcaaaccattcttacatgagcggtattttttatcatgagtaagaattagaacaaccaatctacgtactttacaccacaaatcaaattagatcgccttaattttatacaccatgatgtaaatatggtcactctttaaaacaa

SEQ ID NO: 57770 - DNA, 426 bp, Glycine max
  unsure (1)..(426): unsure at all n locations
atacatacggctcctatttttaatggagtgggctaccattactagaaaacccgtatgcaaatttttacagaggcaatagaattaaatgttcgggatgcaatagaagtagggccttatattcccaccatggttgctgggaatacaacantagaaaagcctatggaaagattggagtgaggaaaaaagaagactatttcaatacaacttagaagccaataacataattacatctgccctaggaatggatgaatactntatggtatcaaactggaaaagtgcaaaggatatgtgggataccctacaagtaacacatgaaggcacanaaaatggttaaagatctangataaacacattaactcatgaatatgaactatctacgatgactgcaaatgatagtatacaatacatgcanaagaggttccacac

SEQ ID NO: 57771 - DNA, 415 bp, Glycine max
  unsure (1)..(415): unsure at all n locations
ntcactttcataagtcatatacattccgaggttcaacaaatgtggcatatacattccaacaaaaaaagaaaacaaacaaaatatgcagttacaaaagtaatttaaacaaatttaaacacttctccttgctttaggaactgcaaactccaattcttagccttaagaattcaaatttgttgataggcagtggctttgtaaacatgtcagccagttgatctttagacttgctgtaaattaagttcacttctccactttgttgcatctctctcaaaaaatagagcttgatgttgacatgtttagtctttccatgacacactggattgtttgcaatagcaatggctgcctggttgtcaacaaaaattctatttttgttcttctgctgcaaaagtaaatcacatagaatcttcttcaacca

SEQ ID NO: 57772 - DNA, 471 bp, Glycine max
  unsure (1)..(471): unsure at all n locations
gcatgcgagcttagcgagacaacactctgttatccttcatatatatctcctanccaggcttagtgaagtttacactatattcaatatgaacggctctactgagcacaaatgaaaactaaactagaaatatttaccatcctaccaaagaataaccataaattgtgagatttatttacattgtagagacttttctatacaaaaattactcgtagaagatgactaacacactcccgcaaatttatatgtttgctcgtcctcaagcaaagaaagaacatattacttatcctcaagtgacaagctcatagtgcttattaaaaaacaatgcttgttccacagatttcaatcacacgacattaatggcagtcaatgcttcaatcaacagcttctcacaagatatgcaacttttcatagatgtgaacattgatattaatgaacacaacttgaataacctattaagagtgacatatatca

SEQ ID NO: 57773 - DNA, 395 bp, Glycine max
tctactgatgtggcagggcgggctttctacatttttcctgccccaacgcgagcactgaccactgtacatccttcccgcgatgcctctattcatgtacgcctgagagggcttatagcctaaaccatacctcccacgacttccatggggttataaaggccaaatatgccggcatagtcttagcctaacccatcccgggatcataaccggtcccaacataactcgggccatcactaccgctgcatcggacagacaagggtgcccaaagagggagcccacggaggaaatgctgaccacctcaaaagactagcaagcgggtactaacgaatcttctgcggcttacacataaagcatggaggatggccagcttacccagaaatcttgctcgcctgacacga

SEQ ID NO: 57774 - DNA, 414 bp, Glycine max
  unsure (1)..(414): unsure at all n locations
tactcttctgataactacatgttcttcactatttccatgttngcatataaggatgatttgtgattgtcaacagctctcatgaatagcatatgatatgtgcttcatatgtcacatatgatacatatccaatgcaatgatactattgctctaaaaatatataacacatgatgcttgtgaaactcataaaacatgatgaatatataattgcaattctacaaatctaaactaagaacactatcttgaacattactaaagtaataaatcacttgctgttgtctataaacaataatagctcgaaccctagcccctttcttgaaagcatctataaagggcacaactctcccttttaatagtcatgctacgttgcttctatactttataacatacaacttttatatctatatgagctgtatt

SEQ ID NO: 57775 - DNA, 339 bp, Glycine max
  unsure (1)..(339): unsure at all n locations
agcttctctccaagtaacatgtagacttcttacctatgcttngncttgaaagaaattgaagcacacatttcatgtgtaacatcaaacttcatatttcaactganaatggtataaccttttaaagcacaccaattgactnttcattcttacctctcttttgcctctttaaaacggtcaaaactacaaattgttacaataaacacatgtaaaatatagatggacaaagaaacactaagctaacctctcagcacaacaaatacactctatagccaagtaaagaaaataaaatgaaggctaagtttgtctgacatgtactgcggaggagaaaaattacatgaa

SEQ ID NO: 57776 - DNA, 413 bp, Glycine max
  unsure (1)..(413): unsure at all n locations
tggtacttctactgtagctgagtttctacccttctcctgtcctgacatagaatctctagtgcagctgaaggatgctatagggttcttgatccttcagattcagnctttgnttcttgtttgttctttttcttggatttatctctcattaaaaaaatatcaatgaaaaatatgatggattaactggttttcctttttctggtatcggagaaaagataatgattttcattggtctcattattcagtatttggatttgtacattttttattgggtattatctattcattcattatattagtaaattttagttttttttaaataacaatatttgatgcaaaaataaaataaaatgattagaactaaaggtattaattaataattattaattcatttcatcattataantatttgtagt

SEQ ID NO: 57777 - DNA, 337 bp, Glycine max
gcaccagtcttaatagattaagttgattcttcgacccctcactgcttcgactcttcctttataagattctagatattgtgtgccgctttcatctgcattattccgtcgtaaatgactggagaacagacgtgacaacattgattggctttggactttcaaccctcctttcttgtgactttcatctggcaacaatggattatttggaaaggaggaacctcgtagtactcttctactgtttccatacatcgtagcataagatatgctcccatctgacccccacatgtgaatgttagtccattaaatcacggacaaaatggagtaaggaggtttagatcca

SEQ ID NO: 57778 - DNA, 233 bp, Glycine max
  unsure (1)..(233): unsure at all n locations
tgaaacttttctgcttgatagctgaccacagagtggnacctggatatatgtcgcgagggtaatgacatcttgggacgactatgggagtgtctatgctcaaaaccaagcttgaccaatcccgacccaacctcggcatatgtcgtcatngagaatctgtgatgttcctaagcatgtgagctcctggtattcaaccgataaaaggaatacaataccttcatgctttgaggcttgtg

SEQ ID NO: 57779 - DNA, 334 bp, Glycine max
  unsure (1)..(334): unsure at all n locations
tcttaggtacagatgtcgcacattgtncgtttttaccccangcacttcctctaatgactatggctttatttctggcgctaaactgctgtgaggtggatgccatcttctcaattaaatctctggcttcagcaagaagtatgtctccaagggcttcaccactggcagcatctattatacttctctccataatactgagtccttccataaaaatattggagaagaagctgttctgaaatctgatggcgggggcaactggcccataggttcttaaaatactcccagtactcatacaggctttctccactgagatgtcttaaaccaaagatacccttcc

SEQ ID NO: 57780 - DNA, 483 bp, Glycine max
  unsure (1)..(483): unsure at all n locations
acctgcacgcactgcaagcttgtggatnntagttttgccggagaaaggatctaattaattctgannagaggtttatntgatcatcccactntgacaaataanaagcctagggcaaatagagaggaccagaaggaggaaggaacccatgctataactgctattcctacatggccgaatttcccaccaacttaacaatgtcattactcagccaatatcagctcttctcattacccaccacccaatcatccacaatggccacccaaaatcagtcacaaaacaccacccttaacacanaccataacaccaaccagggaaggagatttccagcataaatcttgtagaattcaccccaattccggtgtcatatgctaacttgctcccatatctactcaataatgcaagggtagccataaccccagccaaggttcctcaacctnctatttttcgaggatacaacccgaatgctacatgtgcttatcatgg

SEQ ID NO: 57781 - DNA, 421 bp, Glycine max
  unsure (1)..(421): unsure at all n locations
tagagctgctntgctgaacatcacgttttgttttgggatattataagctagtacctacaagcaaatccacaaatgtaatgctacttacctgatcatcatcataactttaagcagttaagcttaaaatttgaataaaaagaaagatgtaaaggagttagctgcaacaaatcaaatcaatctattatatcaacctttgtccatgattatggcttcaaggtcaaattaggtaggctcccattgtattcctcgtttttaaatgtcagtggacctgcaactccaccaaaataattacaatgtataagcaaactatttgcttattattatcatacggagtataatgttatcccgctaagtgactatataagttacatattttttttccttagtatgcataaaaattatggcctgtgtgatgattatc

SEQ ID NO: 57782 - DNA, 421 bp, Glycine max
  unsure (1)..(421): unsure at all n locations
ggcaatattccttggcacccttaatcatgttcaatttgttggtaagtttaggtcttttaatccaaaataggagacttggttaccatgtgagagtaatttggataaatgaaaatagttttggatgttatatgcatgagtatttcaatgcttgcactactacgaaagtgtgttttttatgacaggcgttctacttttgtaattatgtgtctganaaatccttatatgatgcacattctaagactggtattgaaaaccgtcttagaatgtgtgttcctcatataaaattatgacgggttttattaaaatccgtctgtatctcaatcgaattcaaaagcccatataatacgagtccacgtgcangcagcanattaacttctgcgacctctcgagctcttgagctttcacgacctcttgagctttc

SEQ ID NO: 57783 - DNA, 408 bp, Glycine max
  unsure (1)..(408): unsure at all n locations
gaactgaaaagatacaataatgtttttgtttttaacactgaatcaatgagggttattctaccccccattgatagatttctttgcttccattatgcaagtttagcctcccatctgctaataatgggctgccacacagacctatttttagagctgacccctacaggaattccaaggtaagacaatggaatatccatttgactacaattgagagaagatgctgtctccttacaccagtgctcggatttgcccaaacacccaaattttctcttattgtaggttatcttaagaccagagaccaattcaaagcttttcaggatacactttataatctctcccgtatcttctccatatgcaatggccaccttcactattngaaatcaaataaagatcggttggaggtgctttctc

SEQ ID NO: 57784 - DNA, 474 bp, Glycine max
  unsure (1)..(474): unsure at all n locations
ctgcggcatgcaagctggtgtcacaattcattgtgacagtcaaagtgttattcacttattanatcaccatatgtaccatgagaggacaaagcacatacatgtgaagctacacttcatcagagatgtgattgaatttgagaaggtgaaggtggagaaggtttcaacagaataaaacccgactaatatgttcacaaagtccctctctagtgtcaagttcatgcacttcctgnactttttaaattttgaagatgcctaaagcagattggtagaagtgcagccctaaatcacagggtagacgcttgctgatntggagtcaaggtggagatttgtggtgtgtgtctcanaatcacatatggcacaagtgagaaggctctaagaggtgttgtcataactggtttcagttattataactgaattagttntagcaccaaatcatagttacgagttatatatactcttgatcatgaatgcaaa

SEQ ID NO: 57785 - DNA, 429 bp, Glycine max
tcatacaattaatatagaacctatatcctaatgtcacatcttatcagagcgttgcgttcctgtgtcctctaacatgaggttcttcatagtcattcacctattcatctgctccctcgaacacaagttcaagatcatcataggatccaaacacaacaacacgcagggagtgagttatcacattcctaactaatagagaaacaagacaattaaatatacatattatataaatgagataccacttgcttaaacatagctcacgtaacttcaccacttcgtcattcaaaattcacttttcaatcatcaatcacattacacaagaattccacacttcgatcaagatataataacacatcaattagcaagcatatgcaacagttatgctaagacttaatcctatatgcaatgtggtaccatgtcagtgaaaaccac

SEQ ID NO: 57786 - DNA, 397 bp, Glycine max
  unsure (1)..(397): unsure at all n locations
catgcaagctggataacacgcagagactaacatcgtcttcttcgaccttccttattcgcggcagacaagatcgctgataggtggagatttatgtcatcttccgcgctcacaagatctgtcatattgacttttgagtcacgctgacgggcggaaatacccgagtggttttccgcatcaagatttgctgtctgtaagtcgataagcctaattgcacgcagaaacttacgttgtactctgcgcccttcgtgaatcgtggtcgacaagctccgtgacatgcggagatttacgttatcttccgggctcacaagatttgttatactgactttngagtcacgctgacgggcggatatacccgagtggttattcgtataaactctttgtcgctgtagacgaaaag

SEQ ID NO: 57787 - DNA, 402 bp, Glycine max
tttcgtcttacagacagcagaaagtttatactgttaacctttcgggtattttcgcccgtcaccgtgactcataagtcaatatgacagatcttgtgagcgcggaatatgacgtaaatctccgcgtgtcaacgtgtttgtcagccgcgattgaagaagggcacagaagacgacattagtctttgcgtgttatcaggcttttcgtcttacagacagcatatagtttatacggataaccactcgggtatttccgcccgtcagcgtgactcaaaagtcagtatgacagatcttgggagcgcggaagatgacgtacatctccgcatgtcaacggtgttgtcagccgcgattgacgaatggcgcagaagacgaccttagtctttgtgtggtatcaggcttttcgtctta

SEQ ID NO: 57788 - DNA, 382 bp, Glycine max
  unsure (1)..(382): unsure at all n locations
agctngccgtcttggagntntccgactatgctctttgttgtgggaacaagctacaaaaggagagagcaagatatgaagagccaatggttgatacatggacagagatgaaaaagatcatgaggaagcggtntgtgccggctagttactcaagggacttgaaattcaagctccaaaaactaacccaaggcaacaagggggttgaggagtatttcaaggaaatggatgtgctcatgattcaagcaaatattgaagaagatgaggaggtaactatggctcgatttcttaatggtatgactaatgatatccgtgatattgatgagctgcaggagcttgttgaaatggatgatttgctntacaaagcaatccaagtggagcaacaatt

SEQ ID NO: 57789 - DNA, 416 bp, Glycine max
  unsure (1)..(416): unsure at all n locations
tgccgcccagctcgttcatgcgatcaaggttttttcctccagaagcaacaaccttctagaggaatcttctggagggcccaagtgggcctggttgctatttacacccccttttttactaaatgcacccccttatatatttttttgtaattctttttccgtaacgctacgaaactttatgaatttcgtaacgatacttattttcctttccgtaaggttacgaatccttacggatttatgtatttactctttttggctttcaaagaagttacggaaactcacggattgcgcaaaaacacctcttttcgatttccgccacattacggaatttcacggattatgcaagcctgctttcttttggatttctgagacgtctcgngactttatttattgcatgtcatcaagtaataatccccgga

SEQ ID NO: 57790 - DNA, 455 bp, Glycine max
  unsure (1)..(455): unsure at all n locations
agcttctagaaggagatcaactatatgntctatgtcttttgaaggtggcagtccatgaggaatctccttgngatagacatctttaaattcctgcaataagggttgaacactatgagaaacataaatagttaactgattagaattatcactctctctctcttgtgtatcactccatctctcaagtctatcactcttcctttttctattcctttgcggtgccccactattgtctctctctaggtactttttttctctctntctgattgtggtatcacacacttctctgagggatataggtttataaataattttctggtcatggtgctggaaagaaatcttggtagtgaagtcatcatgcactngcttggtgtcctctacaatgttggccctcactagtgccatctccatctccttgcctcaataatcaaacttcttgnataacctctggagttatg

SEQ ID NO: 57791 - DNA, 413 bp, Glycine max
taaaagagcacttataccgagtgtttttaccttatggcctagactccacagaatccgtttaagccacaccttcctgattcaggtcgaacccctaaaacaatttttgcacgcagacattgttcatgaattatataatacccacgaccttacacttatatttcaaacacatttaacatgttgtgctacaggttaacccttcaggatccgaactaggaatcctacatttttcctttaacactgcgcataaaaaaatttctcaaggtaaacacttgtcgggttattgtataactcatagctcacaacacaagtaatatcacatcaagtatttttcacgcactcattcacaaccatatctcatatctacaatttaatatctcatgagtttactaattacaaggtgtacttaacaatta

SEQ ID NO: 57792 - DNA, 491 bp, Glycine max
  unsure (1)..(491): unsure at all n locations
gatcctcagagccacctgcggcatgcaagctcggannaatttggctntaatttccttcttttanccgntccaagtgttntatcacgcacgatgtcttaatctaatcaaaggtgacttctttgttctttcctatatttttcgaaccttgcatgtatataagtgcaataggtcatagttcccaacttcccatgcatatcaacttcaccgggtttctcttggttttgatgttttcttgaagtagtactcttacttcgttcattgtaagttttggtctaatttaaagagtttttgcctttgttaattattggctntgttttttttnttttttattattaatggctaacttggttagtttgcagtgttcatggatgtgtcttaaattatcgggctagcacaggttaacattatatttgacatcttcttcaatatatctcatnntagtcttttttcctcttataactntattatcgtaaaacatatacttataactt

SEQ ID NO: 57793 - DNA, 416 bp, Glycine max
tcaataggagtcttgtcttttacttacttagtttgacatctgttgagtatgtaaacaacagtgtagactgcttcagcccagaatatgttaggtagtcccttttccttgagcatcgatctagccatctccataactgtgcgattctttctctcggacactccattttgttgaggagaatatgcgactgtaagttgtctctcaatgccttcatcctcacaaaatctttcaaactcgcgagaggtgtactctttgctgcgatcacttcttagtacttttatccgttttccactttgattttcagcaagggccttgaactttatgaatactccaaagacttctgatttttcttttagaaaatatacccatgtcattctagagaagtcatcaatgaagagtatgaagtacctattgttccc

SEQ ID NO: 57794 - DNA, 461 bp, Glycine max
  unsure (1)..(461): unsure at all n locations
agctagtgaggttctatgataattgtcttcgtactttattacaaagnttcgccacttaaaacattgggcatggcagttgtgagtctttttgcctaagcaagaatgtgcttagagagttattttggtactggaaggaaagctcttgttgnttttcttacccataaggtttaccaaaaatctttattatgttattgctgaagttattgtcttagttgcttttgatttgaagaacaaggtccggcaaccatatacttttagttttggcctaaattatacaggaggacacgcaaatagntnttaattgttcttccttgagttatatggtttactgatcaaaggctaacaaatatattttatgccttttggccatatattatgatatacgcacaacctaattagctatttaaaaatgcgtaattttgagtttgaagagcaactggacattctgcttgtctatccat

SEQ ID NO: 57795 - DNA, 427 bp, Glycine max
  unsure (1)..(427): unsure at all n locations
cttnaatatatatatatatatatatttatatatttttaaacgacgggcggctcggcgctagtttacttagagagtagcatacatgggagtaattaaatgaaatctaaattaaaaaatataaaaaagaattacataaaaaatataaaaaagaaggaccagagacacgttattccctttttttattcaaagatgggcgaagccaccattcctttcactttcacaattaatcattgttctattattataatcttgcttacgttataataatatgagctgttcttgatacatatatcagctagaaatggaaacattattcactttttttttgtccctccgaacttcaaccaacacatacacccacatatcacaaccttttcattgcgtggatttgttctcgatcttcacctgcccttacttaatctccatc

SEQ ID NO: 57796 - DNA, 356 bp, Glycine max
  unsure (1)..(356): unsure at all n locations
tctctagcccagacgagactccacaggacccgtgatgcacacgccacctgacccacaggctcgatagtggaccttgcatgaaaatggagattacccgctcgcggtgatgcgcacccctgtcgggaggcatactcccttgcccgaaagaaggaagtgctcgcgtgcacgagaccgttgtctccaaaggaaatgagatccttattntaaataacccacatgaccagcagaggagtgataaggttgggccatatgctgctatctacaccgccaccacactaccagcccaacatcttgagaccttaatgaagggaattactgacccgaatgtttccagcatgcatcatacactataatag

SEQ ID NO: 57797 - DNA, 424 bp, Glycine max
  unsure (1)..(424): unsure at all n locations
tcggaagagagggatgagggacattccctatttgcatagctttaaagagcccaagnagtcgaagagaagttcaagtccatatccatcaaagtctgaaaagagtatgatgaactaagggacgtcaatatggccactgctgaagccttggaacgagaaaccaagaaggcccgaatggaagaacacgtgccatcaaagttttgaggggctttatagggcagcaatagtaagctcaagctccgaagaggtgaaaggaatcatcacgggtcaaaggcatgatcttgaaggacgagctaaaggcttaccttatgtcgaaaagaaatttgtcccaacagttcagcgagactgaaaggaatatgtgggccgtcatcgatgagtgcaaagagaagctaattctagtggcgactcacgagcataggctataaga

SEQ ID NO: 57798 - DNA, 393 bp, Glycine max
  unsure (1)..(393): unsure at all n locations
tctgtcttacccctcctcccgttggtgttttaaggaaaaacaccataactaaacgcgccacaacgcatccctatcgcaccagatccaaatctataacgatgggtgatcaagacgagacacatgaacagatgatagccgacatgtctgctctgaaagaacacatggctctcatgatgaaagccatgttagaaatgaggcagctcatggagaacaacgtggtcactgctgccgctgtcagttcggcttgcgaaacatacccaactctcttggaaccgagcaccatcctcccttgtacatataacgagggcgcanggacactctgtggcacgatggcaaccctcatctgggatacaaccgagcggcttatccttatggatggctgaccactactca

SEQ ID NO: 57799 - DNA, 409 bp, Glycine max
  unsure (1)..(409): unsure at all n locations
tgcatctattcacctattttgacttttctatgctgtctctacatacataaaacagccccaccatcccaattttgcacaatcatattcatatatcattggggcatttcaccgagcacttggtgggcgcacgtttagacatgaattgcaagagaatgggagcaatgtggcatgccccattgcttcagaatacaacctaggcctaaggccttttcattcaaattctcaattcaagaaacaagcaccaaagcaaaccaaaactgcctcacaaatataagcatgttctcacaatttaaggcaccaaaagatgaagaaagcacatcaatgggaagcataaacatcaaggacggaatacttacttgtnggagtgaantgaaacacccaaaaacgaaagcgaaatacgatcaaaagt

SEQ ID NO: 57800 - DNA, 344 bp, Glycine max
  unsure (1)..(344): unsure at all n locations
ggcncgggacaagctgtgaacgcctctacanctacacccgngcagcccaaggcacccacccagagggaagctccccaaggtccaactgcgaacacggctcgaccgaccggtgaatccaacacgacaagggaccgacccccaaggccagtgccggaattcaccccgcgcccgaagacggatgaagaacgtctaccatccctcatcgccaatcatgaggccgcgagaactcccggaaggggcctcgaaccgccatcaccgaagagggatgaccctcaggcaactagcaaagaccaagggggggccaaggggcataccatcgaaaaatgcacggcccataaatacaa

SEQ ID NO: 57801 - DNA, 246 bp, Glycine max
cagctcatcaaagggtgagaattatttgatagtatgatgaaacactgcaagaatctattatttcgaagataaaaatataaaattgtacttgtcccttttttcttggctagggttgaatctgttctcaacactcttggaagatgccgttaatgatgcccccaaagcaccacagtttcttggccgcatttttgccaaagctataacagagcatgtagtctctttgaagagattgggcgggtaatacat

SEQ ID NO: 57802 - DNA, 415 bp, Glycine max
  unsure (1)..(415): unsure at all n locations
tgtagaatggctagatatgatacttgtcangttttggntnggcacaaagataaaagggatgccccacattatttccatgacacacatgcaaaaatgatgatttggaaactttacgcaaaactggtcatgcatgcacctatgccgacactcaagtgtcaaatttttatggtcatgtgatgctagggctcacgattcggttcctctattttaatcaacccaatgtttccaaaatatgatcttttatcaatttgtgcattcatccgagtccatctcgggccgccggcgaaatttcacagcattcacccttcaagtgtagacacactttccaacaattggtatgatcaagaatgttttcaaagaaaagttggaagtgatctttttcaaagccatgtggtttttcaccttgccacttatt

SEQ ID NO: 57803 - DNA, 244 bp, Glycine max
  unsure (1)..(244): unsure at all n locations
agctntccgtttaatntcgaccgtctcgatatattacggtactcattttgacatccgnngtataaagtattttcaagtaaatctgctcagagcttcgaatctaaatattgagcgtctccatatattacgggactcaatcagacatccgagtaagaaagtatttgccgtctgagtatgatacgagctttcatttttaatttggagcatctcgatatattacgggactccagatgacattcgagta

SEQ ID NO: 57804 - DNA, 311 bp, Glycine max
  unsure (1)..(311): unsure at all n locations
agacactcgaaattganaacgaaaactcgtagcaagtgcataccgcaatcactcttaaatcgtcgcgaaatagatggacatgctccaatntgaaaaagaaagttcatagcanattcaaacgacacataacttttacacggatgtccgattgagtcccgtaatatatcgngatgctccaacatgaaaacggaagctcctagcanattcaaacgacaataactttntactcagatgtccgacagaggttcgtaatatattgagacactgcatattgagaacagaagctccgatcanattcaaacgacaatatc

SEQ ID NO: 57805 - DNA, 462 bp, Glycine max
  unsure (1)..(462): unsure at all n locations
agtcacctgccgcatgcaagcttgtaaaatggctatacatgatacatgtcaaggcttgttnttgtcatagataaaagggatgccccacattattctcatggcacaaatgcaaaaatgatgatttggaaactctatgcaaaactggtcatgcatgcacctatgcagacactcaagtgtcaaatttatatggtcatgtgatgctagggctcaggattcatttcctctattgtaatcaacccaatgtttgcaaaatatgttcttttatcaatttgggcattcatccgagtccatatcgggcgtgcggagaaatttcacagcattcacccttcaggtgtagacacattttccaaatattaggtatgatcagtgacatctttcaaagataagttggaaatcgtctcttttcaaaagcatgtcagatcttagctagacaacgtatagttatcctcttcttactatatc

SEQ ID NO: 57806 - DNA, 280 bp, Glycine max
  unsure (1)..(280): unsure at all n locations
taccatacgcatactcctatatctctcagtagctgatgaagccgttagctcaacccacgtacaagaggaagggaaacattagtttcctaaaactttcaccagcaacatactctataacgccgagaagtgctaccatagccacaccatactctataatgtcnggaaacattatttcctggctttaagaataccatagccacaccaccaatagcactcattacctcggctcgacgacgtaagccctactttcagagtcatcaagtggtggcaaaacaaacta

SEQ ID NO: 57807 - DNA, 278 bp, Glycine max
  unsure (1)..(278): unsure at all n locations
ttacatagaaataaagcgtcttaatacgcatcgcatcgtatctcagcatacatcttaacatcgaataattcgtttgtaatctccgaggagtgtgcttccaaactatgcataccctccttttgacactataactatgatcgggttcctttcccagctcgtactatcgactanggagcgacattcgcaactgttgaggatgcgaagatcgaggagaaccttttcaaggatccacttagatagatttgngggtatggtacaacatgcggctatacatgcag

SEQ ID NO: 57808 - DNA, 282 bp, Glycine max
  unsure (1)..(282): unsure at all n locations
ctttatcttctgctgcacctccatggttgaaaatcaccatcganagaccttattgaagctcaaagatctagcctccatagaagcttctcaagcaagctttcatcaccatactgttcatcaactctaacaccantttttgggtcacaccaatagcaacgcaaaataatgactctgttgngatatccaagatatgacaattccaatatctccgcaacaattccataatagtccaaatcattctcaccatatatatgtcccctaacacatatcccactattcatg

SEQ ID NO: 57809 - DNA, 342 bp, Glycine max
  unsure (1)..(342): unsure at all n locations
atacctcnctaatagctaagctcacctcctttagatgagaagctagagcttatctacacaccccctataatagctaagctcacccccatgacaaaaaacatgaaaataaataaaaagtccttattacaaagacaactcataatgccccgaaatacaaggctaaaaccctatactactagaatggccaaaatacaaggccttgacgaaggacaaacctattctaatatttacaaagataagcgggctcatacttagcccatgggctcgaaatctaccctaaggctcatgagaaccctagggcctttccatggatctctagcccaatctacttggagtcttcta

SEQ ID NO: 57810 - DNA, 338 bp, Glycine max
  unsure (1)..(338): unsure at all n locations
tgtaactcttcaaaaggttttttgactttctcacactgcctctaagcatttctaaaagatataactcttctaaacggcccnnnnggccaaacatgaagagtctataatagcaacgctttgattcgcttttcaatatacttttccaatcatttcattacaatcctttacaagccttgaatctcttgaacttcttcttttctttgtaccaaaactttctgaagtttcttggtttctaaaccttgaaaacttgtgctattcatccttttcattctctttctcctttgccaaaaagaattcccaaggactaacccgctgactctttttgtgctctcttctcc

SEQ ID NO: 57811 - DNA, 492 bp, Glycine max
  unsure (1)..(492): unsure at all n locations
atcctctgagtcacctgcngctgcaacttaccaacattctcatgaaaaccattgtcattttctttatatatagcggcagaaaaaacaagtccttaattgaatgggtacgagacaataatagtgaattactaaataaacttggtatgttgcttaaggtcattccagacactccctaaaccttagaaaatacataataaatggtaacaagaagtacctccaaattagttaatgtcattaatgaagatagtgaccanaattctgaagatacaactgagacaggctcaatattagataagaaaatataaacccaattatttcaaacactgganaacactctctaaactatattatcaactgtcaattgcccctgaccttctactagaagagagaggtgacaactattttaagagttctaggcatataacatctatgaatggaacatagatgcacatacggagtattacatcatgaacacactccaacatttgacca

SEQ ID NO: 57812 - DNA, 411 bp, Glycine max
  unsure (1)..(411): unsure at all n locations
ctaagcttaggatcannatttttctctcaacatnctcattcttcttctattttatttctgggcnncctttctcttgcacaaatntcacggctagtccatcggtgatgatcatggaaggctaaacacttaattaatccaaggatccactataagtaaggctgaatgtgagttctggtttagtatttataatcnttgtgaatgttcatcttttcttcaatcctatgttttattttcatgattatgattatgattaggattgataatggattatgtatggattcatttctaattcaaaattaatcacagattgctggatgattntccacttaattnggatctcaaacaattaaggatgattcattgactatctctatgcattgactgactttacactctgacatcatcatagta

SEQ ID NO: 57813 - DNA, 133 bp, Glycine max
  unsure (1)..(133): unsure at all n locations
agctttagattgtcttaanatattagctcgtcattatattatttttataaaatatnnngactggagaatcatctctttaagaattggaaagtggttattaaatatttacactactataaaatgcattttagcg

SEQ ID NO: 57814 - DNA, 397 bp, Glycine max
  unsure (1)..(397): unsure at all n locations
ccgactcgnntaactaataataataataataataactcctatttatcacactcttatcttatccaaatttattttatgtagattntattttattcagaatttattctatctagantttatttcgtccagattttatttcatcccatcttatcttaacttatccagattttatttcatttaagggctcggacttaaaatagaattgtatgcttttgggctgaggacttatataacaacaccaatgttntagtttagggagtttttttttttttccggagaggagaataattctaggattctagaatttcacgttttattactgtntatgcacactgttcacgtaaaataaaattcattttctacaaatcatctctaatccataccacttttaatatta

SEQ ID NO: 57815 - DNA, 474 bp, Glycine max
  unsure (1)..(474): unsure at all n locations
tctaagtcacctgcggcatgcaagctntagttgttaagcatatatacatgaatgagnnntattctttgattctctaacagcaacgaagcaagaaaaaacaataaggcttttacagacagacagaaataaaacgaggaatggaaaaaggaaggcgaatccagaagaatgtaaatatctacatcctanagaatctggctgtgcagactgtgatcgtaattagaaattaaattgtaatcaccaatccaaattggcactacattaaattaaagcttacatatttcacaggtcaatggcaaaataatatggacaaccaaactattcaaaaaagggaatcagccacaaatactaaagagattttgattgaagtttgatgctcaacaatatccccaagcaattccatattccattatatgattagcaaatattgcccgctattgacacaaaaatcatttatacaacttaaagaatattgtt

SEQ ID NO: 57816 - DNA, 184 bp, Glycine max
agatacagaagaagtatatacgaacacacagatagcgcgcatagaccaagggttttgttattttgtacagattgattagattattgcatatggatataatgcattcatatatacaaaagatgttatggtggccctagctctactgatatgtgacgtagtataagtgccatatgcccttgtgagt

SEQ ID NO: 57817 - DNA, 452 bp, Glycine max
  unsure (1)..(452): unsure at all n locations
tgtggaaggtgcatntgtgagcccaaatgttattcttcttactcatattgtccctcatgagntctgaatgcagttttctggatgtcttcctctcattctgatctggtggtatcctgatttcaagttcagcttaatgaagatagttgctccttccacttcatccaacaactcatcaatcatgggaatnggaaactcgtcagggatggtaattttatttaaggctctatagtccacacanaacctccaccctccatctcttcttactagaataatgggactagcattagggctgatgctgggcctaatctcacttgaactcagcacatcatccaccaagttttctatttcattntttctgatcgcgtggatactgataatgtgtaaattnggaattgagcctcctttttagcacatagcatcgtcatgcctgatcacagtttaaagatcagctg

SEQ ID NO: 57818 - DNA, 435 bp, Glycine max
  unsure (1)..(435): unsure at all n locations
agcttctgtaaacacacattgctcaatgaaaccttgcatattattattcataactgggcacatgcaacatcaataaaagacattcagatatttgctcagtttataactattactcagtcatctgattctgggtcccaatgctgatttccttgctgaaatgaccatcactgttctggatctcacagtaacctgaaccaataaagagcatcaaggtttggttatgccaaagcccaatgagaaaactacaactagtcatgccattactgctaaaccagacacactataagagtcaccttgttgcttgttgtcagaacaggtttctagcggttggctttctccaagcctatatttctgtgaccacaaacacaaaataagatcaaactcatggttnctttggattcacggaaagcaacaaattatgatatacctgtcaat

SEQ ID NO: 57819 - DNA, 416 bp, Glycine max
  unsure (1)..(416): unsure at all n locations
gcttccgtgattcggaagctcttgctttctcaccctgaagnggagtttctctggtggatggacagtgatgcaatgttcaccgacatggccttngaggtgccatgggagaggtataaagattcgaactttgttatgcacgggtggaatgagatggtgtatgatgagaagaattggattgggttgaacactggtagttntctgttgagaaactgtcaatggtctttggatattctngatgcttgggctccaatggggcccaaggggaagataagagatgaagctgggaaagtgctcactanggagcttaagaatanggcctgttttgaagctgacgatcaatctgctatggtttatttgttggcaactgggaaggagatatggggttgacagggttaccttgagaatcactactactt

SEQ ID NO: 57820 - DNA, 415 bp, Glycine max
tatcaatagacctccaatctttaatggagagggttaccactactggaaaacccgaatgctatattttatcgaggcaatagatctaaatatctgggaagccatagaaatagggccttatatacccaccacagtagaaagagtttcaatagatggtagatcatcaagtgaaagcataaccatagaacaacctatagatagatggtttgaagaggatagaaaacgagtacaatacaacttaaaagccaaaaacataataacatctaccctaggaatgaatgaatatttcacggtttcaaattgtaagagtgctaacgaaatgtgggacactcttcgattaacacatgaaggaactacatatgttaaaagatctatgatagatgcactaactcatgagtatgaattatttagaatgaat

SEQ ID NO: 57821 - DNA, 329 bp, Glycine max
tacctgaacattagatgaactatccaaccagaattataaggtgtcgcactaaggattatatttgtattgttgagatctgaatggttgtgcagcttgcatgggagaaacaataataacttggtctgtttcttggagtgtggacatgcatttgatggatgctcaggtgtacaatatatgccacacaacctttgttgataggctgtcatcacattctgcccgtgaccaatggctagctggctcacaagggatgtcaattctataagtctattcttctactctgattatcaataatcatagaaacaacaactctacttgtagtagctctggat

SEQ ID NO: 57822 - DNA, 354 bp, Glycine max
  unsure (1)..(354): unsure at all n locations
gatccagacatagtcctcgcatgatatgccaatgcttggccaacagaagagggcgtgcgtgatatgacgccctgggtgaggggtcagtggatccagatcgatgcacatgctatcggccagctcctgggatatcttttaatgttggaagatggccaggagtgcgagtttggccataggaggaacccgaccgagggcgtcactgatgaggccatcgcccagctgctatgtataccgcggcaagattttgcccggactgctgccgggagaaaggtgcggatcatgcgcaccaacatgaccaccctgactcagatntggatgactntgctgctcagcaacatcctgcccaccgatcat

SEQ ID NO: 57823 - DNA, 326 bp, Glycine max
tcgccgaccacaaagtggtacctggagatatgtcgcggaggtcaagacaccttggcgacgtcatgtggtgtgctattgcacaaaaccaagcttgaccaatcccgacccaacccgggcatagtcagttagcgagaacctgtgatgtacctaaacaggcgagctcctggcagtcaacagataataggaacaaagaccacaaagcattgaggcttgtgtggtggctggccagctgtgaatcttgtgtgatatatgcgttactggcctctggcaatctattaccaggggtgcgcattccgattcaatgcttaaaatgaatacaacaggct

SEQ ID NO: 57824 - DNA, 79 bp, Glycine max
aaaggacaccgggccacccacagcacaccaaagcaaccacggaaaacccaaagcaagaaacagagaaccccgagccgaa

SEQ ID NO: 57825 - DNA, 443 bp, Glycine max
  unsure (1)..(443): unsure at all n locations
atctctgagtcacctgccgctgcagctcaccaggcagtgtttcatcttaattcaatatatatatgtcataaattgattntgcaagtcatttaccatcaaatcaaggataatgtgcataatcatcatggatcaatangactttntaaggtcggacttgtnaggaaatttggctctggtccccccctttnttttggtgtgagtaggagagcangcataaagatttggttagtaacttaaatgggcgatcanctcctatcccttcatgtcttgaccaagttactnatggttcccttcctttntactctntacaacaaccctatacatggnntcagacattgttgtccaaagaactngtcttctttctatttcctcttgtctttccattttgatgactcttctctttcttttcttctaccttcttatgacattaactcctttaaaat

SEQ ID NO: 57826 - DNA, 323 bp, Glycine max
  unsure (1)..(323): unsure at all n locations
tgcagcttgtcttcaccctataaaacgttattccaaanttgtgatcttctnntttctctttcagnttcacacatacttgattttttttgaaattactgtgaaaaactacctttgtgttgtatncanaccaactttgcttaacaaaaactaatttaattataatccgatgacatataatcgatattgaataatctaatcttctaacttggatgtttatttgtataacagcttcgacttttctctttttttttatactataatgactcttaaattttggtcttggatgagacttttactcttttctccttataaacctggtctct

SEQ ID NO: 57827 - DNA, 381 bp, Glycine max
  unsure (1)..(381): unsure at all n locations
aatgaggagacatntaaattagaaaacaagctgattggaaatggttccatttacctggaagggatatggctcacggatggtgggaaagtcatgatagtgaacatatactcgtcatgtgatgcagctntcacaagaaatttgtgggaacaaataaggcatgccaaatatgggggcctatggtgtataataggagattttatatgtatttgaagaccatcaganagaataggcatttgtcanaggatgcaagatgagggtattataaaagaatttaatgaatggatngcagacttagagtttgaggatgtgccttgtgtggngtganaattcacttggtacagaccacataggacagccaaaagtagattggacagagtcttt

SEQ ID NO: 57828 - DNA, 251 bp, Glycine max
  unsure (1)..(251): unsure at all n locations
agtataatgtaagtgccactttcaatgtgtctgatctatctctttttgatgcagatggcggagccttggatntgaggacaaatccttttcaagaaggagggagtgatgaggacataaccaaggaccatgaagcacttgaaggtcccatgaccagaggcagacttaaacatgcccaacacgtcatagagacaaggctggtcatttgtatagctgccattgatgatgattgaaggcccaagtggagaaagatg

SEQ ID NO: 57829 - DNA, 416 bp, Glycine max
  unsure (1)..(416): unsure at all n locations
cccaatnggattcctaattttcaacttacctaattggatgtgacatcatggcagttaggtggtcccagctctccattgtggattcagacacaaaacaaacttcaatatgttggactatctaacacggngattttcgattctattcccacacagatgtgggaagcactttctcaggttttgtatttaaacctctctcgtaatcatatccatggtgagattgngactacattaaagaatccaatatctatcccaactattgatctaagctcanatcacttgtgtggtaaattaccctatctttcatgtgatgtgcttcagttatatctctcaagcaattcattctctgaatccatgaatgactctntatgtaacgatcaggacaagccaatgcaatcacaatttctgactcctgcatc

SEQ ID NO: 57830 - DNA, 317 bp, Glycine max
  unsure (1)..(317): unsure at all n locations
atacgcagagacgacaattcatagagagatccatactttgaaatggatttccactgaatntattaatagacagatagagatatcttaatgatgaatagtttctaaatgatcttggaagagcaccaccaattaaggtgttggaaaaatctatcatgtcaatagttctaacagccccaattngatctgtcagatcgcctgatagttgtgaacttcgaactgcaagtgtcgtgagtccatgggaaatacaaggagcaagaatctctaaaagttgattaacctgttggtttatgttgagatatgataaacctatcttcctt

SEQ ID NO: 57831 - DNA, 120 bp, Glycine max
  unsure (1)..(120): unsure at all n locations
cttgcccatataatatataacaatctcttacatatgtnggttgggcaaaagtgcaaaatttcatacctagccctagataaaatacttaatgaaaacttcataataagtgtaaacctgttc

SEQ ID NO: 57832 - DNA, 327 bp, Glycine max
  unsure (1)..(327): unsure at all n locations
tggctataaatatgtgaccatgcgcatgaatttanagtaagaactctcagatctctttcattcattcaaagcattcttctaagagtttttttttcaaaactttctttattcaagaaaagttcattgtccaaaaacttgtgttattcttcttcttcattccttctctctcttgccagaataattcagaggactaaccgcctaagaaatctttgattcttcttctccctcttgccaaagatcaaaggacaactacctgatattctttgattcttctcttcctttaaacaaagattcgaggactaaccgctgagaatctttggttcccta

SEQ ID NO: 57833 - DNA, 416 bp, Glycine max
  unsure (1)..(416): unsure at all n locations
agctngntaanncatggacgcttctattttttctacacttttttgagngcgccactcaagatagacctatattcacttatgcgttttgggaatctcttgatcactatttaaaatattaagaacagtagtgcactaaaacatacacttttcatgaatttcatgttgagtattcctaccanaaagtatggcaaacctaaagtgtcccatatgagtacctaagtttgcatcgacactacaaataagagtaaaccttcctaatgagtccctatgtgcacatatcatgaagatgttggatgcacgagtgatcttacaaaagagggttacaccactcaaaacattcatcatactacctaatttagggatgttgtgcctaataatacctactttggacaccaataaagcacaaggatttaagc

SEQ ID NO: 57834 - DNA, 290 bp, Glycine max
  unsure (1)..(290): unsure at all n locations
accatatccgagatctattatgcattatgcatcatcatcgttataatgaagaatagtntctaagttaggaaaatttcttcacaggcaaaatactctctacttttaatagattacaaagttgtcgtaatcgattacaacaagctgtctgaagcttaaagatctagtctcatattagcttaatcgactatgatactatctgaattgattacattatttcttgagacantgactaacttattcacgagcctctactctaatcgataccacgtggattaatcgattacttgtct

SEQ ID NO: 57835 - DNA, 391 bp, Glycine max
  unsure (1)..(391): unsure at all n locations
cttaaaattcagggcccattggcagttgcttgtactgtgtccaacaaacaatgttgttgcctgattttgttcattatgtaagaagnctgatattcatatcacagccgcaattaacaagttaagttttatattctaactatattaatatattataatcgttgaatgaccaatttttaatcatacacgttaatggtttaattttctccccaatgcaatgaaggcagtaaagaacactatggatggtaaaaatgatcaaggaactcctaagtggattgaagtgaaggttagtcacttatatgtcatgcttatttatggctggtggtggttacatagtaaccttagtacagttgttcaatccaattatgatctatattaaatgtatagtcatgcc

SEQ ID NO: 57836 - DNA, 439 bp, Glycine max
  unsure (1)..(439): unsure at all n locations
tgtcataatattntttntttgtattatttagatcatggttatgtatgaaattctcaatgacattgtttcagtacatgaatttagttaaggactagttaanagtataaaaaaaatgaattatctaaattaatgataaaatattttaacaatgacattgctccggcgtggcatattgcatctaatgtcaattctatcaagaggttcgcacagttaaactttgatggtctagacctgtggtaacttctttaataaccttctagctgtggtcttacggaaatctntcccatttttttccccgaattgaattttgcattaattccattctttccatatgcactgaaaaatattgaagtagttttcatttatgctatgcctgcattgcactcacctaccttatattatagaaagcttttcttgttctcaatcttagtagtattct

SEQ ID NO: 57837 - DNA, 395 bp, Glycine max
  unsure (1)..(395): unsure at all n locations
aaaatgtgtaagtagactatcaaccacgaagtccccangataaaacagctcagatcactgtatcagatntccactgcactgagggaacctcttctagaattacaccctcttgtatgactcgaaaagtcactctaaagccacccaaaaatatgacttgaatagtcactctaacagccaaccgaaaatatgacttgaaaagtcactctaatagctaaccgaatattatgagttgaaaagtcactattatagccaaccgtaaatatgacttataaaatcactcttatagccaaccgaagttatgacttaaatagtcgctcttatagccaaccgaaaatatgacttacaaagtcactctaatagtcaaccatcaattatgacttataaagtcactctta

SEQ ID NO: 57838 - DNA, 381 bp, Glycine max
  unsure (1)..(381): unsure at all n locations
ccatagattatatatatngtttttaattatatgatactntatctttctttacaggagttaattgatggacccaaaggaattgactatcaaacttggtcttgagttcaatagnttggaagaggcatatctattttggacagaatatggaggcatgaaaggctctggagttagaaaaaagaattcaagcaagagtaagagagatggttccattacttattataaatatgtttggtggaaggaggacatacgtcaatctgataaaagagatcctaanacgaccaatccaaaagctgagacaagaacatggtgtatggcangtatgaaagttaaacgattcaatgagaaatataaagtgatcgaattttttatgatctaatcacc

SEQ ID NO: 57839 - DNA, 143 bp, Glycine max
  unsure (1)..(143): unsure at all n locations
acctgccgcatgcaagcttctcggctcatgctangaacgcctctagatcaactttcgtgcatttctatatgcacccacccagagggaagctctccaagttccaactccgaacacgactcgactggccggtanttccaacacga

SEQ ID NO: 57840 - DNA, 149 bp, Glycine max
catctatgcaagtattcattgcgtgttgggtcgcaaaggaatattctttatgtgagtggactctgtgtgagatttactatgagtacacgtatccctagagagattagcacaataacatatgaatctgacacattaatttacacgtttaa

SEQ ID NO: 57841 - DNA, 126 bp, Glycine max
tacactaaagattactataactaattagtcaaacgaaagaaatcgaactgaaatgctagtaactaattattgaatggatgttcccatgtatcggtctacactggtgtcccacctaccatctgaccc

SEQ ID NO: 57842 - DNA, 194 bp, Glycine max
aaagaagaaggggagagaagaggaaagaaaaaaaaagaaaaagagagggacagaagcaaaagggagagaagaaagagaaaaaggagaggaggggggaagaaagaaggagagagaaaaacaaagaaagaagggaaaagaaggaaagaaaaagagaaaggagaagaaggaagagaggaagaagagaaagggaagaa

SEQ ID NO: 57843 - DNA, 419 bp, Glycine max
  unsure (1)..(419): unsure at all n locations
cacctatcgccagactctgtgttatgctcctatgacgactaccacatggacctttgcccttttgtgcaacaagatgaagcaatggaacagtctgaagcttatgctgcaaacatctacatcagacctccttaacgctagcagcaatatcgagcacaacagaacaatcatgacctctccagtaacaggtacaatcccgagtgaaggattcatcccaaccttatatggttgaatcctatacaatagcagcaacaacaaccttattctcaacatgctgctggcccaagcagaccatactgttcttaaccaatctcacagcanacaggtgaggctcctacgcaaccttcacttgacgagcttgtgacgcacatgactatgcacaacatgcagtttcacaagagaccagagccttcattcagagc

SEQ ID NO: 57844 - DNA, 374 bp, Glycine max
catagacaaaacgtccgaatgatgtatcgctttattttactaaaaggtatgtcttgattattatattattatcttacctctctttttatttccaacgtggttacgacacgaccgaacggtcggaattcattttaaccgaaaataacggatgatgcaattcatacgatcggcggaaattattttatttttagattacgcgagaaatgacttaaataaatggcttatgcacgtcaaaaggtggtataaaaagtgaatgaatacgagaatcaaaatacatgatacaaaatgtggaccaccacgggtacatagaatgaatcgataagctcagtttgatgtacttacccgttgaagtctgaagaaaacgatgaacgttg

SEQ ID NO: 57845 - DNA, 260 bp, Glycine max
cctcgaattccaggtcttttctcttcttgtcctgataactcttctacctactgtgagaaatcctcatcctatcttggataaacttgaccttcttagtgggttggtgtaccacttcaggtcctaaggtgaggtcctacaccttctaccatacaaagtcttatagggagccatgccaatggtagaatgaaaactattgttatatctgaactctatcaacaacagagcacactccacactcctattttgtctaatacacatgc

SEQ ID NO: 57846 - DNA, 142 bp, Glycine max
tatcgaatcctgttcccccccctctttttcgctttttcactatacattaataatggaggagaatgatgtaatagctattcgattgagattcagaggttaagaaatgacccaacaatagtagacacaatgactgctcatgaac

SEQ ID NO: 57847 - DNA, 386 bp, Glycine max
  unsure (1)..(386): unsure at all n locations
agctnntaactgaatatgcaatgttccaatttgattcatattggcgcaancgannacaagatattggtaatcgattaccaacgtatctgaacgttgaaatcaaactcaattgtgaagagtcatatcctttcataaaaaggtttgagtaatcgattatatggctttggtgatcgattaccaacgacaagttttgaataaaaatcaagagatataactcttccaatggttttcacagtattctaaaggttataactcttctaatggttttcttgaccacacatgaagagtctataatagcaagaccttgacttgtcatttgaaaaaaaagtgatacaancttttcatatattcttttataacctctgaatctctttgaacatcttctt

SEQ ID NO: 57848 - DNA, 437 bp, Glycine max
  unsure (1)..(437): unsure at all n locations
agcttaataagtccatctatggattgaaacaagcctcctttctatgtgcattaanatttcatgaggtcatttattcatttagctntgaagagaatgtcatggatcactgtatataccagaaagtcagtgggagtaagatttgttccttgtattatacgtagatgatattctgcttgcgactaatgataagggtatgctatataaggtgaaacaatttctctcaaagaactttgatatgaaggatatgggagaggcatcttatgtcatangcataaagatccatagagaaagatcttgagggcatttaggcttgtctcaagaaacctatattaacaaagttttagagagattaatatgaaagatngtcaccaagtgtagctcccattgtgaanggtgacaaacttgctttgagtcaatgccccaaaaatgaatttgag

SEQ ID NO: 57849 - DNA, 411 bp, Glycine max
  unsure (1)..(411): unsure at all n locations
tctgagtcacctgcggcatgaagcnttcacaagagtcttcacaaataaccatcatgaagtatatatctatcaaaactacccatcatatctcccaaaaccccatacccacgaaaatcataggagaaagaagtccacccaaacctgaattntcgaagtcccactcgtagccacgcacttcacgaccccgaaaatgctctcctttcacgatttggggcagaaatgatggccaaagggtgaagctntgcttggagcttcaatggagaatgaagaagagaatggcaacgtgagggagagagagggctgtctgaaatttgtggtgctgagtgaagagagagagagttngcttttggtttaaatgaaaggggtntctcttttttctattattntattcaagctatgccacatgtcttc

SEQ ID NO: 57850 - DNA, 358 bp, Glycine max
  unsure (1)..(358): unsure at all n locations
cacatcttcttatgtgggtcttgaatggctatcaaaggcctatatatatgtgacttgagacacgaatntgctaagagttctttggatcaaaaaggtcttatcctcttaaaaagcacaatcgttttatcctcttacanattccttggccaaattacttgtgattcaataaggaattatttgagtgctcaaattgttcaatctatctttttcaagagagatatcttcttttcttcttcttcattctgaacagggattaagagaccgagggtctcttggtgtgaaagaattctaaacacaaaggaagggttgttcttgtgtgtctagaacttgtaanaggaatttacaagatagtggaact

SEQ ID NO: 57851 - DNA, 266 bp, Glycine max
  unsure (1)..(266): unsure at all n locations
catatacaagcaccgcagctgtactacctatatgatctacacgtactttcaaggagtatttgatacttacatcacacacctccttggctaaattcacatacatgcgtactcaaagcattgtggggtaccaaaaattgcacatgtgcacatcttggnatatctaatacctatacctacacaaactttatgatgaatttcgactatctacacaataatgtgctacattctatgctctttataagtatgtgctacctaaagccgcatgc

SEQ ID NO: 57852 - DNA, 386 bp, Glycine max
  unsure (1)..(386): unsure at all n locations
tacactcttatagacaactctactcaatgtcaaatggttntaagatgaaatataacatcttgtttgttngttttacatgaatatctttgcatgtaccagttatggatgctttctgataatctatttctgttcagggtaggctataaatggattacaaagtttcttgcccttggtgtgtatgcagtacttcttttcccaggctttattcaaggtctgaattcagtggtctataacattattctcattcgaataattatgcatgtccagattctgatgtgaaatgcattagtatcacccatcaatatcacatatccattgcccttcctgttatagttggatattatattctttctcagcacatacgcgaagcatatttatggagataa

SEQ ID NO: 57853 - DNA, 321 bp, Glycine max
  unsure (1)..(321): unsure at all n locations
ctctagtgntagntntgcctaacccgagggaaccctttgaggtgtattgttatgcatcaaagatgggtttaggaggagtgttgatgcaaaatggccaagtagtggcatatgcttctagaaaactcaagactcatgagaggaattatcccactcatgacctggaattagctgttgtggttnttgcccttaagatgtggaggcattacttgtttagctccaagtttgagggttttagtgatcataagagccttaagtacttgtttagtcagaaatagctgaacatgcgtcagaggagatggttaaagtttcttaaagattatg

SEQ ID NO: 57854 - DNA, 155 bp, Glycine max
  unsure (1)..(155): unsure at all n locations
tcctttctccacgtcgagcctaaaaaaaaatttcttcttgctcttgataaacctanaacaatcaaataaattattcaataacacgacaccaacatataatagtcatgaaatataccttactcttcangaaaatactagaataatcatattagtta

SEQ ID NO: 57855 - DNA, 395 bp, Glycine max
  unsure (1)..(395): unsure at all n locations
acctccttctctatatcaccattcaggaacaccatttctacatccatttgatgcaactcaagatcataacgagctactaatgccacaattactcgaagagagtctttcttatatacaggggagaggtctctctgtaatcgatatcttctctcttagcgaatcctttagcaacaagctatgccttatgactctcaatggtgtcttctaagtctttctttgttctaagacccatctacattcgatggcttntacaccaacaggcaactcaacgagatcccatacttggttagatgccatagaatccatctcatccctcatagcatataccacaaagttgattcttaaactcatggctgtgaaacatctcagatcatttcagctccatgatgagttga

SEQ ID NO: 57856 - DNA, 463 bp, Glycine max
  unsure (1)..(463): unsure at all n locations
agcttcttgaagtcggtaagatatgccccatattcaatattgcatggtttattcccttgcgagtggtatcaaagagatggngtacaaagattatcaataatgaaaagaatgagttgattcccacaataactatgacgggatgaagaatgtgcattgattatcgtaagctaattaaagctacacaaaaatatcatttttctcttcctttcatggataaaatgttggaacgccttatgggataagcttattatagtttccttgatggttattcccgatacaaccaaatagttgtctaccccanagaccaagagaagatagctttcacttgtccttagttagcatgacatggttttatttttttttctcatattcgataccagagggagaaagtaattctaggatctcgtacattaattatgatcttgatctgtgtcanaacactacaatagtgaatttaattatg

SEQ ID NO: 57857 - DNA, 390 bp, Glycine max
  unsure (1)..(390): unsure at all n locations
tctatganggaatcttgacttctcaagccttctcttagntagntngtttttctcttagngcctctcggatggtgggtactgtcgcaacctactcttttgcgggcgagtgaagcgaggctcacgggtgtgtcttccatgggaggaaaatgtgcggagtcgccaccaacgcttattgaaaggaaaacatcggaaataccaaaggaaactggtcataaagaatattccagattcacgagttatgtctacgcttgaggaaggtattatcacctctcacgtttgtcccacaggacaacagccttagatttagagttgcgtgaaatcatgtatcctaaatattttgtctcttnnttattttgaggtcgacaaaagcagggattttgctcctacgta

SEQ ID NO: 57858 - DNA, 400 bp, Glycine max
  unsure (1)..(400): unsure at all n locations
ctgaccatgaatcaaanatctgcacttgtcaccagactctgtggnntatgctcctctgccgaccaccacacagacctttgcccttgtgtgcagcaatctgaagcaattgaacaacctgaagcttatgctgcaaacatctacaatagacctcttcaacctcagcaacaaaattagccataacagaacaattatgacctctccagcaacaggtacaatctcgggtggaggaatcatcccaaccttagatggtcgagtccttcacaacaacagcaacaacaacaaccttattttcagaatgctgctggcccaagcagaccatacgttcctncaccaatccagcagcaacaacctataaaacaancaaacagtgatgcccttccgcaaccttcccttgaagaac

SEQ ID NO: 57859 - DNA, 420 bp, Glycine max
  unsure (1)..(420): unsure at all n locations
acctgcggcatgccaagctttatccatggcctcctatggtggngagctncntttatacttatcttcttttngaagnggcgncgcctctctctcttccttcttcatttcgctgccactcatcatccaagaaggaaaggaatccattgacgaagaagatcctatgcctacaagctccaatggagcttacatcacaacagttcttcttaatgtacgccaagataatggctgggcttaagctctcgtangtcagactatcagtggtaactcctctatctctacttagagtagcggtcaaggctatgaattcgagcctaaaggagttactttgggcactggtagaaatctgacctgagattacggctccatagttcatgttcatgcccgtgactaatccgtacaccaaccctggtctgtcatatt

SEQ ID NO: 57860 - DNA, 351 bp, Glycine max
  unsure (1)..(351): unsure at all n locations
atcttaagcaccgcggctgcagctngcagagcccactgtgtgtagattgccttttccaattattctgagaangcctccgaccacaacataatacccatcttctgatccttgaagctcatcaagaaccgacaacaaaacctgtgcatgtgcatccaaatcactctccagctaacaataatacagaaattatcgcatgtattctaagtttgtaaacgaaaagaaactctanggtacctgggttagtgcatgtaaccgaaatctaaacataaacattatttgttacataccataatcaatcataaacanataaactaataatatcatgatattcctctaacttaaatttgaatc

SEQ ID NO: 57861 - DNA, 332 bp, Glycine max
ttttcatcagtggtctagccatattacagaacggctctgtatctagtgtaaaatacttccacaagcacggatcaccaatgtaaactatacacctagagatttggctcattaatccatgatgattaatcttgtattaaagaacctaacctccactccggatattacattggtgattgataatataccagaacaacttgtactgatctcgaactaatatataacatctatgtttcggatcataagaaacacacgaagtacaattcaagtctcttcaattactaactgcctgactaacatccctctttccctctactggacacattgagtatctt

SEQ ID NO: 57862 - DNA, 391 bp, Glycine max
  unsure (1)..(391): unsure at all n locations
taantttgggacctaatatatcaagatgctcgaaattgaacaacggaacctctcgagaaaatcatatgttcaaacttttcacacgganttgcgattttgggacataatataccgagacgctcgaaattgaacaacaaaacctcttgagaaantcaaatgatcataactcttctttcagatgtccgagtcagggacataaattatcgagacactcgatattgaacaacacaagctctcgagaaattcacatggtcatgacttttcacacggatgtctgatttgtggacataatatatcgagacgctcaaaattgaacaactgaagctcttgataaattcaaatggtcaacactgattgatcattcacggacgatatatatcgagatgctcga

SEQ ID NO: 57863 - DNA, 147 bp, Glycine max
cacctcggcagaaaaatatttgttaatcgacttcatgcatatttcattcagggatcgaatagaaaactcaatagctgacaacggtcgtgaaatagacccgactgatatttttcagccgacattgcgcaattattatttaataacgta

SEQ ID NO: 57864 - DNA, 97 bp, Glycine max
ggacttgtgtgaggagagagtttgcttcacatatacctcactctcaatctcacttctcaaacctagataattcattaaattgaggagtactggacac

SEQ ID NO: 57865 - DNA, 337 bp, Glycine max
ctttctctcctctatttttccttgctacacgtcgaaggatattgcatgaatgaatggatgtttcgcttccaaatatcgtcctacttgacggccaattaaaaccgcctttattcgctcagtgcaatgctcacgctaagcacacactgtccaactagattaagtgaccatgcgctatgccacaggatgcacgcttagcgcacttgcatgtgacagcttgcttccaaggtggcttcttgaggtaagtgtgcttcttggactgagcggtcctgatgtgctaagcgaggtgatcgtactcaacgcgatattacaacctcttcaatcctcttccatacctcta

SEQ ID NO: 57866 - DNA, 467 bp, Glycine max
  unsure (1)..(467): unsure at all n locations
atcctctaagtcacctgcngctgcagcttaagaccgcagctacatccttaatattgtgttttgtatatcttttaacaaaattccttatgaactntggactagcaaaaggccaagcattaaacacatgcatatntgagattttcaactaaggcacaatcttataggtcgtatgaaagaaagctggattcaagaacaattaactactattttggtggctatgtcgaacgctctcatgatataagttntacgatcccactttaagaaccttntttgaaacagaaatgcgagatttattgagaaagttgtaattgggaaagaatgttgtctttcttgaataacctcttatggacagtgtgatgtagctctatatggagctggtaggccttggatcttcttcatcaatggagttctttgcttcttgaagatgaatgccagtggaatggagaaggaagaatgatgattggaga

SEQ ID NO: 57867 - DNA, 144 bp, Glycine max
atataattgctctttctaaaggaatgtatcaaagagcaagatgaactgatctctcttgaacaaagtgctagacagaaagttgcagaactgaagtctgttctatattctgagaagagtcagggatcagttcttaaagcaatcctg

SEQ ID NO: 57868 - DNA, 434 bp, Glycine max
  unsure (1)..(434): unsure at all n locations
agcttatagttatgggatggagaataaaactttttcanaatcaattgtacctngcaagnaacgaagaattctctttgtggctcttagatgaggagaggtaggagcctccataaagcgacacacaacttccaccgcatatagaatatctggccttgtattggttatatacccgaaactccccacaagactcttgaagaccgtggagtctaccttctctccttcatcaaactttgataactatcagccacctctcataggtgtgttcacgggattgcaatcaagcatattaaatctcttcaacacttcttttgtgtactatcttggagacaaaataccattctccgtttgcttcactccattcccaagaatatgacatgagacccatatctcgtcatataaattcacgagacatggactccttgaagtcttcaaac

SEQ ID NO: 57869 - DNA, 355 bp, Glycine max
  unsure (1)..(355): unsure at all n locations
cagtgtaaacaacatttcatatactatattggcatcctgtaaaaataaaaaagtctctttccagtcaaactatcattcctttatccttatctttatacttaaatttcttaaatattggagcctatcgttttcaatatatataatcctttcatcggctcctaaataagaattcacaagtttcattttcctataaanatatcaattgttaaaacaactatattattatataatgtgtgaactatacatctaaatataattgattatcganatattattatttaaaaatttaaccatataaaactatattaaatattattatttgaatttattattaagacaatattcacaactgaaa

SEQ ID NO: 57870 - DNA, 441 bp, Glycine max
  unsure (1)..(441): unsure at all n locations
ancttgacccttacnagtcagattaganaattttttaatttatnttgtaaacaccgggtngactaagatacgagaaaatgaattatgagctctaacatcacatgaccaaaatattttcgacacttgagtgtccacatatgtgcatacatgattaagtttgcataatatatccaaatcatcattgttgcatttgtgtcatggaaataaagatggacattctcttttatccttgaagcaaaccaaaccctgacatatatcatgtccagccatgctacaagccttgagccaanatcccaacttaccataaaccttgaccagtgtgagaatatcaatcctgccctcgaagatacacaaaagaatgatatcccattctagatgggaaaagcaaatagaagatatcccattaaagaggaggaagctaaaaaaagagagaagaaatcc

SEQ ID NO: 57871 - DNA, 444 bp, Glycine max
  unsure (1)..(444): unsure at all n locations
agctgggagatganggcttcaatggagaaattttgtagtanttatttagagagcggggagcacgaaattgaaggaagaanaagggagagaagttgaactttgagttatgtctcacaagactctcattcatcaaagttacaacaactgttacacatgcttctatttatagactaggtagcttccttgagaagctttcttgagaaaacttccttgagaagcttctttgagaaaacttcctgaggaagcttgagcttatctacacacacctctctcataactaagctcaccttcttgagaaacttccttgagaagattcctanagaagctagagcttaactacacacacctttctaatatgctaagctcacctcttgagatgagaagctagagcttagctacataccctctataatagctaagctcacccctatgacanaatacatg

SEQ ID NO: 57872 - DNA, 436 bp, Glycine max
  unsure (1)..(436): unsure at all n locations
taatcatgataagcttgcgagcattctctccatagatcatatctttcttcatttaggtgatcatgaaggtcattgagttggtttagctcaatttgaagtcttctagttggttttccaacttctgaagatcttctaataagtcagatntatttntctttaccaaattcctcatttctaatgtggagctctgtggtctctattttaagagcttcaaaggcatcacacacttgagtggaaaantataaagaactatatactattactccatgtttcctttgaatttgtttatgatcacttgagatgnttttgaaatattntctcgagtttgataagctttggacaacatggatgaaatagaaagaagttcatgatatnngtgatgaagtgttcaacgtcattgagattacctcttatgtattctaatcttagatgtatg

SEQ ID NO: 57873 - DNA, 384 bp, Glycine max
gatgttcaagggttgagaaggaaaatgagaatgcgtcatttggacaaacttccctccacagtctatatcatcatctaacttgctcaaactggtttacacaaaatctaccgataaaatttgctcctcacacccaatttaccctagaaatggctcttgccttccttttggtcattgttttctctcttgccaacccaagctttctcataagcctatatgacatttctactaggattaactcctttacctccaataccactaaatcagatttggctttcactctcaaagctactcttttcactctaacactcatctacttttaacctaggtacttaccctcctcctacagtttcacacatttaccataactccatcttatctaaacct

SEQ ID NO: 57874 - DNA, 453 bp, Glycine max
  unsure (1)..(453): unsure at all n locations
ctctcctacaacctaatacaaggtagaaggagactaactatacatgctcaagattcaacgttcaatctaacaatcatactttcagctcaaaatatgcgcacgggataaatcaatcatgcacaaagtaagctttctagctaagtggctatcttcaatccaaacatggcattcatcatcttcaattcacgcattcattacatactcagagattcatgcaaaaatcattactcaatgttagtcgttctctcacaattaaagatgacactttcaccagtgtgcaactaatgtgttccttcacaatcaacctgacaaaccaactaacattntcagtcatgatcctaattctatgttgcttgctttctaatgactacatgctcattcaaggcatatgatctgtgcattctcaatcactcacatcatacaattgatcaattcaaaccaatcacaaacact

SEQ ID NO: 57875 - DNA, 292 bp, Glycine max
agctcatatctcgcgaagtcagaattataacagccacttagactcatgaagataccctcggtatatcacacaccaacattggtcgtgcccctatggtacataataatccttttgacacacataagtgtgattccttgcgattttcttgataccttgcacagaagcgaacactaagcataatctggggcggacttgtagtcacactaaggagtgaaccatcatacctctgtacttcggctcatctaacaatataccttatacgtccaagtcaagataaatggatgctatcatt

SEQ ID NO: 57876 - DNA, 97 bp, Glycine max
  unsure (1)..(97): unsure at all n locations
gcttagcagatgctgcagctgcaagttctatggaagtgtttgtgttgctctatganccttangccaagaaacgcaagaacttaatagctcgcaactc

SEQ ID NO: 57877 - DNA, 110 bp, Glycine max
gaaacataacactaaaatatgagcccacaaatatatgtaagcctaaagcttccgttcattcctcttacaagctattccttatatcctttccggctctccttgatcattct

SEQ ID NO: 57878 - DNA, 162 bp, Glycine max
  unsure (1)..(162): unsure at all n locations
gcctataagncggacctcccagaagagtataggagtagcaccacttctaacatttctgatttaatttcttttgcaggtggaactgatattgaggaggaggaaccaacaaatctgaggtcaaatcctcttcataggggaagggatgatgcaatccttcctatt

SEQ ID NO: 57879 - DNA, 137 bp, Glycine max
catggctcccgatcggaaccagcttcagagtatgactaagcgaaagcatgagtccattaatgaatatgcccaaagattgagagagatcactaaccgaattgtaccgcccatgacggaaagggagatgatctcaatta

SEQ ID NO: 57880 - DNA, 465 bp, Glycine max
  unsure (1)..(465): unsure at all n locations
agcgacctgcggcatgcaagcttctaggctaaatcatcatgttgctcctttattcttacattctccctnnnnnnngggnngangaagccaaacttggatttccatttgagtgcatctggagagtcttgtgagtagatacttttcttagaaaaaccaaaatatttctaaacactaagagaagtatcaatcctccatatcaccatcatcatcattaagtagagacttttcttagtatcaatcatccatatcatcatcatccttntgataactcagtgtactntaagtntttccttcttttattagtatcaattcttcatatcataagtcttgtgagtagagacttttcttagtatcaatcctccatatcatcatcatcatcatcattntgataacttaatgtactnntaagttttccctcttttatccacgccttgtctttttcttttacctaatccattgtntctt

SEQ ID NO: 57881 - DNA, 295 bp, Glycine max
agcttattaaaggctttctctagaagctttttttgtttttttttataactctctcaagaagctactttgtaaagatacattcttatctatccacccatctattaactaaattaactttcttataaattattactgatgataataacgccacaaataatccaacattcaacataattactaacaatatatatatatacatatatatatatatatatatatatatatatatatatcaaggggtgacacatatggttacccctccactgcttcttcatcaatgccttgcttattgagt

SEQ ID NO: 57882 - DNA, 307 bp, Glycine max
  unsure (1)..(307): unsure at all n locations
aagaactagctccgcctagcccacttgctcggcgttttttgtatttattagcaccccactgaaatttgacaaancaatgctctttgcacgtccttcatattgaactctggacgaataactcttgacccctctaaatcctatgttcgctaacggtcatcctcgtaataacggacccacatttatttcttgtccgagccaataatgaaatgatgttaacaaccagtgataacactcactggcagaataatggctctttcaccataactgacggaaagattgtactttccggataaacaccgcaatttct

SEQ ID NO: 57883 - DNA, 227 bp, Glycine max
ttggtacctataggtagccatttcttatatactcagcctacccttcctgactaactaggttcatgtgatctccatggacaaatgcattgttgaaaaatatgcatttctaaaaagcgaaaaaacgtggcagacatcttttgcaaatttatagttggatacacaaaacacacgctatccataggggcggtaatgacacttcgctatgttataatccatctcatcaacat

SEQ ID NO: 57884 - DNA, 379 bp, Glycine max
  unsure (1)..(379): unsure at all n locations
caaagacaccnacccttaccccaatctagaaaaccctattctagcatgcctttagaaattcatgcatacactaacaacatgtaaaacacacaatgttaacaacttaactttaccatgaatgcttctaaagatgaagtctagaaggtgtgagtcgcacaaacttattcttagaactttntcttctctcttaacagtgagaacataaggtcattatttatagagaacatagctataaccgctgtaatcgattatatcaaagaagtaatcgattagattatcatcttaatcgattaatgtgttcttcccaacattggaaagctttcaagaacaatataattgattagattatncatgtaatcgattgaagtgttcctgatca

SEQ ID NO: 57885 - DNA, 219 bp, Glycine max
  unsure (1)..(219): unsure at all n locations
atgcaagcttgacgatatggtcttcaccgacgaaaggatcaaattgttgtctttaagatttcaatctgatcatcttgctntgataaatgcaaaaaaataaaagctggagcaaataaagagggtgaggatgaangagaagcccgtgctgtgactgtcattcctatacagtcaagtttcccaccaacccaacaatgttattactcagttaataaacaacct

SEQ ID NO: 57886 - DNA, 300 bp, Glycine max
  unsure (1)..(300): unsure at all n locations
aagtcacctgccgcatgcaagcttgtgcatccaataccctgatgaggatgtcccatatgttcttatttctggactgattcatttgcttccaaagtttcatggccttgcaggtgaagacccgcacaaacatttgaaagaatttcacattgtctgctncaccatgatacccncagatgtccaagaggatcacatatttctgaaggctctttctcattcattagaaggagtggcaaatgactggcttgtttaccttgctccaaggtccatcacgagctgtgatgaccttaagagagtattctt

SEQ ID NO: 57887 - DNA, 168 bp, Glycine max
  unsure (1)..(168): unsure at all n locations
gctatcattcgctatgtttagaganagcaaaagaatgtttatacggataaccacttaggtatttccgccctgcccctaacttcacgagttattctcgacagatgttgtctgcgctgaagacgacttctatctctccgtgcgaactaactttgtggccgcaattgacaa

SEQ ID NO: 57888 - DNA, 177 bp, Glycine max
  unsure (1)..(177): unsure at all n locations
gcccactccatcattaagagnagacttttgttctattctatacaaaccaaccgaacaagacaattatagttgttgttggaacacctcacccgctcaagcgtatcacacaattatggcttttctctaatgaaaacactcttgtcttctaccactctaatgtcacttgaggccttaggc

SEQ ID NO: 57889 - DNA, 122 bp, Glycine max
ttttttttaacgcccaaacagaaacaggaaggagatatcgccccccacatcactcccaggttcgtactaaacccaggacatgtttggtgatgtctagcatcgagcgctgaaaagctacgggg

SEQ ID NO: 57890 - DNA, 417 bp, Glycine max
  unsure (1)..(417): unsure at all n locations
cccgtatcttaagccacctgcagcatgcaagcttgtacataaccagaatgaaangtgatacttattatattcaactagcatctaatcgatgatacttgacacttcacaacggagacttgactgtaagaataattgcattgatcaaacgaaaaagctctcccaatctaaattccgctatataaaattgatcttctaataaagagacaataattgataggcactctcgtagcctatgcgcagttttgttcaaaagatactaagaacccaaccagagatacataagttgtatctcctctgaagagctgaaaacactgttgtggcaacataacgctttcaaaagaggtgcatatatatgctntatgaatattcatgtacaataatgcatggctagaatcgccatattgctggtcttcacac

SEQ ID NO: 57891 - DNA, 334 bp, Glycine max
ttacacattgcaatgcagcgagtataaacaatgtgaaaaggtgtatcgaacttgcgttcaaactataacagatcttcaagcaacacttaatgtaccgctttcattaattatccttattgaaaatcacgacgacatttcactactttaatagaacctacatttcttaaattactccgaatcactcatctcaattctgtctgtgcctaatgtttcattactccacaaccatacatgaattttaacacttaactcactgcgggaatgaatacagagagaattacaaaaattctattttcatgactatcatcatacaataaattcatgatatcatcat

SEQ ID NO: 57892 - DNA, 475 bp, Glycine max
gcttgtgagctataatgagccaactcatttttactttttgacatactaaaacaaaacaagctattgcctcaagactcgtgaagatagatatccttactcttctgccacactatcttcctgttacaaatatttcaaatgatgaagagatatcaaacctgctactattatgattgaaaaataacaaaccatgccagcttgaacatttcttttgcttgacaattcccaacataggtgttaagctgcaacccatgtgtgtcacataatctttgccatgatggctacacgatcaacaactcaatataaattggaatatctctttgggagggtctgttctacttctattcacaaaatagatgggcgtgagaattacactttgagttctgagcatcacattggcaagtagaatgcgagtattgaactcctaacatcatttatattccacgtgtgaccagtatactcttaatccatctttcat

SEQ ID NO: 57893 - DNA, 362 bp, Glycine max
  unsure (1)..(362): unsure at all n locations
cttttcgtctctccttgatcattcttgcctcatccactgaatcaaacattccataggagtaaaatacaatacgttaacttaagctttataaatgggaaagaatataaaaagacatagctgtcacacgaattaaacgatactctaatatattgtttacctaacgaatcaaatgtttacatgcatcaagctcgagtctgactatgagggcgattggcgaaaccttaanaatgtgtttataccaaattcacacctttagctagaaactataattaccaagtacatatatggattatcatcaagattctctcttcttgtagactgattatctatagaattaaaaactatttcggtgataacaatat

SEQ ID NO: 57894 - DNA, 420 bp, Glycine max
  unsure (1)..(420): unsure at all n locations
ttcgcttgcttctacctctatgaaaagatctacacattctcaaataatattttggataaatagtcacttctatttgtctaatttaaaatttagtttctaaaaatataaaagatgcgatgaatatatctgaccgtgttaatttaagttcgtcgtcgtttataaaatagtctatacgacattaaggaacaaatttgtcactgaaattattatcaacatcatctttaattggcaacatagggacgcatttattatantaatatttattgacttcttgtcttcccactctgttgacaaatgacctgaaagatgaaaatatataatttagtccctgaaagcgcgataaatatattctgacattaactttcatccgtcgccgtaatataataataagatccaagaagtgaatatgaatatattatc

SEQ ID NO: 57895 - DNA, 329 bp, Glycine max
  unsure (1)..(329): unsure at all n locations
tctccatgtatctcctcacatgtcttgtgctaaatattgttaacatgattctctatagtttccaccgcataaacttgctatataagctagattagattttctattgttcacatttcttgttcttgttcttgaaccatgaattgcgtagactttacgttcctctgagttttgtctcgtattttttgcggctgatacctataccataaatatcttacaaaaatattaaattagaagaaaacctacaaaatctagagtgactngttcacctattgtagttntgtcatagaagtcatgtctagtcatgaaactttgtcacatagatgtcttat

SEQ ID NO: 57896 - DNA, 330 bp, Glycine max
  unsure (1)..(330): unsure at all n locations
cgggagcaccccnnctcctggatctctcggtagctgacgaagctatcagctcacccctcgtacaagaagaagggaagcaccaactctctatcntatttaccagccacatgctccatgatgctaagaagtgctaccaaatgattgaaaaggtggcgctagcactcatcaactcggctcgattggctaagccctacttcagaggcatcaagtggaatcaagacaactacctatcatgctgtttgagaaagctgaaccccaggaggatggggcaggccataaactttagagttgcattcagttgaaccctgaccatgagaccagtatggtaca

SEQ ID NO: 57897 - DNA, 469 bp, Glycine max
  unsure (1)..(469): unsure at all n locations
agctntacatcatataaagntttaatgattctcatatttcttatgggtggnctatgatttgcagcatacacttaatgaaatcacttatatgagtgtcaagtggggtagcttccatgagatcttggcgagatctctagagatcaaccacttttatttattaaatgttattttttcttttgaaatatgtgagggattgttgtatttaaatatttatttcacaagaactttcttttaaagaattcatacaatggagttcatgaggttcgtgatctgtgactttatgaacaacaatgactagtgcagttcatgtgcaacanaacaaacaacaatatgtanttaccattaaacactcactagctaactcttctatggcttgcaaattaacaggaaatattgattatgataacacactagtgataatgagactctccctgacaataaatgaattgacatctttatgattcttacg

SEQ ID NO: 57898 - DNA, 332 bp, Glycine max
  unsure (1)..(332): unsure at all n locations
aagagtattctatatgaaatatatctccatacgagtcctcaaaatatagagtatcaacattgctaagaacaagaaatcacggacaaccatactatctaagcaattaaggcaaaacaccatactactaacatacccagaattataaggttcttataataagtatacaacgtacatataagaagtaagaatntaatagctaataaggatgtattaaagaatcacaaatgtcaactactacattcacgactgcacacaaaataaagggagttaagtagtcatgcgtttacatatcaagaaagacatactcatccaagacatatatatatgggtca

SEQ ID NO: 57899 - DNA, 247 bp, Glycine max
gaggatcacttaccaaggaggatctctaatcttgaggaacaaaacacctgcgatatagacttacaccttgaggttgcctgctgaagaggaaattcattcttatcttaccttgtttttaaacagattcaaaaaacatctatgccaaatattctggactaactcatttaccactcagataacgattctgacctactgatttataagaactacactctttgaaccctattgacccgagctagtattgcat

SEQ ID NO: 57900 - DNA, 986 bp, Glycine max
  unsure (1)..(986): unsure at all n locations
aagatacacaaantacatcatgatactagaacaacaatacagaactcgacaaattaggagaggcgcacatagagaatatgatccgctacactgagagagcacaaggcacagtgatgacactctagacacgccaggaaacaataaaccaaccgcggcctgctaacttaacggaaagaaatataaccctgttatatttgaaaaaaaccgggaatcaaagcgaaaatctcacaagccctgcagaaaatttacggggccacatgggtggcttcggaagtgccgaaacatattgaactaaggggatgaacattgaaaaaaacctgccccacaaagaacaacaggatttggggacatggatacctggtaatataaagctcgaacaacttgcggtagaccgggagaaataaaaagtaattggttcaccaaagaaaggaangacaannagaagaaggaaccgtcctttttaaaattttgaaatccagaattgggtcatggccaatagcgcaatgaacaattaccacccccatccactgcttattgcatccgacgccatagaaaaaaggttcccgggggaaacagaagttatctgaacctaataaacttcttgcataaaacaacattgaaaaaatttggactctctcgatccctcatgcaaaaatccacaatttcatggaccttatttctaagaaacaccggcaggcccccaagaaattaggttgagaaacaatatgcggtcaatatgggaaaccaatgaggacctggcacccaagaagagggttggccatgaacttcttctttaaaggggcaaaaggttgcctaaaacttttgaacaaatcttaggaataaaaatttggccaaagaattattctgttgggaacacaccttctgcaaaaacggatgggaaaacaaaaaattattattatcagatgtaggaacaaaccttttttggaaagaaaacacaatccctaaaaccctcacaaggaggagag

SEQ ID NO: 57901 - DNA, 456 bp, Glycine max
gctgaacccttttatcaataaacacaagttggatcttattcacaaaatgagagtttatctcttttatcttactgagagggattctcctaaagtcttgagggattcaagaacaccctggctgtatcaaaagacattcacaacctttgcgtgttgccctcgctggaaagagtgaatctttccttcctttcatcttcacccttgttctttcaaaccacaatttcagaaaatccacctctgcccaaaattatctcgtggccataactcccattttacgcactcaaattaagcgattcttgagcctaaattgaatttcaaaacgagtcctttcaccttggtttggaatcacctcatttggagccctttagcttcagttatttccatttctatatttctgtccagccaccacttaacctacgttttaccattccattcaatcattttatgcccaaaaccccc

SEQ ID NO: 57902 - DNA, 434 bp, Glycine max
cagccttaattaaaaatagtattttttttatttcttgaaaatatttccaacttctctttttgaaaatataaaagccttcaattaatcagtttttttaataggaaaaaatatatttactacaaactcaacaaatatatccgagagtttttttattagtgaaacctatttctactatgcacatacccatgttttcttcttgcaccagccaataataagtaccacgcccaatgggccttaataagtatcccgtgcatatcatacaataggatcaaaaggcttttaaattaatttgagtgtcatgctgataacgcaaaagtcctagattcgagtcctgtatgagccattattttagaattaattcgtaaaacatatttttttaaaaaaaaattaaaaaaaaaatctgcaataaaaaaatctatatggacctatatgga

SEQ ID NO: 57903 - DNA, 680 bp, Glycine max
  unsure (1)..(680): unsure at all n locations
tatcttgtaacccaactgaccatgaatcaaaaatttggccttgtcaccaaactctgtgggttatgctcctctggcgaccaccacacaaacctttgcccttttgtgcagccatcttgaaccattgaacaaccctgaacttatgctggcaacatttaccataaaacttttaaccttcacaacaaaatttgcccttacagaacaattattacctcttcaacaacaaggtcaattctcggtggaagaatcatccccaccctaaatgggcgagttctttacaacaacagccaccaccaccaccttattttcagaatgctggtggcccaaacaaaccatacgtttctccaccaattcagcagcaacaaccttaaaaaaaacaaacagttgaggcccttttccaacttttctttaagaacttgtgaagagaatgactatgccaacatgccaattttacaaaaaaaataacctcctttccaacttaacttatttgatgggcacctgggttattgttaaaacaaaccagccccccaaatttgaaaaatacccttttcatattggccaaaacccaaaaagtgaggcctttacattggggcgggaaaacaggggaagggccccaacttaaaaattttcctttttgaaaaaaaactgcccattttttttttttttaaaaaaaaaaagacaan

SEQ ID NO: 57904 - DNA, 954 bp, Glycine max
  unsure (1)..(954): unsure at all n locations
tagaanttttggtgagacctgacgaagcanttgcgnacananaccncnngnaantatttaacaacacngaccctggcgtgcatangcatgctattaagtgattctcactacgaggcgaacgtctctttttatccttcgtgacggggagcaatggtgcacaaatctgtcgtgctgcgttgaaaaacgattataccccttcacaaatttcgccaccaccattactaatcccggatggcatataatagtctcagccctgggggtggccctcactaagcgatactaaaccccccattttatttgagttatgcttcctcacctggcccgtttttcaattactggaaaacgctagtcttgcccgacttgtaattattgaaaacggcccaacagcgaaacccccctgcgagcccccccgtccccgctcatcatatatagttgtttcagcaacctgtttttattcgacatatctgtccatctagtccgccatttcttacctacttattttgaggcctccaataacacacatccctatagatgggcgaaacaatttgtgtgctccttatatacaaattaatccacccgtcacagttcattcatatagcagggatggaagtgactgctccaataacgccattgtgccactacagtgtatgccccgcaccacagcggtggcttttaaggtctggatccgtccgttgactctatttagatcgcaccattagcacgataataaacctcccatagagaatacactgagctgctataatagttctcgtgttataccctcagatctatcatcataatcgggggaaattctctgactcacatctcggtttattacataaacatacaatctcaagctttcggcttgcgtcgaaaattccatcttctcatagtcacataactctacgaacttctcttatgctgagtatgtaaactcacgtcaaaccatgctcc

SEQ ID NO: 57905 - DNA, 485 bp, Glycine max
  unsure (1)..(485): unsure at all n locations
gctttatcggaacgactagtaccccgtcttattggtagagacctgtgatcaatgccgaaaattccagtgccctgttgaacttctctgggtccactgggtgtctcggaggtgcaatacatatgaactagtggatgacatctgagataagctgccccacatgaacattgatttgggtcatgatcctgtagatcagctgacacttgggtagcgggagatcagagttatggtcactaggaaggatgttactgagtaggagcgtcttctagatttgagtcagattggtcatgctaatgcgcatgatccgtacccgcctccctgctatgctccgngcaaaatcatgtcccggggagcaaagtagctgacctataacctcttcatcaaaacttgaaaattgacttcttctctcagcgtactcgcatcgctgtcccttttctaagaccaatggatgccccaagaatgggtgatagcctctgtgtcatatggga

SEQ ID NO: 57906 - DNA, 955 bp, Glycine max
  unsure (1)..(955): unsure at all n locations
tgtagtcccnggtagatcttctctaccagtccnccggagannctttaaaagatcaacctcgccgtcctagccaatcttataaataatggggctttctccacaaaaatcttttttaattgtgcctttttcttcataagaaatataccccacaatatccatcaacctccaattctatcccaaactgggtaatatgtattcattttcaacaaccatttggttgcgcaaaacaaaaagaaacttgcaacgcataactgcttaaataattaaggtaaaaaacaagcctacttttgtctacatggaaattttaatgaaagcaataccttcatgaactatttgaccatcctaagaactacctttcagggataaacacaccttaataaaaccactcgtaccaaaatgcttaatcttattttcacaattctcacctacataaaggcctctaagattattaaatttaataccctttgataacattcaatggtttaccatcacagataattgcgtccaaaaaaaattaaccatttcttgcttcttgggatcccaaacaacctcataatcaaaaagctacttccgctgggatccacccaaacattgttccttctatccccaacctatcccatttgtgattataaaccctttttaatatttaaaaacttatagcccttttttctcttgaaataattaccangaaatcagacaaaccccttttaaaatttttatggaaacctggaattgccaagccaattattttttatttaatatatccaagggccaggcacccaactctctatggaagatctaaacaaataatatatttctcttgggccacaaaacaaatacgaacccaacttactaagatggtttctattacaaagccttgagaggaaattaacaactnctcttgaattataatgtgctaggaatcctctccatagaaaacaaaggattgtaatan

SEQ ID NO: 57907 - DNA, 1090 bp, Glycine max
  unsure (1)..(1090): unsure at all n locations
gacgtcacnnaagcgacnnnngttgtagntcatcgtcggaanccncgccgagnancctatagaaggacccgctgcgggtgcctgcgcancttatagcaattaatctattagccgcatcgggtctatatgttgttttaacacacnccccgcctacacagacaacataagactcttggtttgtgatctatcaagtcttcggtgtggttaaatgtcgacctaaagacccaaccaggcattcgacatacacattggtccgccttctttgtcccctcttcatatattggcagaattgatacccaacccccgattattttattcctgaccgaacgtctactccaaaatgaggtccttggagccaccggctaatatgtggattacacacatcaccataagcgggtttatatttcctttaacctcgaacaaagtaaaaaccacttcgcaaggataacaggtgcctctaggcgcataaataggttataaatgtctattcacaattatcgtacgcatccttagatagccggcacctcttatttgttttaagaaatgctttgcttgtaacaaattacacccccatttcggtgcggcctattgttggtcccccaatgccaacaccacgtggatagaaataccaaattgccgtattgttggttctctgtcccacggacacatatgaagtctgtttcagaaaatcctatagcgcacggatctcaaagtttttatttgaccacaagcatggaaaatggttgttacttttgggcacaaatacacaccaccttgtgtttgaacctgtctcggtttaataaagactgtgggaacaaagcgttgacgtagcgctttggcntgtgattacaacatatctgatatctccaagaatttgtgtgttacaaataaaacgtatttatctaatctggattccataagttcctaagtagtggcgcgtgggaccataactaattctggatgttgcaagaaacacaccaaggtttcagataactctgagactagaattcacactatgcccttactgcttcataagaaacccaggcgcacaacttgtactcttacattttacataaaaagaagaaatgcg

SEQ ID NO: 57908 - DNA, 1398 bp, Glycine max
  unsure (1)..(1398): unsure at all n locations
acgaatctgcagctgacgcagntangtagtanctgagtaaacgatngtctagcaaacntattaacctatnntcaaacgtcctgcantacacntcgncagngtntgntacgtntgcgtnntncggtaggtagnnttacaacnnntatntacganctagtcagtgagtantgtacctattatngcgtntcaataaaccttctacgatcaactacggctacgtantganctaaaaaccccnataatgagangnnnnnnnnnggtttaggnantactanctgcgtgatcgtgcagtgcccanncncnncgangannactctncnnnannanaannanggancanccnacgggctgctggcccagncgagctcagaggacncntantgcgaaaataggtganaatatnancataaaggaaatcgacccgctcatgcagcgntatataatctatattttgatgtgtntntcatctcaaacacgtcntgggcgccccactagagagaaatatcagatgaagaatacnctgtgcaacatctacgntactacgacatagcaaagctgctaggtgagagtgataataggcatactcctagttgacccgcaacacaagtcaatcacagagagaanacataattgtctctcatcttcgtatgcgtggcgcacgtcactaactaccatgtatcaatctaataatgntgagcagcaaaacagcccggaagaaacatataataggcgctgagacacaacattgcgtacaaaatatagaccgggcgccgcacacacttcgagcggaacagaaagagtcacgccaatcaactagaaacaaatttatagacacttttacaaccgacaaggtacaagcatcgggtaggaggaaaacctacccaggcctaaaaaagggtctagggactgcaacaacacacagacggcaaacaacagaccttaatctttacaaaagctggctggaccaaaacagaccaaaaacgggaccttcatccaaaaccaggcggaaaaactcctaaaaaaaacagcagacaggctgaagccccttcctcaacatctcccttggaaaaaacctgtgcagggaaaatgaacaatgcccgaaacaagccggtctctaacaaagagagaaagaagcccccaatgcaaaagcctaacactaattaataagggaacaaaccggggtaaatacgtttataataacaaaaagaacccaaatatctggaacaatggaccttctcaagtcggccccaaaaacccaaaaaatgcgaaccgccaataagaatagaaggtccggaaaaaacgagcgcgaagggcacctaactagacaagagagggaatgaaactagaaaaagaaacccgtaccataaatcactcaaatattaaaaaaaagagaagaag

SEQ ID NO: 57909 - DNA, 773 bp, Glycine max
cgggctttgttgacatcatctcggacccgggatcctctaaatcgacctgcggcctgccagcttgaacatattttcgctaatctttttttattcttctgcactgggtttttttttaaccccagggtcctccttacagaactttttttatttgaactctatcggattaggccaaatgaagcaagtctttttcaactagatggacatgggtgtgtatcttggattcaaactctcaacctctggataaacggatattaatttatgcgaaatgatcgaaaacctgagcttgttcgatgaggaaaatctccttttatgcgtcaacttgggagattgaaatataccccaactcttgctaatgtaaattctaccaatgagggtttctctctagttttgctgacatcccccagcaatgccgtgcactttgggatgggcaatgtgaataataacttacgataacataaagcccctgaatgcgaccccctggttcattggtattgaaccttttatactacaggtttggggggctttttcagtaaccccttcttcttatactcttgaggaataattgacccctcatgacccgtatttcggcagcataactccccttttccttaatggcccagcggggcccttaactttttagatactgccttattgcaaaaagaaccttattctcactactagatgtttttgactcttatgcatgaactaaaactggtgttgaaaaataattggtttttttgacggtttatgaaaaaactttccctctcttttcg

SEQ ID NO: 57910 - DNA, 925 bp, Glycine max
  unsure (1)..(925): unsure at all n locations
caaacaagaccagcactccagaagacgactaccctatacaactagcaagaatctaacatgatgttgcaccacaacacacaactcatanaccaagcncagcnccagatnccntttgttgactggccaaccttttaccnacccgggaaacccaaaaagccgcccgcgagcatgccaaactttgagtaaattcctcacaccaaaaattaatctcacccaagagagattgccgcactccactgagaatgacaaactcgaatcttgtacctccgaaccaccaaatgcctggcggataaccaataccataattcttcaaaatccacaaaggtctaatggccataaagggcgaggcgggggtggtttcaaacaaagaagggggtggcgaaaaccgaactcaaaccaaagacaaggttgttgcaagtacaaacacataactctgacaagctacaatcgaatcaatccccagtatcaaaccggcaagggggggaacaatagcaactatgggaaaaacaaccaaaggcaattatgggaaaaacaaccatcataataactgggcctcaccatccaatccgaatcaaaaatgggggtcccaattataacccaaaccataaccggaacaagtcttctaaatccaaatggagtccacagccaagtccaaaatcaaaacctaacctctagaaactcaaatttaaccccggccaaaaactaggggggcaaaaatccgacagcaaagctttcaaaatcttggagtcccaaaaccgggaaccgctcttccatgggaaccaaatactcccaaaaaaatccagcaacattcttcttttggagggggacaaaccaaaacctccattgggaaaggcaaaaagggcggaaaaaaaccaaaccgccgggacaacacaaataaggtatcccctataaaacaaaaaggaaa

SEQ ID NO: 57911 - DNA, 953 bp, Glycine max
  unsure (1)..(953): unsure at all n locations
tactgctagccttaataagagacatgtcgacatcacaaacattactctcagaatcatacttgtgacccgactttgtagtctatacagaaccaaacccaaaacaaaganattgtactgaaacatccagaccgggaaactttaaataaccgccggcggcacttttattgtccaaaacaatatattttttttggtggggagtatgaaaagtttttaataaagaaggaaataataaaaatggatgggcgagaatgtttaaacaaacttttatatatttaaaagacaatttttcaaaaaaaaggtggaaaattctgccctataacataaaaacttgttgcacaaatgaaaaaaagcaaaccactgcatttagaggcaaataagaatgagttgttgggttgaaaaaatgagccttgaaagcgaaatatggtttgtctgggtcccttctaaaaaagagcgaaacattccacttcctttttcaataattttatataaaaaaatcttttttgggatgataacctaaagatctaaaaactctcatttcgagcgtactatttatataacacctaacaatcttttatcaaaaaaatagaagggtcggtaacgcggtttataataccaatggctcaaccaaaaagaaaacaaaacgatgactccattaaggttaaataaagtgaacaaattaagggtcaaaagcatatgccaaacaaaaatgtgatttaaaaaacatctaaagagccggataaaaataaataatatagaaaggaccccagttagggatgaacggcgtattttatgtagtcggaaaaaaaaagaaaatataccattttaaagtagaaggagaaaaaaaaacaccacggggcttatatgctaatatagagaattttacattagaaattatggggacaggaaggaaacattttagaaacaaaactataatgccctcggggagagaatan

SEQ ID NO: 57912 - DNA, 552 bp, Glycine max
ccgcatgccagcttaatccctctttaattagaaaaaatcatttttatctcccttgctcttataaataggaaagtaattcctttcctccttaaatggaacatcttcttaaacctcattatcttgttaaacaactttgtgaaccacggtataatacttttctccccaaaacacttggagacttctatagttatagatatagatgcaaccaaaccattcatgggccttcccaaatagcttgagctttgagaataatcagttgactcagttcataacaaggaaattgtttggtccaactactttaccattgcccatcctctttaatggcctttacccaaaactacaacttacaacccaaaaaaaaaaacaatgaaattgtaggcatagcatatctgcagacaaaatgctttataaatagttaaatccaacacgatgggcatgcccaaatcacctaagggcttaaaactttggagtggtttcaaaaatattcttacatatttctcaccacaatgtggtaaaaaaatatgtgagaaatttatttagattatcttaaaa

SEQ ID NO: 57913 - DNA, 234 bp, Glycine max
ggcttcatttcctaaattatttacacctactttcaaagagtatttgttatttacatcacacacccctccttggcttaattgacatacatgcatactcaaagcattttggggtaccaaaaaatgcacatgccctcatcttgggatttctaatacctatacctattcaaacttgatgatgaatcttgacttcctacccaataaagtgcttcatttcatgctttttttttcaagttt

SEQ ID NO: 57914 - DNA, 1207 bp, Glycine max
  unsure (1)..(1207): unsure at all n locations
ccacgaacacgcgcagaacagcatatgaatcgacatcgcgacactcgcgaacaganaaactctcggataagcgggagatgaacgatacggaatatataacaactaaacaatgcattaagcaaaacnaancncaagagggantttgatgatcgtacgcagcancnggnngancnnnannanaaaaccngcagggaagcgaaacnaaaaaataaagaaggaaaaagaaaaagttttttatgttcgtgagcaagaagaacgaaacaaaagagaaggggacaagagaagaatcagagagggaagcgacacaaggaaagaattgggatacgagaacacgatacggaataggagataagaagaacaccagaagatacacaagtcaatnggagaccaattacgcgaaaagaggaggaaaaaggaacatggagaggaaaacgccaacgaagaagagagaaatcgaacgtataaacagaaacggcgaacagcaagcacgagaacagacaggaataggaaagaggaacaacacacaaaggaacggtataaaactgaaaaagaacagcaaaacaacgcatgaaacacgaagtaggagagagaaagaagaccgaacaagaatagaacgaaaaggagaagaacgaatgcgagaggatacgacgtgagagaccagatcgaaagagcaagaaacatcgaggagagagatacatgcaacgagaataggaagtcgagcagaatcaacagagaaatagcaacggatgaagcgaaacgataagcgacagcgacaaacggaaacagagacaagaacacgagacgcaggcgaaaaacggagaatcgacgtgtcaggacacggaatagagagacggagagacaaacaacaggaaaggaaaaacgggacgggaagggaaaggcacagaaaaaggaggcaacgatagaaagaaaagagacgaaacggaaagaaaggataggaagaaagaggaacaaaataagaaaagaagaaaaaagacgaaaaaacacaaaaagacaaaagaagataggacgcaaagtaaaggcatggaagagataggaatagaacagagaagaaactgaaagtagaagaaactaacgactgacaaagaccgaacggcgaagaatgaaaatggaaaagagaaaagatagcaaatgacaacagacaagaaaaacgagagcagaacggaaagagatgatacggaaaagggcg

SEQ ID NO: 57915 - DNA, 767 bp, Glycine max
ttcacggtgacctctgtaccggatcttaaatcacctgcaggcttgcaactttgaataagaaatgttaaaagggaatcttcctgcttttattggtgaacaccagatggtacctggaaatatgtcccgggggtcaagaaaccctggggacgtcaagtggagtgctattgcccaaaaccaaacttgaacacatccgaaccaacccgggcataatccggcagtgaaaacctgtgatgtacctaagcaggcgaactcctggcagtcaacagaataaaggaaaaccagaccccaaagccaggaagcttgttgtggctggccaactgtgaattttgtgtaatatgtggattgtggcctttggtaatccattaccaagggtgggttatcgattacaaggcttaaaaattgaaaacaagaggctaagaaggtctcttggaaatcgattacccaagggtgtaatcgattaccacgcttgaaaattaaatcccgaaaacctagggagcctttggtaattcaatactaacccgtgtaatcgattccccgaggaaagggtcactgggaatccattcccagcctgtgtaatcattacccatggattattgcatatttcatttcctgaggctgttatttcaagttatccctttgcaatcacatcccaacgtttgttattttttttccatagattgaaaatcctttaaatacctttttttcattgctgttttgcgttataaaacaaatctgtgactttcaatttaatacttttttaataatcg

SEQ ID NO: 57916 - DNA, 924 bp, Glycine max
  unsure (1)..(924): unsure at all n locations
ccacacacccaccgtccacaaccccgggcgacccagatatactaacacagctcaaaaacagaccgcaaattcaaaaggtaggtcaccacgcaaggancttgttgatgacgtctatccacgacnanaaaanaaacagcaggaggcaagctagaaatgaagaaagaacaaggggagatttctctttattaaacacacgacggtcccggacaaagtcacgggggcacgagaataacgaaccaagggggaaaattgccaaaacaggctcacaaaaaccacccaacacaggcataagaacacaaagagaaaaagggatggacccaagcattgaaaggagtggcaaagacagagtaaaagaactaagaccaccaagcaatgagggctggggaggaggccggcaaaatatgaacaaaaaaaaattaaatgggatacgggacactagcgaacaagaagaaaaaggagggtgggggaggcccataaaacaaacgccctctggaacaagaaacacaatgggagatacctatggtcccatggaaaaaaaaaacaaaaaggggagtgaacaaccaaggaaccaaactccgggggggaagaaaccagcacccaaccgcaaaaacgtggctggaaaacctcaacaacaaaagggggggcaacaacaaacaccaatatattaaagaaagacaggacggcccaaagcgggaaaagtccctttgctaccaccaaatactaatcaaagatggaaataaaacaagcccccaagaaacaagacaacaaattgaggggccctccaccaaacttgccttggaaaaaacttgggagaaaaatagacgatgccaaaaacagtccaactccataaaggaagaacagacctgccctaagatagagcaaataacatgatccaagggagaaatggacaccaaacaggaaaaa

SEQ ID NO: 57917 - DNA, 415 bp, Glycine max
cttgattaattatccacaatggcaagctgagaggctttgtccttcccaatatgtcctggaaacatggcaataccatgccctttgtcctgaaaagagtttgcagccctgccgggaacattcccatgcaactctgtggagggtacaacattaagattgctgggcttagccccgtatagtgatgcagaacctgctgctgctggccagaatgaattcatcctcgcaatttgctggtgacacaatatattgcgagcaatgtagcagtgggttgcacaccttttcggccgaggctggttaaaaagaagatggggaagctgtaatttaagggagaaagtgattaatcaggaattcaattccacattgtttcaaaatcataagtttaaaaagggggaaagtaccggtattgctgcagatgtca

SEQ ID NO: 57918 - DNA, 397 bp, Glycine max
gcaattatttatgcaatccaaattatttcaaatgaaatctattttcctttaaaaaaatgaaatcactttaaatggcagaataattattttttgatgcacatagtaggtggagtttttataaacagtcattcatcgtgattataatatttttaccgttgattgaaactaattgtttgtataaattaatgttaaaatggttatcaaaaaataattaataattattcttatacgtttattctaatataagtttcccacaaaaaattaattcataatcaatttaacaaaaaaaaaaaaagccaccaactaatgtaaattgtcaatcaacattaaatacgccttttaaatatgataattattatttaatttattgattgtgttttacgtatgtgcaaaaaaa

SEQ ID NO: 57919 - DNA, 351 bp, Glycine max
gggtcatgaaaaccttgggaccgtagggggggtgcttttgcccaaaaaccagcttgacccattcccacccaaccccggcatagttagtcaatgaaaacctgtgatgtaccttaacaggcgagctcctggccgtcaacccataatagaacaaagacccccaatcagggaggcttgtgtggtggctggcccactattaatcttgagtgatatctgtgatatggcctctggtaatccattaccaagggtgggtaattcattaccaagcttaaaagtgaagcccggaaactaagatggcctctggtaatccattaccaggggagcgtcatccattaccgggctttaaaatgagat

SEQ ID NO: 57920 - DNA, 530 bp, Glycine max
agctttaatccttaaacttttcttatctattttcagtctgtttactctttttcttttccagatttttaatcccttaatttctttttgcactcttactttggttctttaaaataatcaaaagcaaaggcaaaaaaaattaatgaactaaaaatatgaatgaataaaaagttaaaagactaaaaataaaaaaatatttaaatgactaaaaacataaattttaaaaaatttagagactaaaaagataatttatcctaatataaaatcctttatcatccagaaattattaaataattcagaattacttaaaaaaatctcttgaatcactaccaaaaatatcattattagatatcatcatattaaaaagaaataatagagaaatcttattctccaaatatttctaatgagaaataacactttgatgaaagtcctatatacaatatcatttttcaaatagaagaagaaaataatataacataaagtttaaaaaagaaaataatataacataatattaaaatttatgataggatatg

SEQ ID NO: 57921 - DNA, 517 bp, Glycine max
agcttgtgcatccaataccttgatgaggatgtccatatgttcttaaaactggactgatccatttgcttccaaagtttcatggccttgcaggtgaagacccacacaagcatctgaaagaattccatattgtctgctccaccatgaaaccccccagatgtccaggaggatcacatatttctaaaggcctttcctcattctttagagggagtggcaaaggactggctttattaccttgctccacggtccatcacgagctgggacgacctcaagagagtattcttagaaaaaattttccctgcttccaagactacgaccatcagaaaggatatttcaggtattagacaactcagtggagagagcctatatgaatactgggatagatttaaaaaattatgagtagtttccagcaacaggtacaatcccgggtggaggaatcatcccaaccttagatggtcgaatccttcacaacaatagcagcagcaacaacctttattttcaaaatgctgctgccccaagc

SEQ ID NO: 57922 - DNA, 244 bp, Glycine max
agcttatatgtttttcacaaattgggcatgggcattgttctttaacattatatcacttcaaaaattaatatgctggaaattcgttgatggaataaaataccattgcatgcaacttgatggtctgttggtggtacccatccaaaacgccaaccttgtccttccccaactttcttaaatttttaaccaagggaattaaattatcatcaatgttatttcttggatgtcttggacctgaaattatcat

SEQ ID NO: 57923 - DNA, 1028 bp, Glycine max
  unsure (1)..(1028): unsure at all n locations
acaccaaagtaacattaatatcgaacaacctataccatcttatcgaaccaaatataactaattaaaaagcaaacccagccnttttgactgattctttgcgcccgggaacttaaaacaccgcaggctgcaactttgaatcggacctcanagggtaaatattttttacctctgcgaatntccccgaaaagcgtaccggttgggttaaaatatcagaaggccagctctgtacaataataaatggacggcccgagaatactggacaaattcgtgggtggaaaaaagttaatcgaaccactttaagaaatattattatcaagaagacctcccgaatgacataatatttccgaggcggtctcgacaaaattagtaataaagcgcctgacactcgaacccttcagctggggaaaagaatattgaaacaatttgaaataatctccaaaaaactaccccgaggaaaaattttagaaacgcactcttaaaaagaagaagaccaccgtagataacaacataccggagggaaaaaactatataacactctttgaaatatcaccaaaaaactcaccgaggggataatttaaccaaaatgatccaaaagatagatattaagccactaaatgatgtaattcaagaggtaaaaaaatatagaaacaatttcgtattatttacaaaaagcaaacacccaagttaaatttcaaagacagattatcaaaaataaaaatgccccacaaagcaagaatagctcgaggagaaaggaaatgaacacaatagaatttaattaaagaatttcgcaatgagggacaatattccaacaacctaaaaaatattatattactctacaaaatgacacacagatacgctaaaagataatgacacgtttcatataacaaaacgaaacataagtactagatacttcttccaaacaccgcatgaaaagtaatttgcaacgacaacaaaataataagcaagtgtaacaagattgttatactaataagaaacagcgtcggaaacatattgataaatctcaaacg

SEQ ID NO: 57924 - DNA, 1223 bp, Glycine max
  unsure (1)..(1223): unsure at all n locations
aggctaaacgaaacacgaacaacatctaatcaatctactaatactccaacaatacgcagtagtgcatacatacaaatactctcaatatagaacaatcaggacncttgatacttccttgacccccgaacnataaagaaaaactgaagcctgcaagcaatatgtttatacaaatgggcatggctttttcctttaaaaaataatataccggccaaaaatagcatatagcttggaaaaaacatagaagggaataaaaaaaaccaatgggattgcgaacatgaaatgagatgataggagagaaacacaaccaaaaaccaccaatcccttggttcctctccgaaaactttacttaagcgacgatgcgaacacaagggagacatcatcgaaatagggcaagccgaaatggtgacaattcgctatcgggctgtggcgccgctcggaaaccgcgtgaaagaattcnaaggagganacacaaacaacacaagatgcgtattagatattgcgtatatcaatggaaacacaaactcaaacaaaaaaatatacggtttgagtagtagaacaacataaagctctactcaacacaggactctaangaaagaccacacttcggatgagtaaacgccttatcataattacacacaccaatagaggaatatccaatcttcctctaccatgagaaacataaagaacacacaanaggcgaaangaggaggtgactctgggccctcaaattcagccaagacaatgcgcgggagaaatacaaacactacattataaataatgcgtactttgctcacgtgtggggaagagaaaaatacgacccctgtgacagcgcactcagtacacacacacccgacatatttatgaatatcccaacgtaaaacacaaaccaatgtagaaggggtgtaaagcgatctgattccaatcgaaacaaaaaaacattactataacaccttgaaagaaattatggcaaggaaatataatatacacgtactcttggcgctgggagggcgctgtcacactatagcacgcgtgacaatatataacaagcaaacaaaacgttaacacccctaatatatgtgacacgcacagacaagagcgaccaacacaggtacgacgcggccgcactacatactcaacgaagaataatcatgttatcgttaacacgaaccgagacgcgaacatagtaaggggagacgtcatcgtgattagatcacacaaggccg

SEQ ID NO: 57925 - DNA, 939 bp, Glycine max
  unsure (1)..(939): unsure at all n locations
agccctcnnnngtaggacntctttgaaaccccgagcantttaagagaaccgccggcgggccagcttgggggatatatactgaccaattggagaangagggtattttttttacctctcacgagcgccccccaactgtccttaagaggggaaacgtggttaacccacaatcccgctctgtaaacttatattaaggaaattagtttaaggaattcgaagaaaaataatttttaattgctgatcgtcaaagaatgaataattttataagtgtttaaatttctttttatcctcaatcatcgggctcgcctgtgggaaaatccagaaattaattctttggttgggaattccttcaatgggaaaattctgggttacattgaccaaattggggaaggaagagcccacgaaagaaatatttggtcccacatgcatgggaaaaaaatgtaaatttggcccacatttaagtggaacacattttaacctcctttcccccaactatggtataatatccatcaaaaaattaaaccttctatttattaaacaatatactttcccaatggaatttttttttaactcctgcacggtgttctattttgcggaaaaaattttttttaagatttggattaagcacgaattttatggatcctaatcttattttctttttaacttatgcggacaaagttttttttaatttgtgaagatcaactaactttgcaaagtaaatacactcaattccccgtgttaatttaaaaaagaaatagttcaccactcaatttaatttgtagtattcccccactaaaaaaggagttttctttaaaacatccttcctcttaaaagtggtatctcctgaattaaatgaaatattttacaaatcaaagttgtttttaaaatcgccaagttttttgtagaaaccctactcatttaaatgggataaatctagttgcg

SEQ ID NO: 57926 - DNA, 431 bp, Glycine max
ctgacccccaagagaaaatatcagggaacaatctgagggcaacgaataaaaagcaggaaggctcaccccttcacactttctcaattcaagcttgcaagaatatggggcacccatcaaatgggggactaagtggcagaagggcgatagggcaaaacgaatctccacatacacaaatcacgtataacccaccgtcccctgatgaccacctttaactgagctcacataatcccacgtaacccttaaacctgatacctatcaacgccgggaccccatcaattcttccaagctttcacaaaaatcagagaaattcacatacaaacatcatggaataacaaaaccaagcataacacaacaaagggagaaaactttgcccaaaaaaacaactcaaaatcacaacttttaaaaaaaaaaacaccaagaacatttccttt

SEQ ID NO: 57927 - DNA, 805 bp, Glycine max
  unsure (1)..(805): unsure at all n locations
cccaagtccncnttagattactagtacccgcggncttttagggaacctccggctgccagcctgcaaattttcacccaacatcaagggttttattttaaagaaactacccaccaacattgcactaaattggctattaacctcaaacgtgttttattggatttatttttaactctgtcctttggtgtttattaccattatgaaggcctctcactgcttaatttgggtcaacttggtccctttgtccctgattgaagccctacccccattaaaataacattaaaaagtagttactaggaagtgaacctaagtcggttttccacgaaccgtggcaagccaaatgttcataatattacttgccgtaaccagtaacagtgacgatgggggggggggatacattattaacatttttttctcccctagatagctttttgccctaattattgtaatttctgccttcctaatatactatcttctttgttatctcccgcttcgaagtgtttctttataaatagatcttcatatttgtatctttttaacctatttttaaagacttttactatgactctatagctttgattatattcatctgtaatttatacgtggctgtcctgagactactatccgcttccatttatcgttcttttctgcgccatatggttcgtttgttttgcgagtcaacactcgattttttctttttttctatattattcgatccgtttgaactgtatttcttccttgtgatctctaattattgtactttattgttcacgaacttggtcgtcgattactactcactcgtatggct

SEQ ID NO: 57928 - DNA, 482 bp, Glycine max
ccagtttttatgttggacagccttaacctctaatctggtgcccttcgtaccacttattatcactttatacaggcgcaagcaaaccattcttttaatgggcacccaataaactgccttattaaataaaaaaaccccttcgtgccaattatttgtaagaatgatgcaagaatctttagcactgccgccctatgtggaatctcttctcctacagagagagataaacctttaattttcctttcggttattacaacattactggctttgcgtaaaaaattgtcccaaaggggaatagtggggccgaataaaattgcccggttggtccccgtttagaataaacactggtgaaaacaactctcacgcattgccggaatcaaaaaacacatttttttcttaacctttttgtaaaataccgaagtttactacccaatatcctcccaatattggcatcttatttttccttaacaacttcataacacacgtcg

SEQ ID NO: 57929 - DNA, 869 bp, Glycine max
  unsure (1)..(869): unsure at all n locations
cttcccanntttgttgactccattctagacacccccggancttgttaatcacctcgcagcattcaatnctttaaaaaaggggaatggtaaaaactttctttatctgaaattaaaaagggggccaagtgtttctttttcagaagaagggcaccttaaaaaaaattgcccccggttccagaaatggctttggaaaaaaagttaaatccatcctccattagtatggtaatgaaatcttaaaatgggttaatggttaaatatataaacaccctgggggggattgaattcttggaatctacttattccataattggcaaaattctttttcaaggggattgccacaacccttaagaaaccccgtgggaaagtgagaccaagcatttttatcagggcgattaaactaaggcttacattgtggagggccctttggaaccttgccttttttacttttaaggttgctggctttttatttttaaaatttaaaaaagggacttttttaatgttaccaagttttttttcccgaaactttgaatttcttttttcaagggcttggtccccgtttaaaaaatttcttttaatttccacacaccacaactatttgaagttatttttttaaattcttgaaggtggttgggaatggtaatattagcctgataggcctttatcttttttgggttacaaaattattgccacttatatgctctttgctatgtccaaacctggttttaaaaagggtttatattaataaaaactccctctttgttatggcaccgggatatttgaacttattttcttttataagaattaaaagtgttttgaaagatgggggcctcccatcctttaaattttgctgatattaagaattcggggcg

SEQ ID NO: 57930 - DNA, 707 bp, Glycine max
tttatatcccgcaaatggttttggtctttttttgttttgggcccaccactatcttgactgaacttatcccaattatgcaggtctttttgggttcttttaaaagtgatagaatttaattgctgagttatgataattttttcttgtttctcaccacatgtatacatatatgaatgggtcttgttgaatttggagggagttaggagggaatagcttgattgatattgcttgtgggtgtggaagcaatgtctttcaaggttattttgatgatgcccatgatgccaaagaatcaagaattaagcaaattccaaagattcaagaatgaagttttcaagaatcaagtttcaagaatcaagatttagaataatcaagatcaagattcaagactccagattcaagaatcaagagaagaatcaattcagataagtattaaaaaagtttttcaaaacattgagtaacacaagaagttttcccaaaataattacgaaagagttttactctcttgtaatccattaaccaaatgcaggaatccattaccagttgttttaaagaggttaaaattttcaaaatcaaaagggagaaccccatctgtggtggggaaaccaataccccttatgggaaacgattaccctgactattttcgaaaattaatttccaaagaccaattcttcagtgactggttttgaaaatttttcaaaagaataattttt

SEQ ID NO: 57931 - DNA, 373 bp, Glycine max
  unsure (1)..(373): unsure at all n locations
agcttcaaggtcaatggacaccggctgaaaccattcctcacaaatccctccttantggatgtagtggtggaagatacctccctacttctcttccgccatgacttaagaagttttctttttctgtctccttctttacttttcttgcacttgtccaaatttattgattgctttgattgttcttgatcttttgattgtgctacattgaggacaatgtgttgtttaagtgtgagggggagggggagaanattgttctttaattttgttaggtattctagtttaattttattaggttttctaatttaagtttgttaggttctaagataattttgttattttggttttatgtttgaagttaattttgttattttggttt

SEQ ID NO: 57932 - DNA, 485 bp, Glycine max
agctttagagatgtgagcaaaggcagacaaaagttgattgtaccctagatcttctctaatttcgaatatcacctcttcaccatcaaagttgatagtgtcatcaggttgaggttcctcatcatctgaacttatgtctagtgcttattcatctttactagtggacgcatcagccatcagacacaaggttgattcttcctccctgtccttattcaatgatgaatcgtctaagtcctgctaagtgctaacaaggattttctttttggacttcacgaatttcttcttcctatcatttgcattctcaaggtcaggacattctaacttgaaaatccttaagaagagttttgcatccactggataccttttcgcctagtagtgctttgacttcctcacaagcacaagcatcttgtacactaccaagcgaggttgtttccaagataaaatcaactaagtgaactcgatgagctttcttgagatcctcatgctct

SEQ ID NO: 57933 - DNA, 1012 bp, Glycine max
  unsure (1)..(1012): unsure at all n locations
gtcgacaacaatgcatcccaaaagagaaaggagaaaaaaaagatgggagtccacaaggtaaaagaaaggaagagacncccncccaccagagaaanttgtatcatggagaaaccggagacntaaaggagaacgggggaaggaagcttcaggattaaaaccagagagtaaattttttatttgggaaaaaaaaggaacatgggagagaagagaagaaaggcaaggaggagaaagataggagagtaaggagcaaagaaaaaagggaaaaaagaaatgaagaggagaagaaagaagagaataagaaaagaaaagagtgaaaggggcgaacaaaaaagagagggagcctatggagaaaaaaaagaagggaagagaaggaatggggaaagggaaaaaaaatagaaagtcagaaaagaaaaaaggaggggaacaaaggaaagaggagaaagagggaaaagaaataagaaacgatgagacggaaaacaaagggacgagaaataagcaacaaataggagagaaaagagggaaggggaggaaaagaaacaaagggacgacgaaggaaaaaaaagaaggagaacaggaggagaaaaataaaaagaaaggatgaaggccgaaacaaaaaaaaagtgaaaaggaagtaggagataaggaacatgtaaaaaaggagcaataagaacggtgaaagaaaggcaaaggcgagaacaagagatgaagagggagagaaggacgagagaaaggagaagatgaagagaagatgaagaggagagagggatgaagagagtagaaaaaagaaagaatgcggaaattgacgagagaagaaaatagaggagaatgggaggggagaatgagaaggatcggaagacaaatacgaggagaaataagagaatggagatgatcggggatgacggacgtgaggaagataaacgatagaaagacgatcaaaggaaacggaaacaaggaagacaaaaatgagatgacattggaagaagagaaaaaaagagagacgaaggtagaaaag

SEQ ID NO: 57934 - DNA, 1014 bp, Glycine max
  unsure (1)..(1014): unsure at all n locations
tggctcnnnnttagattcattacatggccgggccngggataatttaaacgccagctgccagcctttaaacatgccttaaaaagggccacgattttcttttttgtccaaagaacatagctccgcgttcgggattacggactattcacccgcttttaagaagcgcttgtacaaccatccaaggataaaaaaagcccctcaaaggggatggttcgctttctttctggagctgacacggtattattcttcaagggacctacatataatttatctgtaatcttctatggagagaaaattacgaggcgcccgggtatgtagggacacaccactaggtgtacctgccttatttgttccttgaatccgaaaccattaacagtttttacttcgaatgttttatcgcacccatgctgtgagcctaacattatagattggtcgagtcgttgacaatgaataatccctgtagttatgggggtccttaggactccttcttaaaatggggcgacttctaaactgacctggcatccctggagatatattcaattggccgtttaggaaagaaaggcgcaacccaattgcccggtttttcgttcaaaagggaagtatgcccaggtccttgatgtgtgtatctgaactatgcaccgccccttacgacactgtactgaataatcgtaataaaccgcgaggcaatgtaatttttctccccagaaactgtgtcgacaaagtaattgcgtacttatctttaattccttccaccaaactaattatggaaatctccccttgcggcccttgatgttggttgttttatcgacggataactatctatcttccccctcccctgtccctcccacagataaataatataaaagacattccctcatggccggaagtaacccattttgtgtttctacacctcttcctccctttatattaaaccaaacgagggtgggagaaagcttatccccctatacctcctccatatttgataaaaggggtgttgttcctccaacagccacttcg

SEQ ID NO: 57935 - DNA, 962 bp, Glycine max
  unsure (1)..(962): unsure at all n locations
gacgggagggaaagaaagaataaaaagtaggatggaaagaaggggaaagattatnagaacaaganccnagcagaagncttgatgtttgaacccccccaananangnnaacagcggcagaagcaaaaaaaaagaggaaggaggttttattttgttaggggtgggaaaaaacgaagggggggatatgaagatcgggggaataggcaggaaagatatgggggaaatgaaagaggggggacgagagaaaagaaagaaatgaggctaaaaagtatgggtgaaagagaaaagggaaacactgacataaaaaaaaaaagggggagaaggtgaggtggtaatgtaaggagaaaaagagaagggtgggaaaggaaaaaagaagaacattgtaggaggaaaaaagaaaaaatggagaaaaagaaggggggaggagaagaaaaatttgtcagaagaaataagaacaaaaaaaaaagaggagaatgtcgaagaaacggagagaacaaaatggaaaaaggaaaagtgtgggtgtataatataaagttgaaaaaaagaaagaagagtgatagggggagaaataaatgaatgttgggggagggaagtgaaaagaagaataaattgaagtggcgcaaggagacaacaggagagggtgatataagagagaaaaagagaggaggtagcataaagaaggggggtggggaagaagaaagaaaacatgttaagtaacaggaaaaatatattgaagaaaggaagcgaaatatggcagatcggaaagtgagaacagggtaggaaagggggaggagatacaatcactgggtgtagaacgaagaagaaaagataagtttatggaggagataagtggggagaagaatagggggaaagattatgaatttgcatggaggggaagaaagagaaaaattggttagggggaaaagaaagtgaaagtaatagagaacgagggggaggagaagag

SEQ ID NO: 57936 - DNA, 974 bp, Glycine max
  unsure (1)..(974): unsure at all n locations
tggaacnnnttggtatcaattccgtaccccgggaccctttaaagtggacccgcgaggctgtgcaaggtctttaaaaaatctctaattttgggaggccagagttttgtttttggcgaagttagagttttacctcttaatttggggcttttattatatatagcccctttctcaattaaagatgagaaaaatctccacacagagagaaaaacccccgcgaatggaaccttttgcctttttatattcacacataaaaggcgatcttttttgcgaaaatatataatatatataaattttacacctctcttttgaggattccccacactggggttacacggacccaaacccaaaccgggcggggatattattttttaccccaaatttacgggggagttccatttcaaccaaacgatgggagaattatttttttttttatgaaattaagcgcaaaaaatgagcctataataaaatggggttaaaacatgggcaaaaagggggtgtttaaaaggttaatgggaaacgcggagaatataaattccttgtgaaccaaaaggtggggccccccaccccgggttccctattaaatgagatatgtaaagacctcgggttgtgagagactcttccccggtgggagagcccgtggaaaaaccaacaaacacggaggaatgagttttttgtgaaaacagggggagaataatttttcctgtttttctcaccaaaaaagtgtccgggagcgccccctcggtttgggatattatttttatcagggacaatatatattttctctcgcacactttctcaaaagaaaagaaaaaatagaaaaaagcctcataggggggtgaaaccaccattttttttttttcctccctcccccccatattatataaacaaataggggggggggagatatatgtttacacctacatttctccatcaagaggaaaagtgtgtgttttctttcacaaagacaccacact

SEQ ID NO: 57937 - DNA, 1266 bp, Glycine max
  unsure (1)..(1266): unsure at all n locations
agcgcanaaannntttgggagntcgatcgagagaaanacngcggngnccnnnngaagatanacccggcacgtcctgccaagcctgggtgtgttaagttgcactatgcccattattattatttttattctgcaactccaaaaccaatacaatacgcggataataaggcggatgtgtnccacactggaattggcaactctcatggtggacaccaacgcattgtaattgcaagagctacttcgactggagctccatcagctaatttaaggctctacatgctctagcggtagtaagacatattgtaaaaaatcgataaactgcgtctcgccaagagaataatatatgtgtttcttgctctatatatcgcgcgactctagaatgcattagcgtcattatacgtcggtgttgagtgaatagagagaacgaataagtactatatatccggtagtccgcttagtgtaatcgccgatacatgtactggtacgtatatatcacttggctttctgttctcacgcatgggagatgtctctgacagttgggagaantaaatatcttcgtgtgtaatcaacattactgctctcgataccgaatcatagattcgacgcgaatctgatgttgtaactgcaactgtacctctggcatgtgaggattaatcaccactaacacttcgggctcgcgatccgctattctccatgcgttcttggagatagacattgagagttgatactcaanatcttaatatatggtattgcgacctcctctctcgtgactcacgcacacgctgatctcgaaacgttcctctctgcgcagagacgtgagtaacatcacttatgtgtcttcgcgtggccgtgcgtgcaccgtgatacagaaacatagtcnaaagatcacagcttcgtcgctctcaatatcgagatcganatcgatacacctgagttctcattctattacacacatgatctactgctattgcgtatctgtatatgcgatataagtatgaacgattacaaccaggtatgtgtaaatgctggtcgtaagcgtcgtactcgtattacacatcagtagtcgatcgtacgtcactactacatctgctaagtgtacaagcgataacgtacangactaatcctactcattaacatcagacatccggcgttacacatgtgaacactgatttatcgtatagctggatcgctgattgcgtgcgcggagaatgaaatctgctcactgtactatgcggatctgacaaatcgcgtaatacgtccttcgcctcg

SEQ ID NO: 57938 - DNA, 379 bp, Glycine max
caagaaattcaatttctcttttattatgaacctaccctaaaccaagaaaacagggcaatagcaaaaaactctgcccaaaacatattcacatattacagctttccttactcaaatactccaggaacattctcttcattccgatttgttaacccgtggatcgacttgaaaatttaactggaggggcctaattcattaatctacattttgaccgttgggatctgcttgaaaaaatccagaacccaatttgttcttcctttcccataaccaacaatgcacaagctttttctacacatgaacaaaaattctgctgcacaaatttgacaaccatattctgcattaataggcaagatttaaaatccatcttttccacatcccattt

SEQ ID NO: 57939 - DNA, 258 bp, Glycine max
aaaatttttttttttcccgaggaactataattttactcaaagcttgtctttcaagcctaagccttatccactctagtatgtgcattattccgctgccttttaatattgcagggcgacctgggagtaattccagtagaacaattccaaaactgtagatgtctcttttctcatttcagaggccctaaacttggagtacctgaataaatgaacaatggatttaaggtcccgatctagttcccgattaaataaaactatttt

SEQ ID NO: 57940 - DNA, 1008 bp, Glycine max
  unsure (1)..(1008): unsure at all n locations
tggacaattttgataactgtgtaccntctccgggatccccctgaagattcacactgggcgagcctgtcaagccntggagaataaggaaatgtgttgaaggggtgaatatctttttgtctttttattggttgacccacaccaaatggctatctttggtacaatttgttcaccggtgcttcatcgagacctttggggacctttctcgttgggtggtgtgctttttgctcccacaaacaccaatccttgacacatatcacctcaccccctaccctggcctttttttgtccacggagaacctgtgatttaccctatacaggcagagcttccttgtgctgttctaccctaattataatgggtaccatgtgaccccccctttcctccgtgcgtctctgttggtggcttggcccaccttgctaaaacttggattggtattgttgagaatattgggctttttgggccatccacttaccccaggggttggggtattttcatttccctggctttataatatgattaacaatgggggctacataatgggtcttctggggtaaatcgactctcccacgagggttggttaattctttattaccacacgcctggaataaaccgaatgctccattaaattcctgatcgcgctgcccctctcttgggtgtatattatatcacccctacccttgtgtctatgtcgttattcctctcttcataagaatagtgtctctacccctggtagtatactctctctctacccgtcttgtatgcttgaattcgctatcgtctcacctggtgcgttattatctcgtattaatcccatcatccattatatcgctgctgttcaatcttacatatacttcctctctgttctctcngtctctccgcgcgtccgcttccagtcctagctttcccatcgcgcccacttgtcgacgctgtttatagtcttccatcttttcataattaacgttgtcaatcgatatattccacgctttgtcctaataggttctttacattgcc

SEQ ID NO: 57941 - DNA, 761 bp, Glycine max
  unsure (1)..(761): unsure at all n locations
gggccnattggaacatganaaacccgggaccaataaaaaaccccccgccatccaaccattgtgattctttgtatggggccgttttttttttctcgaacgaacgcatcaccctagcagggcatcatgaatcatccattcacttcaccagaggatacacgctaaaaaaaagcggccgtgagatgatctcactcaggtttcaagcgcgggtgaatttagtatttatatttacactgtacccccaattgttctatccacctgtggttgctgttcgccgattgacgccacaatttgtctacgcccacatctgccgctgttctcatggaaacgaacgaggggaaactagttctatcttgtgaaatgcagtaacacttactattcactgatactatcagtctgacggttggtcgatcttcacgtcttgtcaaacaacgatcaccaatgtaccttgtcggtacttcgtgttttgtaacgtccttgaactgtcgcagagcctgcttccccccgttaaatacggtctaacgtctaaacgaagaacaaattattgcaaatacgcgattatctttgcgcgcatatctgatatattgtcgatgattccactcagtattttttactccgaatcattatatccttccttttctgggataaagagcaagatgcccgaggcgactcaactgttacctaccattatgcgcccagataaaactttatgggaggaatttacgccactatcacttcgatgcggcgggttttttgatgcaacc

SEQ ID NO: 57942 - DNA, 326 bp, Glycine max
  unsure (1)..(326): unsure at all n locations
agctntaaataggctctaaattcgcgatgttgttcttatcaccaccctcgcgcttagcgcgagtaagtggatttgagcttaacgccaggtgggcgctgaacctgtctgaaaacaactgctgcacttaacgcattgatctcgcgcttaacgcacgaccttgaaattgatgctctggcaaattcttctggcgcgctaagcgcgctgaagctgcgcttagcgtagtgatgagctaagctcaactgtcacttttagcacttcatgacttagccttttttttacatgaaatctaatggaaatattctaaagactacttttacccttaaaca

SEQ ID NO: 57943 - DNA, 562 bp, Glycine max
agcttctaaagtagtataatgaagttggcttttatgaggagttaatatctgacctccaatactaaatgccgattcagaagctacaggggagatcggaatagctaacacaccccttgcaattgcttgtagtgttggatactttaactcattcaatttccaccacattaaaatatcaaaatctgaacttcttggcaaaacttcttcctctaagtaatgatctaactctgttttcatagttaaggttcttgccattttctttctttcaatgtatctatcataatcacacaatttactctttccatcactaaccacatcttgtgattcaaaagaactagtagaatcttgatgctttttggcttgatattccgaaaccaaatcataacacaagtttcggatcctattaacttgagaaaaaaaatcaatgggataaattgattcaaagtaaaactcaagcaactccattttgtatcttggatctaaaacaatagcaacttccatgatcacatgaattacactcccataaaaatcaaatttttgtaacatcttttttggcctattttga

SEQ ID NO: 57944 - DNA, 512 bp, Glycine max
  unsure (1)..(512): unsure at all n locations
agcttgacagtattacaaatctcaatatatgttgccaagtgtgagtttggatcttcatttggtaaaccatgaaacaaattgctctatattagttgtatcaatgaaagtgggtaaattaaattttgtgcctgaacctctggccgcgcaacacttgaaaaatattgtggcaccgaagtacttgagtaatcttccatggtcactcgttgaggtttctcttcagccatgacttcggcttcaaattctgctatttgagattccctagatgtaggggaattagaagatgatgacacaaaaaagtgagcctcttcaaggattgatgctactattctgtcatgcaaaatttttctttatctctctgcgntgnttcttctaaaggtggcttcaatttctaaatccaatggaaccaattcacatgcagaagatctacgcatgcaaacattaacaggaaacattgtttacccattcaagaagaaaataaattctgaacttaaccaatttttaccaaaacaaaa

SEQ ID NO: 57945 - DNA, 534 bp, Glycine max
  unsure (1)..(534): unsure at all n locations
ttatgaaaaactatcatgtacatctgtccattacacaaaaaatacaccatctaagcaaacttaactgagtaaaaactagntctcttcttcttccataccaatatgtcctcctcactcagaatcaaattaatacttctaaagtcatgacctttttttatctaagcaaattattatatttatttctcccaatgatatagagatttctccattcccatctccacaatcaatttccctccctccggtcacctaaacctaacaccctgtcttttatggctactacaaggttgtataatctagtatacttcctatatgtgaaaataaagcactttcacccaaaggtcttgagaaaataaaaatattacctaaccccccaacccccaaccacctttttaacaactcgaatgccagattctttcttccctctcatagntactctttgatatcccgtatcacaattattggggatttctctgcctttgaaccaccatttttccaataatggctaaaataaaaaccctaatttttttcacccca

SEQ ID NO: 57946 - DNA, 410 bp, Glycine max
agcttctaatgctaagttgagaccccctatcgacacattcttcttagactacaaaagttgaaacccctaatcggcaccctctagtacaaagccaagactccctttggaactttctaaagatccaaggttgaaatcccccatggcatcctcctttcggtatgtgacttggaaaatttctttgtagtcaattttttcataaaaagaaagcttttatggacaaaatcttgaaccatgtcccctttggatacttgttacatgttcctctcgaaaagttatatgaaacaaacatattatacatttgaaattgttcattataggcatattatgccctttcaaaatttctaaggctcaaaaattcaaaaataataaacaaggttcttgagcatcataggttgagacccccccccccc

SEQ ID NO: 57947 - DNA, 530 bp, Glycine max
attacattaaaatactaaccatattattttaattatttttttaaatatattaaaggtaaccaaattaattattttcctattaacggaaatctatattatcataatatattaaaatattaacgtaaaggcgtttcctttttaactataactcgacttagtggacacaagtaataatcacccactataagtccgacaagataaatatttttttcgtgtccatgcagttgcctattaagtgtacattcataaaacttacaattactttttctataatataaccatattaaaatattaacgtacattaatatattaaatatattatcataatattcaaatttactaacataattacgttaaacatacgtataaattatattaacataaacataattaatatatatatatatatatataatagacatataaaatacataacataaatgtgttatatttattaatataaaataataacaatattatgaaacctatcattaaataaatataatatgtgtattaacgaataaaaattt

SEQ ID NO: 57948 - DNA, 315 bp, Glycine max
atttttttaaacacacaaaatagaagtactaaatatttattacctattcttaacagaaaatacttattacacttcaaaataaccataaattggaagagtttgatacaatttacacaagttttatacacaaaagttagtcgtattcaccgactaacaactcccccaaatttatagttttgcttgtcctcaagcaaaaagagaacagctcacttgtcctcaagtgacaatgacatgcagtgactatgtacaaaggtgtatgcaacaaaagtgattgattgcatgataagagaatggagtaaaatggcctcatcactt

SEQ ID NO: 57949 - DNA, 466 bp, Glycine max
tttttttttaaaaggtggttccaattggcttccttatattcaacttaccttgtaccaaacagaaatggtaaacctggcttttgaggaccatgtaccttccacacaaaaaaattcacaaagggataattcttcattgccttggcttgatttattacaagtattatctatactaatccttaataacagaatgtatggctttatgtgcctagaggatattacaggaacacaggttgctatgctttgctcctactactcgacaagttccaagccaggctaattgactatattccccaattcaccctcaaacgtagtctttgaggtatgttggcttaactattcttctcttgagcttgtttcctactaacacccctgtggcctgtgtctctgtggctgttgcacctctttcagaatatctgctcctgcttgtgtgttatgaaactgcttttttaatcacccgtggcccttg

SEQ ID NO: 57950 - DNA, 405 bp, Glycine max
ttgcgtctatacaattcatggccttcatcatgttctgattaattcaaagatttatgcaaaagatcattattcacagttagtcatttactcacagagtaaggtcacactctcatcggtttttggttcatgcttttctttcacaaccagtctatgtagtgactaaccattatattataagttcacactcttgttctttctttgttcaacatgcacatttgctcaaattcatgaaaggaaacacacatctcatcttaagcatgcattcaatttaaaacaatgcataccaccattttcacaaaacaaataaactacttcactgccataccatcaaaagttaaattaaactgttcacgatgcttcgagatgagaaactattctactcatgcacaagactaacaaaaagta

SEQ ID NO: 57951 - DNA, 1204 bp, Glycine max
  unsure (1)..(1204): unsure at all n locations
tactaaccgaccttacacctccgaccacactgcctcgcagctatgtagtgagagacggacagatgaaacgacaaaacatcacctacaagagtgcccaccagaaccagcgatttgatgaacatcgtatgaacacccccggaaannnaataaaanataacgcgtcggccaagcacagcaaaatatcaaaccaggaggaaagacaccgtttcttttgntattgtactacgagcgcggaagagaacggctgaaatagagcaacagagcgaactccgacagatacagacaagacaccggatgtacaaagtaagacaacacatacacacgcgtatataaaacgacacacagacacgaaaacagcgccctatctcaagacaagaacgagaggacacgtgacagagagatgaaaacacgctggaaattgataagatcgcgaagcgataaaatcgtaggaagaaagaccgagaacaacgaaaatgataaatgaagcaaagaagaagaaacaaacacagagagaatagatccgtacatgaagaggaaaaacacacaaagtaaagcacaaccagacgcagcgcgagggaacgaaaagaaggcaccagatagagcaccgacaacgaaacaacgaggcgcgaccgatgccaagcgctacagagtgaaagcgtatgtactcggcagagaaacaggcgaggaaagagacgaagaatactgagcgagagcagggcaatagggacaacaatacgacccgaagagcgcaacaccaaaagggaacccggaagaacggaacacgccgcagaggaaccagcaagggaaaatancttaacaaaaaccacgcgacagggaacgaggatgcctatacaagagaaccgacggaacgcggaacaaagtgatagaaaagaagaagaaaacattcgaatagaaggagggctgagacgagggacaagaaagagaccgacgtctcgatacgacaagcgcaggggcatacgcaaaatgaacgaaataaccgtaccacgaaagaacacagggcgagcacacgaaaggaagacaaatagagagctggaaagagacggcgcacatcgaacaactcgatgtgaaaaccttaagaggagaaacataagagcagcgtgataacgcaacacacgagaacgagatagatggccgaacaaaggagtagaccgaaaagagactacggaacagaaagtatgtgagg

SEQ ID NO: 57952 - DNA, 1231 bp, Glycine max
  unsure (1)..(1231): unsure at all n locations
ggaggattactgatagaggtatcggaagtgctatacgatcatgacaactatagagagtgggaatgataatagtaatgatacatcaacactcacaacacagaacgaaaaagaggcnnatttggagtctttgtagnaacacgngaaactcnaaaagagaaaccggcgggcattgcaanactgacaccataaataacgggtaagagaacgagttatatattattgatatataaagaacataaactggaaagagagtagaatgagttatttgtaatcataatacatgcgagacaggagnagaggccataatatgaaaacgagttagaaatattaacacgagaaaataaggtataaaagatctgaaatacaatatatcacaaaaaaagtgtgttgagtaaaacaaagagagttggctggcgttgaattaaacacagatatagacaataaatcggcgacgaaaaatgtaagaatataaacgggctacgagatactaaaagatgcgaaaaaaacgagagaaacaaagaactgtaatgtttgaatccggtccaacatggcagaaacatggacaatatgtacaagaggacatacatgtaaacaaagaagagtggtaatagacaaacaataaaagatgagaataggaatgagagactgaacaaagaaaagaaatagtgaagaaggaaaaaggcccgatgataaatcaagagatgtattttacaagaggggaagacaaaaaatttcacatgagaaaaaagaaaacgagagacaacaacaactcgaatgaaattaataaagttaagaattaatagacatagaacaaaaattaatatgggaaataatgtgacataaaaagggacaataactcgaaagtgacgatcgaagcgacaaaagagggaagtggaacaatgatttaagaaagggaaataccagataagcgtaaataaantgggaacgacaagagtacactataaacttatgaagatgataaaacgcggatgaacaaaagaatataagaaagtttggaagacgatcacacataggggaaagggatgataacaatatgtatagaacgtaaaaggagtaggaataacaattataattaacagagtttatcataaataaaagataaggggttataatacccacagtgagagctaataatagtcacgaaaatatattcgccaaacgaagaagttcgtaggagtaacaacacagtcattcgagtgaacagtctccg

SEQ ID NO: 57953 - DNA, 1143 bp, Glycine max
  unsure (1)..(1143): unsure at all n locations
agccaagaagaaccataacacgaaccacaaccccacacacaacacaacagcaaacataaatatacaataaacaaccgccaagcaccaccaggacatttgatgtcgagctccttcaagcgcntanntttaanacaacccgcatgcatgcaagctcaaaataaaggagacccaaccatcgtttttatggaaagccatacgggaagaacggacaaagacttccatacgaaagagggccccccagggacaccccanaacaaaaaacggaaaggggttcgggaaaaagaccacccccctaaaaataggaccaacccacggtcataaaaaatcccagggaaaaaaaaaaaccggggacccaaaaaaaaaaatccggccctgtgtacggaaaaagaagaaaaggaccccaaaaatcctaacaacgggcccaaaggtcttttccgcaaaagagaaagggaaactggcacactattaccataagtgggccggggggcggcccccactccggggaagaagaaacaatatgggcgggcaaccggacacaggctggggagaagagaagacaacgaaaggcgctgggggccaccgcagcacttatggggagagaggggggggagagaacaaaagaaaaaaacacagcgctttacaaagcaaaatataatataagaaggggggggagtggaggcgcactcctaaccggcgggacatgaggagaaggagngggcctctctctttatatccggcgcgaggaagaagagaccatcatggaagggcgacaccactctctcatcacatactacagaacacaggggcgggcgagagaaataagagaggggaggatggaagatctacaaaagacaggagaacaacccacggagatgggagcatccacacacagagagaggagagaggtgccgcgtctatatcgcgcgccaccaagagagaggacgcgtactctcgcttccgcccaccaaacaaacacaagatantggagcgaggagatggagaagagtgcgctctccacactctacacaacataaagaagaagcaggaggcgctncggtcatatcctgcccaccacacataaaaacagtcatagacggagggtgagagtgggaccaacgccacttctctatgtcgtgaacgact

SEQ ID NO: 57954 - DNA, 612 bp, Glycine max
  unsure (1)..(612): unsure at all n locations
cttgaaaaccacgttaagcacaatctttttttttaataaaatgaaaccccccctttacaattcttattgatactttttatatgggctaagccaaagtgtgaacaaaaatgacccttataaatttggttagaaccttttaacaatgccaccggactggattaaaaaacttaaatatagaagaagccaacaaactataggtagaagcttcataccctttgttaaactgggcagccgtaagaaaagacttttgaagctttgggagccaccccaccgacttgtttctccaagaagaccagttcttagtgggtttnttcttttcacacactcacaagtttccatacaagtaagtgtaagggggttttcttttcgacctttttcttttgaattggaagatttctggtggggtttccagccgagccgggttttctgaacaagtattgaaaaatgaaatgttgggcgcaaatgtggggtgtcgacccgagcggtttccggcaaaattcgggtgggaggagaaagagaaaaaagagtgccgcatggtttttaagcgcccgagtttggaaatttcaacacgttttaacatattatcataacaacattaacttctgtttttaa

SEQ ID NO: 57955 - DNA, 554 bp, Glycine max
  unsure (1)..(554): unsure at all n locations
agctttggattcatcagctgcgagacacatggtantcaaatgaaagtttctctggagtggcaacctactcaaaaagtggctttatcttaaatcaaagaaggatattttatggctaccgattttataatactttaaggggaaatacattgagtattaaatggaaaataaaagtgagttaaaaaaataagaactctgcccaatatgaaacctagaattccttttggattaattaaagattaacattataaccttggcatgaaattgtgtggtatatccccatgaacacaggaccgtgtctaaacgtttcaaggcgaatacatttaaagactgataatttaatataattgatcaaagttcattcttttttaccgattacaaaattactattcaaagttatatatataattaagtgtttctaaacttttactatcaatatataaaacataaaaaaacatttaatttatcttttaacatagttaatatcaaagaagaaggcgaaccctgttgcaacggaaaagctgtgcctttgtgacctgttgatcatgggttcaaaa

SEQ ID NO: 57956 - DNA, 431 bp, Glycine max
agcttggaaagaggaaagcataatcatttttttttatgaagaaaaaaaagagacatgaggtggagttttaacggatgagacgaaaaccagcttaatttacaatacgattctcagtattttataatttgtagcactaccacctattacggttggggggtgggcatattctcatatacagaaaatgggtgacatacgcatgatatgataagcttacattacgcaaggaagggttttttatatatattaaagatagtattttgttaaatgcgctgggcttttctttttataacttttaggggacgaaaatacctttggtgaaatgcacactatctataccaaaaaattacgatagttaaatgtgtgttttattaaaaagtacgatagtaaaatttatttggggatatttgagcatagtcttttatttaataaaa

SEQ ID NO: 57957 - DNA, 198 bp, Glycine max
cgcccccctgctttttataaaaggggctaggggatgaccttgccataaacattatttaggaactaactattttaaggggctcccattagttcaaacggatacttccagctttaatgccacgaccatttaatcatctcctccacctttgacaaaatcccatacttttaagcatgtgcggcaacataaccccaagaaacc

SEQ ID NO: 57958 - DNA, 634 bp, Glycine max
  unsure (1)..(634): unsure at all n locations
agcttattgaatatccacgaataacacactgtatatgtgaagagattgcacactttattcaatcatatgaaaatgaattttataagccttacagacttgactctcaaaacagaataacaataaaaacaaaaaccacaaaactgcatgacgcataaaataggattgtttattgacacattaaaataactaacattaatttgtattttaattctcttttaatcactatagtttgaaattgatctttttagttcctataatttgtattttaattaccttttagtccttactgcaataaatatataaaataattagctacaaattagttataaattatcaactatttttttattacaaattatcttgtgataaattagttatgaattacttgctaatatttttgtagntaattataattgataatattactcatattttgatgggaagaactaaaatgaaaatcaaatataaagtatagggactaaaaaggtcactttcaaactatagtgactaaaagaaaattaaaatgaaaatgataaggactaaaaaatcattttcaaactacagagactaaaagagaattgaaatgtgaacttttatacttaaaaaattacttttaaactataatgactaaaag

SEQ ID NO: 57959 - DNA, 385 bp, Glycine max
tctgaacttttacttttatgccactggtgaacatttgaagcttccacttcatgaattggaggaactgaaaattcaagcttatgaaaattcccagcttttattagtaagaataaaaatttatcatgatcaaaagctttcaaaaaagaaatttcagcctgtcataccctaattttggccaaggactatcggtcgttgatcttttgatccttgctagttgacttacggtcttgaatgcccgttacagtgcaaagcaaggaaccattccgtgtttcgatcagggatgcgaaaaataccaaaaaagaggggcaaaaaggtcttttcattgagttttctggaccctagctcgcccaggctaacctctggctcacctgggcccttaaattac

SEQ ID NO: 57960 - DNA, 885 bp, Glycine max
  unsure (1)..(885): unsure at all n locations
accccatggncnnnttggaaactttgagaaaccccctgatggtatangaaacagcgcggcatgcaagntttggaaagagttgattttcacctttttttttaaccaatatggtggcttagcgaggctcctttttgcccaacacttctgggcttagcgccaaggaaaaaccccaaaaaaaaagaattgtgtcaaatttccttaaccgcccccgctccgtgtattctctaaacaaaaaaaaggcccctctacccaaaatatccttaacgggggctaacgcccccaaacacaaaacagcccgtctttatttaaccccggaaatataatattttggaaggggggtttgaccggggaaaacaaacactttcgcttgtagggggttatataaaagaggaaaagggcgccacttccccaaaaaattttagaagaatatttgtggggtgtaaaaaatctggtaaaaaaccacattcttaacaaagaggagtttggattcacgatacctctaaaataatcttaaaggctggtgtcgggggcatctctttgggggggggggagaccacactccccaccccgcgggttttgttcaaaaacaactaaacccgaggcttttctttctttggatacaaaaaagaccgtccttccgcgaataatagaaaacatcactcctcgtggggagggtccctctcgtcgctgtccgccgcatggaacataaattatctcttttaattattaatatcatgctcctgtggggagtcttcgttgtaactaccactctatttcactctccggggcgccttatcctcgtgtgagaagaatgaaccgccatctgttcctgtgaggcgccatacacacagtgggggaccgctgccttaatcttctgtcgagtcc

SEQ ID NO: 57961 - DNA, 1007 bp, Glycine max
  unsure (1)..(1007): unsure at all n locations
gggcttgatgtgtcccctttggaaaaccccggaattttagacacccggtggccacgtggtaatcgtaattccccgaacggcttacttttttttggcgagcgagatggctcaccttgctcggaactgtaatggtcagatgaatcgtgtctcaagcgccttacggaaagtgggccattggtttgactcgagagttcccgtatccatacccgtgtgcccgcggaaatccggcggtggaggcactagtaaagtagagtggggttacggcggcatccggaaaagaatgactcgcactccattcgcctcgtagtaaataaatccgctctctactaagtgggctcaaatggggagagaaattggatccgctgtgtacggaacggctattacgtatggggtcgatactgtaatccggcgctagcgcccgaagtctgggcaatggggatagattcaaatgctacgcgcaccgtgcccaagtgaagtgcgatcagaaatgttggccacgacttgttctgttacgctaccaacactattcggtcggtggaacagcctgctattggaagccactccgcgtgagtctttgtgggacggtaatttatgttccgcatagcgtcttaacctcacttcttggtgggagggactgtgaagcactaaccgtggtccagctcctctcatctacataagtcttctgtgagcctgatctacacgggtgcactcttctccacnctattatgtggactaaagatagataaattagacgttatggcaaatgtgtcttcggatcctatatcgtcncaattttccaaaccatctagcgcacattacatagagtgattgtacagtgggatcacggttcgtacccataattgcatcaagcatatcactgagtcccgctagcccctttaatgtgttccctatgagtacnacacttctcgtggtgcgatactgattgcgctcgtcctatggtcgtgcttcacgtttataagacactgatgggatcggcgcctctgtcc

SEQ ID NO: 57962 - DNA, 1282 bp, Glycine max
  unsure (1)..(1282): unsure at all n locations
ctcgtttctacatcgctgcgcgantcacntgtacaattcntgcgctcattgtcgtctacattaatctaccgctgcgagctaatcnttgatantaatggtgctttnantatacataacgtgagtcgcntcantctnagtctacacttgtcacatgcacgtagacnanactcnnnnnnaataganannatttggatntatcagttacttcaganaccaccccgcggattacttntaanaagttctatacctgccatggcaatgtcacaagaccttatgcgataagaatggagaaacgaggtaaatatcatctcgcctaatatattactttgtggatgtaaaatctcccttggacacataatctctgtgcatgtgttcatacaaaacatagtaaacctatatcattcaactctgcctacacataatatgtgtggtgtgtgcagagtagaagaactaagattaaattaacactatcttaacttctttcggcggcttttaattacgcaccctctcaaaattactccttcttaacttaataagaaacccaagaatggccgcgcttatcaacctctattactcctcttttatcgcggaacgcacatttaaagattggaaccattcttctgtttatataaggttgtaaatgataacacaagagggtgttaacgatttcttcaatatggccacttttggcgtccatatgtaaatcttccttatgaagaagggcctatttcctaataccattgtcatttaaatagggaaagaaaccacttaaattaggtggaatattcatttttattaataacatatttttctcttggcaaactttctttttaataataatctacgaaaaaagaaaaccttcacccatttcacccttttgggaagaggtgccatcaaaaacgtttgtattacggccaaaaaaggctttcttattggtacgccaaaatatgttctaaatgggacaaggtgaaaaatgggtcttgtgtatggccctttcggtgccaaatattaatatttggatgttaaccatgtaaaacacccattcttaaaaaaaaaaataaatgtggatttaaatgccaaccctcttaaaaacctgatacataatgaaaaaggggtttgatcttgccaaattcttgggttacattcttattaaaaaaatgccaatctattcaatgggcgggtacctttttgcgaaagcaaaactaatattcctgtgtcctaacaaacatggagacccctccctttctttagggaacaatttggacaacgtgacatcaccatc

SEQ ID NO: 57963 - DNA, 419 bp, Glycine max
tctttcaccaccggcaccttcattattttaaaaatatattttaataatattactactttgattttcaaccttgtattttggctatattactatgggatttgaacaatttattatttccttatttgcatgggttggttgaacaaatatgttatttgactatgtggattttataagataatttggttatgaatggtgcttcatgggttttacttcatgatggggttaatattttttatgaatgtttaaaatatatttgcatactttaaggttgatacgcactttggcttttttttttatgccaaagggggagagaaatagggataaatcaagaactcacatgagtaatccatttaattttaagataagcataaattaaaaaacaaagggggagaatttatgtgagtgatcgacaaagaaaa

SEQ ID NO: 57964 - DNA, 790 bp, Glycine max
  unsure (1)..(790): unsure at all n locations
agggatgtnnnnnttagaccctagagaaccncacctttggagagccaacagcccagcggnngntgggagagaaagggtggagaattttttttttattgatcacataatttcaaggggggggatggtttaataattaaatgacattctaagtatcagattcaaagcttggagtgaagattaggagggaggaagaaatttgaacacgctgaaatggttagatggataggtaacgccaatgacgaagaatcaatgaaggacactcggagggaatatagacagaagaaaaaaatgatggatgattaatgtagaagagatgactgattgtggtaaggatgaatgatagctcgagagacgcgataatgatggatgatcaagtgagggttagggacagatagtaggaccgggggaagaaggtaagatcgaagaactttgatggatagataaactaagtaacgtatgagtgggaggaggaatacaccnnagtttaaaaaggaaaagatagaagttagcaaaataattgtattgattgtaggtctaatgcagaaaatcataaaatcagagcaggactgaggggaggaaggacggaagcgagaatatgttcgcaggttgtatgcaagttatgaacatatggtcgggatagagaaacgggataaagggaggtgaggaatggctgaaaggtatgatatgatagatgtagacaacagcacggactcagggattagactgaatggacgggaaagggagataaaagaaggagcgctgtgaagatcgagagaagtatggaaactcg

SEQ ID NO: 57965 - DNA, 777 bp, Glycine max
  unsure (1)..(777): unsure at all n locations
ctgggnnttttgaaccctgaaagaacccgggattcttaaaaacaacctggcagctgccagctttggaaaagggttggttttcaccctctctcttagcccatattgttggcttatccagcctcccgcttagcgcaacactcctggggctaagcgcaaggagagaatcccgaagaagaagagttgtacagattcactaagcgcaccgcttttgttcatctgctaaaccagaaaagcgcgctaacccaaaaatcactaacgtgggctaagcgcacgaacacgaacaagccgaccctattaaagcctgaaatcaaattttgtgaagggagtttggactgggattcaaacctttgcatgtctagggttcctaaagagagaaaggcccaagttcccaaaatttttgaaagatttttttgtgtgaagatctgtagacaccaaaacttcaaaacaagagttggttaaaaagcctgaaataaatttatgagggattgggaaaacctaggaggggaggacaacctccccccctgggtttttttaaacatccatcctggtcttttctttggaggaaaaaaggctttctggtataaaaaagcaaaacctctgtgggatcttccccgggggccccggaggaaaaatttattcttttctattaaaggagcttggggggtcccgggggctattctctttttattccagaagccctttaccttgaattagaaacagcctctttttttgggcccctccaccgaggaaacggtgtctccccttaaaccaattgac

SEQ ID NO: 57966 - DNA, 1082 bp, Glycine max
cgattagattgagaaaggtgtattctaacttgttgtgacatgtaatggaacgatattagaataggtattgctatagttatagtagtcataataaagggattgtatgactcttaaggcaaccgagtatttaaggaatagtaggggtgtaactaagcttaaaataatgagtattacacgtatttttgtaatactacacatgggactatgatgtggggcatattcaaaaatgtaaagtattgttatgaaagaaagaaatagtatatagatgatagagtgaaggaaaatcttgtgaaaatataaggaggaggtagaagcggtatagttagaggagaaaattaaaggaagcagattggaggagattggcaagagagatgtagtgggcgataagactattatagagatagttatcatatgattggggttatataggaggaaattattgaagatggatcaatggtgaatatgaagtattggtgaaaaaagcgatagatacaaatgggaagtgatagaacagaaatagagaaggatagtgaggtttaaggaatgattgtatgggagacgattatctatgtacacacttgatatgaggatgatgtgaggaggaagagaaaatatatgagacgttctgtatatgaaggaattgcataaggggggtattggtattcaatagcctaatagatagattaggctatgtaaatgtctttggaggagtataaattatgatggaaacaagaggtgatgttgtatttataagcaaagattgagtatgcacattgattagaataaggacgtgctacgtatagatggtgtggaatgtatggaatgaggggaggaaggacttaataggttaggaatctcttagatttttatgtgaagggtatgatataaatttgaggaaaattgtaaagttcaagggagaatagatggtgtgtcttaaatagatgtgaggggaatattatttggggatgttgttaatgagttggcatgagtatgtaatatatattgaattactatgaatcgagaaaatgagggagaatgtcgtgactttagagggaagaatgagaatattaagttacgcacag

SEQ ID NO: 57967 - DNA, 1085 bp, Glycine max
  unsure (1)..(1085): unsure at all n locations
acgtgtagaagactgaaaagagacgatagtattcntntcctcacgcttacgactctacagtctaatatgaacttgcctggatgacgaactcttaggtaacaggacaaaatcaacagcaattgaattgtaaccatccacaaaccacnaaaaaagaagcgggcggtagaatagtaattaataaacagtacttaggtgttttgttatgttagaaggcacgagaatctcgtcattaggccacaaaaaagaacctacgtgggaaattaggaaaaggagagcccgaaggcaacaaaacatgaaataatgcccgccgccgggaacaaggccccaactttatcgaggaaataccgttggagcacgcgcgataagacaaaaacagagaaggaaactaagaaatttcgaaggagtaaaaaaaaggagtatagaaaaaaaatgacaaaattatacacactcgtgccccggagaactggaggaacaaaagctgagacaatgctgggggcaaaaacaaaacaaattctaggaaatagagaaaaagtttaaaccaaatgtggagaggaaacatagatggaagaaaaaaatacactctcttaaccatactacgaagcgagggggatcaatactgatgcaacaattagattaactaggggggaaggagtaagacctggtgaaatcaaccatggactaaggctaaagaacagaatagtgaactgtagtactcggtcgattactagctctcacttccatagagaataataatggaaacagagcttaaacggtgtaggagatctaagaaacaaagggaatgtgaaagcaatgcggatccaaatcggaaagaaaatcgatacagttaggagcgacattcacaatggagagatgtacagagactgaacagctatttcgaacgaataagaaataaggtgaaagaaattcatagggaggagaacgggtaaacccaagctgtaaagagcgtagatgccatataaacattgaaaacgaaacactggagcacgaacagcgaaaaaagtacaagacccgctatgagtcgtcgagagacggtacagtagataaagagagagaatcacaataag

SEQ ID NO: 57968 - DNA, 169 bp, Glycine max
  unsure (1)..(169): unsure at all n locations
agcttctatataagctgaaccattttatctattaacacaagttgagttttattcagaaaattagagnttatctcttttatcttaaggagaagtgattctcctaaattcttgagtgaatcaagaacaccctggctgtatcaaaggacattcaccacctttgcgtggtgcc

SEQ ID NO: 57969 - DNA, 1020 bp, Glycine max
  unsure (1)..(1020): unsure at all n locations
ctttgcnnnntaggattactaacgaagcccccgagattttttaaanaccccctggccgtgctgccatgcttttgtgaaagtgtcgaaatttccaccttttctttcttattnaccgaattatgtgtccggcggtaatccgaaggattccctacctaaattcccaactcttctctcaggggccttattctgtggtggttgtatggacaaacttaaacccgatcttggtggggtattctccctctaaatgccgcgcggcctctttttcttttaatatatacaccatttcggtggatattgtgccccccttattactccaccttttgttatcttgtggcgtcaactacggacaaaagtttctgtggccaacaccctcagaatatatataacccccttaattttttttttttttggtcggcgggtgaaattaccccccgtggataacggaccccccccagtgaagagggtgggttatctttgtatatgagagccccgccctctcaaggtcacaaaaaatattttaaaaaaaatattgttttgtggggaataaaaattttttaaaacccaccccaatttttatctccggggggggggttttttattttcttgtaggcaaattcattctggaggagtgcgcgcgccacacccttctgggggggggggaagaaaactctcccccaccccacacaaatatgtctctgcctccttttctttctttcggttcccactactccttaacgagaaaaaagaatcttctctttcttggtttctgccccactccccacaaacatgttttttcttctccttcaccggagggcttctctgtgtgagtcgaacacactaatatatatttattggtcttcgtcctcttcgttctctcccctagatggtgattttatttatatttctcattctcccgtgtgtctctcttaaataacataaggaagacttcctcctctatttatgcgtgagcggggcttctcctaatgagtaatgatatgtctttactcatctatctgggcg

SEQ ID NO: 57970 - DNA, 1158 bp, Glycine max
  unsure (1)..(1158): unsure at all n locations
cacacacgtctactaagagcaaacacganctgtcgtancacaaacaactttgtctacgtctanacacntctgtggtggaagtgtacgntgagtgcaactaattactacacctnatacactctgtatcncaagcaccgagacantagcgcaatagagacnntttgtttgattcgtcgatcaccttccgtcagcaaccagggaatatctnactagaccggcacggcgaggcgaggcacaacactaaggggctattacaaggacgtttctatgacataatggactataagaggccaaccatgactccccctgcacaagagagcctaaaggacatagaaaaacgcactgctggagaaattgggaataaaaagtaaagaacggagaccgcataaaacaacacttagagaactgtattgctctccggcggcgcgttggacagtggggccacataactttggactctgattgcccataaaaaaatgtgaagagacgcgcccaagacctaaaagaaataatgcgcaccatggaagttccatttcacagggcacaaataagaaaagggattcttaaccaatacaatttcaactaaattattaaaacaaaaccgcaaactttatagtggtgacaataacaaagagaaaaatttcgcgagggaaaagacaccccacccaataaaagggcaccgggctcctgaacaaaggtctggagtgaaaaagggcatgaaaacaaaaacttcgatatagatgccacacgggcgggctaaccctaaagcacatttactttaatcggggcttgcttaagcagggaaaaaaccctgcaaggacttaattaatggaagtcccagggtataatgtgtaaatggttaacctaacaagcggaaagaatccacacaactcttttttgggcgaaattgaaaggagggttggggttttttattaaaaacagaaagaaaaatggttttgaatcccggacaagcccaaaaaaaaaaagcccagcccaaagctgctaaaaacagtgggcccaaaataaaaaacaaggaagaaaaggaaccaccccataggggtcgaataggaacccaaaaaaaaacccaataattttgtggaacagaaaaaaagaacccacatcaatttttttccctttaagaaaaaggggaaaaaaaag

SEQ ID NO: 57971 - DNA, 257 bp, Glycine max
attacgactcctgccctgaatattgaacctacgcaatctttgatccatcgcccacttatcccttggttctacttcctttccgaatcagggcttaacacaaaacttggttaattattataagacacgattgctattatacccatttactccccccctgtggctacggcaataaacagaagttcgcccccacggagtacaaattccccactttttgataggctagctaacatagccacgagacagttaccccatgaaca

SEQ ID NO: 57972 - DNA, 743 bp, Glycine max
  unsure (1)..(743): unsure at all n locations
atgagacgtctcgcaccgggtccttaagtcacctgcagctgcagctttgccaaatcccttcgtttggcttattaaactgcgtgaccccagcgcaaccaaaaaaacctcttatggccaaagaaaacccacggaaactcaccaatagggaggggagttattattaaattttacccgttttgacccccttgttagggtcaaggaacccaactttgagaatatctgtctggccctgttgcatggctgattttctttcaagaaaaactatgtttttaacgaatgggatgccatatatcttttgttgatgaaaaacacttttggttattaaacctgggttgtttgaacaacctgggagtgtgaacctcaggcattgaaaatatattttacctgcggaatgcgactcattgttgatgttgcctattggtgaccttaattgatatggggtgaagttgattttatgaatgaattgatttcagaagaccttgttaaaaaaaccctgtccccttaattgatggatttgtgatgattttgtgaatatgaanatgaggttgttggtggtgttgataacgctagtggagacgaaattatgtctcttttaaaatggatgtgaaatgggatgcttatttatgctgaaaaagctttggcctgtgccttttgggttttttccggggggtcaaatactcaactttcccctggccagcccttggaattatttgctaaaattcctgtttccaatctggcattcg

SEQ ID NO: 57973 - DNA, 294 bp, Glycine max
tttgatacatcagctgactgaaaaactgcctcctatggcctacccttggctggtcactataaggcggatggatcttcctggacccttgcccacgactcctgagcgaacaacattccttctagcggcccttgactattacacaaacaggagtgaggccataacgttatccaacataacaactctggccatccaaaaattctttaggaacaatatcctcacatgtatcggagttacaaataccttgttcgtagatcagcgctctattcttataccggaagctcaatgaattcttgg

SEQ ID NO: 57974 - DNA, 409 bp, Glycine max
  unsure (1)..(409): unsure at all n locations
attgttatcaatcaaactatgagtattttagatcattcaaatataatattattgagctgagaaacattgactttgtagtgtttgtgctattttgattttttttttattaaggtatctttcaaaattacattggttgtaatgttagaagagcatttctttcaatgactgaaattctgaaataataacatttttgctagtatttggggtgagaaaaaaagcatgtttcttttatgttggatgtgttgatccttgaacatttttgtcttgttgatcatattttaaatttgtgtgtgtgtgtgtgtgaaaaagaggagagtgagtgagtgtgtgtgtgtcnngtgtctcatcttatgttttagattttagctgtgttatgttttgtgtttgtgctttatagtacgaaacaaac

SEQ ID NO: 57975 - DNA, 843 bp, Glycine max
  unsure (1)..(843): unsure at all n locations
cgggcannttaggatacattcgaacacgnggatcctcttaaacgacccgcccgccttgccaagcctctggttttataaattccgagccctttctttttttttttccgggacccaaatcgggcacttctgagagggaaagagttcctggcccttataaaattcggggccgagctccctggctttaaaattttcaggcgggctccaaaaaacaccccggactgccatcaggacgactccactcccaacctttgtgggtcctcccacacttggaacaagccccctcttttcctaactttgagcccctcccatctgttctttggaacccccacctcgccttccaataccaaaatctggccgcgccattccctttgcgccccaaccccccatttttcacaccctcccacgctcctggaggtttccaccccgccccttccccttgagaacccgaactccggccccctgaactcggctcaccccccccactcgaacccctctcccccccccgcgtcttcctgcgcacctactccgcccccccccccaataccctccggctccctctacaccttccacacctttttgcccctaacccccccctccttgacccccaagacaccccccgcttattctgcccgcctcgctttcgacggcccgctcactccccccccgtgctgtgctgagcactcctccctactctccctcttgcgccgctgggtcccttcactttctcgggcgacctaacgccctctcctctctgtccttcacaccctcgctttccccatgctgccgcgcctccactcaccggctcctctcgtcacttctctcacaagtatctctcccgcaccc

SEQ ID NO: 57976 - DNA, 788 bp, Glycine max
  unsure (1)..(788): unsure at all n locations
agtgcaactttgnanacttctcggagccgccgagctcttaatagacctgccggcatgctagcttatgctaaaattccctttgcccgggctttattaagacttgcgctggaccgacnagcgcatatctgaaagagacgctctatctgttcacattatagaatacctaccgactatcttttcgagaaggtgaggcggagttattataaaatttaccgtattgactcccttgatttggtcaaggcaccttttttttacaacttttgcctgtccctgtagcctgcgtgttctcttttggaaaaaactatgctacttacgaaatgggcgcgcaatctttattgctgaacaataacactatgagcacctaaacatgtggtgactgacacctggggagcgtgaacttttcgcatggcaaatatagattcccttgcgagatgctactcattgatgctgcagctttggtttcttatattgatatgctgagacgctgacacctttgagaacatagcccttaggagaggctcctaataaatatcttgtctcctttaaaatgagagaactggtgattaggattgagaaatggaactgaggtttatcctgcttaatggggaccttaatcaaaacaaatttcctttttagggcaataattgtttaatacatgagatgttggcaccaccacggccgccttaatttttttcttgcttcgcattgggtaaagggacaattattttttttttgccttgccttggaacagaagccatccctttaattggcagttcccctttgctttt

SEQ ID NO: 57977 - DNA, 1298 bp, Glycine max
  unsure (1)..(1298): unsure at all n locations
agcgtagcactcacgctnacagcagtagatagcgcgacantnctcatcnacttcgctcatgtccactncgtgacacgatgtcagctantggatagcagtcgtgcgcatactaacgctgttggatgtaatactatataaaaggcactatcacngacntatgagcncacnctttggttgtgatcttctcgtatagncgacccgcgcccgcgagntaantcatcgaaagtatgagcactccacggggngtgtggcatagctcaacaacagctcatataaaaatatgcgtaactatagaagagaaacgtgatcttctcatantatgatatgtgtatgtggngtagcgctcatangacacacaccaatcngcgctggctagatatattgagagataacaaaatactctttcaatacagagctcggcacgagaaaaaaatacaagcattaactcggcgcaacaactgcgacataatgacgggatccatagctgtacgttgtgtgattcataccaatactactcacccaataattgagaaacctcgctagtaaaataaggaacatactggtaaccataagaaaagtaggataagagaacgcaagacctttgtctcggtagctaacaaaagagggagaatacgcctctccataaaataaaaaaataaatacactctttaagaaaatagtgcgattacgaaacctcatcggaatcgggagagaaaaaacatgtaagacgaaaggcaacggatgagaaagacacttggggctacaatagaataaacactgcagcagcgtgtgcacatccggcaagcacgaaaaacaaataactaatgggggcggcggaacaaaaaaaacaaattaatttggtggaagcgaataagatgaaaaaaaaacaaagaacgcaggggcgtcggtgggtatttctcggccagaaaaaaggagaactacgagaaataccccgcaaccaaaagaagaacagcggctccataagatgagaacgccaaaaaagagggagcctcatcctgttcaataaggacacagggggaggtgatattaagggaactcaaaacgccttggagggtggagaggaatgggtaacgcactctcacctattataagatccacaacgaagaaaaaggattacatttaaatgctaaacaggccgggagggggcgaacacatgtgagttgaataccaaaagagagaaaaaacaatcttctattttgaatcggggtgcgggagcgtacaaatatatagaaagtgttacgggaaaagaaatacaatcgaccatcgttgtgagtgag

SEQ ID NO: 57978 - DNA, 765 bp, Glycine max
  unsure (1)..(765): unsure at all n locations
acgccttgtatctctcgaannaccgcgagcctctanagacgacctgcaggcctcgcagcttaatgattgagatgtttcgcctccgatttttttttcgggcaagacctataaaagcttcatataaaccattagactattaaccaactatatattgggtatcatccaaacgattagtattggagatcatttcaaaaatgttattagcgaactggagaagacatggccttcgtagcgtgtgtgctatttcgaggattttgttataaaaggggctttcaaaattacaatggttgtaatgcgagaaaaagctttcttttaatggctgaaattctgaaataaaaacacctttgcttgttaaggggggagaaaaaaagccggggacttttatgtgggaggagcgaatccagaacaattttggcctcgtgatcatggattaatttgtgtgctggggcgtttaaaaaaaaaaaaaacgaacgagcgtgtgtgaatccaagcgttcatttatagttaaaatctagctgagtcagcttagggggtgagccctttacttcaaacgaaaataaattggttacctcccccttggagggaggaaatcctgccttctatttgggaaccagaaccatttgggagaaccacccaatatccctttattgacacttctggggaggaatcttaaggagcgcggggccttccaacaagtcgttactctctaacctaaaaagagggccccgtgaacttcataaattacggtttccccaaaagcatatt

SEQ ID NO: 57979 - DNA, 837 bp, Glycine max
  unsure (1)..(837): unsure at all n locations
aacacgaagaacaggaacgcacccccggcgaccgacagcaaaaaaacgaaaccgcacaaacctcacgaaaaanncaagatgaacctcgaancnccgacccnaaacacccgcggcgcgcaagctcaaagagagagaaacccaccacatgtttttatatcgggaagggccataaagcgggagataaatcacaagagcaacaacacatgatatatgatgggatcaccaaaaccatgaggattttaaaacactcaaaaataaaatcatagagcggagaaacacagaccctggagagggcgagcgaaacagaaatttacatgaaaaaagggatcctcaaaaatacacacggatggaaaaggaaaaaagaatatccttcaaagacagaaaaaccgaaaaaacaacacatatgcaaaaaagggggggaaaaaaaaaaacagggcaattcaaacgggaggcgcggagaccagaaacacaaccgggcccggggagcacaaattaaaaatgcgcgcgcgggggcgggaaagaaagaagaaaatgagcgagcgtgcgtggagcgcggcgaaataacaagggataaaacaaagcacggacaagagcagggcgcggcggcaaaaaagaaaaaaacgccgagaggacagaccatacccaggagaaaggaaaaaccacgagccaaagaacggaacaaacaaaaacagccgcgaaaaaaggagaaacaaccccttagaacacaccgggggggaaagagcaaaaaaggcgagcaccccacaaacaaaaggggggcccaagaaaccaaacgaggcgcccaaaggcaataagaacgacggaaaacaaaaacaacca

SEQ ID NO: 57980 - DNA, 1119 bp, Glycine max
  unsure (1)..(1119): unsure at all n locations
gcccgacggccnacgtcccgctcgacatnacacacancaatagacgacgagacgcagagaaatccggtcgcgacggaaaaccacaaagaaaatagaantcaacaccaagaanatgtgatgaagtcctgcgacacccnnnnaatgaaaacgaggcgaccggaaggaaaccacgaggaacacacaacagcaactattgtgtataaacacgaacaaacggcacagacaggcgcgggcggcagtaagaacaacgcacaagnggaggcgacgcaaggtcaacgcaatacgtcatcggcgagaagaaaaggaacgcggaacagacaaaggcgacacacgacggcagtcgganatgggaacacagacaagcatcgccgggcgcacaaacggagaagagagaggagacgcgtcgcggctcggacgacgaccggggacgagggccgaanataaccagacgggagacaacgacgcgcaaacaacgcgcgggcgaaacctgacgacgaacaccaccgcaaggagagagagcagacgcgacagagagcgggaccgcgggcgacggagcaccaaacacaaacacacaaacaagcagagggcgatacgacgaattcacaacaggagcacagcgaaaccgaccgggaagcgcgagggaagagcgaaccagaacgcacgaagatcggagcacaaaatggagcaaaacccgagtagaccgggaacaagaaaagagaggaggggggcgcacgcacgagagagacaaaggacgaagaagcaaccggaaagggcacgacccccgaagcggaggcggcgagacacagccggcgaccgaggagacgcatgagacccgcaaccggaagaaagcgaaacacgcgaggagaaacaggaaagaaacgcgccagggaacgaaaaggccagaccgcagagcgacgcagaaacaaacgcaaagagccagagacacgccgggcagagagggggcggaatagatgaacgcgaacgcaacaggagacgagagacagatgggggacaggcagccgcaggcgcagcaagaggacacggagacaacgaaagacaggggagaggagaagcagaggggaggcaacgaggaacagacaaaaagagaagagaagcgag

SEQ ID NO: 57981 - DNA, 999 bp, Glycine max
  unsure (1)..(999): unsure at all n locations
gaatcgagagaatangatgtgatattatacacacagttaagaacgccaaaagaatactgagatacgaattgaagttacgtaaaaacccaaataaagacacagaaagacagaggggntttgagaacatcngtaagaaccaaccggggtatnnaaaaaataacacgcgggagggatgagagaaataggaaaagaagaggggaggagaaacatattgtttgtatagtaaaaagaaggagacagaaaggagaaagaggatattagagtgctaagggaaaaataaaaagtgcaagaaggataaatagatggaagggaggaaaaactgcgtagagggaaaatgaaaaatctaacgaaaaaatagaaaccggtgggaagaacaaataaaaaagggggggaagaagacctaaaggcggggaaggataaaaagaagaaactgaaaaaaaggaacaaaaagaaatctggccagaatggaaaataaaaattaggcaaaaaacattatgattcgtaagaaaaaaaaaaggagtagaaaaaaaagagaataaataaaaaggtggataaaaatacatgaaagaaaagaaagacgcgaggaaagaggagaataacaataaatgcatgattaagaaaaccgaaagggaataaacaaaaacaaaaggcggataaaaaagtgaataggtgatgttttgaaaaggaaacaaatgaaggcaaggaaaaaagggtaaaatgtattaaaaagagaaaaatgagaagtaaaaagggaaacaaataagtagcaaaaggggggaagaacaagagagaaaatttggaggggaaaaggccaaaagaagggaaaaataaaaggtagaagaaaaaataaaaatataattaaggggttgggtagagaccttatattaataaatagaagttgagaaaaaagaaaaaaaagcggggggtggggaaaaaaaacaataagacaaaaaggcgaggaaatagatatggtcagtgaaagaaagaaaagaaggaggg

SEQ ID NO: 57982 - DNA, 1065 bp, Glycine max
  unsure (1)..(1065): unsure at all n locations
gcgacaaaacngcgagcagcggggacagacgttcttccacntacgacgcaaccctactcacaatacacacaatcaccagcgtgacaacgagaaaacgtcacaacacaggaaaaacacacacagagaattgaaaacattcgaaaaacaccccgaccataaaaattcaacccgcaggcgtgcaaaccttaaacaatggaaccacaagaaacaattttttatcctaggggaaactacgcggggaaaaagaaccgagggatctataacaatagagcgggcactgcaacatggtgactgaaggaaaccgaaagaatatatgacacaggaaacagaaagaaacaaatgaaatcaatagacacaacacaaggagaggggcacaacaacaaatacggtaagaaggacacacagcgctacctacacacaaccccagaccagagcagtgggaacaaaccactaaaaattagaaaagagcagcaccacccagcggctagcaacaggtgcacaaaatgcaccaataagggcccaagtccctcgaaaaggaaaacaccacagccctcatcattaaaacaacggcgactaaaagtgaaaaaacaaagcagacccacccatctttcacaaaaagagaaagaaaaagaccgcccgcagggccataccaaaaaaaaaagtataaaacaagaaagggaacaacacagatacatgggaagaagaaaaatgataccaatcgccagccacaaaaaccaacgacacaagctaacctaacagtcgccaaccacaaaaagagcataacgacaaagatcacaaacaagacgcacaagaaatgaatccaacaaggaagaaataacaccccccgcagcaaaggaacacggggcggacaagcaggaatgaaaaaccccaacccccgaccaaaagaaaagcgcggtcacaagagacgaataccggaaagaggcgctctgcgaaaataaaaacccgggaggggtatgaacaacaacatgacaggaagaactatacaaaccgaggagagaggaaaatagagaaccctgcaccaaggagcccacaaaacctcgaaaa

SEQ ID NO: 57983 - DNA, 476 bp, Glycine max
cagaaggcgctccccctttgtttttaaaaagggcctttggaactcactcttcagcttctctgatcaactaaccctccccgaggctcatttactggaagggggaattcctcggagtgggtcttgcacatcttctcaatttcagattccttttgcttaacgacatatatcagccggtgaagcagcccctcaagccgtcccctttcaaaagcaagcctgaccagaggaccaacatcatccccatttgcaattaaattagccagaaccatatcctctcctccatcaccgttctccacaacacctctcctcattgtctttacatccatgataacatgaatccctggaatctcgaccacacaattctcattagaaaccaaatgaatactaaactaagcttataaaaatgaattatttcagaaattaacaatcacacaattacattgttatattttttttcacatcacaaaactcatgactta

SEQ ID NO: 57984 - DNA, 923 bp, Glycine max
  unsure (1)..(923): unsure at all n locations
agcaaagcgaacgaaaaagaagagaatcgacagcacacaaaaagaggagtaaaaagagacgacatcaaaacaccaagcacacaacccaaganntttgaaccctcgcaaaccggcggaccnnaaagcaaccgccgcgaggcaaccaggacgggaaaacagggcccaaccataatttctcttacaaagggccccggggggacaaaacacgggtcctggaaaaaaggtgccccaaacgcggggggaaaaacaagcttgaggggaaaggggccgcgggggtgggcacccccagacacacattaaaaagacccctctaaaaaaacattaacccaaaagggtatgtatatgggaggccttgcagggcaaaaacatgaggaaaaaccaaaaccccgggaaatggagaatacgggacccagagcacaccccctttcagaggggcgcggggcaaaacacttaaaaaccccgcgaaaaaccaaatgaaaaagagtgggaaccgcggaaaagccgcaacaccttataacaaagagagggcccggagaaaaaaaatgacaaaaaaaaacccattccccccccatggaaaaaaaaaaaaggggagggggccgggaaaaaatttaatggggccccaaaaaaggagataaacaaggggtaaaaaaaaaaaacccgcccagatttgggcttgcgaaaaaaaaagattgggggaaaaacaaaggggagaatgcggggggtaaacaagggggacgaaaaaaatagggcgacaaaaaccccgaaagctggggggaacacaaccaaaaacggggaggacagaaaaaaaagcaaaaaacccccatgattatttgagcaacaaacagtcgccaaaggaagaaagaaaaacactccggaaggggcgccgaaaaatactatacaggacccacgggcaaataaaagcc

SEQ ID NO: 57985 - DNA, 287 bp, Glycine max
agctttatacaagggagcaaaagatacaagttttcttttcaggtaagctaagtggtcaaaaaagcttgcgtctatacaattcatggccttcatcatggtctgattaattcaaagatttatgcaaagatcattattcacagttagtcatttactcacagagtaaggtcacactctcatcgggttttgggtcatgcttttctttcacaaccagtctatgtaatggctaacccttatattataaagtcacactcttgttctttctttgatcaacatgcacatttgcttca

SEQ ID NO: 57986 - DNA, 488 bp, Glycine max
  unsure (1)..(488): unsure at all n locations
atcatcaatcacctagctgaccaatttttgaggaatttgtggcttcccataatggatacaaatacaagggatcacattcacaaacaccattcaaatatggaaacgttactgatattcctactgcagtggattggaggcaaaatggagctgttactgcagtcaaggaccaaggccaatgtggtaatcaagtaacagagaacttttatttatttttttatcagcaggaatcaaaaacaggtaccagggagtttacaataactcacgtaccttgctcaatcatctgagctagaccacctggattaacacaaagaaaatgaaccctnnattaaagtgatactattttcttttgtatatatcattgtcatgatggcattaattaaaattggttaatttgtaaatgaattaaacaggtaactgctgggcatttttaacagttgctgcaacaaaaagtatctaccacataaagacaggtatgctaatgtcccttt

SEQ ID NO: 57987 - DNA, 236 bp, Glycine max
agcttgagatgaggaagtgttgataggtgaaacttcctgcttttattgttgaccacagagaggtacctggagatatgtcgcgggggtcaagaaaccttggggacgtcaggtggggtgctattgcccaaaaccaagcttgaccaatcccgacccaacccgggcataatcggtcaatgagaacctgtgatgttcctaagcaggcgagctcctggcagtcaacagattaaaggaaaaca

SEQ ID NO: 57988 - DNA, 412 bp, Glycine max
ctctggttgtactatacgtgttcttggatcaagtttgctcaaagctgttgtatattatttttgggtattgttgcttgtgttggcaaccagttatcatttaatattccttttaactacttttctctaaaggttttttatttgggtctttttaggcatattctatgttaaattcaatccctgttattgcatatctgtcactagatctacccatttcagttgccctggttttcacttttcatacctgctattcttatttgaagagattgttactgtcaaatgctgcactttttttattagtttgtacttgatgaacaattatacaataaaaactatttaccccattttgaattaaaactaatggactgttcttgtaaattttttattgtaccttaataatggattattcatgttt

SEQ ID NO: 57989 - DNA, 1075 bp, Glycine max
  unsure (1)..(1075): unsure at all n locations
cacccactctctcngagactgtaagaacnaccttctnttcttctgccatccacgctatccaacatcccntctatctcagtcacactatcatgacattacagaactaagcncacatgggccgttaggaccctcgcccgaccccggnagaccntatagaagcccccggcgcgcgcgcacctcattgaggccaccctctgaggagatatattttatggggaaaaaaccctttgcaaaaggcctcccctccatgtgtggggagacccgttacggcacaccgagaaagagaacccacgcgtttttggagggaagtccccaccccagaaaatgagagcccggctcttcttgacaagagatgacaccttggggtatgcgataaacactaattttgccttgggagaattggagaggcccaacctaagaggcttaaaaacacaggtgggtaaatcctactccccccggggaaatttggctaaaagaaaaatttagcacaaagctctcactacagggaggagatggcctaatcctggttatcccccaccccactggaattccctaaagggggaagagttctaccacacaagagacagaggggccgggaacataatatcataggaaagaaaataattattagggagacccggaggtgggaagagcctaataggaatcttcacccccgcacccaggggccacaaaaattcctccgtgggtgggagagggccactggctatccattttttcccccaggggccagcggggaatatgttttttaaaaaccccgccaacaaaaaatttctttgggtttttttcagggcccctcgtgtattattggtatcccacataggaaaaagcggccgagaaatccaacgggggggggagcttatttgatagtgaaatggggcgggaccccttcgggtgacctgaaaaaaaaactctcagggatttcgttgtccgccctcggaccccggatagtttctttcttgtggcccatactaaaccccgagaagtggtggaccccatccccccggcgggggcgcggattacatatcagcccaccccccgcgcgtacacactgtcg

SEQ ID NO: 57990 - DNA, 1322 bp, Glycine max
  unsure (1)..(1322): unsure at all n locations
cacgatatgcgtaatatagcatagagagatcaacttaaggatacaaatacatttggataattaacactacgaatcactaataagtatacaaagagcgagaagagaannaagagagnttaagaactttgtaagaaacaccgagnancaanaaaagaagacgcgggaggggaaccacttttggctagagaagaaaagaagaaaaatttttttttgggggaaaaggaactgggtcaagaaaatattcttagtgtaaaaaaaatatggacctgatacaaggtgaaaggattgtaaaaaggggtagtttattaacattggagcgataggcgaatcacatgtgatgacaattattggaagctgtaatgtggaaggtggataaagaaacaaaaagagcgcattggggcttatcgaattcaaaagggcattgaatctcaatttatataagaaaaggaactaacatcatataataaataaaaaatataggggaatccttgagttaacatactatcaaaaaatggagagtaaacaatgtgcacatatcctttaacacaaactctcagagtggtgggtagtaagtacaccgcataaattataatggtagtgaggagagggagaaataattaagggctacctatatcattgaatatagacaaaagcaaagtaggtaatgnaacactacgtactataattattgtcnagtggtgaaatacctactgcgtatatactataagcgagataagttataataatgaaatacacgattcnctacaaataaacggtaagagataacagatagtataaaatgaaatgttgtgattgtgtagtagaaaccaccaacgtggagataacaactaattgttgggtctaagggctgtgaaaataatacctagaaggcggttgtaatatgtggtaacgngcgataacgtaaagatagaagaatcattaataatacaatcgctctctctatatgatagactaatctcatcaaaatagagatcgtcaacatacgtggacagtctaggctnagggagaaaacatatggggagaatantctcgcgacttcaccacactcctcntgtgtactagatacaagtgntgtccactaagaatctcatgagatatatagttacattcctataataatcacgacgctttgtggcgacggagagaggtacatattgtggaggtcgtgagttaagaacatataaccaagcagtgactactgaatacagaatatgactcatctctaaattgtgcggaacagagagacaagaatcgtatccatactttatatgtcgtagagagcgaacaagatgacctgtaag

SEQ ID NO: 57991 - DNA, 878 bp, Glycine max
  unsure (1)..(878): unsure at all n locations
ttccggtagactcgtacctccccgnccnnntaaaaatcactggacgcaccatcctgaatcgttcttatggatcgccttttatttttttcccgaggctctggcatgggctgaacccttcaatgggaaacagtttcccccccaactgccgcactattaaaacatggcgtgattgcttgccttcgtgttggcccccgcgggtgccttaattaaatagagctcttctcaacatattatttgccgctagaagcgtcatctgcctcgcctgtccctttcggggaaaaccctgctcgttgctcaacttgcaattaactgggatagtgtgccaaacgcggagacccctttgacggtaccctaattggacaccgtggcccctgattctttcacgtttttcactaccctgattattccttaatttgagacagttcaggcacaccgtacaatacagctgtcactatggttctaattaaccctgccctttgatggaacaccctattacattgtccataactattttaccccctctttgcaatgcaaatctactggaactggttgcttgtaaaatttttttatcagtcccttcataatggaattattcatctttcaactcgaagaaccctgccctctttttgcttttccaaaagaatagttttgtttgaaaatcaaagaggaatcttgctggggatccccggggcaatataaacttcttgtagtgtcattttactcaagcactatgggggacctccgcctaggggtgaggtttatgaaacacaagcataaaccccactttttcttttttggtaaatttgttctttcatgtcccgaagatttcnncctcgtaacgggcttttctcatcttttttnnnnnccatttggttccc

SEQ ID NO: 57992 - DNA, 390 bp, Glycine max
agcttcggttatcaatttcgagtgtctcttttttattacgaggcttaatcagacatccgagtaaaaagttattgtcggttgaatttgcaacgaccatcaacattcaatttcgagcctctcgatatattacgcgactcaatcagacatcagagtaaaaagttattgttgtttgaattggctgagagcttcaacattcaatttcgagtgtttcgatatattctgggactcaatcagacatccgactaataagttattgtcgttgaatttgctcaaagctttaaaatgcaatttcgaggggctcgacatattaccggactggaacaaacatgcgagttaaaaagtattggcgtttcaatttgctcccaactttcacattcaattttcatcgtc

SEQ ID NO: 57993 - DNA, 866 bp, Glycine max
  unsure (1)..(866): unsure at all n locations
ctacgagaaagaagattgtgagtcatctacaacttgattaaagaagaatcaaattaataaatactatcagctaacaacaaaacaaggcagtgaaatgtgccctccgaaacccnnaaatatacgaggcgggggcagcaagtatgagccattcaagcgatttttcttttttcatggacgtctcaataaatggcaggaaaaatgccaacaactctaaaaaggggaaagggaggttcaaaataaaagtaagagcccaacttacaaattgagggggggatttggataagaattggagatataattgaaaaacctaagaaattaaaaacaaaaagtctcctgggagacacaaaaaaagagaaaccttccctaggggggacaaaggaagaatgccagaaatacgagaccgctgggaaaaagaaggctgtaagaatctaaaaaagtgcaaagcaaagaaaaactaaatcggaagatcggaggcgggactaatgaataaaaggaagcatggaaatggaaacaggagatctttaaaaaattaataacaaaatgaaggttttaatcaaaagggcaatagggcccccataaataatgaaaaacgcaaaatggaaatgggtataatacacaaaaaataaccggagaaggcgtttttgtaacgaggaaaaatgggacgcgggcgaaaaagaaaaccctaataatggaaaaagatggttttaatcaaagacgggaagaaaaacactttcagtcggaaacaaatgaggggaggggttatagggagaaactgaaatgataaaccgatgtgatgaagaaaaaaatatggggcgaaatcatgaggggaacaaacacaaaggatgggaaacataaaaaaaacagcg

SEQ ID NO: 57994 - DNA, 271 bp, Glycine max
cacctatactcgccactcctttcacagtcaattaacacaaacgaagtccttcctctactactagtgtttgtgtcagaccttataatcaccgccacaaatccgttttcatgagcaacggatcgagcccaccgtaaaacatcttctctgctgtcatacacctacaaagcaatccacataatttcagttttctacaacatattgattttattaaatcactcacaatcatgaacattattacctgaaagtatcgacgcatcagagcaataacatg

SEQ ID NO: 57995 - DNA, 294 bp, Glycine max
tgagatgaggaagtgttggagggtgaaactttctgtcttttttgttgaccacagaagaggacctggagatatgtcgcgggggtcaagagaccttggggacgtcaggtggggagctattgcccaaaaccaagcttgaccaatcccgacccaacccgggcatagtcggtcagagagaacctgtgatgtacctaagcaggcgagctcctggcagaccacagataaaagggaaacgagaccacaaagcatggaggcttgcggcggctggcccgctgtgaatctagtgcaatatgcgga

SEQ ID NO: 57996 - DNA, 362 bp, Glycine max
acactttagtcatctaacaattgcgcaagtaattttaataaaagcaaaactgtcagtataaaataaaagtgtgtgcgctactatttaagaaaaagaaaagctaagtgcggataggcaagtaatagagctggaataaaaagaagaagggtgatctatggatgaatgctctattataacctaagctgttgcaccctagataaaccatgatgtgttgcagcccagccacattacaagcctagtgaagtccttcggattcagtctgtgtgttcttgactgcatgatatgagatgaagtgcacagagtgagacttatgttggttgttcattgatggataacctaaacactcgcgcatgagtggaaca

SEQ ID NO: 57997 - DNA, 400 bp, Glycine max
ctacctttgactaaactgactcgtaagggtcatgcttttgtgtgggatacccaatgtgagcatagtttccaaatccttagggaaaaattgacgactgctccagtgctagttttgcctaactcgagagaaccctttgagatgtattgtgatgcatcaaaaatgggtttaggaggagtattgatgcaaaatggccaagtagtggcctatgcttctagataactcgagactaaagagaggaattatcctacccatgatctggaggctgctgtagtttttgcccttaagatgtggaggcattacttgtttggctccaagtttgagttatttagtgaccataagatccttaagtacttgtttagtcagaaagagctgaacatgcgttaaaggagatggttagagt

SEQ ID NO: 57998 - DNA, 378 bp, Glycine max
ataaattaatgacctatttagtttagtaaccctaaaccctaattagtcacgtaaccataaatactaattagccacataaccctaatccctaattagtcaagtaagacaaaatcataattagtcaagtaacactaaaccctcattagtcaagtaaccctagacccccattagtcaaataactctgtcatcaaaacactaaaacataaataattatataatgggtgatgtttgtttctaatttatttttcgacagtcaatacttaagtcaaaaaataaatatacaacgttcaataaacacacttattatcatatacatgacaccccataagggactaaggtcatcttccctaataacaagcctattcaacctcgtaattg

SEQ ID NO: 57999 - DNA, 387 bp, Glycine max
  unsure (1)..(387): unsure at all n locations
tggagcatttaatttatatgctccagcttgaggtggagagttagaatatttgctagntgtatctttgtaaggtttagaaaaggctgtttttagtgtgtaatctgaaaagcctaagtaggagcaggttccccgggctgaacctggcttttcttgtttcttattgtactctttctgatttatataaatatatacgatgtgtggctgagtaaagcaactcggcactgctctaatgtaatgtgtatctcaaacccttcaacaatgtagttcttaactttaagagaaacaaagctatatattctactaatcatcaacatcaacaggggtaagttaaaaaaaacattttttttcttattaatagtggacaaacacatttaaaagcaggctctc

SEQ ID NO: 58000 - DNA, 424 bp, Glycine max
  unsure (1)..(424): unsure at all n locations
agtcacctgccgcatgcaagcttaattaccctaccatgaatcaatgctcttacacgtgttttcttatcttccagaanagacagcttgctgaagaagtaatgcaaaattgattgacaacaaaaagctggttatagtgatcacttgcaaataaaattacagatggaggagtcctaagaatacactccttcaaacacagcctctcttattggttaaaactttgttgaaactacaaaattaggagtgctaggacccacgaaattgccatttcccctaaattntaagtaataagagaaggtgtgtttggagaagtgtgttagagagcgtgttcctagtatttcgcattacagatgatatatatatatatatatatatatatatatgctcattattcagaacagtattggttaaaaatggtaatgacact

SEQ ID NO: 58001 - DNA, 395 bp, Glycine max
cgcgctattcatctttttcattctcttctccctttgccatcctgaattcttttgtgtctcccttctccctttccaagagaattcaaaggaccccgcctgagaattcttttgattctttcctttcccttaaacaaaagatttcaaaggactaactgcctgagatatcttttgtttccccttacaaagattcaaaggactaaccgcctgagaattctttgtcttaacacattggagggtacatcctttgtggtacaagtagaggatacgtctacttgggttgttgaactaagaataagagagggtacatctcttgtggatcagttcaagtggagggtacatccacttggttgttcaaagagaacaagggaaggtacatcccttgtggatctttggct

SEQ ID NO: 58002 - DNA, 376 bp, Glycine max
  unsure (1)..(376): unsure at all n locations
ctgctttattgttgacacagattgntcctggagaatgtcacggnggtcgggagaccttgcggacgtcaggtggggtgctattgcccaaaaccaagcttgaccaatcccgacccaacccgggcatagtcggtcagtgagaacctgtgatgtacctaagcaggcgagctcctggcagtcaacagataaaaggaacaaagaccacaaagcaaggaggcttgtggtggctggccagctgtgaaacttggctgatatgtgagatatggtctctggtaatcgattaccaagggtggttaatcgattacaaggcttaacaataaagacaggaggctaagatggtctctggtaatcgattaccaaggggtgtaatcgattacca

SEQ ID NO: 58003 - DNA, 406 bp, Glycine max
gaacactcaagcttccacaacatccaagcaaaacaacattcaaactgcataagctatcacagtctagcaaaagcagagcaaaggcagaaaactctgctcaaacaccagccaagatgacagcttttctcacttaaagaccacagttacaattccttcgatccaatatcgttgaccgttggatcgactccagaattttactggaggtctatagggcatgagcctacattgtgaacgatgggagtctactagcaaagatcaagaactcagtctggactactctatccacagacaagcactcacacgcgttgtctggaccaagctagaatcctgctgcacctatgatgacagcagagattggcataagagcagatctctaatatcgcacttaccctcatacgatcttgct

SEQ ID NO: 58004 - DNA, 414 bp, Glycine max
gacctgtgaaactaagctctccgctgctaaaggagttgtagggcattgtagtggtgtggaatccccagagagagcttactcttggttcttacaatggcaaatcagagagatgcatcaaagtaagagacgtcctacgcaaacctcacattagcaacgtattgtgaacataaggtatcgaggtttccgaagagtattgatgaaatgtgcgagcacttagacccaagcagaaccttacttttcttttcattggaggctcactctcttctcagattcagctgttgttttcattggtttctcactctcttgtgagtttcagcaagaaagaaaaaagcacttcgcagattcttcaatcaatcacatgtgtcacgatgaataacaattttttttgccacattcgctgaagtcagatctgga

SEQ ID NO: 58005 - DNA, 305 bp, Glycine max
  unsure (1)..(305): unsure at all n locations
agctngtcaatatagttgtcccttgcttaattcttatttgnctttttgttntctttctaaattttaaggatatgaatttaagtatcacacattcattacatgttaacattntctatatatgaaaaatatatcaggtgatgagagtataacaaaagagctaatatgaggaaaacaaagcatttccataatttcttgcaacttagctagtttttttgttatgtgtctcctcatcaaaacttgtatgctgccaatggaagtagctcaagcttaatgggggctgtggattgagatggaatacatctgat

SEQ ID NO: 58006 - DNA, 388 bp, Glycine max
tcgataggtcattcccagagtaccaattcaaagtgatgttctcggtgctaacaaccaatgcataagaattggggtggacttggagaaggtccttagcaagatcaattgaaatgaggcctgcactgcatcccattccaccaaggttgaggctctttatgttccctctaagcttataatgattgataatcattgccgaaagtgatggcgtggggcaaaagaggctgcaattcacaatcagaattccaatgtccttaggtttcacagaagtctttgcaaacagctcatctattgcaccaaacataacagcttcagcctcttttcttgcctctttcattgaggggttgggaggatcattgagaacagcctcacgaaagtaagtgctttcccc

SEQ ID NO: 58007 - DNA, 441 bp, Glycine max
  unsure (1)..(441): unsure at all n locations
agcttcatgatgaatcttgtatgattcatatatttttgatgataacaaaggtgatgacaaaaagctcaaaagtcaagaacacttcatgataacaaagatgatgatctcaaagaatcaaagaatgagttcaagatgttcaagattgaatcaagaacatttcaaggttcaagaggatatttgatttcaagaatcaagaatcaagattcaaggttcaaggttcaagcttccaagaatcaagatcaagattcaagactcaagattcaagaatcaagagaataattaatcaagataagtatgaaaacgtttttttcaaaaactgagtagcacatggatttttctcanaacctgtttaccanagagtttttactctctggtaatcgattaccagattattgtaatcgattaccaatagcanaatgggtntcaaaaatctttcaacta

SEQ ID NO: 58008 - DNA, 389 bp, Glycine max
tgccaaacataacaaccaaatatcttagatattttatagtatctgataaatgaatttgtcttagtagttgaaagctaagacattccttgcatgacactttacaaaacatgggaaatttattagcaaatatacgataggtactcagaatagtacaccacaaaaccaaaactaatgttggatatcttttgcatatgttacggcatttctggtgccatacatcaatatatcttctttgcatttaagaaaagaaaacaaaattaatggtcctcaacacaccacagtacgcttccataaaaaacataaacagatttagttgcatctcactcgaagtgtggtacctcatggctaggaccctaacactttgattggggaaaggatgttagaaaaaa

SEQ ID NO: 58009 - DNA, 413 bp, Glycine max
  unsure (1)..(413): unsure at all n locations
agctnttaaattgtggttgcaatcaaaattcttttataacataaattttgaaaaaaaattaagaaaaaatatgtgaccgatgcaactataattgcggttgaccttggtctctccttgcttaattcgatttatttttcatatatactttttgtttatatccataaatttctagataaatcaaacatatagatgtgtgtatgtatgagcagattttctcacaatataacataattttgagttattaaatgatttttgctaactaattagggacaaaaaaaatttgcagatgggatctactcttctaagcttgagcctgaataactcagggcaaccccttaaccaagtgagtaatactaatntaataatttcttcggtaccctataagccaantatatatgttatttttaattaat

SEQ ID NO: 58010 - DNA, 391 bp, Glycine max
  unsure (1)..(391): unsure at all n locations
agactctatagaatacctcagctntacaggatttgaacacattaccttctagtcacttggcaatatccttaacattgtgccaaggcacacaaaataaagtgggaaaaaagtttcttgaaatgatgccgaaagaatgactttacctgctcagaaaggaagagtgatgacactaaattcagtgaataagaacttaatttgtagtctctttgcataaccagtgaattagaacatatcataggaacctattaagcaataaactcattgtgtcgaagcacaaggtagttaaagcaaaacaatatggatagaagctgaagtaaatcaaactgaactctcccttctactgtaacttctttactttccctgggcccataccacctaccaaaccatcgat

SEQ ID NO: 58011 - DNA, 141 bp, Glycine max
  unsure (1)..(141): unsure at all n locations
agcttctaccatgccttatcgaangagactgtgtatggatttaagaaaacaaagctagtaacagtgctctgggtcaaacacccacatcactacatgaaagagctgagagtatttcgggttttacaaaggaacgtaatttgg

SEQ ID NO: 58012 - DNA, 329 bp, Glycine max
  unsure (1)..(329): unsure at all n locations
tcaccggatgatgccgatcgaacattttttaattgataccatccaacncgaagccagggattgaataaaataaacaatggccggcgtccgtccttatatggccccgactgatatcattcaaccgacattgcgctatttcttttacaaaagctggccgataatgctctttttttaccagagaggaaattttttgttttggtgcttcctaaaccaattacaacgcaagtcgggatggttatttcgtgcgagcttaacctatggttcgtccacaccgacactgcgttgtttgtcttctcatttaagagggcaagaactatttggaccacccc

SEQ ID NO: 58013 - DNA, 388 bp, Glycine max
  unsure (1)..(388): unsure at all n locations
cgagctctgactagtactcatgctgtaatcatagaaatgtccccatttgaccaatattatagtgntgaaagagcctaacaagactttcctaaattggtttaaagattcaatctttggtgatgataatgcttatgaaacggtttggaagccaccttatgtgcctaaaagaaatgttttgacttggcacggagacgatatcaacaagtattcattctacaccaaatcataagatggcacgagtatcctgcgcaacactggggttagtcccccggctgcctctcaacactctgatagtgtacatgatgacaaaccttgtctagctcacacgccttactttggaggcattgataaaagttgggagcgtcttttcttaaaatctttgcctggg

SEQ ID NO: 58014 - DNA, 229 bp, Glycine max
tatggatgtatgctacgatcatttttgcatgaatttctaatctttattatcatatgcatgtcattgaaatgatctggggcattcccttattactgagccactagctaaacaaatattctgacatacatcatgtcccaccttacgtaggccttttgagccaaacctgcactttttggccataaccctgacctacgatagaaagttccacccttacccttgggaaagagaa

SEQ ID NO: 58015 - DNA, 367 bp, Glycine max
ttaataaagaaattattctaaaactaaataatttggtacaacagtgtagagttcaaacacaatccaataacgatttatcaagagccaataatggcctggtaggacaaaaaatgttgggttgaaacaaacttgatgtacagcttgtgttgtagagccagaagtgggagtcattagtaattgtaagcttgttgaaattagtggaacttagtggttatcaaaaaattatacataatcttaattatgaagatgaactaatataaatctttgtcgtatgtgctttcaatttttctctgctttaaattgatctatggttttaattggattctgttttgaaaactctatctatttttctaaatttgttttcatt

SEQ ID NO: 58016 - DNA, 356 bp, Glycine max
  unsure (1)..(356): unsure at all n locations
tacatctttctagttgcattntcaccttatcagaagagactctgaaaagttaagatacaactcataatgctgtcaattgaatatgtaacaatcaccacgatggcatgcctgatgcaaaggatgagatctttggtccagtccaatccatattaaaattcaagtaagacaacaactagtgttagttaattactctgcagagaatggtattatactaccatacatgtgttgggctttgtgcattaatttttgtgttgatgactccagggaccttggtgaggtagttcaaagagcgaacaacacacgttacgggcttgcggcaggagtgttcacaaagaacatggacactgcatacactt

SEQ ID NO: 58017 - DNA, 207 bp, Glycine max
  unsure (1)..(207): unsure at all n locations
gcttcgactagagccatcaagagattatagatatgtgaccatggcatgagtttcattaacaatcaatctttcgagatctttcaacactttcaacataatnttctaaataagttctcttcaactttcaaaaagttttgggggaacttttttttccagaaaaaatctttgtccaaaaccgggggggtcatctttttaattttttttccc

SEQ ID NO: 58018 - DNA, 318 bp, Glycine max
agacttaatcaagataagcatgaaaaagtcttctcagagactgactaacacatagattgttctcaaaacttattgaccaaagagtctgtactctctggtaatcgattaccagattgttgtaatcgattaccagtaccaaaatgattatgatatagtttttcaactgaatttacagcgttccaattgatgtcaaaatgttgtaatcgattacaatgttttggtaatcgactaccagtgtgcttgaatgttgaaattcaaattcaaatgtgaagagtcacattctgtcactaaaaagcgttgtgtaatcgattacactga

SEQ ID NO: 58019 - DNA, 401 bp, Glycine max
  unsure (1)..(401): unsure at all n locations
tgaagttaccgtttgaggtgctgtaatgacactttattatatctagnaatgaccatatcatcaacataaatgagaagacgaacaataccagctgcagtggtttgaataaataaagaagaatcatatcgactttgagtaaaagataaggcaaggagaatagttcgaaatttttcaaaccatgcccgtggtgcctgccttaaaccatatgaagaatgtttgagcttgcatacaccaacagaagaagaaaacaaaccttgtggaggggtcatataaatatcttcagctaggtcaccatgaagaaagacattcttcacatccatttgatggagagaccagcccttggaggcagcaatagatagcacagttctaatagtagtcattttggccacaggtgcaaatgt

SEQ ID NO: 58020 - DNA, 297 bp, Glycine max
tttaactactatcaccctttttaataactaaacccacctccttgaaaataattacggataaaaataccacaccaaatatattcaaacatcaggcataattactaaatatatatagatatatatatatcagggtgttacactaagcgcgagatcagtgtgctaagtgcagtagttgtcttcaaccaggctcagcacacgactagtgctaagctcaaatccactcactcgcgctaagcgcgagggtggcgctaagcgcaacatcgtgaattcaaagcctatttaaagtctgtcttgtgc

SEQ ID NO: 58021 - DNA, 393 bp, Glycine max
tttgagtgaaaggatgtgactcttcacatttatttttgattttcaacgttcaagggcattggtaatcgattaccaaaacattgtaattgattacagccttttcaaaataattggaatgttgtaaactcagtttgaaaactttttcaaacgcattttgctactggtaatcgattacaacactatggtaatcgattaccagagagtaaaaactctttggtaaaggttttgtcaaaaaccatgtgctattcaatgttttgaaaaaactttttaatacttatcttgattgaggcttttcttcattcttgaatcttgatcttgattcttaagatcttgaatcttgaatcttgattcttgattctaggctgtcttcttgagtcttgaattcttcttgat

SEQ ID NO: 58022 - DNA, 465 bp, Glycine max
  unsure (1)..(465): unsure at all n locations
agcttgtggttgttgaaacatttaatatttgtattatatgcacattcttcttcatgtagaanaatcactctngttttctttcatgttgaatatttcagcacaaaatcacttcctttgagtcagaacaagtctgtcacaacaaaacacatcttttgataatgtttagtaatttcacaaaacttgaacttcatttgttctttgtgggatttgaaagatcatgggagacaaagcaaatctcanatacataatattaaatgaagtcttaaatgttttctttaatgttgtatcagatcatacattaaacttgcttccgtttgaaacttcaaatgtaggatcatgaaacataattngatatcacataagacacaacttttaactnttgtatttatttttatataatcagaataattaaaggttcgatccatcaagacacaaatgtattntctcaacgtatttcatattaat

SEQ ID NO: 58023 - DNA, 341 bp, Glycine max
ggatcaaacctaaggcccacgccaccattttcaatgacaatcaaagcttcggagcgggtatgataattcacaatgaccaagaaacgtttatagcagcaaaaacacaagctcaatcaggcatcccataaccaaaattggctgaggcatggggactacttcaagcagttaattgggcatcagagatgaatcttgacaatgtacgttgtgcttgaattggattgtaagacgataacatatggcattaatacttcctcagcgggagaaacagacaattatgtcattctaggaaaatgtttacaagctttaacatctttgtcaaactcagtggtgagtttgttggg

SEQ ID NO: 58024 - DNA, 379 bp, Glycine max
  unsure (1)..(379): unsure at all n locations
cgacctgccgantgtcgtcctgggatgagatatttacaattagccgcctgttgtgtcagacggctttctctgggttgaactggggcatcattaccttcccctagagtctcactccgaaaaacagggaattgtattccttgctgtgacacatggattggaaatacagagctgagcgcgtatactgagcatgcaactagtgacaatcctgtgctgctggacactcttgctctgatgcccagttgtccctattatgcctacgatcctctaaattctcaaatgctttgatctagacaaagatcatgatattgtggctgagggacgagacaacatccaaagtgatggccagcctatctttattttctagtaagacataatcacc

SEQ ID NO: 58025 - DNA, 297 bp, Glycine max
  unsure (1)..(297): unsure at all n locations
tctattttacttcaacagagagaacaacataaacgtaatatgaaaaggaaacgaanaggatataattnttgtttgcttaagaatgtaataggaaagttaaaaaaaaaggaaacctgataaaaaaaaagatatgatttttgtatagaaacataataggatatgattttttataggaatgtaacaagatatgataggatatgattnttatttggtctagaatatatgaacgtaataaaagaaaaagaacacctaatatgaatagaanaaggaacctaaaactggtctatttaatttaat

SEQ ID NO: 58026 - DNA, 393 bp, Glycine max
tgcacatcttctcgatcaggacgactattcatttctaattgtcccttggcagcttcagccaccgcatggttttgactccttgaatccaattcattttgcacccgtacctcaatctccaatctgtcaactggagttaaatgtgcgaaggtgctatctacttctgattcatctttggcccgccatgataactgatatctctgaacaatctctgcttcacgttcggattgccgcttcttctttcgcatcatcagggttttaaaccgacgtttaactgtcatgcacacattgcaggagcatgtgggtttgagttagcccttcccacttggtggctggatacagacaatgcaagagcacccaggtctatgccgaggatgttttgtggagctaacaact

SEQ ID NO: 58027 - DNA, 427 bp, Glycine max
  unsure (1)..(427): unsure at all n locations
agctnttctcgagagtcttctttgagaagtttccttgaaaggcttttttgagaagntagagntttaactacccacacccttctaataactaaactcacctcctagaaataaaacatggataaaacaacacaataaataaaattaaacatcaattataattactaataatattttagggtgttacatccctaaaataaagtaactaaataaaaaataattagattttttgttcagaattttctaaaaaagagacgagtatgtagtacttgagctaactttngggtaaaatgacacgagagataaaaagaaaagaaaaatatgttctccacgttaatttttgtattttaaattatgtggctatccgataaggaatggaggcattgaanaacttaaaatatngcatttgattactttattataaaaaaca

SEQ ID NO: 58028 - DNA, 404 bp, Glycine max
  unsure (1)..(404): unsure at all n locations
gaaactcaagcttggcatttcaaagaccaatccagatatcttattccgaattgttaataaattngctaggcttgatattgacccaaattctatcacatggaggagagttatggacatcaatgatcgattcttgagaaaaattgctattggccagggacttgacgagaaaggaatggtgagagaaacaggctttgatatttcagttgctagagagattgtggctgttttggcactgacaacatccttagctgatatgcgagagaggcttgggaaaatggttattgggaatacgcgagagagccatttcacattctgttctatgttagatctcattactgacatggctgaagaaacgaaccgcgcgttacgcacgggttacatcctagtatatatatatatatggg

SEQ ID NO: 58029 - DNA, 459 bp, Glycine max
  unsure (1)..(459): unsure at all n locations
ncaagctatgaaactctctgtatcttggacctttctctctntagaagtctctaaacatgcaaaagctntgataatttcccaaactcccctccaaaatctgatttcaggcttaaataggtggctntgtttgtgctagcacgcttagtgcaactatggaccgctcagcgtgcattagtggatttcggcttagcgcgtgcgtttctcacttagtggatggactgaagtggtgcgcttagcgggatgacccttcgctcagcgcatatgcacaactcatccttcttccagattcttcctcgtaaccggngagtgttgtgctcagtggatggctcactaagccagaagaatggcttagcgagcggatgaaaatcaacacttcacaaactttctaaattaacctaaaattaagaggaagatggtattaaacacacaaaatgggagtactaagtatttattacctat

SEQ ID NO: 58030 - DNA, 387 bp, Glycine max
tcctcggggccattcctgcgaaagcttacatttttaaagttagtttacaagaaatataacaatcattacaaacaagggccaaacaacacttctcatggcacgagtgtcaacatgcactttataaaataatcatattggggtcgtgctattttatgacacatacgtatttgcacacataaaaattttgtatgaagcattttacgacacctatccatgtacatatttttttgacaaaccttttcatgctacatcctatatatatacacacacatttttttggaaggcttcttttgttacctactcacaaatacacatattttgaaaaacacttttacgctacccatccaacactttgtaaggcacttcatgctatatatattcatatta

SEQ ID NO: 58031 - DNA, 404 bp, Glycine max
  unsure (1)..(404): unsure at all n locations
gacaccaaaaacccagcttgcctgataaagcatttcaacgnctcttaacttctttatgctctccaaggccacgctatatgatgaaagctttagaatgaacgctcgctacattccattcaatgttttttcaagcatgcacttagtctttttcttcttcttcttttcagttgattagaagtttattgagtctattttatcaactaatgctatataagtaagtcataaacactaaaatgcttgaatgaaatcaattgattaattgggtgaggcaaacaaaaactatcttctcacttgtttttttttaaccttgtggtgaatttctcaaattctcaatagggcctaagcgagtcacatggttataattatcttgtcaaaggtgactaaaaaattagtcaataattatt

SEQ ID NO: 58032 - DNA, 357 bp, Glycine max
ctgcagctgctgagaattatatatttaaattttgttgatgtctagagaatatttgagaggaaatattttgcaatataatttatggtttttaatgtagcactaacaagaaaatggttgcagtggatttctataaaatcagcatagttgtagagatgatggtaagggtgaagttagattgtttgcgtcaattggttgagtcatgtaaatgctctcttttaacttgaagcatggacaaaggcacaggctcacccaaaccttgttcttaattttgttttcgcaaatatagttgttgttgacagatatagatgttaaatgattaatggtggctgcatcacctttgagggtgtatgtttagtg

SEQ ID NO: 58033 - DNA, 387 bp, Glycine max
  unsure (1)..(387): unsure at all n locations
nctcgagcatgatcgatacattcattttcatttattgaaggatgaagaagnggngcgtgatatgttttggtatcacccacatgcagtaaagttatgcaatgcatgtcatctggggttttgtatagacagtacctacgaaacaaacaggtacagactcccactacttgacttttttggggtgacaccaacgatgatgacattctctggtaggtttgcatatttggaggctgagcgtgttaataatattgtatgggctatggaacaatttcgaggcctatttttaagaaacgatcgactccctgttgataatgtcgctgatagagacctagcactgatgaatgcagagaaaactgtgatcccggagtgtacaaaattgatgtgcaagtt

SEQ ID NO: 58034 - DNA, 383 bp, Glycine max
cggctaaaggggcattttcaaggtgctggaggtcttttctgagcctagaacacgcacccttgaatgtgaaccttggccttccccaactggacaagatacctaagaaaatccaactcatggatgcaactgcactgcatcagaacaactgggggcctttgcctcttcatgtactgaccaacaaggttccaatcccttctcagttgagacctataggactaagtgcacctggactctgtcggtaaaagtctgcaggagagcttgagccttgtcccagatgcttgacacttgaagaaaacatcgtggcgctggatcatgcgatgatcaacatccacagaattagctggagtttgtatttgataccacacgcaacgtattacttgggg

SEQ ID NO: 58035 - DNA, 430 bp, Glycine max
  unsure (1)..(430): unsure at all n locations
ttcttgaatgcaattttattcttcgggtgtttattcttgtccggatgaagttgaaggctgaatcaaaataacagtccttgttattatgcaggagaaagaggaaacaaatattgcataaaaccataaaaaatgagttnttttttttttttttttcttgaataataaaaaaaaaagagttaagcctaccaagtttatggtattgctggcgaatggtgctcacccctgcattttcttccacctatgagaaccaaataaggagaaatttgcatcataaaaaagaacacanaagaaaagtggtagtaccaagtttacaattgcatcaacaagaaaattaaggataaaanaaaatacttactccaagagtgcaataccaatctatgaaaggtggcttaacatgatggtttgagacatgtctatgaacacacacaac

SEQ ID NO: 58036 - DNA, 271 bp, Glycine max
  unsure (1)..(271): unsure at all n locations
cgacccagagagcgaattatatatttcctcaacttcanancaaggcagccacaccagataactgacactcatcacctcactccacatatacattggtcgggactactaaagtggatagaaacctcttgaccgcgcccccattacgcatacaagagaataaaaccgtatccctctctgagcctaaacacaccttgaaaagaatatccgcagataacctttacatacgcgcattacaccctattgatcgaacaatacctagacaattgctata

SEQ ID NO: 58037 - DNA, 353 bp, Glycine max
  unsure (1)..(353): unsure at all n locations
atgccgcttctagaagtgaatccagagngctacactttcttggaattacagtaagctcgccgntctatattntctctctaactccgattccgatccccactctatcttcgatgacgagctcaaactcgtgcgttttcactctcgtcggttaatttaattcaatataatttggaaaataaataattacttgattttgtttttctatgaattgaatgaattactatgcttggntatttatttangtggagaatgcgttgaggaagaatttaagtcttacggcgcgtggcatcatataaaatgggtactcaacaaggggcattcgttcatagacaacgaaatgcgccttctgaatg

SEQ ID NO: 58038 - DNA, 405 bp, Glycine max
  unsure (1)..(405): unsure at all n locations
gcttttgnggactattggaaacagagatgctgtttgttcttgggttggagtgtctgtccaaagcctttgaacctcccaagccttctccttctcaacagtatgcacagagaaaattacttgaggaaaaaaaactccgtgatggagctgatttccatcaagacgatgtttctaagtgccctcccactggtaaaatttccaagtctccttctcttcaacagttaagtactcctggatcagtctcatcttcaccaaattcagttaaagtggacaacttgccatctggtatgtctcgtttgcttgagaatctttgttaactgctgtcaatttggacatgcaaattagatcagagactagataaacacatgataaatatatgttacaacaaacagcatcactacttgcaag

SEQ ID NO: 58039 - DNA, 299 bp, Glycine max
  unsure (1)..(299): unsure at all n locations
gtgtttccgccgacattggcatgttcccatgcactcggacaagaaaacattagcccacatcgaanagagaaaaaaaacattaatcaccgatattgatcggaaaaaatgctggttgacgtcggccaggaaagatgaccgatcgaggtctaaaaataaaagaatcaccggatgacgccgatcgagcattttctaattgacatcatccaaatattatccagggattggatagaaaaaacaatagctgataccagtcgttatgtagtcccgactgacattnttcagccgacattgcacagtat

SEQ ID NO: 58040 - DNA, 298 bp, Glycine max
gaggaaccggaagatatgtattgggtgacaagacaccttggggactgaaggtggggtgctattgtccaaaaccaagcttgaccgatcccaacccaaccctggcatattaagtcagagagaacctgtgatgtacctatcaagactagctcctgctattctactcatcccagggtcttcgacctctgagcattgaggcttgtgggggctggcccgctgccaaacttgattgacatgggagatatggactctgcgcatctattaccaagggagggttatcaattactaggcttaaaaatga

SEQ ID NO: 58041 - DNA, 363 bp, Glycine max
  unsure (1)..(363): unsure at all n locations
tcaggttttcgccttcgataaagaaggcctcaatcgacgtcattggagatttccgtttggtcagaggaggtcaaagaaggggatgagaaaagcgagagttctctcggaacggtgtcgtttgatctgcaagaggtgcctaaaagagttcctccggatagtcctttggctccgcagtggtacactctcgaatccgaaacctcgccggcaaatgacgtcatgctcgccgtttggatcgggactcangccgacgaggcctttcangaggcttggcagtccgattcccgcggcttgataccggagacaagagctaaagtgtatctttctcccaagctctggtatcttagactaacggtcatccaaacc

SEQ ID NO: 58042 - DNA, 395 bp, Glycine max
  unsure (1)..(395): unsure at all n locations
tgccatactaagttcttacgctttggaatgctcttttttcccacaaccttttttagnccataccaagttttccacattaacttcctcctattacatactcgngatataaggttaattggatcgttaagaaagaaccgaaaggagaaaaggtcacgaattcaatcctctttaacaaaaataacaattaacatttaccgattaaaaaaaatactttgatgctaaataacctcttgaacaaacgatgcatcaacaatttcgtttataaagactaattgattaattacacacttaagtaaacagtaaaagagaagcatgacattaagatagtgagtaaatagtcatatataacatctcaaaagaaattatgaatgttttctgttaacacataaatagtt

SEQ ID NO: 58043 - DNA, 323 bp, Glycine max
  unsure (1)..(323): unsure at all n locations
ttctagaggaatcgnctggagggcccaagtgggcctggttgctattngcacnncccttttactaaatccaccccccttctatttttttgtaattctttntccgtaacgttacgaaactttgcgaatttcgtaacgatacttattttccttccgcaaggttacgaatccttacggattatgtatttactctcttttagctntcgaagaagttacggaaactcacggattgcgcaaaaacacctcttttcggcttccgccacattacgtgaattcacggatcacgcaagcctgcttccttttgatttctgagatgtctcgggact

SEQ ID NO: 58044 - DNA, 389 bp, Glycine max
tctagaatggctagacatgatacatagcagggtttggtgttgtctaaggataaaagggatgccccacattattttcatgacacaaatgcaaaaatgatgatttggaaactttatgcaaaactggtcatgcatgcgcctatgcggacgctcaagtgttaaatttttatggtcgggcgatgctaggggacaggattcattttctctattttaaatcaacccaacgtttccaaaatatgttcttttatcaatttgtgcattcatccgagtccattttgggcgtctgggaaaatcttcacagcattcaccctttaggtgtatacacattttttcaaaaactagctatgatcagcgaatttttcttttaaagaaaagttggaaatcatctcttt

SEQ ID NO: 58045 - DNA, 421 bp, Glycine max
  unsure (1)..(421): unsure at all n locations
catgcaagctcaatggccatggtgattgagaaggagtttacattatgggatttcanatcatgcttctattntgctttttagacatgactcttgcttcaataacatggtttgctagtcttgtaaccaccaacctagtaccattgcataacccttgtgattgatacatgttccttaaaagcattattggggtacccacctttagttttatcttatgattaggaagaccaaatgttctcaaactattgagaaattcacttgtgaccacttcaagtgcatttcattcaaccatttttgacttgtcaattgaataagaacttagatattccctttgatcacctgaaaacaattcattaataaaaacattgtagaatcaatattaattattaaatcaattgatttatttgtgagatacctggaataa

SEQ ID NO: 58046 - DNA, 384 bp, Glycine max
tactgtgaaatttgtgattcaatatgaggcattttagtttatatacattgatgcagccattcatattaataatttatgtaaatcatattgtctagtgatatagcatgattccaaaaattattaagcgttggagctcgagaatattatggttaaatttgatgaacatgtgtatgttgtaccttatgactatcattaggaatgctataagatgcgcgatgtgatgttatgagatgttaaagtgtggacatgatattcaattgtgaataaccggatgtatttaacacttgatgctacattaattatattgtgagctatgaattatacaataacccgaccagtgtttatgcgcaatgtttaagagagagcgtatgaacatatttagga

SEQ ID NO: 58047 - DNA, 388 bp, Glycine max
  unsure (1)..(388): unsure at all n locations
tgtcggtcccttaggtacctgctttttctacttagnnaattaacataagccaatgaaagtcaatactttatttgtaacaaatcattttttaataataataaacacaacaaagaggaaataccttttctgaaaaagattgtacaagatgtggcaaccaagcaaggagggtgttaagggtcttccccactaactaaatctctttagtgggtagaaggatgcaagcatcaatatcttgaacttcctcaacacccaccttcacctgatcattgccgaaaaggatgttgtgcatggttgtcgacccctaataaaatcttccaagggcaaccacacaggtaggattgtcatcaacatacaatatcctgtctgatgctgccgtgtctgggctctg

SEQ ID NO: 58048 - DNA, 411 bp, Glycine max
  unsure (1)..(411): unsure at all n locations
agcttaaagagagtattataaatactntatttttactagntcactctttcttgagctacatccagntgtcttttacaaaataataaagggctccactaattaatgattgattacaacaaacattctaacctgtcactcttggctttacaagtattctctaggccactactagtataagcattagactccccctgaatctaagaatatcaagtattggtttgtcaataagctactcctgggtttcacaaacacagtttgaagaatcccacattctaacacacgaagagtgcattgacaataaagtaagactgagtataagaactntgctaagcaaagtatagaatctatgattaaatcagggcataatcttggtcatttaaattttttatcattgggtgattgattcttctg

SEQ ID NO: 58049 - DNA, 391 bp, Glycine max
  unsure (1)..(391): unsure at all n locations
ngcagaacggctagacatgatacatttcaaggtttggnttttttcaaggataaaagggatgccccacattatttccatgacacaaatgcaaaaatgaggatttggaaactttatgcaaaactggtcatgcatgcacctatgcggacactcgagtgtcaaatgtttatggacatgtgacgctagggcttaagatgtggatgctctattctaatgaacccaatgtttccaaaacatgatcttttatctatatgtagcacttatgcgaggccatatagaggcgacggtgatacttcacagtattcacgcttccagtgtagacacattttccaaaaattggatatgatcaatgagactttgcaaagaaaagatggaaatcgtctcttttcaaaag

SEQ ID NO: 58050 - DNA, 250 bp, Glycine max
  unsure (1)..(250): unsure at all n locations
taagattcttttcacttaagaaattaggactaagaaaatatctattgactaattgtagtattgattcacaacaagtatatttattatgcatttaagcaagaagagagtaaaatttggtaaattctaaccctgataattcctttattatttgaaaaccgcattgttctaagctttattttaactaaanacaaccacanaaaaaagtattttaattactctgcccttacttggtttgtttgtatcttactca

SEQ ID NO: 58051 - DNA, 389 bp, Glycine max
  unsure (1)..(389): unsure at all n locations
tgaaccgccagtgctaaaggcgggtttttgggtaccgctagncgcagcagcgggacaggcaaggggtaccgtcattccttctggcgggataggctgagtaggagtgagaaaacgtgttctcagtgcataccgccatttctcctgggcatgtcccgcctttggagctggcgggataggggcaatacgaagttctctctactattacgcttgttgccaattggaaaatcaaccaccaaaaggtaagctgatttattagttgttagagtttgttttcccaaaatgtggaagcaggataaggcatatgacgaaaaaggtgaggctcattatctttttcatggtttagccttttatttagaagactgaaaacatttctgtgggaatcaaactaa

SEQ ID NO: 58052 - DNA, 347 bp, Glycine max
  unsure (1)..(347): unsure at all n locations
gcatgcaagctngtacagntntttattttatggttatattgtagtgatttttgtaaataaatcttggggtatggttaatgctatctctggaacattttcattgaatttaatgatgaaatatgtgcattttcaggtgaaaaagaggctaagttttgaattgcaaaatgtagcagttaggctaagctcaatagttgggctaagtgtagattcaacgcgcttagcacaaaggagaatctggcagagcatcagcatcaaagctgcatgctaagcacagcaggtgccttcagccaggctaagctcaagactggtgctaagcccaatttcacttactcgcactaagcgcgagg

SEQ ID NO: 58053 - DNA, 364 bp, Glycine max
ttcccaattttgaagcttgtcctacatctttattaagctataaacttgaatcagaaaggggcaatcatattttctatgtcaatgtgtagatatcagatgttttatatgactagaagcctgattctaaaggtagtttaagtcaagggatagataccagaagttgcacatgacttaaggatcattaaaagatgtaatgcttagactacaagtgaagagagatgtgtgtagcaaaatagtcaagaaacacacaacgagagttataatgatcaacaccatgcaacaatgtaccgatatgctaccttgatgaagctctctcgatccaatggatctattcgaaagaagaacgagttaactcttactttag

SEQ ID NO: 58054 - DNA, 432 bp, Glycine max
agctgtgggtgatttttgtcaaaggcatcttgcaacctctcgcaatgttgtcaatcaaaattgtattctactttggcttgcacacctctacatataaaatacttgaccaaattattatgcataaacttaaccaaagcagttatgagcatattttgtgtacctttgaaaatcttatttactacctctaacaaattagttgtcatatggtcatatctatgcccaccttgatcatgtgcaaatattcatttttctttggaaattcacttaatccaatgcataatttctgcattaatctcatgaaatctttaagtctccattcaaattggcacaaacatattctataacctacagaaatgtgtaaaaaataaattaaatagttggtgcatgtgttgaccaattttacatataaacaaaaagagcagcaataatcta

SEQ ID NO: 58055 - DNA, 373 bp, Glycine max
ttaggctgctcaattgctccaggtttctacatttaagggcaaagggctgaatgggggtcagcagaggagcacaaaccacaaactcttgcgacaggaacaaatttctgattcaaggccagctgggttaccaagttaaccaatgcctccagtttgccttcaagcttcttagtttcagatgatgcagatgggtttgtagctacctcatgcactcctgtaatgactatggcatcatttctggcgctaaattgctgggagttggaagccatcttctgaatgaaatgtctggcttcagcaggagtcatgtcttcaagggctccaccactggcagcatctatcatacttctcttcatattactgagtccttcattaaaat

SEQ ID NO: 58056 - DNA, 386 bp, Glycine max
ttaattagtcaaggtttattaataattaattttttcctccttcttaattattccgaggccacttgatccaacaagtggtatcaaagcaggtatcttgtaaaaagtttcacaactacaagattcatggcctccttaaattttctgtttctggaaggaaattccatccataggccacccatatttaatggtgagggttaccactattggaaaatccgaatacaaatctttattgaagccatagatttaaacatttgggaagcaatagaaataggaccttacatacccaccatagtagatgtaagcactagcaccacaacacaaaaacctagagataagttgactgatgaggatagaagaagaatccaatataatcttaaagacaaaaa

SEQ ID NO: 58057 - DNA, 440 bp, Glycine max
  unsure (1)..(440): unsure at all n locations
tgctntctattgatttacttgattgtgcttttattcaccaatttaatgcaagttaattaatatgaaaaatatttacgggtcattatttgattgtcaatatcgatgggagatataaaaaatcatttttttaattntatataaaaanatgtaaacaaatagtaataattagttatttaatataatttgtaaattaattttaatccactctaatggtttagactntatttttagtgaatcaacataaatattcctccgctgtgctgttccacgtgtgtctctagatactctntttcataatttcattgtttggtctaataaacagccaatgtacttgttgttataattgagagtagttcagggaaaacaaacaatccaaaggaattctatatatcatgaagctctctgtaaccttgatatgcttagctgtatgtccatctatg

SEQ ID NO: 58058 - DNA, 377 bp, Glycine max
  unsure (1)..(377): unsure at all n locations
tcaagacaattctcctctgcttttgtctactatatcttcaatttcagataatggcttgcttagtacagataccattgttaataaaaactctagtgtggtccctaattctattgtttcttctgctaatactgctagtctttggcatactagattatgtcatcttaatagacatgtaatgcagctagttttcaaacattgtaatatttctccatcaaataaaaacctctcagatttttgttcttcatgttgtatgggaaagtctcacagattaccatctcacacttctatttctgtttattctcctttggaacttatcttcacaaacttgtggngaccctcacatttaacttcatatgctggttataaatactatgtgt

SEQ ID NO: 58059 - DNA, 413 bp, Glycine max
  unsure (1)..(413): unsure at all n locations
tagaacctcaagctntgatcttccaccaccgccgccaccatcancttataattatattnnaatattatcactactttgattttcagccttgtattttggttatattactatggtatttgaacaatttattatttccttatttgcatggnttgattgaacaagtatgttatttgactatgtggattntataagttaatctgtttatgattgttccttcatggtttttgcttcttgcttcatgatttggttgatattttttatgaacattatatggatgtttaaattaaatttatttgatacgcactttggctttttgttgatgccaaagggggagagaaatgggattaaatcaagaattcacatgagtaatcaacttatttttaagataagcataaattcaaaaacaaaggggg

SEQ ID NO: 58060 - DNA, 394 bp, Glycine max
  unsure (1)..(394): unsure at all n locations
ctcgagaaattcgaatggtcataactgngcacttggatgttctaatntnggacgnaatatatcgagatgctcgaaattgcacaatggaagcactcgagaaattcgaatggtcataacttttcacaaggatgtccgattcgcggacataactcatcgagacgctcgaaaatgaacaacggaagctctcgagaaattcgaatggtcataacttttcacaaggatgtccgattcgcgtacataactcatcgagacgctcgaaaatgaacaacggaagctctcgagaaattcgaatggtcataacttttcacacgaatgtccgaatttgggacataatatatcgagacactcgaaattgaacaacggaagctcacgagaaattcgaatggtcataact

SEQ ID NO: 58061 - DNA, 311 bp, Glycine max
  unsure (1)..(311): unsure at all n locations
cataatgaagagtaggggggaatgcattttgagacgtttatntgatactttagtataccttaggccatgttttgaatcanaatagttatggtttcattttttttaatatattttagataggaattacaattttagaaatttttaatatgattttgggatttttacaaagaaataagggcaatttacaaggtagcctcgctccagcaaggtgtanggtgctccagctagctgaacagtgtagaagataaaattatacaaaagatatctcgcanagcgaggagcgcanaatagtgcgtctagaaattgaataa

SEQ ID NO: 58062 - DNA, 393 bp, Glycine max
  unsure (1)..(393): unsure at all n locations
ncgttctttntataaaatgagaagttctgaacttatcacgttatctatttaacctaggggaggatccaagtgctccgatcattcattagcatattcatgttttggtggcatactcaccgctgtttatttctttaggaatttcatcataactaagaaagcacaaaggcacccctataacactcgatccagaaaaatggataatgaagagggcgttcaggaactgatgaaggccgacctatcggccttaaaagatcaaatggcttccatctcggaggtcatgctaaaactccagaaaactatagaggataaagccacggcaaccgcctccagtacagctagggaagcggagctggtgctacagcctgccttaaatctgggccgagacagaaacac

SEQ ID NO: 58063 - DNA, 460 bp, Glycine max
  unsure (1)..(460): unsure at all n locations
gcttgagacaggagtctaagacactactatgggctnggaagtatatgaaaatggtgatctcttcctccttanaggtctagtgcaagaagaagaaaatgaaggtttaagttttggttttttgagaggaaatgatgagaaatgataaaaagtgatgcaaagctatgcctaatgctattgttaaacttacttgaaaggcttgaatgactatatgatggccatgttggacgtgccaaaggataccataagtaggtagttntgcttttgaatttttagccataaatggataaagtaggcataggaaaaaatggtaaaaactgcttttgctaaaattggtaaatcttatcctaatcttctagattagtgtgctaacctactacattggaatatgtgtactcagagtgaaccttacacatagtccactcgcacaaagacanattacacttacactttatgcacaatg

SEQ ID NO: 58064 - DNA, 363 bp, Glycine max
ccgaatggaggctctggtctcttgttgaaacttatgtttttcatagtcattagcctcacaagttctttgagggaaggttgtggaggggtctcaactgttggttgtttctagggctgttgctgttgttggattggtggaggaatgtatggtctgcttgggccagcagcattttggaaggaaggagcatgctgctgttgttgttgctgagggctagaccatctgagattagggtgattcctccatccagggttgtatctgttactggagaggtcataattgttctgctgtggttgatcattgctgctgatgacgaggaggcttattgctgatattcccatcataatccacacgctcttcctttac

SEQ ID NO: 58065 - DNA, 419 bp, Glycine max
  unsure (1)..(419): unsure at all n locations
atcggacatccgtgtgaaaatnatttatctttgaatttctcaagagcttccgttgttcaatttcgagcttctcgatatgtgatttgcctgaatcggacatccgtgtgaaaagttataccagttgaatttctcaagagcttccgttgttcagttntgagcgtctcgatatgtgatttgcctgaatcggacatccgtgtgaaaagttatgaccatttgaatttctcaagaccttccgttgttcaatttcgagcctctcgacatattatgcgaccgaatcggacatccgtgtgaaaangtatggncatttgaatttctcgagagtttccgatgtttaatttcgagcgtatcgatatattataagcatgaatcggacatccgtgtgaaaaggtatgaccatgttgatttctaaagaactttca

SEQ ID NO: 58066 - DNA, 376 bp, Glycine max
  unsure (1)..(376): unsure at all n locations
taacaaaaggcatgcgatgtgggaggaatncctttagcaattcccttattttatcaaacataaaaagggaaaaggcaatattgtatccggggctctgtctcggcgtcgtgcattactttctatgcttgaaacaaaagtgattggtctagaatgtttgaaaagcatgtatgaaaatgatgaaacttctgcagaaatttttaaaaattgtgaaaaagtttcagataatgggttctttaaacatgaaagctttcttttcatagaagacatattgagtgtgcctaaatgttccactacaaatttgcttgctgagaatcacatgaaggaggcttaaaggggcaatatgttgtccaaaagactctagaaacattacaagaac

SEQ ID NO: 58067 - DNA, 261 bp, Glycine max
  unsure (1)..(261): unsure at all n locations
acacaatgcagaggatagacatgctacangacaacactacattgaatcatgggtgaaggaatcccaacgagaggtctacctaggagcctactttaatcagtatgtaaacattatgcaaatgcttgtaaaagaaatatttgcattatacgtccctaattattgtcgacttcaggcgcccatcggtaactggntgttcttgtgccatggaatgatgttgtagactggttttgttcattgcgtaagacgcctgatattcatatc

SEQ ID NO: 58068 - DNA, 390 bp, Glycine max
  unsure (1)..(390): unsure at all n locations
tcaacgatggacaaatcttgncacttttaattctcgnataagnctatagctttgaacaaatgtattaaaaatatcaaggattttcctaatatgatccacaattgaagttgcgtatgaaggattggtgtcttccattctattacaaataaaaaacacataatttaatattttaattacaatgtagagtacataaaaaaataaaatgaagtcaatacaccttatgacaaacgttctattttggatctcatttttcgtatcaaatgcatatctgagcaaatcttggttcctttcctagaagtggaagtagactaccgatgtgatgaaaatcttattcatttaaaacaaacattggaggagcatttccatcatgaactatattgntaacacttc

SEQ ID NO: 58069 - DNA, 278 bp, Glycine max
ccaagaagagttaggtctagccacggcccacgagcatagaatcgtggatgagtatgcccaagtactacgcggaaaaagaggctagaggaagggtgatcgactctttacaccaagaggcaaccatgtggatggatcggcttgctcttaccttgaacgggagccaagaaccttcccgattgttagccaaggccaaggcgatggcagacacctactccgcccccaaagagattcatgggcttctcggctattgccaacatatgatagacttaatggcccac

SEQ ID NO: 58070 - DNA, 350 bp, Glycine max
  unsure (1)..(350): unsure at all n locations
ttttggagtagaaacatgggaccattttatnattcnttaatatggaagncataactaggcaaggtctgagagaccatacaagtttcctaacgatttctaattatgtgggccattaagtctatcatatgctgacaatagccgagaagcccatgaatctcttcaggggcggagtaggtgtctggcatcgccttggccttggctaacaatcggggaaggtcttgactcccgttcaaggtaagagcaaaccgatccatccacatgactgcctcttggagtaaagagtcgagcaccctctctctagcctctttttccgcgtatactcgggcatactcatgcccgattttatgctc

SEQ ID NO: 58071 - DNA, 375 bp, Glycine max
  unsure (1)..(375): unsure at all n locations
agcttcactaattctttatcattaatggtgattgtttgtgtcggtatgtctaaaggattgggtatcgggcaagtattttagaatttgcgaccatgccggagctaggatagaatacattagttgaatggggatgagcaaaagagatgagtagagaattgttaagttatagtggatcgagcaaattccaagttcaaacctagaaattcattcatcaagatcgatgtaaccatccaagtctagtatttctatctttacttaattattntatggtcatttaatttttattgcaatttgtttgtgttatttatttcttgataatcacaaaacaaaaatacaaaaacttagttcttagttcaataattacatgaaatctgg

SEQ ID NO: 58072 - DNA, 389 bp, Glycine max
  unsure (1)..(389): unsure at all n locations
ttgaatttggatacttgatccatttatgtctttgttctngcttaagnncactaacaacagactttcatctgcatgttaggagggtctattctcggattgaagtttctagatccccttgctgaacttctcgtctcaggcatgattttgaaagctggagctgaaacaggttaccagaggtacctatatctctccccctacagtttatctttgcttgcaagtttgactaatattgaaactattttctttaccctggtgtatacatgtcaaccacattttgaaacctaagttaaacaaatgggaactaagtgtgatcctcatacaaggatacaacaaaatattgaacaaacctatgctagacatagatgacatgtgttagatacctaaaaatt

SEQ ID NO: 58073 - DNA, 350 bp, Glycine max
  unsure (1)..(350): unsure at all n locations
ttaagcaccgcggctgcagctacctagagtgaggaccttncttgtttgagagttcataatatgctatagtggaccttcaagagagtatggagtcagcaccactttaatatttctgattaattcttttgcggtgaactgatacagaggaggaggaaccacagatctgagtcaatcctttcaggggagggatgatgcatcctccctggaaatgaccagtccagagccatgacaagagctccagagattggctagagctgataagaagctttaggtttaatgaccttanggagattttgagccctgggtaaggtgggccactcttttgtaatattgaatggttttttatcttt

SEQ ID NO: 58074 - DNA, 380 bp, Glycine max
gcttcaagataaagatggcctgagcaatttccttattttcagaatgtaagcctagcaagagacctccaatctttaatgaacagggctaccactactggaaaacccgaaggcttagtgttattgaggcaactatatgtaaagatgtgggaagccatagaagtagggccttatatacccaccagagtagatagagtttgaataaatggtagttgatcaagtgaaagcatagctatagaagaacctacagatctatggtctgaacaggatagaaaacgagtacaatactacttaaaagccaataacataataacatatgccctgtgaatggatgaatatttcacggtttcaaattgtaagagtgctaatgaaatgtgggacac

SEQ ID NO: 58075 - DNA, 329 bp, Glycine max
  unsure (1)..(329): unsure at all n locations
agctngngtcatggttctgtgtatggattcttcgagccccaatctatacacaaagcanaggatagatgtgttgaatgtcaacattacattcaaacatgggtgaanggatcccaacgagaggtctatctccgagcttacttgaatcnagtagcataatttatgaaatgactggnanaaatgtttcacctactatatacctaattatngncgaanttanggcccattggcaattgattattctgtgtctaggggaacgatgttgcatctggttcnntgtcgtgcgtaaaaagcttgatattcatatcaaagctgcagttagcannagtatg

SEQ ID NO: 58076 - DNA, 356 bp, Glycine max
actcagcttcttatccaagctcatctgggtgttaagctctcttcttcttggctcataccctagtggagggcgcctactctcacctcttttcctttgtctttcgttgcatctccatggaggaaaatcaccactaaaggacctcattgaagctcaaagatccaccccccattgaatccccacaggcaagtttccatcacatatctgctatcatctaacgattgacacatgacaacgaatctattaaaaaatactacaagttctgagaaataaactaacagtggcaaatatgattgatgggaaaaggatggatgggactgacagaggggggaaagaaaacttggtgggtggatgtcaca

SEQ ID NO: 58077 - DNA, 317 bp, Glycine max
  unsure (1)..(317): unsure at all n locations
tctcaaggaggagagcttagctattatagggttttgcgnagctaagctctactttctcaaggaagttttctcaacgaagcttcttaaggaagttttctcaagaaagcttctaaaggaagcctcctagtctataaatagaagcatgagtaacacttggtgtaactttgatgaatgggagtcttgtgagacacaactcaaaggtcaacttctctccctttttcttccttcaattcgcgctcccccctgtctctttctctccctctttcttttcctgcattgaagcatcctctccaagcttcttatccaaggctcatctt

SEQ ID NO: 58078 - DNA, 402 bp, Glycine max
  unsure (1)..(402): unsure at all n locations
agcttatttaactgactattttaaccttgtttcgtttcctcgtgtggattactaggtccacaaaaaagactagataatttgatgcttcaagctgggaacaagtattgtgccgactgtggatcattggagccaaaatgggtgtaagtattagcttgaattttaaagaaatttagtttacatgtgttgctcactgctcatgttttgtaacatgatcatgaatcatgaactagatgttatttttctggataaatcttttcattgattgtctaagttaactgagaagatacatatgccttacatcaacatacacttgaaaagaaacatcaatttcaatctggttttaattngcttccgatcatggcaagcatcctaataacatacatttcatgtatcttagtggat

SEQ ID NO: 58079 - DNA, 376 bp, Glycine max
tctttactggaaaattccttcccgtattggcttttgtgctaggattggagttgctggcggggcgagattgtacgggagtcgggttttgagtaggaggcccttgtggttgagcgggcactctttgctggacgggtgccagattaaaagggtttccaacatgggccgaaaagcttggttggtgtagggaatattggtaattgttgtgaagggtttgttgggatttaagccaagtaggagctgaagtcacagcgtgggtatctccttccttcttcttagccccacttgctctgaatctcctattactcgtgctggcaagagcggcataatcgaactttccccttttcaagcctacctcgatcctctcgcccgcaaatac

SEQ ID NO: 58080 - DNA, 222 bp, Glycine max
  unsure (1)..(222): unsure at all n locations
atcattggaactatagcttgccattataaaatagcttagacaatctangtctgctgcttctgaaccttttatntatccttgaagtagnttaattttttttttaattgtgttcaactagtgaagagtgaagactgaagttgttctgtcagactcgttgattttcctttcatttcgatggaagcctaagcaatacactaccactgaattgccagtaagaaaaat

SEQ ID NO: 58081 - DNA, 397 bp, Glycine max
tcatggatttctcataagcttaatatcagaaagtgaccctttattcatgagtcaattctagcacgagcttttcaagttgtatgggactaagctgcgtatgagcactgcttaccatcctcaaagtgatggacaaactaaagtgcttgattgagttttggaacaatatttgtgggtgttagtgcatcataagccatcctaatgggataagtttttgtatcttgctgaatggtgctacaaccccactactcatttagccactaatttaacctcgtatgaaattgtttatggtaagcctcctcctagtatttccaattatcaagctggaacctttgccgtggaagcaattgaattttttctgactttgcgccaagaaacctttcacctacttaagaagaag

SEQ ID NO: 58082 - DNA, 454 bp, Glycine max
  unsure (1)..(454): unsure at all n locations
agctttgttgtcaacattggcaatcatttttttgtttatggnagtgattatggntgccataattgcaattaagaaaacaactgaagaatattgggcctggttgtggctcgaagctgattccaagctattggctcttgctttcactaacctgagttttatgccttggtatacatttgctcgttggatgaattgtataaagttagctaattgttgcaaatttaaggtagtgtacatcaaatttcaagaatatacacatccaagtaccactattcatgattttgacaataaaagggcaaggttccaagtacacatttatttgatgttccagcaaaataagtttatcaaatgcactatgtctcatacctttgtcacatctanttattcagaaatcccatagctcttgcaatggtcatcatcaagattcaaggaacaagtctttaaggtagtctacatc

SEQ ID NO: 58083 - DNA, 396 bp, Glycine max
ctttgtgacaaaagagaatatatttgtgttatctatctatgtactactcataagctccatttggagttctatagtatcctatagcccctgcacaaggcagatagatcaagtaagcacaaaatccgaaaataagcaacaagtactaattaagctaaatcatttgcctaagaccaaaactgtattaaggtgagaaaataatagtcaaagagaggtcaatttagctaagatggatagaaaaatactaaactacaaatgctcaatcaacgagttaagagaaagggctgtcgatttcatttagatggaggagaagacaaagtttaaagcgaaggtgcgtggggaaccctccaacatagcgggagacgaagattgagagcggtcgcaaccaagggaaatcta

SEQ ID NO: 58084 - DNA, 439 bp, Glycine max
  unsure (1)..(439): unsure at all n locations
acctgcggcatgcaagctgaagtgtgtaccaccattttttatttaancactgttttgtgtctactatcattgttatcatttctttctccatcattgagggaaccacttgggctgccagatccctccatctttgagcgtattctttgaaagattcgcgccctctcttgcatatgctctgtagntgcatcctatccggagccatatcagaattgtaccgatactgcctaacgaaggcaaccattatgtccttccaagaatggactcgggaaggttccaaattagtataccatgtgacagctgccccaataagactttcttagaagaaatgtatcagcagtttctcatcttttgcatatgcccccatcttccgacaatacatctttagatggttcttggggcaagtagtccccctgtacttgcaaagtatgtcaccttgaac

SEQ ID NO: 58085 - DNA, 395 bp, Glycine max
ccgaacaatatactcgtgcttgattgaactatttttgggtttggcagtctcgctcaacaaaggactttcgacacctaatgtacgttgatttcaccaatgctgttatgggaaggctgcgacaatcctttaaaaccttattgatacattctgaaaggtataatgttatgtggccatatcgacgtccttctgtatcgtaagtcatcgtccatttttcctttgaaatgcgatcaatacatgttgctatggctggactgagttcacgaaattgttctaaattttgatcaaaaatgcgcatgcgaggagagtaagctgcatatgattagttgtgaataacaattttaagtatctatgatagttaaataaacgtgaccatcaaatatgaaatcttacccaat

SEQ ID NO: 58086 - DNA, 429 bp, Glycine max
  unsure (1)..(429): unsure at all n locations
agcttgtacattcaatttcgagcgttccgattattacgggactcattctgacatccgagtaaaaagtaattggtggttgaatttgttcagagcttcaacattcaatttcgagcttttcgatatattacgggactcaatcagacatccgagtaaaaagttattctcgtttgaatttgctcagggcttctgtattcaatttcgagcgtctcgatatattacgggactcaatcagacatccgagtaaaaatttattgttgtttgaatttgctcagagcttcaacattcaatttcaagcgttccgatatattacgggactcaatcanacattcgagtaaaaagttattgtcgtttgaatttgctcagagcttctacattcaatttcgagcttttcgatatattacgggactcaatcagacatccgagtaaaaa

SEQ ID NO: 58087 - DNA, 393 bp, Glycine max
tcttataagctgaaccattttatcaataaactcaagttgttttttattcagaaaattagagtttatctcttttatcttagtgagagtgattctcctaaattcttgagtgattcaagaacaccctggctgtatcaaaggactttcacaacctttgtgtgttgccctcgttggaaagagtgattctttccttcctatcatctccacccttgttctttcaaaccacaattccagaaaatccacctctgcccagaattatctcgtggccataactcccattttacgcactcaaattaagtgattcttgagcctaaattgactttcaaaacgagacctttcacctcgttttggaatcacctcatttggagccctgtagcttcagttattgccatttct

SEQ ID NO: 58088 - DNA, 403 bp, Glycine max
taaaaacccagctttccttagcctggaagatagatataattttaaagctaagtaagcttcgccgtaagctaatttgcttaagttaaaatcatttatttttggaccactgataacataatagtgtaaagtatctgtcagctttgtctatcattaatttctctcagggaacctgactgaccactttagtggggtcttccatcccaatcatattgttttccattcacaatccgtgaaccaatcccacttatgggagaaaagttgattttaacttatagaagaaacttatttcatttttttctttttatttcttctgctataaggttttatgaagaagtttatgcaaacgaggtttaattaattattacacatgaatgaatatatatatatatatatgattgactat

SEQ ID NO: 58089 - DNA, 332 bp, Glycine max
  unsure (1)..(332): unsure at all n locations
agcttagactcanattttgatgcgactattaattttgncnnattctggatttatttggaaataatgtacattatactatagcactatcaatatgcaaatttatggttataagttcgtgtggtatatattgtgagggaattggaacatcctgaacacatttgtgggataattgttattataagtactcttggagcatggtatattttggttagaactcttattggtatattaatttgagtaaattgttattcataactctttgtgatattttgtttataaatttagcttatcttacgagttttatacagctctgaatgatatgtcatcaaatg

SEQ ID NO: 58090 - DNA, 407 bp, Glycine max
ggaccttaaaacctcagcttgaatcgggatacttcggagattaactcatttattccttgtccagacctacttgaaagccccttcacagcaatttcttgcccacccactaattgtccctgcataattgcattcattttaggagaggctttcaaaatgaataattcttctcttgattctagttgatcttcttttatttagagctaaactattgaattaccttatatacaggtccaaagccaccttgtccaatcttattgctcaataagaaattgttagtggcaggagcgattgttagcagatcaaacaaaggcacattcacatcttttagttgtgtacaatgctttcttttgcctttgacttatctggaatcagtatcaagaataaaacattcaacagtatcatgaaac

SEQ ID NO: 58091 - DNA, 367 bp, Glycine max
  unsure (1)..(367): unsure at all n locations
agcttctgcatgtntttatagttctagagagtgataggtccaagtttcagagagnttgggagattntgttgtgtgaagatctgcagagaccagagccatcctgagagattgagatgcgtttgtgagtgattgtgaggtcctagaggtggaggagacatccccactacttgtatttctgcaatctttcatctttatcttctgtttattggaaaggaagtttccctgttatggaaagctaaatcctctgttggatcttccttgtaggtacttgatgtaaatatctttttatatgtttaatgatgttttgtgtgttcattgtgctatcagaactgcattctacgatgcttttagcttgatcacgtagatg

SEQ ID NO: 58092 - DNA, 389 bp, Glycine max
tcaatggatcttacatcatgtggtatcagagcttcaattatataaaatctaattgaatttctagaagcccaatccaattaaattttagagggggaggtgagcatttggttactacacctcattgccacattatatggtcacacgttgtgcatgtccttcatgctttacatgcctcatgccacctaagcacacttagtggagaatcttggaattgatcttggattagtgggctaaaccataactaaaattcactaatcataattagtgaaattttgtctccaaagtttgggtccacaaattcaatttcaaattcaagtgaaatttgaattgagattcaaatttccctccaattttgtgtgacacttaggctataaatagaggtcatgtgt

SEQ ID NO: 58093 - DNA, 387 bp, Glycine max
  unsure (1)..(387): unsure at all n locations
agctanggcctttatgttgttcatcatgnatttcattcngcnccttctatctctaacacacgncatctttaatgatcttgtctttgatctctcaaagaaggattaaagatacttcaaggaccacattgagcaactacatgaagtgtaaaagtcaacaagagaagagtatgaaaaagcctatgatcctaaggcggaggctacaaggaaaacaaacgaagctagtaagttacaagcagtagagcaaacaatgctatcaagcaatacacaatacaaaaaagattgatgaggttcttattgacttcactctacaagaagaagcatcccttattgcgtccaatactgctaacgctgatgagggtattccaaatggtcatattgaacctgcat

SEQ ID NO: 58094 - DNA, 370 bp, Glycine max
tgcaggggccaccccacagtccgttgttatatgtctgacatgttcccatatacacgtgataactcatatggtaaccataaccctatccaaggttcatacaacctccgtttctccgagaatacaactcgaacgcgcatgctgtgctatgctactggacgagaacccactgcgccgaaagattgaccactgtacgtgcacgaattgaaaggtgcgaggtcgaattgctgctggctgaaatttgaggccaatcgcgcggctatcctgacattgacaagagacgccgcacgtggagcaatggtgaaagctgttgttatatgtgtctaatgactcaccaaaaccctcatctgtcaccgcaatgcgggtgtaagcc

SEQ ID NO: 58095 - DNA, 391 bp, Glycine max
  unsure (1)..(391): unsure at all n locations
agcttattgcatagttgctcttngggctcatataatcccacaaactaatccctcttattactagctattgggaattctttagttcttgaatgtacaaccttcagattgttgctcgtttccctctttcttttctgcaaaaaagaaaatcaaatgctatgaaaacatggatgaagtcctaagaaaatcaatatcaaagaaaacatggatgaaatgacaattaaaaagcacaactacctatctttcagagtcctttggataatttgtcttgtctctttatgtgagggggttttgtttaataatgttatactttngccttccaaaaaacacttatcanctaatcctcttttcattaatccaatttgtatgttattggataaaagatcatgggttc

SEQ ID NO: 58096 - DNA, 397 bp, Glycine max
  unsure (1)..(397): unsure at all n locations
ctcagcttatgtttgtaatgatgacaacccactatgaagcttaanagttatgatngaacttactcactaatggttgttttgagcgttctttattaagacaatacatacttggaagcatggtgctagtgtgaaccatatgcctacggtgtaagctttccatgacataaattcaacaataagaagcgagactaccaaaagaagagctatttagaagttggaaaggaaattatgtttttcgagtcaaagtgcatatatcaaaagttgtatatgattagaagcatgatactcgacataacttaagtcaaagaatgaatatcaaaagttacatggctaaaggatcatcggaagttgcattgcgaggtggttagtgatgacaaacatatctcaccaatccaga

SEQ ID NO: 58097 - DNA, 291 bp, Glycine max
  unsure (1)..(291): unsure at all n locations
tttcttgaatcggaccttagtgtgaaaagttttgatcatttgaatttctcgaaagctttcggtggtcaatgacgagcatctcgacatattatgcgctcgaatcgaacatccgagtganaagatatgaccatatgagtttctcgagagcctccgtggttcaattccgagcatcttgacttattatgtgcccgaatctgaccttcgtgtgaaaaggtatgaccatttgaatntctcgagagctctcgattgttaatttctagcgtctcaatatattgtaagcctgaatcggag

SEQ ID NO: 58098 - DNA, 344 bp, Glycine max
tcttatccaaggcaattcttggttgtgaagcttcttcttccttggcttattccctagaggatggtgcctcccctatcctcttctcctttgccttccgctgcatctacatggcgaaaaatcaccattgaaggacctcattgaagctcaaagatccagcctccatagaagctccacaagcaagcttccatcacttttcacacagaggtcagattcgggcacataatataaccagatgctcgaaatcgaaccaccgaagctttagagccagtcaaatggtcatgacgttgaacacacatgtcctattctggcgcataatatgatggagactctcaatattgaacaac

SEQ ID NO: 58099 - DNA, 444 bp, Glycine max
  unsure (1)..(444): unsure at all n locations
agcttcacatatcgtgttccttactatgtgtagctggcatcctcacatggcacgtgaagtttatgatgcatataaattcataanaggatgtattntagtttgtcccacttgttcttcgtgaagttaagtgaaactcanacggtcaggatgtgaatagggagatataaggttggtagggagggaggaataagttgtgggattgaatctttntactaacaagaattaacaactaatatttgttgataaaaaatcaataaccaatgtgaatagttaaaatcaaagagaaaaaaagttatattttatcatattattttaacggtaaatactaacctgcattgattnttttaaaaaaaagtaacctggatggacattagttggaaaattaagtgtttttctatgaagtgttattaaagtattttatactataattttaatacatcttta

SEQ ID NO: 58100 - DNA, 381 bp, Glycine max
tctcccccaattttctattatagtgggagaagtgaagcagaaaagggttcagccccttaggcacttctctctctttcgaatttgcttagaaaaattgtttccgtgaagaaaatccaagccgaggcgcttccgtaacgtttccgtgagtgatttcgcgaaggttttcgactgttcttcgacgttcttcattcgttcttcattgttcttcagtcttcaacgggtaagtacctcaaaccaagcttttcaattcattctatgtacccgtggtggtccacatttggtttcatgtatttttattctcgtttcattcactttttatacccccttttgacgtgcttaagccattttatttaagtcatttctcgcttaacctaaaaataa

SEQ ID NO: 58101 - DNA, 370 bp, Glycine max
  unsure (1)..(370): unsure at all n locations
agcttgtangaatatggngtacccatcacattggtactaggtggttgtcgggcgatggtgcacaacaagnntttccacatncacaatgcgcgcataaacccaccatcccctggtgcccacctncaactgagctcgcgtactcccacgtagcccatatcctcgtttctctcaacaccgggtccccatcaatcctctcaagcttccacaacatccaagcaaaacaacattcaaacagcacaagctatcacagccaagcaaaacagagcaaaggcagaaaactctgctcaacacatcaaccaaaatcacagtttttctcacgtaaagaccacagtaacaattctttcgatccaattcgttaaccggtggatcg

SEQ ID NO: 58102 - DNA, 397 bp, Glycine max
tgggagagatatacagatattatggtcccaggattttactaccggagatgaatgtagtagtttattacactaagtttgacgagttcaaggaggaactagagagaagacactgggatgagaagttgactgattttgctgacagtagcatagacattgctattgtgaagaaattttatgccaacctctatgaccccgaggataaatcacctaagcaagtgagggagagaggtcacctagtgaaatttgatgaggataccttgaacacatttctgaagaccccggtgattttggaggagggggagaatttatgtacttattccaagtttgcactcctgaggcctaatcctcaggagttggctactaagttctgtatcccagggaggggattcgagctaaa

SEQ ID NO: 58103 - DNA, 432 bp, Glycine max
  unsure (1)..(432): unsure at all n locations
agcttgagaaaacctaattaagcctgctgattcctttatggtctctgtattttactgntgntgctaccttcttccacttgtattatatgcatttggcaaaagatcacctttacttcctttacccaacagattaatcagaaagtgattgtggatcagaaaatcaaatcacttgtattgtgtactgatataaatagcttcctcatcaaaatccggtgcccttcactgtggccaaaaggtttcatctgttcaacatctaggctaggcagaattcccttttcagaacaagcattaatagaatggcctcctagaagattaatatcgttctctatgggatatgggctgcctaaacttataactattgttaacctcaatacttnntgtgtgaanaagcttctttacttcttctaagttactatcaaaatcaagaaaatc

SEQ ID NO: 58104 - DNA, 128 bp, Glycine max
gcttgagcaatcaaacacaaaactttgatgtggatgttttattgagcccgtttatatcgagagctcagaactgacaacagaagctctaagcacattaccacgacgataactttcgactcaagagtccg

SEQ ID NO: 58105 - DNA, 104 bp, Glycine max
  unsure (1)..(104): unsure at all n locations
gggccctgagaacaccagctcctggctaatgtcggcgacagaatganatagcgctttatcaacttacaagatatgggtgaatgtctctgggcaccactcacatc

SEQ ID NO: 58106 - DNA, 382 bp, Glycine max
  unsure (1)..(382): unsure at all n locations
cctgcggcatgcaagcttgaaggtgtgtaacccaccacttccatattagaacactggtatcatgtctactatcattgngataatctctntctctgttattgggggcgctacttgagctgtcaagtctctccatctttgggcatatcctttgaaagatccgtgccctctttntgcacatgttctgtagttgcatcctatccgaagccattatactgacacaacctaacgaaggcaaccattatgtccttccaagcatgggctcgggaaggttccaagttagtgtaccaggtaacagctacctccagtaagactttcttggaagaaatgtatcagcagtttctcatcttttgcgtatgcccccatctttcgacaatacatcttt

SEQ ID NO: 58107 - DNA, 392 bp, Glycine max
cagcatcacaagtttttgacaacagtcgggtttagtttatcacacccgtagggcgcctttctggttgatatctttaggaagctataaataggggttattttctatatcttgtttatcttttacctaatttatgaattagataacacttttgagggttgtaaggcgtatgaaacactgtaatgacagatcgtgatcattgttctccccttgtggtacgtctatgctaattgcttataggcttactagttttggtttgatcatgagcaactagccatcctagtctgggagctatgatgtaattgtccaattgtacccctttctctgttcttgataaaattccttagtgctttgagttaattcattctctttctcatttttattgtttaattggg

SEQ ID NO: 58108 - DNA, 376 bp, Glycine max
  unsure (1)..(376): unsure at all n locations
aacaatatacttggccttcatttaactgtctttgggcttggcggccacgctcaacaaagtactttcgacacctactgtacgttgatttcaccaatgctgttatgggaatgttgcgacaatcctttataaccttattgatacattctgagaggttcgttgtcatgtggccatatcgacgtccttctctatcgtcagccatcgtccatttttcctttgagatgcgatcaatccatgttgctatggctggactcagttcacgaaatttttctaaattntgatcaaaaatgtgctcgcatggagtgtacgctgcataaaattaagtatgaataccaatntttagtataaatgaaagtaaaataacgtgaccatcaaatat

SEQ ID NO: 58109 - DNA, 395 bp, Glycine max
  unsure (1)..(395): unsure at all n locations
ncgcttccacatttggttgactgtccatgtgaatgttcttttgatgagtaccataaaaacattgaaatgtttgtaaactatgtgtgtcaaacatgggtgattccgcacaaagagaaatttgtgaaagcatagaccaacaaagtgatgcatttaggaaacacaaccactaacaagtatgaatattgttttttgtttgtgttaatttttttaagtgttgacttaaatgaaaatgttgcgggtgtttatatgttgttgtatatttcatttgtagggttgagagtgctcattggtcattaaagagattcctacaaaactctcttggtgacatatgcagtgtttgggaagcaatgaacaacatgatgatacttcaacacacccaaattaaagcatagtcc

SEQ ID NO: 58110 - DNA, 321 bp, Glycine max
  unsure (1)..(321): unsure at all n locations
agctntgctgngcatttatggtggatgagttatatataaaagaaggctgcgtgagagagagggagagcttctgaattttcttttggctgagtgaggagagagaacagcttttggctttaaaaagggttttctcttttcctattattttatttaagctatgccacatgtccccatttgagtggagcaaaaagggcccactttctcttttgattgtgacccatacttagtcacaaaaagtgagaaaaatctgacctttgaaacgctaaaatcctgcctcggtttgcgtgtcgtttctctggttccaggtcctcacgtttctct

SEQ ID NO: 58111 - DNA, 382 bp, Glycine max
tgttgaaattgccatgttcggatgttttatattttcccattctaggctagggtttttgtgatgatgtttgtgatgtttatatgctgaaattgcttatggaaaactgttagagatgaatggtagagttaacctagggttagaaagtgagaatgtgatgttatgagtggaaaaagagtgaggctttgagagttggaaggttaagtctgaattctgtggtaaatggaggttaaagtgagttaatcctagcttgaaatgtcatttaggacttatgagaaagcttggactgtgctagagagaaaaacaaatgaccaaagtgaacaaagagtcatttctagggcaaatttgggtgttgaagagtcaaattatgattcggtgagatttt

SEQ ID NO: 58112 - DNA, 381 bp, Glycine max
  unsure (1)..(381): unsure at all n locations
agcttccatatagactatgttactatggttctttntcaaactacattagntntattctggaaccatgagtatggacctaatctttgtacttagtacctctagtacttctatcagtatattaataattttgctgataaaaaaagaatatagaccatattactgccaaccaccaataccttcatcgcttagcccttaatccttcaatctggatagaaatgtgctgcatgaagtgctgtttcgggctgaaagggaaagcgcctttgatattcatccatgacatcgattcccaccacataggttggattntgatgcaatgaatatataggtgagattcatcttccatagctccactgcagaaagggcaaagcatattgttgatct

SEQ ID NO: 58113 - DNA, 391 bp, Glycine max
ctgaagacatgaggactaaacttattcactcgttttcaaattctttctataaaaagctttctgcataaattcttgtaaaatttagaaaaactctcaaaacaatttgattattttgagagaaaagactaagtgttgaaactacctattcgtttgtaagtgttagtcattgtgcaaacaaacaaatctcttgatttgtattagagccagtagtggcttggtaggataaagaatattggttgtaacaagtttggtgtagagcttgagttaaggaatagaagtgacatcgataaatacgtgtaatttgttgaagttagtggaacttgatgtgttgcctagagctgaacatagtctcagtggttgagacgggccagtataaacttgtgttttattt

SEQ ID NO: 58114 - DNA, 286 bp, Glycine max
  unsure (1)..(286): unsure at all n locations
agcttgaganaactttcttgagaagcttctttgataaaacttccttgagaagctagagcttagctacacacacccctctcttaactaagctcacctncttgagaagcttccttaagaagattcctaaagaagctagagcttagatacacatacctctctaatagctaagctcacctccttgagatgagaagctagagcttagctacacaccctctataatagctaagcgcaccccatgacaaaaacattgaaataaaaaaaaaatttcttactacaaaactactca

SEQ ID NO: 58115 - DNA, 386 bp, Glycine max
  unsure (1)..(386): unsure at all n locations
tcatgtttgtaaaaattaattgattttacagtccatgatattcagntcatatggttgaatttctctgtgaagcaaacaccatttttgagtgatcactgtagcttgtcacttgaagacaagtgaattgttctttctttgcttgaggacaagcaaaactgtaaatttaggggagtttgttagtcgtcttatacgactaacttttgtatagaaaacattttccaaaacttgtatagttcccccaatttatggttattttgtagtgatttttgtaaataaattttgttttatggataaagctgtctctagaatatgtccattggatttaatgatgaaatatgtgcaatttcagatgaaaatgagactaagtcatgaagtgctaaaagtga

SEQ ID NO: 58116 - DNA, 390 bp, Glycine max
  unsure (1)..(390): unsure at all n locations
agcttggttcgaggttcttacccgttgaagatctaagaacgatgtttaacgaatgaagaacgtcgaagaacgggtgaaatctttgcgaaattcctcacggaaaacgttacggaaacatttcggaagcgccttggcttagattttcttcacggaaacaatttttccaagcaaatgcgaaagagagagaagtgcctaaggggctgaaccccttccttcttgccttcctcccctatttatagcaaaataggggaggtggttgccgcccagctcgcccaggcgagcagggttgcttcctccagaagcaaccgccttctggaggaatattccggagggcccaagtgggcctgggtgctattngcacccncatttttactaagtacacccccctct

SEQ ID NO: 58117 - DNA, 387 bp, Glycine max
tctacttatgtggcagggcgggctttcttcatcttcttgtcttcaacgcgaactttgaccattgttcttccttcccgcaatgcttctcttcatgtctgcctgagtgggcttatagcctaaaccatacttcccacgatttccttgagtatttatcaggctagttatgccgccgttgttttttcctaaacccatcccgggttcaaaaccgatccccaacataactcgagccatcattaccgctgcatcggacagacaaggttgcccaaagagggagtccacggaggaaatgctgaccacctcaaaagactggaaagcagtttctaacgattcttctgcggcttgcacataaggcatggaggatgggcagctcaccaagatatcttcctc

SEQ ID NO: 58118 - DNA, 261 bp, Glycine max
  unsure (1)..(261): unsure at all n locations
gacatgatcatccgaatcgacgacacgtcgtatcgctccacatcaggactcttagcaatggccaaaacgattggcggcacaaacggcgcgacgctcacattgtgtttctgcaccaactccagcaacgcaactatatcaaacttcggaacgatcaaaacggcagcctcaactcgaagcgaacacagcanaacagagttgagcgaataaatgtggaatagtggcagaacacacactaccacatcgtcgctgcgaaagtacaaa

SEQ ID NO: 58119 - DNA, 387 bp, Glycine max
  unsure (1)..(387): unsure at all n locations
tctaatttttcatctttaaactgatttcttattttctctcatttagnncatcagctagtttcaccaaaataattgataatacttttgaggatattataagttctttttttgactaacttataagttaatgatttgatacataaaattattttaatatttgtaataatagcttattttccctcacctatttacataagttatttgaaaaataatataatgtgtttgagataatccaaaaaattagattattttaataatcgattatgaacatgatcagatttggatagatttgctaaaaaaaaatagtttgaaaatgagtaatttcatttggatgttacaaaaaaatctacttttacacatttgaaaaagtacaaaaatagctgaagt

SEQ ID NO: 58120 - DNA, 442 bp, Glycine max
  unsure (1)..(442): unsure at all n locations
ttcttgcttctacaatctcccnnctttttatgatgacaacttctgaaatcaagaaacacacatacacactntttcctagtcgatcactcacataaatttccattctccccctttgtttttgaatttatgcttctcttanaattaagttgattactcatgtgagttcttgatttaatccctatttctctccccctttggcatcaacaaaaagccaaagtgcgtaacaagtttgaggcatacaaatacaactaagcatccacacaacattcatggaaaaatataaaccaaatcatgaagcaagatccatgaagcaagaaccatgaatatttcaaatatataaagaccacatagtcaaataacataattaatatttgttcaaacataccatgcaaataaagaaatagtaaattgttcaaatatcttaataatatagccaaataca

SEQ ID NO: 58121 - DNA, 364 bp, Glycine max
ctcagcttcaagaaaagaccaatttttcttttataatcttatttcaggcttaaataggtggctttgtttgtgcttgcgtgcttagtgcaactctgaaccgcttagcgcgcattaacgaatttcggcttggcgggagcttttctcgctcagcggatggactgaagtggtgcgcttagcgggatgacccttcgcttagcgaacattcataactcatccttcttccagattcttcctcgtgcttacccgaagaatgttgcgctcaccgaatggctcgctaagccagaagattggcttaacgagcttgagaaattcagcacttcacaaacttgcctaattaacctgaaattgagaggaaatgattatt

SEQ ID NO: 58122 - DNA, 376 bp, Glycine max
  unsure (1)..(376): unsure at all n locations
gcaagcttcgactattcctatgaacggaggaacattgcgcacagcgtctcgctgaacgncaggctcgatctcggacacatccatctagcataaatctggaatcaatntaccggatacgtaccaaaaaatcgaatcgcaggttacaaaaagtgtatacagagaaaacgttatcttgaaactctttcatttcatcggtcagagttagaatgccataacataagtttaagttattggatatcctcccaattataaaatagatgcgtgcaccgatgctatatgttaatacgtttaaacaaagacaacaaatgctggaaaagcgcacgttgagtcggncccacacaatatacttttaaagagaacgatgannatttagaat

SEQ ID NO: 58123 - DNA, 396 bp, Glycine max
  unsure (1)..(396): unsure at all n locations
ctaagctatcagccttctcattcagaattcagcaattatattttcactgtttccaggcttggtagtggttntggactaatagaaaactgaaaaatacaatacaactaacaaattaactacaacggagtttcactttgagggtgattcattggctaattgcatatcccgggttaaagaaattgccaagtgcctcaaaaaagacacagtattatcgaaacctagaaattgaaacattaaattggggtgagaaaagaaacacgaaaagattagctcaccgcattttgctctactgcggtagtattaggtttatagaattgacttatataccagtgtcaaccaataccaatatccataagaagtatgctcttatttagatttattagaatttactttttt

SEQ ID NO: 58124 - DNA, 426 bp, Glycine max
  unsure (1)..(426): unsure at all n locations
gagcaccgcagctgcagctgaatcgacctcatgtcaaagtatttccatntgatttttcagagcttcgntgtcaatttcgagcctctcaaatattatgcgcctgaatcggacatccgtgtgaaaagttatgaccatttgaatttctcgagagcttccgatgtttaatttcgagcgactcgatatattataagcctgaatcggacctcagtgtgaaaagttatgaccatttgaatttctcaagagcttccgttgttcaattnttagcgcctcgatatattataagcctgaatcggacctcagtgtgaaaagttatgaccatttgaatttctcgggagcttccgttgttcattctcgagcgtctgtatatgtgatgcgcctgaatcggacatccgagtgaaaagttatgaccatctgaatttctcgaga

SEQ ID NO: 58125 - DNA, 366 bp, Glycine max
tagcccaagaggggatggaccttttcagggctttgagagttttaataataatgcctataggttggacctcccaagagagtatggagtcagcaccacttttaatatttctgatttaattccttttgcaggcggagctgatatataggaggaggaaccaatagatttgaggtcaaatcctcttcaagggggaggggatgatgcaatcctccctaggaaaggaccagttaccagagccatgagcaagaggctccaagaggattgggctagagttgataaagaaggccttagggttctcatgaaccttatggtagatttttgagcccatgggccaaaggtgggtccactcttttttgtcaataggacaat

SEQ ID NO: 58126 - DNA, 241 bp, Glycine max
  unsure (1)..(241): unsure at all n locations
gcatgcaagctcgttagaactatcatcacatgacactttttgtgcaccgaattgatgcttctattaactgagatttaacagaaacactnggtaagttgccaactaaactgtctattggtcaacctacacattctactgttttgcagatggcaagctgtacaatctgcggtgacgctcattaaatacgccaatgtattcccagtgaagaacacactcaagaagttcactatatgggtgatcg

SEQ ID NO: 58127 - DNA, 358 bp, Glycine max
cgtagggaggctcggctacgaaaataagcggtatttctttattcaaaggcttagattctaagagagcacaaatcctagacttatccaagtagtcttttcaatacaattagcttactcactagcctttcatttttatttgcatttaaccttatgacaatagcatacactttctttgactgggccctttctttcttttttttaaacacaacttatttgttgcgcgtgctgaagttgtttgacaagcggcctcaaatatcttaagaaggggggggggggggttgactcacacacttgaattcaaaaacaattgtattgacgcatttttacgtgtctctttgaaagggaaataaagagatct

SEQ ID NO: 58128 - DNA, 465 bp, Glycine max
  unsure (1)..(465): unsure at all n locations
atgcaagctctgtcctgcanagtatactaactttgttcntaaagggaaagtattaagcttaactatgacggaaacttagcatgatatttgttacatagcctatgttcataatttttaggatggaagtaaaagctgattacatcgggttgctgttaattgcatcagctagttatgatccccgggtggtacctaaagtgtatgaggagttgggaaaatttgctggtgattctacctttggaaattatttctctactcatccttctggacacacatagagcaaaattgttggctcaagataagataatggaagaagcattctctatatatatagagatgtaagagttggatgtggngttgaaacttttctttaggactacacaaccatcaccacctatatttgtatctattgtgttagaatgtnctcttgccactttntttacaatccaaaaatacattgtgtacatg

SEQ ID NO: 58129 - DNA, 387 bp, Glycine max
  unsure (1)..(387): unsure at all n locations
cgagtgaactttgaatattatgaaaacgtggattttactttatgttctcactcttaaaggagngatatgcctacttatacgtaactgtacattttatttctagtaagcaattatgtatttatcacttaggtagcttgattagatattggcaaatatgttattaatttcgtttgaactttgtagtctattcactgtaatcagtgttatgtatgttatatttcatgaaataatgtatgtattttacttctagactctgttgacatcatttattcggtatgggattttataataatattaaataatggcgtcttttatgttcagatgtctggtgagtttccatgagctacttctgatgctcaatctatgcaaactacatctataggtcaa

SEQ ID NO: 58130 - DNA, 359 bp, Glycine max
taaatgtgtctaaacgcatgagttatctaggtttacttctgtcgcaacctacccttcggcgggagggtgactcgagactcgcgggatgcgtgttccacgaaaggtatacgcgcggatgtcgcaccaacgtttatttgaggaaaacgtcggaaaaaccggaatagacgcgatctacgaacttctaagtgaaaggatcgggagttgtatttacgcactggagtcgtttgatgcttaatcaatccattgaaatcctacggtttgacccccttcttttgatgaaaacatcgatgggtgagaactattgatcggcccctatgttcacttgaggctcatgcacggtgccactcattgccccagtg

SEQ ID NO: 58131 - DNA, 389 bp, Glycine max
tctttgataattcatctctgataatcgaaagtttgaaactatgcttattattattaaaggagtattcgctcattgaaattttggcaaggctattgttagcttcattgtagcgttgagttttgagttctgatgctaaattaaaggagtatctgctaattgaaatctctgttaatagaaagttggaaacaacgcttagtgttgaattctaacaacgctacggtggcctccccgaacatggacaaattatctgctaattgaaattctgacttcatcacaggtggataatgggctttgtagctgcctttcgggtagtgggttttgatgctgactttggagcaaactcttaccagttcatgattcgattctacgaggcgagtgtatggaacctt

SEQ ID NO: 58132 - DNA, 176 bp, Glycine max
tatacatgtgcagtcaactgctctccatgggggtaggggagaatgaacgacttactaaaataggaacgttgatcacaaccatgagcgcaaaagtacagcatgcttgggactgaggtgctcaattaagagtgaaggggctacttcaccttatggtcaaggttggaggccatgggctg

SEQ ID NO: 58133 - DNA, 385 bp, Glycine max
  unsure (1)..(385): unsure at all n locations
agcttgttgcgccggttatagttnntccacattgatataaggggcatttcgtctagggttgaagataacactttgggtcttaaaaagatataaatttattaaacatggagtacaggtaaacaagttaaagttttaaataatgaggtgaggtgcaccaattaggaggagtgtgtttaaatgagtatatatatctttaatttagctaggaattagctaggaaataaatttttaaattactatagatatagattaatttttggctacagattaactacaaaattactatgaaaataacctagctagatagctagatagctagaaacaaagaanaataaacaatatattacaacaaagtagntagcaaataactacaaattttttaaaa

SEQ ID NO: 58134 - DNA, 393 bp, Glycine max
  unsure (1)..(393): unsure at all n locations
tcagacaacttgttgtaatcaantattatgagtttgtaatttattaaaacacaatttttgcctctgaagaaacttttctaacttagaaacttttcttcacactaaccatgatgatgcatgatgcaatacaaatattaaatgtactaagatgcaacaacgaagataacaaccaatacaaatgtcactcaagggagttgggcatgtaaaagccaaaaattcttcaagctttggccttaggttgtactatgttgctcccctatctctaaaatcatctattaagggctaaatcaatccttaaatcttgcatttgtatccttgaatcccattatgaaaatgtctattgttggatcaagtggcctcggaataattaaaaaggggggttgaattaattat

SEQ ID NO: 58135 - DNA, 417 bp, Glycine max
  unsure (1)..(417): unsure at all n locations
agcttggagaggatgtttaatggaggaaatatagagggagagaaagagagaggcgggagcacgaaattgaaggaagaaaaaaaggagggaagttgaactntgagttgtgtctcacaagactctcattcatcaaagttacagcaagtgttacacatgcttctatttatagactangtagcttccttgagaagctttcttgagaaaacttccttgagaagcttctttgagaaaacttccttgagaagctagaggttagctacacacacccatctaaaaactaagctcacctccttgagaagcttccttgagaagctagagcttagctgcacacacncatctaaaaactaagctcacccttcttgaaaaaatacatgataatacaaaaaaanagtccctattacanagactactcaaaat

SEQ ID NO: 58136 - DNA, 387 bp, Glycine max
  unsure (1)..(387): unsure at all n locations
cgaactctagtgtgtgtgcgngngttgtgtgttgtatgtaccagctactaagagttatgtagacttagggtgtgtttgacctattcaactctcccctttcttttattttattactttggaatgtgtaaaacctccgtccagtcatggtgaaacgagtttccatacacacacttagccactaacaagtgatatagtttcctgagtgtaagtttaatttagttaataaagttcaaatttcatttccttccattatatcgcttcaaaacaattttgttgacttacacacttgaatccaaaaacaattgtattgacgcatttttacgtgtctctttgaaagggaaataaagagatctgtcaacactgaggacgcgtttggtaagggagaaa

SEQ ID NO: 58137 - DNA, 394 bp, Glycine max
  unsure (1)..(394): unsure at all n locations
agcttctagagaatgttacatgaagctgccttggtataaacactgtccagccttcattaaccggtggatcttctctaaatttggtctacaactntgcaaaacaattttccaagatctgaccgttgggatctttgagaagatgtctggagtgtgctagaagcctcttaatgaagcttctggaggaagcctcttaatgaagcttctagagaaaactacctgtagctgcctcggtagaaacgctacccagcctttgttaaccgttggatcttctcgaaatctggtttgcaacttcacaagacactttaccatgattntaaccgtgggatctttgagaaaatatctggagtgtgctagaagcttccgttcccaagagcantccttatttaagcatttc

SEQ ID NO: 58138 - DNA, 386 bp, Glycine max
tccattttcaatttcgaccatctctgttatatttccggactcatccggacatccatgtataaagttattgtcaattcaatttactcagggcttcggatcttaattttgagcgtctcgatatattacaggactcattcagacatccgagtaaaaagttattgtcgtttgaatttgatacgagcttccgttttcaatttggagcatctatcgataaattatgacactctgtcgggcatccgagtaaaaagtaattgtcgtttgaattttctaagagtttccgttttcaatttggagcgtcttgctatattacgggattgaaacgaacattcgtgtataaagttattgtcattgcaatttgctcagagcttctagtctcaatgttgagc

SEQ ID NO: 58139 - DNA, 299 bp, Glycine max
  unsure (1)..(299): unsure at all n locations
ttcttctggtgggacatcttgacttgctnttcattctgacattcaccacagattctgccttcttctatattcagattgggaatgcctctcacagcacctttggcaatgattttcttcatgcctcttaagtgcagatgttccaacctttgatgccataatttgacttcatcttctttggaggatagacatgtggaggaagagctggtttcttggggtgtccataagtaacaattggcctttgatctgctgcccttcattagaacttcactcttctcatttgtcaccaagcattctgactt

SEQ ID NO: 58140 - DNA, 384 bp, Glycine max
tatgcatggaaaatgtatattatgaaattgagttgcccgaagaaacaccatttcctagttaaccatgcattaggtaccatgttcaattattttgtttttaagtgaaacgggtttatgatcccaacatggttggctcgtggtgcctaacacatgaaactaagaatgtagtgtgaagtttcacgcttcccccttttttgtttttgttttgtagaggaaaacgcaaggatgagcaaacatgaaaacaaatggtatgcaattttgcagatcaaaaagtttgttgaacgcatatgcatgatgatgccatgactcatgcaaaatgtgaggccggaatatgataacggacaaatgcaggatatgtccattatgatgttatgaagagatgct

SEQ ID NO: 58141 - DNA, 349 bp, Glycine max
  unsure (1)..(349): unsure at all n locations
tttcttgcttctacatatatganggncatggtttgtatnactcctttgctcgcatgaagaccacaagcagacgtcatcaaagtgttgattcttcattcttctcacaccaatgtaagccatcaccaccacccttaatggtgcaatagctcgcttccatacgacactcctgtactgctagcctacatgtngtggtacaaatatctaaagaattttgagcatggtgctactaggatgctcaacataactccctccagttggttcgcatacacacaccaattgtgaattattngaanaaccatggctggaggtgcctaactggcatttaagagtattcttactgggagcctac

SEQ ID NO: 58142 - DNA, 378 bp, Glycine max
  unsure (1)..(378): unsure at all n locations
tgtacgaaaggaagattcatctttttcgaccctagtgaanctagactccatctcattgaagcgcatgtccacttgtaactccaaagtatcaaacctttcaccaacaaaggtttgaagaccatcgaacctatccaaaatcttttgaagaagcgaggaatcttctccaccatgtaaatgtccttcttcatcaacatgtcgagcaccctttttcacccaagagccatcatgctctttttgataaccaaaggatgcaatgacaacaacgcctattagaaaggatctcttgattggaacataaggttcacaaacaagaggtatgttaaagtgttgaatgaagagggtgactaggtgtggatatggcaatggagcatttaatcg

SEQ ID NO: 58143 - DNA, 408 bp, Glycine max
  unsure (1)..(408): unsure at all n locations
ttgttntgaatgctctttttaatggacgcgataataatatcctcagaccgaacaacactctgcacagtggccaaagatgcttgggagatcctgaaaaccactcatgaacgaacctactcagtgaagatgtgcatagtgcgactctcggctacaaaattcgaaaatctgaagaggaacgaggaagaatgtattcatgactatcacatgaacattcttgaaattgccaacgcttgcactgccttgggagaaagaataactgatgaaaagctggcgagaaagatcctcagatccttgcctaagagatatgacatgagagtcactgcaatagaggaggcccgagacatatgcaacatgagagtagatgagctcattggttcccttcaaacctttgagctacgactctcggat

SEQ ID NO: 58144 - DNA, 347 bp, Glycine max
  unsure (1)..(347): unsure at all n locations
acagcttatggacaagnnccaatggcttatttcgaggtttttcagcgccgaagagtaagagcataagggtagagcaacaacttaaagggaaggctacttgaaaagcatatggctctcactcttatttaaacaaagaccaacgccacggcatcttaggggctacaccttatatcccaaagactcataacgggagagactaatcgacaaacaaccccctaaggctactatgccctagaatcctagctctatgaagtgccttaaaagtcttggaagaggacacattgcttctcaatggcccaccgagataaccatgactatgaggggccaagacatttatagtagccaag

SEQ ID NO: 58145 - DNA, 182 bp, Glycine max
ttgagagaaataattagaggcagaactcaagattacacagaaaaatcttctcacaaggttgatatacagaccaatcattcatgtatccggggacatattcaaagtaaagtatggacagaatcttagctaatttatgtctgttctacagctaatgtaccaaggtggcgagacactcgctataa

SEQ ID NO: 58146 - DNA, 396 bp, Glycine max
  unsure (1)..(396): unsure at all n locations
gaaaacaatgacactatcataagtgtgctgctctatttcancaatattggtttgggtttcatgagtgtccaacaacatcatcattgattactctgcttttaacagaggccagacagctgcttctgcaattaagttgacatttgagaataaaatcatgtaatgtaattcatgcccctctattcatgtgaatacttaaatacacgcatgctntgtttgcaaatcaccgggtagagggttgattangtagttgttcaaaggctctggataatatattttggactgtaaaattactacacatttctagaatattcttaaatataatatgtatgaaaatggtagaatatcctacaactatagcgagtatgaatatagtagaacaatctaaaactataatat

SEQ ID NO: 58147 - DNA, 398 bp, Glycine max
  unsure (1)..(398): unsure at all n locations
ctcgacggactataccaagctctaggaaccagttttcggatttatgatctatatataggctngctaagggtagagagaggaagactagagatttggatcaagtaaagtgtgttaaggatgaagaaagcaaagtcttaatgcatgaaaaagatatcaaggaaaggtgaaaggcgtatttccacaacttatttaatgatggatatggatatgactctaccagtctagacacaagagaagaggaccggaactataagtactatcgtcggattcaaaaacaggaagtgaagaaagcgttgaaaagaatgagtaatggtaaggcggtggggccagacaacatacatattgaagtgtggaaaactcttggagatagacgtcttgagtggctcaccgaactcttt

SEQ ID NO: 58148 - DNA, 388 bp, Glycine max
  unsure (1)..(388): unsure at all n locations
gcatgcacgctcgcgcctctctctctctctctntcacttatacgagctccattatagcatatatttgttatactctccttacacatattcttacttaagcatcatagtcatttgttttccaggtcccccttcctatcagaggcacctctccaagccgacgtgtgaagttcgagaccccactcaaccacatccatcctgacgtgtcacggttccagaatttggtaagcacatagagtgcgatttattgtttatatcgcctccttataaatagtaatgcaatgaaacacaattcgtattgatacttatgatttagcattaatcatntaatgagccatgcataaatattccttttaattcatagaggggggttgtaaagacaaatatcaca

SEQ ID NO: 58149 - DNA, 404 bp, Glycine max
  unsure (1)..(404): unsure at all n locations
gaacactcaagctcgagatgaggaagtgttgaagggtgaaacttctcgcttttattgatgaccacagagnggtacctggagatatgtcgcgggggtcaggagaccttggggacgacaggtggggtgctattgcccaaaaccaagcttgaccaatcccgacccaacccgggcatagtcggtcagtgagaacctgtgatgtacctaaacaggcgagctcctggcagtcaacagataaaaggaacaaagaccacaaagcaaggaggcttgtggtggctggccagctgtgaaacttgattgatatgtgggttatggcctctggtaatcgattaccaagggtgggtaatcgattacaaggcttaaaaatgaagacagggggctaagatggtctctggtaatcgattacc

SEQ ID NO: 58150 - DNA, 443 bp, Glycine max
  unsure (1)..(443): unsure at all n locations
tgctcattgactccagattgttgtatagaangatagtgatctgtatggngatctacagaagaacatagaccacagactcttgcaataggtgcagattttntattcatggcaagttgagttactaagttgaccaaggcatcaagttttccctcaagctttttattntcagtagatgaagatgaatccgtggccacctcatagactcctctaaggacaatagcatcatttcttgcactgaaatgttggcagttggaagtcatcttctcaatcaaattcctagcctcaacaggagtcatatcaccaagggctccaccactggcagcatcaatcatactccttttcatgttgctaagccctcatagaaatatngtagaaagagtgctcaaaaatatggtggtgagggacactgcacacatttcttgatctttccagtactatacaac

SEQ ID NO: 58151 - DNA, 391 bp, Glycine max
tcctagcttttcattgttgtgttttgatctctttttggtgttctaaattgtgggaatgtgctcaaatatgtggggcaattttggtttgctttcttgcttgattgggttgaattgggggtttgtatgagatggccctaggcctataatgcattttgaagcaatgggacatgccacattgtccccgttctcttgctattgatgcctaaacgcgcgcccaccaagtgttaggtgaaatgcctcaatggcattagcgcgtgatttttgtaaggaaacaacccatggggcaatttggtttgcacatattttttgggacatgcattcagtttcgaaagggctagagtaattgccccacatatatcctaggcctaggaaccaaagttttatgcaaaag

SEQ ID NO: 58152 - DNA, 411 bp, Glycine max
  unsure (1)..(411): unsure at all n locations
tcttcttcctcggngccattcctgcgaaggcatacatttggaaagttagttntaccaagaaatgctacccttaaaacaaaaatggcatacaacctcctccaataaatacaaacatcaatgtaaatttagagcaagcttatgcgcatatttccttacgaacattcactcgcacaagatattcttctaactaagaaaaatgcacccatgcacaatcaaggcactttcgttacctacattatttgtatgtacttccaaggtgtactacctacaccacatgcatttccttggctaaatttacatacatgcatgctcaaagcctcttggctaccaaaagttgcacacatgcaaaccttatgatgaatcttggctatctacacaataaggtgctacatttcatgccttattcaagtg

SEQ ID NO: 58153 - DNA, 377 bp, Glycine max
tcaagaaaaagatggtctcagcatattccttatttccagaagggaattctatcaatagacctccaatctttaatggagagggttaccactactggaaaacccgaatgcaaatttttatcgaggcaatagatctaaatatctgggaagccattgaaataaggccttatatacccaccacagtagaaagagtttcaatagatggtagttcatcaagtgaaagcataaccatagaaaaacctatagatagatggtctgaagaggatagaaaacgagtacaatacaacctaaaagccaaaaacataataacatctgccctatgaatggatgaatatttcagagtttcatattgcaagagtgctaaagaaatgtggacactc

SEQ ID NO: 58154 - DNA, 405 bp, Glycine max
agacctataaaactcagcttcatgatgaatcagattgaccagttagtttttatgataacaaagaagacgacaaaaaagctcaaaagtcaagaacatttcatgataacaaagatgatgatctcaagaaatcgaaaaacgagttcaagattgaatcaagtacacttcaaggttcgagaggaaatttgatttcaagaatcaagattcatggtacaagcttccaagaatcaagattcaaggtacaagcttccaagaatcaagatcaagattcaagattcgagaatcaagagaagacttaatcaagataagtatgaaaaagttttttcaaaagctgagtagcacatggatttttctcataatctatttaccaaagattttttactctctagtaatagagtaccagattat

SEQ ID NO: 58155 - DNA, 415 bp, Glycine max
  unsure (1)..(415): unsure at all n locations
agctcgaatatcttgatttgagnnatgcacattctatacttgctcattcttcaccgaactctccaacctctttcttctttgacccacctatatttcgcagactgcacactcccttactataatgaaccatccttgctcaacttctcatctctgcaaactctacatctttccttcactagttattcccctgccatttcttttgtccccaagtggatattcagattgaagaaactttgttctcttcaattacagggtaatgaaacccaaggtccgattcctggtggattcgaaacctcacacttcttcaaaatcttgactggtctttcaattcattctcatcttctatacctcgatggctatatgggcttcattcgctcaaggtcctcaacctaagggacaacaacttgcatgggac

SEQ ID NO: 58156 - DNA, 393 bp, Glycine max
  unsure (1)..(393): unsure at all n locations
tgtaagatttgcaagatcatcttccttgacatttccttgatatttatngccatgaatataaagatatgacaatttagagagtgatccacgactttcaaatggatttccactgaatttattaaaagagagagagagagattttaaatctatctcccttaagctgcggagattacccaaaaaagtcggaattgttccttcaagatgattacgtgataaatcaagttcaacaagagaagtcacatttcccgaaaaagtgggaatggttccttggagttgattatatgacaaatcatggtcaacaagagaagtcaaattttcccgggcatcatacatagtcccatgctagttgctggagcttacgtccaaagacttgagacgatgaagaccgcataa

SEQ ID NO: 58157 - DNA, 434 bp, Glycine max
  unsure (1)..(434): unsure at all n locations
agctttccatgtgtttactntagtgatgcttatcccaataaacgaagcaattttgtgtgccatatgccaagaatataattgcttggcttagctttgagactccacctcaaaaggaaagaccttttccacatagttcaacactgacaccaggnttttgtatgccacaaaatgtaaacatgtatgaaactagatccatcacttgaacttcaaaattgaacactactcgggaggtaacagcataattggatgttaggtaattgtctaacaaggttatcatattctactgtaatataacaagagaactatttaaatggccaacanttggtcctctaaaattaatggcataagatccttagcaaacatgtatatatatagaacgatatctgcactaaaagatctctcatanactgctcaatccatctttcactaaaatc

SEQ ID NO: 58158 - DNA, 390 bp, Glycine max
tgctcacctttgagaatgaaatatattcactctatgagtcgtgggttggggctggactgggtcatgattataaaattgatactcagcccattaagacagcttcggtgctacactacaatgggaaaatgaaaccttggcttgatctgggaattccacagtataaaagctattggaagaagtttctgaacaaagaggatcagctcttaagtgattgcaatgtaaattcataataagttgttgttcctgtggtgcatgtttgggaaattgtagggttgatctcttaaacaagaggatgcctgtgctttgggtgctcaattttctgatctagttttcgaaggggttttgtggaaagaagcaatggtggaccggtggtgatgagcttaacacacc

SEQ ID NO: 58159 - DNA, 356 bp, Glycine max
  unsure (1)..(356): unsure at all n locations
tgagctggaccgctaaggangaggtttgcgtgtgtgcaatttttgcacccgcgaacacaggatgctcaactccgggaacaggagaaatgaggcgtcgcgcttatgacaaattctcagttgtatgacgctagagcaaaaattcatcgtgactaattgctgtattataggaattttcaacgccggcaacgggaaatgtcagttaatactcgaatcagaatgtgaccatgaaagctactctccataggggctggaccgttcctcagctacgaagattagccacatggagctgtgtaataggaggacccaactcccttcaggtcatggaccgtgataggcataacaaaccaacactactc

SEQ ID NO: 58160 - DNA, 367 bp, Glycine max
tggagccgctgcaacatgatcattcattcatgtattctgaactcagcatcagaatcaattggttagagcatagtgtatttggaaatgctgttgatgcttggaatgatttgaaggagacattctctcaaggagaccttatcagaatttctgagcttcaacaagagatatatggcctcacgcaaggatccctctctgtcactgaattttattctgagttaaaaacactttgggaagaacttgaaacatacgtacctattccatgttgttcctgtcccgttaaatgcacctgcgctgcgatgagaaatgccaacacatttcatactcttaattatgctctaagattattgactggttgaatgaaacattt

SEQ ID NO: 58161 - DNA, 383 bp, Glycine max
ttgtgaataatctcctgagcagtttaatgatctttatgaaaaatgaccctattacgcctgcaccataaaatataacaaccctccaaatagcaagaccaatttatatcatgaactacatgggtcatagaaagattaacttgcagccacatcttccaatcagcaatggaataaaattcattgccatcattccttcaaataaaaaattgccactgcacactagcatagtcacaatctcgaaaaagatgaaggagattctcttcttggttatcacaagcaggacataaattgttgttagtcaaactcaatctcattcgccaaagttccaaataaaacatttagccctctctggacccttccaattagcaacaagtttgaataaacta

SEQ ID NO: 58162 - DNA, 447 bp, Glycine max
  unsure (1)..(447): unsure at all n locations
tatcttgatcttgaattaatcttgaagcaatgtttaacctttgaatgtttgttgaagtaatcttgaaagcaaccttgtttgattattctttggcatcatcaaaaccatgtattcatgcattaacattctcccccttnttgatgatgacaattgtcgcaacctacccttcggcgggagggcgacgcgagactcgcgggatgcgtgttccacgaaaggaatacgcgcggagtcgccaccaacgtttatttgaggaaaacgtcggaaaaaccggaaaagacgcgatctacgaacttttaagtgaaagtttcgggagttgtatttacgcacggngaangtattagcaccccacacgtccgtcccaagggacggcagcctttaatcgaatgtgcaaacatgaacccgattntatgntccctttttatgtctttatatcccttatactctttt

SEQ ID NO: 58163 - DNA, 363 bp, Glycine max
tattgggcattaaagtttttgaactttgactttttgcagctggtgaacacaggaagctccaactccgtgaattggaggaaatgaggtttcaagcttatgaaaattcaaagttttataaccaaagagtaaaaatttatcatgacaaaaagctgtcaaaaaggaattttcagcctggtcaacaggtattgttatttaattctagattaagattgtttccaggtaagctaaaatccaaatggtctggaccgttcatcatcaaagaagttatcccacatggagcagtgatattggaggacccaactagccaaaggacatggaccgtgaatggcagaagaatcaacactacttatgtgagatctcaag

SEQ ID NO: 58164 - DNA, 241 bp, Glycine max
agcttctagtattcaaagaccttctttctttatgtgttgttgtctctaagcgaatagaattcttcacttgagcatttgcgcaagcctaccctttgctggcgatcgaagcatagcctacatgtgcctcttccataggaagaaaatgcgccgagtctccaccaacgccttttcgaaggataaccgtataaaaatccatggataccttgtatgaagaatattccaatattcggagttatcctta

SEQ ID NO: 58165 - DNA, 57 bp, Glycine max
actttatcttaatatcgatggagctcatatatatgaagaccctcgaaattgaaaacg

SEQ ID NO: 58166 - DNA, 153 bp, Glycine max
tctcatctaaaccaaacaacactgatcctttattcaaaaactataggttaagcggacaattggcaaacaaatttgacacgaaagggatcctctctcaacccaaaagtaacccacgagaacatttaaggcatttacaactaggaagggggcagt

SEQ ID NO: 58167 - DNA, 219 bp, Glycine max
gtctctggatgaagcaaccactcgaagactctggtagtaaccttgatcacattcctctaaaatgtgacaacacaagtgcgatccaactataatataaccttgtcatgcattctttgactaaacacattgagaataggcgttattttcttagaaatcatgtgttaaaaaggtgattcgtgttttgagttcattgatagtgagcctcaactatcagatatt

SEQ ID NO: 58168 - DNA, 138 bp, Glycine max
tctaaaccattacattattatttccgtgtaaggatagtaaaacaacaataatacacgattgccggacacagaagacctggcagaaatttctcagcagaaactgtttccattggctgtgcagatctattagacgttacc

SEQ ID NO: 58169 - DNA, 276 bp, Glycine max
  unsure (1)..(276): unsure at all n locations
agcttgtagagagatcctngttctggttttattgattatcgattacataatttagttgagaccatgtatggtttattcatgagtctctgctctaatcaattatcaggtgatcacaataaattacttcattcttgaaagtattcccaaaagtgatcaataacactttaatcaattaaatcaagagtctatttgattacattgttcgcgaaagctttctatgtttgggaaaaacactttaatcgattaaaatgataatcctaccgattacttcttcga

SEQ ID NO: 58170 - DNA, 260 bp, Glycine max
tgcactttgggagcctctaattatcttttgttgagctcattaagctgacgcgatgaaaatgctttccagccttcgttaaccggtgaatcttcttcaaatatgggctgcagctttacaagacacttttacacgatctgaccggtgggatctttgagaagatgtattggagtgggcgctaaacttccattcccgagagcattttcttttgagcggttacacgctttgctctctgtgtatcctatgaaaaacgccatttcttt

SEQ ID NO: 58171 - DNA, 279 bp, Glycine max
  unsure (1)..(279): unsure at all n locations
gcagcttcataagaggcgtctagcttacttatatatcttctcanagatcccaacgatcaaatcatggtaaattgtcttgtgaagcttcccaccaaatctctagaagatccaacggttaactaatgctgggctgcgtttttaccgaggcagcttcatgtagctttctctagaagcttcattaagacgctttcttcataagcttcctcgtgacttctttgagaagctgtctcaagatgcttctctgagaagctagaatcttatctatccacacccctctat

SEQ ID NO: 58172 - DNA, 280 bp, Glycine max
  unsure (1)..(280): unsure at all n locations
gcttcttatccagggcacattctggtggttaatctctntcttccatggcttattccctagtggatggcgcctcctctcaccttttctcctttgtcttccgctacatctccatggtggaaaatcaccattgaaggacctcattgaagctcaaagatccagcctccatagaagctccacaagcaagcttccatcatatgtcatctataattttctaaattccacgtttttaatctggagaaaatatcctgcccattcgttgcgaatagttgtcatggcctct

SEQ ID NO: 58173 - DNA, 269 bp, Glycine max
aagtcaccgcggctgcagcttctacttgaaagcttagttgagacatttatttgaagctgctctgatctcatcagaacacttgctatgttctgctcttcgtctatgtatcatttgcagatatgtaggcttgtatagctttcctgcatatgatggtatgctaatgagatagtacatttgatgtagatggaaagtcacagaatgtccttcttataggaatactttgatgaaatgacatgacaaacatgtattccagacattctggtgtgaga

SEQ ID NO: 58174 - DNA, 171 bp, Glycine max
tgtcatcaatgaagcccttatgcacggtgtccttttctttttcttcgagaaagatactcggagagataccctgctttatgatctcgagctcagcgagtgaatatacatgcaggggagaccccacttgagatacagagagattctccgtaagcggtgagccaggataactca

SEQ ID NO: 58175 - DNA, 204 bp, Glycine max
  unsure (1)..(204): unsure at all n locations
cacccccgctgcagcttaaccaagcacgggggtnnnttttnctaaacccctcatttaaggatttcaaggttcgagaagagaaattgagaacggggtaaatttggagcatagtctcacctcacacaagtctattacatcaatataaacttgttcaaactggatttacacctaaaaatcctccaaaccaaaatttgactccttaac

SEQ ID NO: 58176 - DNA, 111 bp, Glycine max
gctgcactaattttggtatgttgggttttttatctcctacgagaaggtgaacccaaaacaactaacttgatttattagaaaacggtttttgcacaggctgttggagtctta

SEQ ID NO: 58177 - DNA, 214 bp, Glycine max
tagcactgttagtatttgggatcgtactctttccgaatgtacactggcttatggatttatcagctatcgacacttttcttgcttatcaccacaacaaggaaagaccgggcattgctgtattggttgatgcctctgacacttttgacctacattttaacagagcattgcttgaattatctgttgtacacccattcactatgtatgggtgggttcc

SEQ ID NO: 58178 - DNA, 156 bp, Glycine max
  unsure (1)..(156): unsure at all n locations
cttagccanatcctgactcaccattattcttggggggggagagagggtcaatccttaccctcaaaatcatataaatcaatacacactcataatctttcattaattgaaaaaatgttatgatatgaaattcccaatcctatattgggatacagctca

SEQ ID NO: 58179 - DNA, 127 bp, Glycine max
caaaccatttcttttttttatccacatcccagaaaacctgcttcaaatcacgactggccaacgacaatatataatcgatatagtaatgttctagaacttcggttatacggtgttgagtgagatataa

SEQ ID NO: 58180 - DNA, 221 bp, Glycine max
  unsure (1)..(221): unsure at all n locations
agctntaagaacattttgatgttcattactctacactgatttattgtaagaaataatctccactttcaacaatttcagtttcttacctaactctgacatatgtacaaccccaatgggttttgtcttataatgctggttattcactattaaagtctatgccgcgtccttattttatggtacttttaccgtgaagggaaagacttttattttttatactcctt

SEQ ID NO: 58181 - DNA, 122 bp, Glycine max
ccaaatactacatagatacagattgtgccaacgacaaaaaattgataaacccttgaaaatgaacgcctcattctaacgcgttgctcaaaataaaaagcagaacctggcggagacgcttttgt

SEQ ID NO: 58182 - DNA, 300 bp, Glycine max
ctagttgtattccaagcttacctgaatattgtcattgtagacgtgaaagcataatatctctgactatgaatagctgaatatatcttattgatgcgcctcctcctttcgattaacggcacaaatctccgctctaatatatctacgtggcgtcgctggctcgtaattcagtacggcctgcccatattgcgacttctgctgcggggatggcttgtacaagaaaagcaaccacctataaactcattgcgcgactccctcacttaatatattcattgcacgcccatgataaatattactgatggt

SEQ ID NO: 58183 - DNA, 311 bp, Glycine max
gggagagacccatttgataaaccgattgtcttgaggccatcaagcttttggatgaaacaacatggctgatttgtttgtcaaagttgggctatctatgcagacggagactagggtgggaaagacgaacttgttacttacatacgtgagttgtgcaaatatgtatgtagaataatgtggaccgttagaataattattaaaatactacaatatgttttccgttcctataaatatagaaatgtcttgaattcgtcactgtgaaaatttgagtatgggttttgtcctcgcagaatataaatatgtgatattttggc

SEQ ID NO: 58184 - DNA, 198 bp, Glycine max
caacctaaataagtgtctatcaaactctcctcaatagcaaattatactactctctggtatgttgtgtctgtgttaagtgctgatcggtttacttttgcttatagattcattggtaaaatactggttattaggtaaccgtttggattatgtaatgaaggtgtgaataatgactcctctattcaaagcattcaatactat

SEQ ID NO: 58185 - DNA, 310 bp, Glycine max
  unsure (1)..(310): unsure at all n locations
tctcacctcttctnctttgtcttccgctgcatctccatgttggaaaatcaccattgaaggacctcattgaagctcaaagatccagcctccatagaagccccacaagcaagctttcatcacaagaagcaaaggaatccatcgatagtcagtgaaaatgacacactnttgtgtataaaactcgtataaatagtatcaaactctcccaatttatggntattntgtaagggtataagtattttatgttaagtatagggaataaatacttagtactttcattntgtgtggttaataatcattttctctcaatttc

SEQ ID NO: 58186 - DNA, 203 bp, Glycine max
  unsure (1)..(203): unsure at all n locations
cgcacaacatgttttccacatccgcanatcgcgcataaacccaccatcctctgtngcccacctccaactgagctcacgtactcccacgtagcccatatcctcgtttctctcaacaccgggtcttcatcaatcctaccaaagcttctcaacatacaagttatgtaacatccaaatcatcacacactatcaaaccatgcaaaaca

SEQ ID NO: 58187 - DNA, 603 bp, Glycine max
  unsure (1)..(603): unsure at all n locations
tggcancnnnnnnaatatcctcgcgtctgatctctaagcacctgccgctgcaagctggataaacagaggaggggggcagggctctcctatctatctgatgtgctgngcaaatccacctagaaccaatttacccagaccaanaccatcaagtcagtcaccacanaaaaaaaaaaaaaaaatcccacccacactctttgtctctaccaccacatcacaggccagacaaaaaacacacaaaaacccgtttagccgcttaaacaataattaggaaaaataactgccacagtttcacatttcacacacatacacaatcataatagttgacaatgaacttacctagatacacttgttttccacaatccctgcnncacaaatagaaccagaanaaaaaanaaaacaaatcaaattttgattgtcgagaaggaaaaagaaacacatatttcatgaaatggaagggaaatattaattactaaccatatatgagactccccagcgacccgtcttctgtagaaggtgactcctctatactgagaagctctngacctcggtcctcggcgactcttcttcataggctgagaaacttcactgatgatnttcggtggn

SEQ ID NO: 58188 - DNA, 163 bp, Glycine max
  unsure (1)..(163): unsure at all n locations
agagtggtacctggtatatatgtcgcggggtcaggagaaccttgggacgtcaggtggggtgctattgcccanaaccaagcttgaccaatcccgacccaacccgggcatagtcggtcagtgagaacctgtgatgtacctaagcaggcgagctcctggcagtcaa

SEQ ID NO: 58189 - DNA, 582 bp, Glycine max
  unsure (1)..(582): unsure at all n locations
atttaaccgttgactcgngatctctgaggcacctgacgcatgcagttgtctcatgctaggcattgtgaatctngatagctattttttcttgangccatggataanaagcttggaggaagaaggagatgaatgaanggagaggaacagaatagcactggaattttagctctaaaagggctctgaaatctgaagtttaattttcaaatgatcaaagttgaaaagaatgcacacaccaggcctctatttatagtctaagtgtcacacaaaattggagggaaannttgaattctattcaaatttcacttgaatttgaaattngaattgtgaagccaaaatttcactaattatgattagtgaattntagctatgggtcaagccactaattcaagaacaagtccaagattcttcactaagtatgcttaggtggcatgaggcatgtaaatcatgaanggacatgcacaagtgtgactatatgatgnggcaatgggctggaccaagaaatgctcaccacctatnaaattattgggatgacttcttccattcaaattaattatttccacgacataaatatcacttatgatg

SEQ ID NO: 58190 - DNA, 133 bp, Glycine max
  unsure (1)..(133): unsure at all n locations
accaacttgaaacagaattattaccagaaagaataacttgaataggacaaatttaatttgaatattatacatgactatttaatttgaatcattcttttataattntggtctattgcagctaaatgtaaaactt

SEQ ID NO: 58191 - DNA, 193 bp, Glycine max
  unsure (1)..(193): unsure at all n locations
gagagaagttgaactttgagttgtgtctcacaagactctcattcatcaaagttacaacaagtgttacacatgcttctatntatagactangtagcttccttgagaagctttcttgagaaaacttccttgagaagcttctttgagaaaacttccttgaaaagctagagtttagctacacacacccctctaataa

SEQ ID NO: 58192 - DNA, 199 bp, Glycine max
  unsure (1)..(199): unsure at all n locations
acacgtactttcaaggtgtatttgttacttacatcacacaccttcttggctaaattcacatacatgcatactcaaagcattttggggtaccaaaagttgcacatgtgcacatcttggtatttctaatacctatacatacacaaacttcatgatgaatcttgactatctacacaataaggggctacattntatgctcttt

SEQ ID NO: 58193 - DNA, 221 bp, Glycine max
  unsure (1)..(221): unsure at all n locations
ctcctacacatattctaatactcatgcatcttctacattaaacaccggaaacttagattcctaggcatgagtcantcctttggcactntagtctagcttctacaaactagccacacactcacaatgcgcacaatntatttctcatgctaagttccacagaatcatgcgcaaatgctatngaggaatntcaccgaacactcggtgggcgcatgtttaagcat

SEQ ID NO: 58194 - DNA, 610 bp, Glycine max
  unsure (1)..(610): unsure at all n locations
tgcccccnnnnnntttgtctcgacatcngtcncgnngatcttanagcacctgcaggcatgcnnagcttantactcaatttgatcctttaaatttatntatatgtgttaantanggnnttcaatatttttaaaaaattcaatcaatttacaattttaaaaataattaatccagtcctttccgtccaatagaatccgacaacgttgagttaccgacagttcaaattcatgaacaacgactggtttcaacaaccacaatatttattattattatttttaaantaaaaaattataacanaataaaaattataaaattaaattttaatcttgagtgttntattattatttaaaaaacaatggtaagaatgcatcccttcttcactgggaaatcaaagcccccatcggcgcaccagcattaaactggttttctcgcaacacccaangtacttctagaacctctgtggttcgcanatacaccctacccttnaccacctgcacatattcttctcctttcntcaaatcatctcagagagaaagaaagagagtgtttatcattaataataccccncttccttcaattcnncacacacttntcaagaacccctantgacgn

SEQ ID NO: 58195 - DNA, 169 bp, Glycine max
  unsure (1)..(169): unsure at all n locations
cacagaggaattacttataaccaagaaaaatataggcacatgagagaccaatcaaataggacagaagaaatagactcaccaagattcgtaagattntcttgttcatctaatgctccaatcatcttgagaaaatcaatagcattctgaacctgtntccattaaatttgta

SEQ ID NO: 58196 - DNA, 163 bp, Glycine max
catgagaggttggatcaaatggagaatacagatcataatgaacataaaacgaggagaagagggaatgatggtgcttctagacaaaaccgaattgacggtattaaactcaacattccttcatttaaaggaaagaatcattcggaggcctacttggagcgggaga

SEQ ID NO: 58197 - DNA, 243 bp, Glycine max
  unsure (1)..(243): unsure at all n locations
ctcagctctcaagtttctggtttctaattctgaaacttgtgtattcattctttcatctcttctccctctgccaagagaattcccaaggactaaccgcctgaattctttttatgtctatcttctccctcttccaaaagaacagaggactaactgcctgaattcttttgtgtctcccttctcccttgtcaaagaattcaaaacgacacagtctgagaattcttntgattcttcccttttccttat

SEQ ID NO: 58198 - DNA, 134 bp, Glycine max
  unsure (1)..(134): unsure at all n locations
ggtaatcgataccaaaacattgtaatcgattacaactnnttgaaaataattggaacgctgtaaattcaatttgaaaactttntcanaacaattntgctactggtaatcgattacaacaatgctggtatcgatca

SEQ ID NO: 58199 - DNA, 113 bp, Glycine max
cgagcacgatgcttcattctgatgataatattaggatccatctaatggtattttcatatatgaaaacattatgcctgtgactataattgctgataccaaatttgttggtatag

SEQ ID NO: 58200 - DNA, 235 bp, Glycine max
  unsure (1)..(235): unsure at all n locations
tcttaagttcttcttaagtacttaagtatggtcttaaccactttctaatgttcctcaccagggttntcttgatatcgacaagttacacctagtgcataagcgacatcaggacgtgtacaagtcatggtgtacatgatagctcccactacactagcatatggtactctactcatgtgttctctttcttcagaagttgttggacaattctccctactaagagcaattccaacaccta

SEQ ID NO: 58201 - DNA, 302 bp, Glycine max
taaaaaatgctacaatctattcaatgactataaactcatttatgaaggtcccacggaaccatgcatttatagataattaatttggagcttgaatggcctttaccaccagagagagtcatgatgtgtctcaggaagctacctaaaactaaataaggtgagagaaaaacatcatcactaagcaaactatacttgcctagaggtgatttaattaatgcaagtagatgggccttcataccatgagactcagtagactgatagctcttgttatataatatcatgattaagtcaaaatccttgaattt

SEQ ID NO: 58202 - DNA, 166 bp, Glycine max
cctcaagagcacttgtatgaagcttgttagaagaaagaaatagactcatctctcctttggttgagcttgtgcaaaatggagaagaaagaagctccaattgtttttaagagacatgatgatgagggttaggcttaagttgacaagcttaattgacaacatgaatgac

SEQ ID NO: 58203 - DNA, 548 bp, Glycine max
  unsure (1)..(548): unsure at all n locations
atatactcgctatcgancnctgagcacctgacgatgccgctgacctcaaccaacttattaagccatatacttttctgtgaccatngatggaaaggaacattaaagtcctttttccgccccctcagccaggaccaagtgagaaanattgtgttatccaccaacttatagatgtgaaaaggctgattatgaaagatgatatcattccggagcttccatattaaccttgtagctgctattcaccatatnttccttcttctattgtaaaacctcgagcctgctatggaggagtgctggaggaaattatccatgtgcctacaatgaagaactctatcctctctacccaggagttgaattcccaccacagaggcataactttttcacaagtgaagaacatatgagaggaagaatcatattgctttgcagaaaggcacaggcattgtcatctcacttgtctctaataagtctcttagaggaagctatccaagaatctcagaaaagataagctttgtgaatttatgtccaactgcgaacctagatgatttaaaacg

SEQ ID NO: 58204 - DNA, 145 bp, Glycine max
  unsure (1)..(145): unsure at all n locations
atcattcttctgcaaggaatctatcttttcttacatcactctcctccaatagaatntatccttatgaatttcaactnttgcaaaacttcctggcttcccttcattgatgatgaagatgtactccaaaccatggtaccttctagat

SEQ ID NO: 58205 - DNA, 526 bp, Glycine max
  unsure (1)..(526): unsure at all n locations
atacctaactaaccggactaaggacgcgctgactgggtcgatcacantttaaatcacgnnaggcacatcatggacatctttctcttattggaagtgcacttgagctgccaggtctctccacctttgggcgtattatttgaaatatttgtgccctttnttgcacatgttcttatcagaaatgtactgatattggctaatgaaggaaaccattaggtcctttccacaatggactcaggagggttcaagaataagtgaccatgtgnatggccgcccaataaggttctcttgaaagaaatgcatcaacagcttttcatctttcgcgtacacccncattttctgacagtacattttcagatgattcttatggcangcagtccctatgtacttatcanactcttgcactttgaaactcngaagaatgancatgtnggtactangaacactctttatgtagcaaggcatatatctgcttctcatggccctagcttctctagagatcaacttccattnttcatagaggggattn

SEQ ID NO: 58206 - DNA, 189 bp, Glycine max
  unsure (1)..(189): unsure at all n locations
aacatataatattgtaatatgtttttntaagaaaaaaaatattgtttactaagtattcctttataaaattatttnttccatcattatcattatattatattatatatgtaaagcttttaatgttaaacgtatcaagcctaattatatgaaataagctaattnttctacttacttgtaatgaaattaaac

SEQ ID NO: 58207 - DNA, 555 bp, Glycine max
  unsure (1)..(555): unsure at all n locations
gctgaatatgcattcagacntcgactcttagagcacctgcgcatgcaagctatataatcatacgctcgaatttacatttgttctctcgaganattcanatggtcataacttttcacactggatgtccgatccggcgcataagatgtcgagaggctcgaaattgaacaaccgaagctcttgagaaattcaaatggtcataacttttcacacggatgtccgattcaagcttataatatatccagacgctcgaaaatgaacaacggaagctctcgaaaaattaaaatggcgtaactttcacacggatgttcgatcatgctcatatatatcgagacgcttcgaattgaaccacggaagctcttgagaatatcaaatgggcataacttctcacactgatgtncgattcgcgcgcataatatatccagacgctcgaaattgaacaacggaagctctgagaattaaatggcatactttcacacgatgtctattaagcgcttgactcgtgacgtccaatgaccctcagctttaaaatcaatcgctaacttcacacgagctccg

SEQ ID NO: 58208 - DNA, 200 bp, Glycine max
tcgaataccatgagcatgtgatcgattacctatgtgttaaaacgttagattttcaatttcaagagtcacaacttgtgataaaacagtttcaaacttgtgtgatcgattacacaatatatggaattgattactagtggttctaaacgatggctcttatatttaaacatgaagagtcacatcaggtgatgtgtaatccatta

SEQ ID NO: 58209 - DNA, 323 bp, Glycine max
  unsure (1)..(323): unsure at all n locations
gctatgcgcatattccttacaacgttctcttgacaagacattctattatctaagatanatgcactcatacacaatcaaggcagcttcgttacctagattatttacacgtacttccaaggtgtatttgttacttacatcacacacatctccttggctaagattacatacatgcatactcaaagcattttgnggtaccaaaaattgcacatgtgcacatcttggtatttctaatacctatacatacgcannactcatgatgaatcttgactatcttcacaaaagggtgctacatttcatgctcttnntttcaagttttgctactt

SEQ ID NO: 58210 - DNA, 588 bp, Glycine max
  unsure (1)..(588): unsure at all n locations
attagggccatgagacnccgancnnacagacgangcccgcataacatcagaccacttacagtgtgctggagcttctttacatggtattgatggngcctatgcaagaagaaagcgctggatgaaagacgtatgcctatgctgtcgtggatgatttcttcagaattacctgtgtaaactttatcagagagaagatagaaacctttgaagtattcagagagtngagcctaagacttcgaagagagaaagactgtgtcatcaacagaattatgagtgaccatggcagagaanttgaaaccagaggttcactgaattctgacatctgaaggatcactcatgagttctctgcgccattacaccacaacagaatgcgatagttgagatggaaaacaggaccttgcaagaggctgctcgggtcatgctttatgccatagaacttctctattatctctgtgctgcagccatgtacacagcatgttacattcacatcagagtcacactgagaagagggacttcactcaccctgattgaattctggtaagggaggaagccntctgtcaagccttccacatctttggagtccttgttccg

SEQ ID NO: 58211 - DNA, 279 bp, Glycine max
  unsure (1)..(279): unsure at all n locations
atgacccctcctctcacctcttatcctttatcttctactgcatatccatggctgaanatcaccattgaaggacttcattgaagctcagatatccagcctccatagaagcttctcaagcaagctctcatcaagtggtaatcagagctcaagagcttcaagtaggtgctccttagacctccattaatattcagctgtaccttctcctccattgggtgttacttcattttctccatgtatctactcacatgtcttggttctaatgttcttaacatgaatttt

SEQ ID NO: 58212 - DNA, 593 bp, Glycine max
  unsure (1)..(593): unsure at all n locations
tatgtctttgtcncngatctctgagtcacctgcggctgcaagcttattaagaggatttcctcagngcctnctcgttgtctcttttataagctttctcaacaggcttctttgagaaaccagaatcttatctatcccaccctctattaactaaattaactttccggaaaattattacggatgaaaataacgccacacaataatcaaacattcaacataattacctaatatatatagatatatatatcagggtggtacacatcgtatccggagccatatcagaantgtactgacactgcctaatgacggcaaccactaggtccttccaagaatggactcgggaaggttccaagtagtgtaccangtaacagctaccccagtaagactttcttggaagaaatgtatagcagttcctcatcttttgtgtatgcccccatcttccgacaatacatctntagatgattctangggcaagtagtccccttgtacttgtcaaagtccgacaccttttgactgngaggggtgatgatatngngtactangaacaactcttctangntaacanaggcataatctttcgcttctttcatggcatn

SEQ ID NO: 58213 - DNA, 256 bp, Glycine max
  unsure (1)..(256): unsure at all n locations
gatgaatgatagtcttgtgagacatacttcanagttccacttctctacctctnttattccttcaatttcatgctcccccctctctctntatctccctctatcttttcctccattgaagcatccttccaagcttcttatccaaggctcatcttggtggtgaagctccttcttccatggcttattccctagtggatggcgcctcctctcccctcttctcctttgtcttccgctgcatctccatggtggaaaaccacca

SEQ ID NO: 58214 - DNA, 252 bp, Glycine max
tgccttctgatcgatgaaaaaatctttgttacagtgtatacgaaaaacactctactccgttgatataaatattaggcgtatgatatggattaattgttatgaccctcttataaaatatggctcgactgcgcttacgatgacattataattaaatatgtgttgcctctctatatattacaatatatttaattctttaatatttgatcacattttataatataagtcgtactcttataatacgtctatgacccc

SEQ ID NO: 58215 - DNA, 559 bp, Glycine max
  unsure (1)..(559): unsure at all n locations
attactgtactattcanacctgcgatccttgagtcacctgccgctgcagcttgaccagaatattggatggttttatgtttattctnngtgtcctggngcggagatgatggtactgcnggtgaaccacaagctgcagtttcttttggtgaggtagccatggaaaagcagagcgtttggaatgatttcgtaaatctcacaaggctattgggaaatgctgtgtaaaacacgaatgcccagcagatattaatttgaatgaagaatgtanaagggcgtgtgaagcaacgtcgaatttgcttgtagtgaacgtgctattaatggtaagtgattcgtttgggcacgttcagaatgcagtagctgctattaattctctaacagaccaatgcccagcttgcccctcagntttcaaactgatttgattcaaagctttgtaaaatatctgctatttgtctcagagcaacatgctcagtgtgacacttattcatcacagatctctgaatgtgaggctatgtcaagtgctggtctgctggtgacccgattttaaaattaatgcctatgtccg

SEQ ID NO: 58216 - DNA, 554 bp, Glycine max
  unsure (1)..(554): unsure at all n locations
atgattataccatcgancnccgnannccatagncacctgccgcatgcagctgtatcgatacacactagnngatatcantacctgattagatgtccacanaaattctcaacaggcacagtctttcatttgattctcgcatgaccatcaaaggcctatatatatgtgacttaagacacgaatttgcagagagttatgaatgctcaaaaagactcatactttgtaaagaataacatgagttttcttgagatcagaccttcctatactgatggagagccctcgcctaccactatgaatctcactcaggcttagagctctcattacagccgcgataataacggacgaggactgaatcatacttctggaattgcgggagtgaatcacaaagactagaacaccacggcctctttgacttcactaacccaagttcatctctctcgattttctttgaacgccgccacaccactcgagatatctcctgcttgaaaataagatactctgtcatactatggctagctatcctgctctcatagactcgatacgccaatacacctccc

SEQ ID NO: 58217 - DNA, 290 bp, Glycine max
cagctctagtctagataagcagctgagttgtagctacttcattcacttctctaatgactatggcatcatttctggcgctaaactgctgagagttgaaagccatcttctcaattaaatttctggcttcagcaggagtcatgtctccaagggctccaccactggcagcatctatcatacttctctccatattactgagtccttcataaaaatattggagaagaagctgctctgaaatctgatggtggtggcaactggcacactagttcttatatctctctcagtactcatac

SEQ ID NO: 58218 - DNA, 160 bp, Glycine max
aatagacctccaatctttaatggaaaggggtaccactactggaaaacccgaatgcatatttttattgaggcaattgacttaaacatttgggaatccatatacatagggccttatatacccaccacagtataaagaaccactattgatgaaagctcaacat

SEQ ID NO: 58219 - DNA, 177 bp, Glycine max
  unsure (1)..(177): unsure at all n locations
ctcanacaaacaaatcaaacgtaacaagacaattatagctgctgtttgaatacctcacccactcaagtgtatcacacaattatgtcttttctctaatgaaacactcttgccttttaccactctaattccacttgaggtcttaggcaattcaagagattatggccacaacaaagaaca

SEQ ID NO: 58220 - DNA, 598 bp, Glycine max
  unsure (1)..(598): unsure at all n locations
tgggaaannnnnnttatgtaatccangtacngcgatccttnagncaccgcggcatgcagcttttagaaaccttgaaatggaaatngaanaatttatgatagcgctttggaaagacacatctcttcaaacctatttgaaaagacgcagctcgccctatatatatgtgtgtctgaccttcaaagccagatagagagttttcaaagagaacttaattttcaaatgctatctaaaccactcttggcccaacactttgcaatctattgagaattcatctaagaacttcaacttgtattatcatctctaaaagagagaaattcctctgggatcttcaatttgtatcatctactctaaaggagagaaatctttcttgtcatctattgaactcaagtgtaatcaagagacggtgtgtctcttggaatgtgagaatcttgaataccagggtganggatcccaaggtgtgctcaaagtttganagggattacagagatagtggaaaatctcaagttggntgctngaggactggatgtanngcatggaangtgccanaccantatanattgnagttgcaattctctcttccctatctcattattntatg

SEQ ID NO: 58221 - DNA, 324 bp, Glycine max
  unsure (1)..(324): unsure at all n locations
atgctacattcatatnccagacgtgaagaggcacaagcttgaagataagactatacgaggtatcttccttgggtatagcaatatctctaagggctaccgtgtctacaacttgcaaactaagaaactcgtcatcagtcgagatgttgaagttaatgagtatgcttcttgcaattgggatgaagaaaaagtggagaagaatgttcttatacccgctcaactacctcaagaagaagctgatctagaagacccaggtgaaccaccttcaccttcaccacaacaacaagatcaagaactatcatcaccagagtctactccaagacgagt

SEQ ID NO: 58222 - DNA, 424 bp, Glycine max
  unsure (1)..(424): unsure at all n locations
agtcacctgccgcatgcaagctntgaggagcccgcaggtaatctggaaaggagataggcttgtgtccaaatattatctcgtaaggggtggagcctgtgctactattccacgaagtgttatgggataactcaacccacggcaataacttgccccatgtttctggccaacgatgcacaaaggcacgcaaatattgttcaaattaccctgttcattacccttctacctgaccaatcactctganggatgggtanngcagaaactcattcgaagaatgagtgccactcaagtctnaaagagcttcttttctagaagccgcttgatgaataagggggatccatggactgaannactaagcttctggganaatgccgtggagtttgacnaacaatgtcaatgaacaacaaaggtaccatgtgagctgtat

SEQ ID NO: 58223 - DNA, 134 bp, Glycine max
accttgaaaaactgtgaaacttgtgcgtctcagaacaaccctattcatgcacttgggcaatcaatttcgttggggaggttcatgtcagagtccctggcatgggagaagtggtccatcttctcccacaaccgcta

SEQ ID NO: 58224 - DNA, 472 bp, Glycine max
  unsure (1)..(472): unsure at all n locations
atgacttgcgctcganncatagcgactgccgctgcagctctcctctnttcctataagagggggagagaggtactanatataaaaggtccaccctcccgggagccgagaaacacctaanaatagtgagaaatttttttcgcggagagttccgcgtgtcttcggtcggtcctcggcctcacccgaagtcctgaaacgactttcaatcatctatgtcctagggccccactgttcgcgctttatttcgttcattactttcgacccctttgacggcttagcattattgagcatttctcgccaacaaaaataaataattccctgacatcaatgcacatctatattcaggaaatgagtcaccncagcagccgaccatgtaaaccaaaagagcaatatctatatatcaaaattcttagtaatataaaaaatcattcgcgtttttcgggattaatctcatttcgataaccaaggaccagcc

SEQ ID NO: 58225 - DNA, 324 bp, Glycine max
ctgaacatcttcacaaccgcggtttgttttttgataaacggtgagacgtcgtcctacgatgagcgtgcgggttgtcttatgttttgggttaacatactagatgaccattgatttaggcgaaacagcttattgtctgacgcctttatatcattttggacaggtaaggggctgggttctatttgagattctaaaaaaacaggattgccccactaaatcaagatgacggcctgatcacaagtttagacgatgatcaacttcatttaaaaacaatttttacaaatcaaggataaaacacattatctggctcaattaggtgcgatgtac

SEQ ID NO: 58226 - DNA, 295 bp, Glycine max
  unsure (1)..(295): unsure at all n locations
acttccttgagaagctagagcttagctacacacactcctctcaatctaagctcatctnctcgagagacttccttaagaagattcctaaagaagctagagcttagctacacatacctctctaatagctaagctcacctccttgagatgagatgctagagcttacctatacacaccctataatagctaagctcacccgcatgacaaanaacatgagaatacaaaaaanaagtccttactacaaagactactcagaatgccccaaaatacaaggctaanaccctatactactagaatg

SEQ ID NO: 58227 - DNA, 538 bp, Glycine max
  unsure (1)..(538): unsure at all n locations
ggcccccnaatattcttgaaccggtccttagcactgcgctcgctttaggtggctatcacccttttctttgtgctggnnacccagcccaagtggtaccaaagaaagagggcatgacagtcattcggaatgaaaagaatgaacaaatcccaacaaagacatgcactggctggagaatgtgcattgattaccgtgaactccatgaagccacaaggaaaaatcatattcctttggctttcatggacccagatgtagagaggcttgcgggacatngctantactacttcttagatggatactttaggtagaatcagatggctatggaccccaaggatcaagaaaagacggtcttcacattgcccttttggtgtctttgctatagacgaatgtcattanggtatgtaatgcattgcacattcagaggtgcatgtggccattngcaatatgtggaaaaatatcagtttcatgatgatttcagattgagcctttttgatgttctgaaaacttgagagggtatatgagcgggaacaactagtcttcg

SEQ ID NO: 58228 - DNA, 203 bp, Glycine max
  unsure (1)..(203): unsure at all n locations
acaatataccatctgtatcgataaatctacaagaatcgatagatatcttttaatcgttaaagtgtcttccaacacttggaacaactcanaagcaatgtatcaattatatactcanagtaatcaattaaagtggtcttggtcacttcttaaacactttataacagagaagtaatcaattaaagcagagacttctaaacaaatca

SEQ ID NO: 58229 - DNA, 564 bp, Glycine max
  unsure (1)..(564): unsure at all n locations
nataacttacatcagcncngaccataagcaccgcagctgcagcttgccaaaagcaacaaaanaatttttcatttttatatncacnngaganngaananancgagacgctcggaatggaaaacagaagctcgcagaaaatgcanancgcaanaactttgaactcggatgatcgattgaggccctgtatatatcgagacactccgaagtgaaagcagaagctctgagccaattccaaccacaataactttcgactcggatatccgattgagccacttaataattcgagacgctcaatattgaattcagaagctctatgctaattcaaatgactattactttcgactctgatgttcgactgagtcattttataatttgagacgcttcaaagtgaatgcangagcttctaccaaatgtcaaagaccataatctcttactcggatgtcgattgagtcccgtaatatatctagacgctcgaaattgatacagaagctctggcaaatcagccacagtacttctgctcaatgtccagtgagcataaaaataatacctcgaattgatatgacg

SEQ ID NO: 58230 - DNA, 152 bp, Glycine max
  unsure (1)..(152): unsure at all n locations
ctcaaagcttctcgttgacattcaagtgtctcgatttattacgggactctatctatcatccgagttaaaagatattgtctcttgaatatgcttacatgtactgtgttcaatctcgtgcatctctatatactgcangactcactcaaactttc

SEQ ID NO: 58231 - DNA, 171 bp, Glycine max
  unsure (1)..(171): unsure at all n locations
tcacatcaacattgtcctctgtcaattgtntatcgcaaatcattattaaaanaaatcatatgcttaatntatgtactttgggttatatatttacggaagctgaaatgaggactgtgagtgaagaaacaaatggcagagtggcatgtgttagcattatgtccttggttatgt

SEQ ID NO: 58232 - DNA, 293 bp, Glycine max
  unsure (1)..(293): unsure at all n locations
tatgaacgtgtcttaactaattaaaaaattatccttcttaatattactagattcaattaagctttacaactaagttatgagaaagtgaagaacagaaactattacttagacaaaagtgaagcagaaagtaaaagtacacagcggaaaatatagagtgtatggaagaagaagacaaacacaagatttatactggttcggccacaacccgtgcctacatgcagtccccaagcaaccaccgattcttgagatttcaataaccttgaaaatccttacaagcanagatcacaacggat

SEQ ID NO: 58233 - DNA, 407 bp, Glycine max
  unsure (1)..(407): unsure at all n locations
tatctcttttatcttagtgagagtgattctcctaaattcttgagtgattcaagaacaccctgactgtatcaaaggacattcacaaccgttgtgtgttgccctcgctggaaagagagattctttccttcctttcatcttcacccttgttctttcataccacaattccagaanatccacctctgcccagaattatctcgtggccataactcccatnntacgcactcaaattaagtgattcttgagcctaaatngaatntcaaaacgagacctttcacctcgttgtggaatcacctcatgtggagccctgtagcttcagttattgccatttctatatttctggccagccaccacttaaccctacgtttaccatcccattcatccattttatgccaagaaccaccttatta

SEQ ID NO: 58234 - DNA, 71 bp, Glycine max
ctcgggtgactctagctgtggcatcaggacctgggaaagtgcattgtggggatttcaatccggcactttaa

SEQ ID NO: 58235 - DNA, 467 bp, Glycine max
  unsure (1)..(467): unsure at all n locations
acatgcaaantattattctctttttctatcataattttacatatatatttctttggtggttgtctccctttattnttgncttcttattagcattgtgtggcgagtatgtttaacttgagggtaaatctaaacacgctcatgttaaaactttgagaaaacaaataaatntagttaagtcaatttgagtattttgttttttgtaaanatattttaatgtgctaaaataatgtttgttatnaccaattttgttatttaaaaatcttattttgaacaaaataactaaaagggttaatataaattcagttattaaatttattttgtgtcatgcagaagagatcgtnttgataattatttatatagtcaatatttggaatatataactattaatattctatatgagnaataatatatatctattannatattcatgtcgactgangaatattnataantnaaaattaatttat

SEQ ID NO: 58236 - DNA, 169 bp, Glycine max
  unsure (1)..(169): unsure at all n locations
catcgactttgcactgattcttggtatttaatttgctttcaactcactatgcagagtgtagagtagcttgttcaagtgtttgatagaatggaatcaaagtaagaagtggaacctacacattgagtntcagtacaacagcattaactaataactatccttataatacagt

SEQ ID NO: 58237 - DNA, 272 bp, Glycine max
  unsure (1)..(272): unsure at all n locations
tccttagagactngcctcagcaccttatctccgagactgaggattattgcactatgtgccttctacagtaatgctntcttatccncatcacccatcatcttnttcaagttggcttctccatcaagtgcttccaccaggccctgctgaacaagaagagttctcatcttcaatcgccatagcccgaaatcattttgccctgtngaattttcaacctcatactnggctgagcccatttcttgaatcgaacctcaaaatgctctatgctcaccgca

SEQ ID NO: 58238 - DNA, 436 bp, Glycine max
  unsure (1)..(436): unsure at all n locations
nnaatgatgtgcgtcagatctctgnagcacctgcggcatgcaagcttgancacatataagtgagggcanacccaatattcttattctttatggtttggaataaagngtgggttcattgtcacttattgtggtggctgaggttgtggtgtaatctcttatgttacccctctgatgacaaattgatcaactttgatctgaaataatgtatcatccttggtttctttatggggtttctattgttgtcttcctttgtaacttatatatattcactctttgttattcttgagcatttttttaacttttagacaaatttttctttttaaaaatatacaattggcaaaaaagatgaaaaattatttaattaactattataaacaattatatgagtgtnattaattattaccaattatcatcaatgtatgatgagactattttt

SEQ ID NO: 58239 - DNA, 360 bp, Glycine max
  unsure (1)..(360): unsure at all n locations
acctagaatctgagaataacaacacacatcatcttcctgagcatcatgaactngtcaatcttcaaagccttggtcataatatctgctacctgcaagtctgtcttacagtgccttcaaatcaatttgtctttgttcacttgatctctcaggaagtggaacctagtttctatgtgtntacttctgccatgtgagactggatttttggccaaatctatagcagatntgttttccaccaacagctccacagtcccactcatcttcacattcaattcttccagcaagtgtgtaatccaattggcctgacaagcagcactacaagcagaaatatattcggcttcacatgtggaaagagcaatcacg

SEQ ID NO: 58240 - DNA, 580 bp, Glycine max
  unsure (1)..(580): unsure at all n locations
naatgtcttcgcntcgatctcaagcgacgaggctgcagctatgcatatgctctgagttgattataattctacgcttattaccacgtaattccgcaataaagggatcaccataagaagctacacctatcaaagtaaatattagattattcatangccaaagacagtgtccacaatatctgaattaagagacaacctaaacacattatttgcaaatgaacatanataatccaattttgccaagttagaaaattgaaaccaatgccgtctaaatgaagatacaacantagggtctttcanatcanaataaaaacccgtacataataataatctaaaatgccctatagcttccaccgatttaccatctncaacatatatccatctttcagaatcaattggcttctgatagcttagacaaccctttattgaaacattgatgttagtagtgacaccagaatctaaccaccaagtggttctacgtattgaagctaaatgacctcagaatagaccaaagtaagaacatacctttctttgacgctagcatgatattgatacattttattacatgtgtcaggctactgag

SEQ ID NO: 58241 - DNA, 255 bp, Glycine max
taacataaagtaacatgttcagaatattatgaaaataataacgaaattcatgctctaatagtacacactatcacaacattgtgtctcagcagtctctagcatgatgttctatacagacattcacctagaccattattctcatgaacataagggtcgatatcatcacaggattcagacacaaacgacacacaataagtgagttatctcattcctaaataggttaaagtaaacgaaaacgcacacacacatataata

SEQ ID NO: 58242 - DNA, 562 bp, Glycine max
  unsure (1)..(562): unsure at all n locations
atgtctgtgctcgacctgagcacgcgctcagcttattaaatatgctgtttcatatgctttattgatttttcacaccaacccatcatcaaatattaatgtggatttaatattaatcgatggcaatatatgttagtaggtatgtacttaatgtgaaattttcaaaattttattattgccgcattaatccaattcaacttaatgtgagtaatacattggtcttcaatttcactcaataaatatatgacttatgtagaagaatctagcaaatgaatctagcacaatcaaatatataaatagaaaattacattagacgatggtaattaattcttcttcatcatgatcattacgattagcatgaacgtgattagcttcttcttctncgacaacattangagtgatntgtatggacagaggactaacatanngcgtcatgtatgaatcatcatcttctacattaacaccaaattgtnttgccctgtagaaccacgcacccaacttcatcatcaaggtcttgcacgtaaaatacttgtctagctttgtctgcatgatgaaaggtcatgtg

SEQ ID NO: 58243 - DNA, 172 bp, Glycine max
  unsure (1)..(172): unsure at all n locations
gacactgaatctatcatgtgatactctattatgagcctaattatttcaagtntttcccatgaagtaacaaattaatattaaacacattagtgtttgatcaagttctttaagaaaataagaatgtactgaataaatgatttctgattattttgagaaactactatgacgaata

SEQ ID NO: 58244 - DNA, 355 bp, Glycine max
  unsure (1)..(355): unsure at all n locations
atcagatgatatgtcatacaacccaatgctagaagttatctcaactgtcttgggacttggagctctaccaagcattttgaaaatgtcatgttgaaagtcatcanaatccaccccttcttccatctttgtggtaatactaatcctatttttcttgatttcgatggaatnnntgcacttgatttgcctaacttattttgcttcatctttcctttgccttcaaatctccttcatcttatattgctttcgagtgcttgttntgtgcatcantccttttctgttgagaatcctgatcgaattttgttgtcttcaacactacttctattgttaacatctctacaactcagttagttgacac

SEQ ID NO: 58245 - DNA, 208 bp, Glycine max
  unsure (1)..(208): unsure at all n locations
tcagctatctgtacanatggtaattacatcgcttgttacatcgatttgtgaatattaaaacgcggtggcataatcgtaaataacatgagtgtgtcaacatcatnttttcaacaaccgatgttaatgcacatagcttaatataggctgtttgaanatccgatgttgagagatgataagttaacattgattgtttcaaaaaaccgatatt

SEQ ID NO: 58246 - DNA, 289 bp, Glycine max
aagatattcatctcaattagcgcgacaagaatagtaccctcattaaatatggcatatgaaacatttagagcgctaaaacaacacaagacacatcttcattatgtacggtaaaaatctttgaaaacataatataaagtaaaatcgggtgacactcgtataaattgttatgaacactaaaattaaaacaggaaatgtgtctaaaaacagttgctcaataatgactaacgagtaaccgtattatgttaaatagcttctaagactattacaaagttaactctggcacttacat

SEQ ID NO: 58247 - DNA, 577 bp, Glycine max
  unsure (1)..(577): unsure at all n locations
tttattataccgttgagacccgcanccnanagngacctgccgctgcagcttgncccacaagaaggccctctgtgtaaattcttcttgacaacngagcatacttactacaagagctggatggcacaacacattcacgaacatggaatgccacccacctgaagttctacttcagctgacttatacttcaaacccaatggtgtactcttnttcctactcaggtctttcattctaaaaataaaaaaatcaaggtttaggcttaaagggttntaacaaggctggcgtaacgaaaggagtctgtactcaatcaaatacattgaataaaattctacataccttccttttcatatttctcttatcaagaccagaacatacatagtcgtagcttcaatgctcttaagactcagcgtctacccttggtgagcccctcttctagcactcagtcttcagtacgtgccactttgtaagaagcacttatgcagaagtatacattgtgtctccatatatgtaaccacgacatgatatcacacgagcaccttctgagcctcagtcatgccaccatgatcgtgacatgacaccg

SEQ ID NO: 58248 - DNA, 301 bp, Glycine max
  unsure (1)..(301): unsure at all n locations
acccttcataagtcatgagttctctctcttctacagatgatggcatctttcttcatttcttacccttttgcccatttaatattgatggcttattgcaataattngcagtttatattgggctatctacctaattatgtttctatctaattcaagaataatgaacattggcttatccggatttggttgggactgaaaggcgaataagcactctaccttattaattctatatgaaattccatttatttatgtgtcacgttattcgtttgccaatatttataggccatgcttgaggacttttaat

SEQ ID NO: 58249 - DNA, 169 bp, Glycine max
gagaaacctccttgagaagctaaagcttatcaacacacacccctcttatagccaagctcacctccctgagaatctatctggagaaacttccttgagatactaaagcttaccaacacacccctttaataggctagcttacctccttgagataagaagctagagcttagct

SEQ ID NO: 58250 - DNA, 322 bp, Glycine max
  unsure (1)..(322): unsure at all n locations
gattcaagagaagactcaagatatgccagaacctcaagaacaacatcaagattagtattaaaagattttttccaagaaaagattgaataacacaacttgtccaaaagaattgttcaaagaaaaatattntaccagagcttntactctctgtgtaatcgattacccatagggcantaatcaattaccagaagcctaaaatagttntataactattttacaaagtagtaatcgattatcatggacttggaatcgattacttatctttttgaacgttgaatttcaaatttcaagagtcacaacttggtgataaatattttcaaaa

SEQ ID NO: 58251 - DNA, 242 bp, Glycine max
  unsure (1)..(242): unsure at all n locations
tggggcggtccgacctgatccatttgatgtcagacagctatcatcagactacgctccatcccttatatactgattccgagtacatcaagcgtttagtgctattactgctaaaaaacaccncccgctgcatttattatactgggacatataatcttttgcgcaggaactatacaacggctgatgactgataactaggcatataccttgtcttcgatattngtcttgagtactgggcaataatt

SEQ ID NO: 58252 - DNA, 435 bp, Glycine max
  unsure (1)..(435): unsure at all n locations
tgcctactatngatatatagcattgaccatacatgatactagctagagagaatagaaactattgataatagtacactccataggtagtaaaccacaaaaaactntagtggcttgcataactntagttaaatttagcggctnttaatgcttatcctatatataatataatgacataagtatttctaacttgttaccntctaagagattccctttggagtccttactggttngttaatcttttagctgaaacattngcatttggccatgaggttgatacaagggttgaatatttttataagctaacattngtggaacantcctaatgagcattngagatntgagatcatacctcaatttacctatgactagaaatctggcctagaccccttttgttcaaggcatactntacatgtagttcactanatacaatctatg

SEQ ID NO: 58253 - DNA, 575 bp, Glycine max
  unsure (1)..(575): unsure at all n locations
tgggccctgnnnnnntttaatgatcctttgagaccgngatccttaagtcacctgcggcatgcaagctngctctanattacatngangnttgtannttattgatgagnngtatatgccattntgtcttaagagtaatgtcccactggtaaaactaactttccgaatgttttgcttcgcangaatggccccgaggaagcttgccttanagaggtccaggaaggacaaggctgncgaangaactatttccgctccggagtacgacaagcaccgctttatgagcgctgtacaccagcagcgcttcgaaccatcaagggatggtctgttctccgggagcgacgcgtncagctcanggacgacgagtatactgattntcangaggaaatagggcgccggcggtgggcaccactggttactcctatggccaagttgatccnaaatagtcttgaatttattgcatgcttgccaacaagganggcggcgtgaatgaaacctggctagggtcaccgattctgtcatcgccacgttcataccctccctatagcgatggtccgagatgtcgtaacacttatcccacc

SEQ ID NO: 58254 - DNA, 216 bp, Glycine max
  unsure (1)..(216): unsure at all n locations
tgaaatgctacaactgatatcacatcnagacacaattcttgggaccatatcgactactgttaatacactggcaatctatctgcatcagtacagtttgcgcgtgcgngattctttactgatgatatacattgagcatatttatatgagttttctatacacatttaatgttatcttgctgtaacgttgaactgattgatcagaacttcaggatactct

SEQ ID NO: 58255 - DNA, 305 bp, Glycine max
  unsure (1)..(305): unsure at all n locations
ctaagctccagagaagctgagctagctcacacacctctctaatagntaagtctcaccctttgagatgataagctagagcttagctatacacactccctataatagctaagctcacccncatgccaagatacatgacaatacaaaanaagtccctactacaaagactactcanaataccctaaaatacaaggctaaaactctatactactagaatggccaaaatacaaggcccaaaagaaggaaaaacctattntaatatntacaaagaagactggacctaaccttggcccttggactcatctatc

SEQ ID NO: 58256 - DNA, 494 bp, Glycine max
  unsure (1)..(494): unsure at all n locations
atatctatacatcaacnctcagcgacgccgctgccagctttttctctgcngcataagcactnaaaatgtttttttcattctgannatnnnanccactccctttagaaggtaaaanangngatcatagatagatttaatgctataccctagctgtttaatgggtttcatttcttaatattcttaattccttatttctctcctatccatacatatgttgcttgtaatataaatctcctttacaaattatcatcttcaccactgaataaagttaagtcaactactgggcttcatttgctaatataggggaatttacagtcaattgcatatcaatactgaatcatgttctaataaagaaaggaaggaaatggcttcatgaatacttaatgtctttaaatgacaaaatgagcctaccacaaatgttgaaattgtagccattatatcataggagccctactaaaagtgatgttataccactcattatntggacctcttct

SEQ ID NO: 58257 - DNA, 300 bp, Glycine max
taatccaaacctaataacaattttttatttgtttaagtgagaaaagaaaagtcagtttattcttcgaaactttcaactattctaaatacaaaaaggtgggaactatcaaaggggccataaaatgttaatttcaattggccttcaaacttttaactgatgtttgagaacaccactcttggcactgcgaactctccctttctattatagcaagggtgttagatctatcccgcttctttatgtttgtgaaaatgttccaaaatcaactgggtccacctcaacttctacaatcaaagttcgctc

SEQ ID NO: 58258 - DNA, 239 bp, Glycine max
  unsure (1)..(239): unsure at all n locations
gccttctaaccattaagaggtcaccttcttcgtgggggtagacttcctcattatactcttcaccccttacttcatcttcacttccactagaggaagggcaagaagcagtctcctcttgctactatagattcctgaccctcatgaacatatttcttcgtggcgcattgagaggcaatgtgacctctcccaagacatttgaagcatntaatattactagtcctttcttgggaactagtctt

SEQ ID NO: 58259 - DNA, 226 bp, Glycine max
  unsure (1)..(226): unsure at all n locations
ccagcttgctgtgtcgcctgttcccctgnacacttgcagccatcttgctgagctcttatgtcactcgacaaataacataatgtctacagtggaccaaactaccctactgcaagcatcaatacaggggctaaaacattcccatgctggacatgctgaggcatatggtcagcctcttgtaaagtgtccttcgaacattggcaagaatttctctccatctatcttgact

SEQ ID NO: 58260 - DNA, 254 bp, Glycine max
  unsure (1)..(254): unsure at all n locations
gctctctctgtagtaatggtggcgtctttatactctctagaagtcccttccggttgatctattangggtgctgagagttagagaanaaggaacataaatatttctgtaaaactgctccggggtttaaagttcctttatataatgagaaatatgatgacctaattcttattcttttatttaaaagaaaaaccaaaaggcactactattacatatcttgccatcaatagagccgacaggtcaacctcttccacatg

SEQ ID NO: 58261 - DNA, 144 bp, Glycine max
  unsure (1)..(144): unsure at all n locations
tatcattcttttgatgctgaataagaccagtttaaactccacctnctncaccgaagcaatatctgtgacttcacaatgtcgatctcctccccaagtagctacccaattcccacactatgtgtaatgtgagaaatcatacttaca

SEQ ID NO: 58262 - DNA, 506 bp, Glycine max
  unsure (1)..(506): unsure at all n locations
atgtaactcncgtgcagnctaaggcacccacccagagggaagcttcccaagttncaacttcgaacacgggtcgaccgggcggcaatttcaacacgacaaggaacttcccttcaaggccattgccggaattcaccccgctcccgatgacgtacgaagatcttctaccatccctcatcggcaatcaatttgcccgtggtaactcccggaagggtcctcgaaccccctttcccgaagtggtatgaccctaatgcaacttgcaagtaccatggnggtgccccggtgcattccgtcgaaaaatgcttggcccttaaatacaaggtccaacatctaatggatgccggatggctgacattacaagagggatcggccaatgtgaagaccaacccgctcgcaatcatggaggggagcaagttatgcangngaattcgattgccccacacgtcccaactttatagatgtggcacccctagaagttatcttgacgcccataaaaggacgtgtattcg

SEQ ID NO: 58263 - DNA, 99 bp, Glycine max
aacaagaagaaaaagaagattaagagccccttaccaaagctttgatggaagaaacctcaagagtacttgtatgaagcttggaaaatgaagaagaatgac

SEQ ID NO: 58264 - DNA, 294 bp, Glycine max
  unsure (1)..(294): unsure at all n locations
caactcctggctcaagctctttcatgagaaagttagatccaagtggtctggcccccttcaccatcaaggatgtgaagccttatggagcaatngagttgatggacccctcatctaccgacctggaacacagctggatcgtgaatggtcaaatgctggagggttacaatggtggtgacattgagagattgaccaccatcatcaaactccgtgacctgtgagggtgttatacgtcaagctagtgatgttaaagaagcacttactangaggtcacccaccatttctaacattttcctt

SEQ ID NO: 58265 - DNA, 132 bp, Glycine max
aagcggtttcatttctcaatatcgagcgccgtcgaatagtatgcacctggatctgacctcggagagaaaagatatggccattcgaagagctcacgacgcttcattggtcaatttcgagcgtgtcgatataac

SEQ ID NO: 58266 - DNA, 189 bp, Glycine max
  unsure (1)..(189): unsure at all n locations
ggctgcggcttccggtccttgtcatcttcctgttctacattttgataaccataaatcaaacttaacataagcaattaaaccaaaagcaacaaagaaacatattataccaacaacanaaaattgaataaccctagaaaatgaacgcctcaatcaaacgcaatgtcacaaaatagaaaagcagaacctggc

SEQ ID NO: 58267 - DNA, 443 bp, Glycine max
  unsure (1)..(443): unsure at all n locations
tctctaccttctcttccatcgttgtttcttcaattttctccatgtatctcctcacatgtcttgatctaaatggttgtaacatgattctttatagtatccaccaattaaacttgctatagaagcaagatatgattgtctatggttcaaatctctagttcttgttcttgaaccatgaattgtcgtgagtttaggttcctttgagttctcgctagtattttatgtggctgagacctaaaccataaaattcttacacaaacattatagtagaagaaaacctcaataatctagagtgacttgncacctatcgtagtttgtataaagtcatgttagtcatgaacttgcacatagaattttatgtgngccgaattatattcttgttcttgctactcattgtcatagtgatgaatctttacctatactgattggtcaattttatgtaatag

SEQ ID NO: 58268 - DNA, 106 bp, Glycine max
gctcaaagagttaaagatgttcaagatataatcaacaacacttcaagattcaagaggagaggtgaagaacacttcaagattcatgaggaaagtcgatttcaagaat

SEQ ID NO: 58269 - DNA, 364 bp, Glycine max
  unsure (1)..(364): unsure at all n locations
agagcttagctacacacacccctctaataactaagctcaccttcttgagaagaatcttaaagaagcttgancttagctacacacacctctctaatagctaagctcaccttcttgagatgagaagctagagcttaactacacaccccctantatagcgtagctcactcccattccaaaatacatgaaaagncaanaaaagccctactacaagactactcaaatgcctgaaaacaagcaaaatctatgatggtattatttctctatccttaaccctttgcaccaattaatactgattactctaatgtaaattatattcagttataattggtcactgacaatttgtgtntaatcattcagatatata

SEQ ID NO: 58270 - DNA, 379 bp, Glycine max
  unsure (1)..(379): unsure at all n locations
gcttagcggaccanatcagcctcagatgcaatggttatgtgctaagcgcttgagactcttggcttagcgcatgaccaaagatgcgcttagcgcaaggctcgagcttattgaaaggaatgtttttcagaacaatgttctctaagctattcttcactccttctctcacaaaantgaaacccttatatcttgacattaaagataggctgatatactcctatgtacagattatgcaacaagttcccaatgatctaatgcatganaacaaaaattacagaaattaaaactgggttgcctcccacgaagcgcttctttaacgtcattagcttgacgcttagcttaatacctctcaggtggcatgaaagtcacatagaacacatct

SEQ ID NO: 58271 - DNA, 115 bp, Glycine max
tgtgccgggcgaaaggcacggaacaacgagttttggagacctgaacaacgtggagatctaactaaaaatggaaggggaaccaagcaccaataatgagaaagaaggcgggacacgc

SEQ ID NO: 58272 - DNA, 292 bp, Glycine max
  unsure (1)..(292): unsure at all n locations
tctntctcaagggggncaatctgagcaactctagccatataatcaacatgaacacgtgcaccatatatcttcactttgtctgtgtccatggcgtgtntgccaccaatatcttcgcattctctatttgtttaggttgtccaataccaacttttntttaaggatgaatctaaccagaaaaaagataaaacaggcaaaaatatttcttttacccagagtaatgcaatgataagcaatgctcggaaaataaataacacggatactaactgcaaatattcattatgtaggtaagtgt

SEQ ID NO: 58273 - DNA, 577 bp, Glycine max
  unsure (1)..(577): unsure at all n locations
tgctgtgcattgagncncgncgatcctagagacgancggcagcttgcangctgntgatacaactgacataancntctgtctttttatatattgtaacaacaaatagtagaacagatagtgtaacagaactaaagaattctctctggatcaccatactctccaaagtattcaatgatatgtacatcgtcgaaatctaatagaattgcgcaactatgatgcatagataccatacatggtttcaatccaataccatacatatctgagttggaaatacaattactctacaaatatgtaacaccatagatattcatctagatatctaagatattgattaaaggtcattaaacatattacctatattattggaactgtgaattcaaattaataacacttcttgggccatactaaanacaaaaataaaagtataatcatcattattaactcctattgctaccataggaaaatatcaactcattctttcttgagatatcctaaagaagaaattacttattccgtgtattacggcatcattttattgtttctaacatacatctccatggttatgtgcattcatacg

SEQ ID NO: 58274 - DNA, 347 bp, Glycine max
  unsure (1)..(347): unsure at all n locations
attgagggtatatatatntagcagaaaataaaagttacagcagcaaaataagattgagggtatctatattaatccaggctctataacaagagaagtgctatggtatctntagaaatccaagtgtgggccaataagcacaccaagaccattataaagaaggagaataatggaggaagaaagaagtttcagtaacaataccacaatccttgaattttggagggtaccatataatttctctttagttatcataataacaaagggtcgtctgagaattgaaaactaatngaataaccaatagtcgccaataatatacacaccacacaatattatgtgaatcttctcctcat

SEQ ID NO: 58275 - DNA, 524 bp, Glycine max
  unsure (1)..(524): unsure at all n locations
nttttgctgcntcgacncngannanaagcgnctgccgctgcagctnnnnnnaagcacacgnnggtgttatattttcttcttccacggccnanaccgcgaggggangggggcctcccctcacaccctgctcctctatcgttcgctataactccatgggtgaaaatcaccattgaaggaccttattgaagctcacagatcaagccttcatagaagcttctcaaccaagcttccatcactcatgaatgtcatgtttgaatgcacaaactatttactggaacaattcgtggtacatttcctgaccagatagggatgcacaactcgctatgcttcttttaatgctatctattgcaagccttgccctacaaatggatgaatggaaatgggcttcattggcttatcaaggagatgattttctcatattttgaatactggtacttattgtcattgcgagggacccgtgtgggccttttttcgcggtgtcctctggcgaatatagtgaactggatcccgcctcctctccctct

SEQ ID NO: 58276 - DNA, 257 bp, Glycine max
  unsure (1)..(257): unsure at all n locations
tcagcttaacttaaagagatagttacaatctccattcatatctaaaatcatatacaattaacttcacaagaagaggaggaggaggagtatntatatgcaagaagtcatggaagaaggcgaagaggtgaaccaagaagagataatcattctgggagcattaagatgacaatccctacgtttcaaggtataaacgatcctaagttgtatttggagtgggagagaaagggttaacatatgtttgattaccatattattct

SEQ ID NO: 58277 - DNA, 327 bp, Glycine max
  unsure (1)..(327): unsure at all n locations
tcctctaagtcacctgccgctgcagctaggaatgcattggcacctattttgaatctttatgtctgacctacatataagaaacagtctcactctcccaattatacaaaatcatattcatatatcattgnggcatttcaccgagcactagatgggcgcacattgggacatatatcgcaagagaatgggagcaatgtggcatgccccattgcttcataatacaacctatgcctagagtcttctattcaaatcctcaactcaagaagacaagcatcagagcaacccacaactgtctcacatatataagcacattctcacactttatagcac

SEQ ID NO: 58278 - DNA, 213 bp, Glycine max
  unsure (1)..(213): unsure at all n locations
gctggtgaatgccatgttgatgtgtagacatacccattctgtttatggttnttgtgatgatgnttgtgatgnttgtatgttgaaattgctcatggaacattgttagagatgaaaggtagagttaacctacggttggaaagtgagaatgtggtgttatgagtggaaaaagagtgacgctttgagaagtggaaggctaagtctgaattctgtggt

SEQ ID NO: 58279 - DNA, 583 bp, Glycine max
  unsure (1)..(583): unsure at all n locations
ntatatnccattgagaccccgcgatctctagagtcacctgccgcatgcaagctngaaggtaggagaagatgagtggagggagggaatagatttgaacaaaatttaagagagagaagaggcagaatgaggtatgaacttttgagtctaatttctcaaaaatcaaggtgaaaaaatgcacacacaatgctcttatttatagcgtaagtgtcacacaaaattggagggaaattcgaatttctattcaacattcactcgaatntgaatttgaatttaaaatttgtggaccaaatttggagccacaaattcactaattatgattagtgaaatttagctatgggttatcccactaatccaagatcaaatccaagaatcttcactaagtgtacttaggtgtcatgaggcatgtaaagcatgaaagacatgcaccaacgacgactattatgatgtgacatatggggangcaagcaaatgctcacctctccctatgctggtctgacattaantggatcggtacggctcctcctaattaagngaagttttaccaaccacacttccacaatcatgtaagtatggactcatctcg

SEQ ID NO: 58280 - DNA, 277 bp, Glycine max
atctaagcttagtgaagagaactcacataattaatatttcagcacgaatcataccaacatgatcatacactttgaatatgacctgaatcattgaaactttaacatttgtctgtatcatacacaattgtatcacaccaaataaactttggtaagtttgcaaactattctttaagttaaaaactttaaactatctgatgatctttctcattctgaacttgatctgaatctgactgatctgaatctgactgatcgttatactttgcataactaattattt

SEQ ID NO: 58281 - DNA, 408 bp, Glycine max
  unsure (1)..(408): unsure at all n locations
gcttctccttccacgacgtattctgtagtgaatgacacctnctcttatctctctttctttatcttctgctggaactccatggctgaaaaccaccattgaaggaccttattgaagctcaaagatccaacctccatagaagcttctcaagcaagtcttcatctctctgatgaagagtacataaagattcatagctttagaagtgcaaaacaaatgtatgacacattagctcttacgtatgaaggatcgtcatatgtgaaacacaacaaactcagcttattaacacgtacgtataaactcgtcactatggaagatggtgaagatatacanaccatgcttganatcttctagggacctatttanatgaattacgatgtaataatagaacttttgataattatgataacattg

SEQ ID NO: 58282 - DNA, 289 bp, Glycine max
  unsure (1)..(289): unsure at all n locations
atctgtattgcatgacaaccttcaccggaagccgcgacagaatttccacgactgaatcttatattattaagaaactcataaattctactctaatcantttatgagttagtttaatccttgtctggttatacttacatctaacattaatatctccgtataattttgttttttaagcatatgagacatactagatatgtactcatcatatatagttcataactaacaagacaatacacatcatatcattaatcaacatcaacacaaagaacaagaaatgtacattctcctc

SEQ ID NO: 58283 - DNA, 378 bp, Glycine max
  unsure (1)..(378): unsure at all n locations
acatcntttatcatagnaggagtgattctcctaaattcttgagtgattcaagaacaccctggctgtatcaaaggactttcacaacctttgtgtngtgccctcgccggaaagagtgattctttccttcctttcatcttcaaccttgttctttcaaaccacaattccagaanatccacttcttgcccagaatatctcgtggccataactcccattgtacacangtcaaataagtgattcttgagcctaaattgaatttcaagacgagacctttctcctcgttntggaatcacctcatttggagccctgtagcttgagtattngccattctatatntctgtccaccaccacttacctacgtntctcatttatatttattta

SEQ ID NO: 58284 - DNA, 453 bp, Glycine max
  unsure (1)..(453): unsure at all n locations
atgactcgcattgatctncaagcaccgccgctgcagcntntaatgcatataagtaaattaattttcagtgtttttgaccaagttattttataataacctattgtgaactgcgtctttaaaaaacattntcaaaaatggaactaccaacataggggcttattacaatatggcattgagccaaaaattattaatcaacttgtgtaacatcgcaataatgaaacaatcaaagaatttgacttaatatatcaggtgacataaatatgatcatgatcatctagccaattttatagtgcctatttttttacttatgtcataaaagttttctttcagattttcagcacattgcctcataaaaactgaatctattatagtagactttaggaattatatgcaaaaatattaaaatcctggcaaaacactaaatgtttatatggaaaatctatcccttcttaa

SEQ ID NO: 58285 - DNA, 566 bp, Glycine max
  unsure (1)..(566): unsure at all n locations
cgcncccgnnnnatgtccatgatacccttgatcnccncgatctctgagtcacctgcggcatgcaagctnntgctacanactcttcaatcccctcaacanaattattttntcanaccngttttacccactnnatacatctatcatacattccnatgatgaatttcaaaataaaaaccttggatgttagtcatgcctactcttagagtgatctncattatataatggtagccagaattattatcatactttatgtgaaaacaatggcatacatataatggttgactttctacactcacaagtttggaatataataacataccaccatccaatatatatataacttaacacatttagtataaaaatttcaaacagtcaataaaagactcactaacctaaacatagaacctagttgagtataaagcatcactcaaacagactactatgacctgatataaagaaaagaaaaaagttaaatcatatctaaattttacactttatatggntagatganggaagaacgattgtattatgttttaacatcactcattcgatgttatcttgcttct

SEQ ID NO: 58286 - DNA, 117 bp, Glycine max
  unsure (1)..(117): unsure at all n locations
caacngaattgtagatttaaactacgaatngngtccaaatatntctaagcacaaacaaactagtacaaatctagctaaattgcatcaagttttctaaaaggctatttagatatgcat

SEQ ID NO: 58287 - DNA, 170 bp, Glycine max
tgctctaccttctctttcattatattctcctcttcatatttctccatgtatctcctcacatgtcttgttctaaatggtgttaacatgattctttagagtctgcaccgattaaactcgctatagaagttagatttgattttctatggctcaaatatcttggtcttgttctt

SEQ ID NO: 58288 - DNA, 273 bp, Glycine max
  unsure (1)..(273): unsure at all n locations
ggagagaagttgaactttgagttgtgtctcacaagactctcattcatcanagttacaacangtgttacacatgcttctatttatagagctagatagcttcttgagaagatntcttgagaaaaccttcttgagaagcttcattgagaaaacttccttgagaagcttccttaagaagaatcctaaagaagctagagcttagctacacactccctataatagcttagctcacccccatgacanaatacatgaaaatacaaaagaaaagtccctact

SEQ ID NO: 58289 - DNA, 73 bp, Glycine max
atacagaattaaggaatgtagagatgtatcatcaacttacccgatctttgtggatatatactttgaaaactac

SEQ ID NO: 58290 - DNA, 311 bp, Glycine max
  unsure (1)..(311): unsure at all n locations
gctctatccaaggctcatctnggtggtgaagctccttctccatggttattccctagtggatggcacctcctctcacctcttctcttttgtcttnccgctgcatctcatggtggaanatcaccattanaggacctcatttgagcccanagatctagcctccatagaagccccacaagcaagcttncatcaagtggtaatcagagcacaagagcttcaagtangtgcctcttaaacctccatttattnttttgctgtacattctcttccattnggtgtactnntatttntctccatgtatatcctcacatgtc

SEQ ID NO: 58291 - DNA, 208 bp, Glycine max
  unsure (1)..(208): unsure at all n locations
gagaccttcaatcctattacgcaacgtggcggacaaaagtgggcagttaacttgaacggtcattattgntaatgcggaagggtatttgcgcttcactatccatgttcacatattatngcagctngtggttacgtgagcctgaactactaccaatatatagatgttgtttatacanatgggcacatcttanatagctactctgcacaat

SEQ ID NO: 58292 - DNA, 270 bp, Glycine max
  unsure (1)..(270): unsure at all n locations
gctataaagtggtntatgacccttctcaattctnntttaactcatttcattaaatntcacggngaaacttatcanaagaagcacttaataaataagcgaataatcttatgtntacctaatgttccgtanatgataatataattttggatttcanaacataagtagaggcaagcaaaaatggcatgcgaaggggattttgctccttcctctcttgaaaatgaactanacaattaaaatttaaaagaatctctttctctcccttcccctaca

SEQ ID NO: 58293 - DNA, 362 bp, Glycine max
  unsure (1)..(362): unsure at all n locations
gtggcaggaagtgggaaccgcatcactgatcacccacagaccagcagagcacaaaaactcacagacatgctgccctcaatgtattgttgggaagccactacaattactatggtttagggtccaatagaattaagcagaaaatactaaattcaagcgaaatgattatacatttgtgcaaaaatcttgtaccaaaccttgtcaaaactgatgcccgtggtctccagcatcttcctncttgccctactttatctcttattaatttctgagcctgaaaacaataaatcacagtattgatatacgagataagttaaaactatttaagaaaatattctcatttatctttcatgaacaatttacggact

SEQ ID NO: 58294 - DNA, 237 bp, Glycine max
  unsure (1)..(237): unsure at all n locations
tcaattggcctttttantacatgcgcncncacattagatggtcgaatntagaagttacaagttcactgganaatatcccacgactntattaatgatagtagcaagtagtctcacttgacacacccgttatacaggggttatcaagtgagagcattatcttattataaaaaggtggaaggggactaattttgatcattcaatctcaaatggatagtgcaaaatataaggtacatacat

SEQ ID NO: 58295 - DNA, 281 bp, Glycine max
  unsure (1)..(281): unsure at all n locations
tctcacgtacgtncaatcggttcatatgcctttataacttgttttgttngagcatcattnnggcanaagaaagagagacaataagcttaacaaagtctggtactatgatacccgtctttccccataaataatnggatagntaaaatacttgtactggtaacttgtgatgactngttaaagatagatattcgatattatgatantttatctacgaatatttgtgagtgctaatttnttttgcctaacataattcatttcctatgattacctctaattaatca

SEQ ID NO: 58296 - DNA, 368 bp, Glycine max
  unsure (1)..(368): unsure at all n locations
acaaagagagtggaaaatttcaagtgggttgcttgaggactggacgtanacacnggaagtggccgaaccactataaatcaagtgtgcattccttctttccttaaacttctattatttattgctatntatcttctgctgtagagacgtttattttgaattgtcttttgagtaattcatgttaatggtgcattgctaatccaaaaagagagagtgacagtttaattggcgaatagtcttttgtatttaattcaaccccccaccccttcttaagataactgaggccatttgtccaacatcctattcttgataactcacttctctctaaaaagacaaactttccggaatgataaaatgatgtcaaatgaact

SEQ ID NO: 58297 - DNA, 178 bp, Glycine max
gctaagaactagagttcgcgatgctctctaaggaaatgattcgtgacaatgttactatcaaacaacattaacaaccctaataatgtttgggcagaaacttgggaatggctattagatggcatctcttttgaacaaagaagagcattacatattccaggtatgaactctctctaatgat

SEQ ID NO: 58298 - DNA, 624 bp, Glycine max
tttggttcagagttccttctaaaaatgggaaagaagatttttctttgcccaaaatgggtcatgattacttgataatttacagtgagttcatagaaatctttgagttttgttcatccagccaatatagttggattcaccagatttggttgtatgtaacaaagtgcatgttgccattactgtctaccaaatgccaagtatgctctagttcatccttgccattactgtctagcagatgccaagtatgctctagttcatcctttcattttacaaaaaaaggatctactcaattcaccataagactacgtttaacaaagaaactaatataagcaaatgtgttatatcatgtcatgtttatttgaaaatagtgttgaaatttctaacctgatccatattatgaactatgttggaacttttcatctaatttttttgtaatcttcatcattggtttaatcattttcttccaattctattaatcttcactcattaattggaaacctcctttacaatgggaaagttactattaaaaaataaatatttggcttccctacctacctgtagtaaacccagacatatggattttgtgcgtgtactttccccgagattggagaagccgtgtccttttta

SEQ ID NO: 58299 - DNA, 656 bp, Glycine max
tgcatgacatcttaaatttcatgcctagaaactgacaatttataatttttactaaccacaatccccataatttgcatgtaatgtcaactcatcacacaattatacaccgatatgcccaaattgagtgattgtaagcgaagtctgtatacaggtttgggattaattatatgcagcatacacataatacacatatgacaagaagcatcagctaatgccaaagcacacatgttaatgaagctgtactacaatgcattacctcaaggaccttagcactatatttgcgtgaactgactgtatccgcggccacatatcaaggagcttttgcaggatgaaatttaacaagtttgcaacttcattaaacaccgaatgctgtaggtcgacccgatcatttgctacctctttttggctcccttgagatatgtgaaacaattttgaaccaatcacctcattggtaacaaatttgggacatcaacctcaaaaaaagggaaactggtgctcccattcccaaggataaaaattggtgcagaatacttggagaaatggtttttttcccattggcgagccaaaggggcatccctatccagaattcacttaaagacttcttaattttacctaggaaaggtaccggcatagaaaacaatactggggggaattct

SEQ ID NO: 58300 - DNA, 379 bp, Glycine max
aatacaccttgtggggtctctattgtaaaaacaaagcttcatggtgaatgtgattcaaaggcggtttggatgataacaatgatgacaacaaaagataatgacaaaggtgatgaacaaaaagctcaaagatcaaagaacaactcaagtgaatcaaagaacatctcaagtgaatcaagaacaaatcaagaggtcaagaatcaagaagaattcaagactcaagaagaaagcctagaaacaagattcaagaatcaagatctaaagaatcaagaacaagattcaagactcaagattcaagaaagaaaaaaagacccaatcaagataaggattaaaaaaggtttttttttcaaaaacttgaaaagcacatgagtttttgacaaaa

SEQ ID NO: 58301 - DNA, 329 bp, Glycine max
aacttaaatactagcctgttcttttaattttcctccccttctggtcgttttttatgttttttgaaaattgctcgttcgttgttgtgtcttctttggtggaagggcattgtttaccatggttcgtgggcaagtgatgattgttgcggtggttggtatggccattaacagcggaggtaaagtgtttgatttggtttttttcgcggtaaaattatggattgataatccgtaagttgttttcaatttaccaattgataatccgtaccttggatataccttacaattgttcatccgtaagaacctctccgtatttcaatttattagttcctttt

SEQ ID NO: 58302 - DNA, 109 bp, Glycine max
cgcaagccggccgcccagctcacccaggcgagctcagcgcgcccaggcgaacattgttgctccccccagaagcaaccggcagcgggaggaaaccgcgggagggcaccaa

SEQ ID NO: 58303 - DNA, 706 bp, Glycine max
tcattatcaatgaaattgcgttaaaattcacattttttatattttaacttcaacggcaatgaaattttttaatccagtttgctttacacaccaatgaaatcattgttaaaaaagtgagtgaaaacccatattttaattctaagagaaaacttctatttggccaacacataaatatttatggtaagtttttattttaacaacgtcatttgaagctgcattaaaaatgataaaagtcacaacaattaaaagaagcttcattttcactggaaaaatttagtcaatgtgtttctccgcatagctaaaatcacataaaaaggtgaaaaagtcacaaggatcaaaagaaatttcattgtcaatgaaaaaaaattgtttactttttacaccaatgaaaccgtataaaattatgagtaaactccaaccatcaaaagaaatcattggcaatgccaaaaatttgggaagcttttttaacacgtccttggaaccatgtttaaaaatttattaaagtcctccccttaagaaactttttttttattgaaaaacttaatctttgtttttctgcctagtaaaactgcaaaaaaaggaaagttcttacaataaaataaacttttttttaattaaaaaatttattcagtttctttaatacccttttaaatttttttagtttaataaaattcttttgttaaaaaaaattttttgttaccaaaaa

SEQ ID NO: 58304 - DNA, 389 bp, Glycine max
tgctaacccatggaagctcctaatatctcccattcttttttttgtgggccaatcctggatggccttgattttctcatggaacactcggaccccatttttaccaacttcaaaaccttagaagactatattatctacacaaaaggtacacttctttataattacatagaaggggctttccttagtactggaataaattgcctgacaagtcctaactgaatactctacactactataggacactaaatcatcatcaaaatatacaacaaccaatcttactatgaaaaacccttaacacatgatgcataaacactataaaggagttcgggacatacaataatcccaaataggcaacactattacaatcaatactaaataaaatttcctcgaaa

SEQ ID NO: 58305 - DNA, 616 bp, Glycine max
tggaacatatgaaatcaatctaaggcccccttcgagggaatatattcaaagcaacaatctgaaaccctaacaccgctttcaatcgcaggtatgcttttccccatttctcgtcactctcataatttctctctcctcaaattttcaatgatttggagaagcttcttctagatctggtagcctcgttccaagccataacgcgtgctagctcctctgaacatgtcctttttctatcttggtctttatcccttccttgccacattttctctatcctaaaaacccatgccctggaaagccacactactaataaataaaaaatttccaaatcaagtgtgatactaacactaatcaattggtgagctagatcatgaacatcaataccaaaaaaattattttgctaagcttaaccaccagaagacgttcaacatcggggataaaaaccaggccagggtatttacaacgagacttgcttgatcaatggagaactgcattgacctaaaagagggtcgccaagccacctcactttttcaagaataattgagccaccttttgctttcataggaataaaggaatgccttgggttatttaaaagtacgcatggaattcacctgagggcctg

SEQ ID NO: 58306 - DNA, 638 bp, Glycine max
  unsure (1)..(638): unsure at all n locations
tgtagaattcaccccaattccagtgtcctatgctgactttctcccatatctacncgataaaccaatgggagccattaccctaaccaaggttcatcaacctccatttctccgagaatacgactcgaacgcaacgtgtgcttgtcaccgagaaaccccggggcgttccattgagcatggtaaggctctgaagcgtaaggtgcaaggtctaattgatgcgggctggctgaaatttgaggagaaatgcgtgtaaatcctgacattgacaagagatgccacacatggggcaattttgaaagctgttgttaagtgtccctaatgactcatcagggttttcaagtttatgccattattgtaaaccccagctaccatggtaaaagaaatggataaagttgatatctttgtccctcatcctctcacaaacgcatgtttgcttattcaacttcttcgaaatgtggggcaaaccattggtctgtttgccaaacaactgaccctctgaaaggtgaattccaaaatgttcaatcaaaaaaatactcgtcttgcccttggtgggggggccctaaaaaaccagttaagttaaaaccaacaatttcaaaaaaaataaataaaaaggttcaaaaaaaaaaaaaaaattttgttga

SEQ ID NO: 58307 - DNA, 371 bp, Glycine max
tggatgaattccaacctttgtgtctactaaaaatttttctttttttactatgactcctgtttatctttcctcgatactctctcctttggcacactctgattctttttttaccataactttaaccactactccatcaccaccttacccatctcctttgtgtcgcgccaccacctacaccacctccttcaccgtgtgccactatctgcaccagccagcacaacgggcacgacgatgtcggggtcgcaaatggtgatatggtggtggtggagacgcatgacagcgtcagggtcatagatctgagggagagaggaacgcccacgttgtttgatggttagatggctttaatggcggttgagggtgggtttaatggt

SEQ ID NO: 58308 - DNA, 461 bp, Glycine max
atactcaagcttgagatgaggaagtgtagaatggtgaactccctgccctaattcgtttaccacagagaggtacctgaagataagctcggggggtcaagaaacctcggggacgtcaagaggggtgctattgcccaaaaccaaacttgaccaagcccgacccaacccaggcataatccgtcagagagaacctgggaagtacctaaacaagcgagctcctgacagtccaacagataaaaggaacaaagaccacaaaccaacgaagcttgtggtggctggccacctgagaaatttgcgggatatatgggtagaggcccctggtaatcgaatacccaccttgggaatcgattacaaggcttaaaactgaaaacaggaggctaagatagtctctggtaaaccaattcacccctttggtaattgtataccaaccttgaaaaaggaggtcacgaaagctacgggaacct

SEQ ID NO: 58309 - DNA, 452 bp, Glycine max
tcttttggaccttgaacaggcaaacaacccctctttctaaatcatgctaagggctcgcgactggtcccttttcttcctttgcaacttgagttcattattgctaccccatagggctccgcgaaatttgttccggccatactcttccttgcgagccctcttggtctctcgttcaagggctcttgcggtaattgcattctcttcccgtaacccggcacactccttccgaacgtgtgtagcagccaacttgaacttctccttggcgagttttgcctttcccaactcgcttttgagagcttggactttctcgtcctcttccggtgcttcaaaattctctttgctgacgacttttaacttggcgagccaatctaaacctcgtatgcgaactttcagccattcgtgggacccaccaatgatgcccttacgaatgcctctaagctcttgatctttcctta

SEQ ID NO: 58310 - DNA, 605 bp, Glycine max
  unsure (1)..(605): unsure at all n locations
cttggctgctgctggccatgttcccccttaaacactttgctttttttatgctgagctcttggtcacccgacaaataacataatgtctacagtggaccaaactaccctactgcaagcatcaatacaggggctaaaacattcccatgctggacatgctgtggcatatggtcagcctcttgtaaagtgtccttcgaacattggcaagaatttctctccatctatcttgactgtaaatgatacgtcatcaggatatggtgcatggctgtcatctaataatacaattggtttagtgagacccaataatagtgttgaaagggtgggtattcagaataacaacatgctgatattagagcaccaacaaaggcagcagccccagcaaaaacaacagcagcaacagcaaaagcaacagcaacagctgcagcagcagtcattgatacatgatcgaagttgttcaatcaatgttcaaccatcttgcctggtggttccctttcaatcctctgaaactttccagcaataaaaaatnctgcttctgtcaatcaagattgcanttttgccggaatgcccatattgaatattagctattgcacaaaaatcaaaaaattcatt

SEQ ID NO: 58311 - DNA, 639 bp, Glycine max
tggtgagcacaatcagaccaattcaagttagcactacgattttcgtcattcacatgaattaactcacgaattaccaccatgttgacgtcgtcttgaattcgtacataattgctgcacacttttacctgaaagtgggaccaagtgacaaacacaccaaaacaggaggaaatgaatactagccaattgcaaactttatcatccaaccagtgtaaaagcattgatcaaaatactaattcaaccagaaaaaccaggaagcaatattagaattgagagcttattttcttcatgaaacaaaagttcaatcagcttctcaattgtacatgaagaagcataattctaacataacaggaggctaaacataattaacacataatattcccataagaaaacataattcaaaatttactcgaataaaagacaaaacaagagaagtaagaagacaaagaaattagtacccctttacggcgaacatatgcaccagccattttctcggcgcaagtaacaagtttgaaaaaatgttttctacagcaaaccaagtttcttaaacgttccttaaaaccttaccatggagctgcaaaaaagtgaaatgaccccacccttaaaaaaaaaattattaaaaaaaattcttaaaaaaaattg

SEQ ID NO: 58312 - DNA, 559 bp, Glycine max
  unsure (1)..(559): unsure at all n locations
tatttaattgtattttcatagttgtttttgaagagaacactatcttgtntatnaaagaaaaaaccattattacccatctgtatcgaataaatcctacaaggtaatcgattaaataatcttttaaatcgtttaaagggttcttcccaaacacttggaaacaactcaaaagcaatgtaatcaattatatactcaaagtaatcaattaaagtgttcttgttcacttcttaaacacttataaacagagaagtaatcaattaaagcagagacttctaaacaaatcagtcattgtctcaaaaccactgtctaatcgattacgataaggctgtaatcgattaaacatatacgagacataactctgcaagcttaaaaaaacttgtgtaatcgattacgataagactgtaattgattaaaacaaagaattttgccttctgaaaaaattttataactttataaactttcttcttactcactcatatggatcctgatgcacaataaaacttatatgtgctaagatgcaacttatcatttaacatcctaatccatattgacttcacgggaa

SEQ ID NO: 58313 - DNA, 407 bp, Glycine max
cgcatgagcagagattttttttttgaatcctgagaagcacaatgatcaagccttacaagctcaaacaagcagaaagtttgacaagcaaggagacaaatccaaaaagaacaaaggaaagtggcgtgatgaaaagtggagaaagactgaagattcaaaatgtggtgattctggatcatcttcacagaaagctgtgtcaaatccaagaagccaattctcagggaaaaagaaatgggtcgacaagaagaatgtgcagtgttacaactgcaggaactttggccattttgcagctgattatacattcagtaaaggctctcatgtgaaaagtgaagaagaaaggttggcacaagaggagaatacagaagatgatcactatcttgtgatggttaccaccaaaaatgatcttcagt

SEQ ID NO: 58314 - DNA, 618 bp, Glycine max
tatgaaactccgcttggacttccgtgttttgggaacctctccttttttttgtgttcccaaacccaatcacctggttcaagcacgactttctttctgcttttggtggcttgccttgcatagctcgcatttttcttttcaatttgaaccttcacttgctcatgcaacttcttcacatactcagctttagcctgtgcattcttatgcttaaacatagcaaatgttaggcatatgcaacaaatcaagaggaatcaaaggattaaatccatacactatctcaaatggtgaacaattagttgtgctatggacagcccgattataagcaaactcaacatgaggcaaacaggcttcccaagatttaagatttttctttataacagtcctaaacaatgtgcctaaagtcctattgactacctcagtttgaccatcaagttgggggtgacaagtagttagaaacaacaatttagtaccaatcttaccccacagggtcctccaaagtgacttaagaattttggattcctatcactgaccatgcttctttggaatccatgaaaccgcactatttcttgaaaaacaaatagccccatgaccagcgtcttccactttttttgcaaggaatga

SEQ ID NO: 58315 - DNA, 559 bp, Glycine max
tctcccccattttcttattaattgggggagatgtgaattgttttttcgctcaaccctcctgggaatttaaaatcacttaaaattagtgagaaaaattggttccgtgaagaaaatccaagcccaggcgctttcgtaacgtttccgtgggtgatttcgcaaaggtttttgaccgttcttcgacgttcttcattcggtcttcgccggtcttcggtcttcaaccggtaagttccctagatcgaacttttcaattcattctatgcacccttagtggtcctcattgtttttacgtgctttcatttacatttcatttactttccgtacccctttttgacgtggtttaaaccctttatttaagtcattttctgccttaatcttaaaataaaataaatttccaccggtcgtgcctgaaccactttggaaatcgatgaagaggtgaaaatttaatattatgttcatgagatactctttttagtagattaatctaatactaatttgcacggtgtcgctttgggatttagctatttctagtgcatgcgcctagctactatatggggtgaat

SEQ ID NO: 58316 - DNA, 670 bp, Glycine max
ttatctttgaaaaaacagggcatcattgccttatattatcttttgacaaaacagaaaaataacagaataaacttccatatggattttggtcgcacccgaacatggatgcatttgaaagtagttcatgataagctaattttagatattcaaggacatcaagctaagtttacttcttcatcaaggtctgacttggactcttctaatgttatgttagccatcatacaaaagttagcttcttcgctatcctcatccgacaatgtgtcgtctatgtcttcccaagtactcataagctcattcttatctttagatttgataaataataacgagagagatttattaatggattagtggtctcattaataaatttcttatttcctgaatttatttattgggtattatataatattttttaatataataaattatttcatctaaatatttatatataaaataaaaccattattctgataaaaataatattatatcataaaataatttaaataaggaattctagtttttaaaataaaaataaaataaaaatttttatgaaattaaaaatatgggaattaaaaaataaatataatctatgtatacaataacattcctatcatcggagggggggaaagactatttaataatataaatgaatgaaattttttttatccaaaat

SEQ ID NO: 58317 - DNA, 750 bp, Glycine max
ggcctcaaaatattggaagttctagctagtacacttgaattattttcttttttcttaagctcctttacctctgcctggtagtggctggggttgagtaggcttatgtgacagggcagcaaagattgggaagttaatttatggttttgggttgcagatgagtgatttcagtgataagctaatgataaagtttctgtggggatgtaactgtgtttagatgttttgaaggtatttctatattaaaggttaacattcataacacctaaaccttgccgacaagatgaaaatggttatgtggaggcaaacttgcagaaaattattgtaagcagaaaattatttatttattaaagaaacatctagaataaataaattaatatcagattaaataaacatgccaatattaaaatattgagataggaaattagggatcaatttttatttaaatggtatttagagaatatatatatatatataatatatatatatatatatatatatatatattataatggccctaatttcactttgggtgttaatcaaatggattcaagaaaatttccaagaaaaaagccccaacgggcgtttttataatacattaccagttccaagaaaattgtgaaatttaattacttattcggccttttttaatgtaaccgggggtaccccataaaccaactgggtaaatttttttttaaagggatttaatggttatccccccccaatgatgggggggaattccttttttttttttta

SEQ ID NO: 58318 - DNA, 567 bp, Glycine max
taggttccaggagagcattcatccatggataaaccttcactttttcattcattcacaccccatacttgccttttatttaagcactcaactttatttcattatttttcaacatacacacttattaatttcatttgtacttacagttttttttaacacgatatatacaaagaccttatgtgtttatacagaaatagtgtgtgtatgctatttactttgaccatttcaattcttacccagtgcctcccccaaatttggaataaatttaccttgataattactcccccaaatttgggacaaatttgctttgaaccacgcttcctggggatgatgctctcctacaacctaaaccaaggtagcaggaaataacactatatacggtcagggttcaatcaatcaattaatcatttaactcaaactgggtgcaaaggataaatcattcaaccacatgaacaactctttggctaagtggctatcaaaatcaaaaatggcccttattaatgcaaatttatacattcaatcatactttaaagaattctgccaaaaacaatactaaatgaatagtcgttt

SEQ ID NO: 58319 - DNA, 473 bp, Glycine max
tgaatcggacatccgtgtgacaacttatgaccattttatttttttcgagagcctccagtggtcaatgtcgagtgtcactatatgggacgccaccaacaatggacattcgaattaaatgtttggaccattggaattgctcaagagcttcccgggatcagttctgaacgctcgatttgtgatttgcctgaatcggacattccgtgggaaatagttttgaccattcgaatttcgcaagagcaatggttgtgcaatgtcgagccctttgacaaattatgcgcccgaatcggaccttcgggggaaaagttatgactatttgagaccccgagagctttcgacggttaatttggatgcgtgtcgagttatcattagcccggatgcgcgccattgtggtgaaaaagtatgagcagttttttattcccgagaggtttgcgtgatgctttttcgaagcgtgtacataatgtgatgcgccgtaa

SEQ ID NO: 58320 - DNA, 674 bp, Glycine max
  unsure (1)..(674): unsure at all n locations
agcttttcaggggcaaagatcggatctttttgtttttttggncaaagagctggtctatcatcatgccttcatcatgtctgagttagacaatattctaaattcaagattatgctagatcaatattcacagtgtcgtcactcacagagtaaggtcacactcttaccggtttggttcaagctttttttcacaacaatctgtctactgactaacaattctaattacaagtttacattcttgtctttctttgcaacatacacacttgctcaaactcatgaaagaaacacaaactccatcacaatcatgcgttcattcaaaataaaagcatacacccatattcataagtcaataaaaggcttcactgcatgtctcaaaacaagttaaactattaaaatacttcaaatagcaactaactaccctaagaaactagcgcgtttataattaaggaaatttggtccaaaccatattttatattacccaaaagcaaaagggacatcagattaacaattcaaaaatgtttaactgggaacaggggagaacagtttttttatgacgaatcgaagaacacatttcctcattggggaacaagggggcactattctgcgatgggaataagaggaaaacggttttttgtgatgccccgaaatgacatccaggaggaaatggggaaaaagggc

SEQ ID NO: 58321 - DNA, 508 bp, Glycine max
  unsure (1)..(508): unsure at all n locations
taagcttgtcggatttatcgtgaggctctttgatagaagtccgnctttgttttttaagnnngagcataacccaatcccctatttggtaattaacgtcacagtgtccaatatctgcgtgttgtttcattaaaacctgggccttgatcagcttcttttaaatgtagttgaaattgtcttccctatgggccaatattgcatcgacgacagcaacgtttgaagttcctattccgggaaattaaaaggcttatggacaaacattatttcatatggtgtagtgtccgtgccgacattccacgaggtattatacgaacactcgacccaagggagtaatttgtgttatgtccccggtcatcggtgaacaaaagtgcacagatactgttcaacgacgcgattcaaaactttgttttggctgtcactttgcagttgataagcttaacttcatccgcattttggaccactcaatcaaaaaagttcttgccaaaagtgactgacaaagagtaggtcacaa

SEQ ID NO: 58322 - DNA, 429 bp, Glycine max
tgccacccagctcgcccaggcgagcagggtttttttttttttaagcaacagccttctggaggaatcttctggagggcccaagtgggcctggttgctatttgcacccccatttttactaagtacaccccctgcctttttttttggtgattctttttttcgtaaagttacggaaaattacgaatttcttaacgatacttgttttctttctgtaatgttacggaaccttgtgggttacataatcatcccctttttgacttacggaatgttacggaacctcattaattgtgcaacgatgcttccatttgatttctggtgtggcacggaaccttacggattgtgcatcaatattttcttttgttttcccgcatgtcccgaaaatttcacaaattgcctaatgatgggtgccaagcacctcacaaggaccaaaca

SEQ ID NO: 58323 - DNA, 323 bp, Glycine max
agaaacccaagcccaaaaacgaaaaaaacagacacaaacagcgggttatttattaccacaaaggtgcaaacgagcacatagggcaaaaactgaaacgcaaaagcaaaccacccggagaaaacccggatgaacccccagggaagacgactacatccgcctgggaaacaaacacccaaaaagagaataccggcgaagaagaccccataaaccacgaaacaccgggccaaaccataagccactacaaacgggaaaaccccatccgaaacaaaaaacccgctcgaagacaccaaagaaggccgagaacacacacaaagaaaaagcgt

SEQ ID NO: 58324 - DNA, 145 bp, Glycine max
tgccaagcttaacattcatttcgagcgtctcctaattacgggactaatcagactcccagaaaaagtattggcgttgaaattgctcaaagcttaacattcaattcagcggtttgtatattatagactcagtcgacatcccaaaaaa

SEQ ID NO: 58325 - DNA, 484 bp, Glycine max
aaaaggggagaaggaagaaaaggaggaagggggagagaaaagaagaagagaaggggagaaagagagaaagaaagaagaagagtagaggaggggggagaagggaaggaagaaaggggtggaagaaaggagaaaaagaaaaagggagaaaaaaagaaaggaagaaggaaaaaaaaaagaaggaaaaggagagaagaaggaggaggaagagaaaaaaaaaggaggagaaggaaaaaggaaaaggaggggaagagagagaggggggaagaaaagaaaaagaggggggggaaaaaagagaaacgaggagaaaagagggaaggggaaagaaagggagagaaggaaaaaaaagggaaaaaaaggggagaaggggaaaggaggaaaaaagggggaggaaaaagaggaaggggagagagaaggaaaaagagggaaaagggaagcagaaaagagggggggaagggaaaaataaaaaggagcgggaaaaaggaga

SEQ ID NO: 58326 - DNA, 331 bp, Glycine max
tggttgtttagaatatagcgttcgtatattgtatgcttactaagttaattcgatgagtctagtacttcattgttatttgccagtctatatttagtattgaatttagttatgctataatgttcgtttatataactgtcgcttatttttttttcatgaagggttttgcttatgagctttatgttttgcatttaacattgttgcacgttcatctcgtaattttttgttttattataacttctaagttatcctcctttatgtttgtaattccgtgatgatcgaattggagtattttattattaaccataaaatggcgatgtagagatcttatatc

SEQ ID NO: 58327 - DNA, 572 bp, Glycine max
ttttttcaaggcaccggaatcgatgacctttacattgttaatgatccccccccttgaaataatatgaactgggaattatctattgaagactttttaaaacaatttgtactgggatcgataccgcaatttgggaaattgagtaccagagatgaataaattttttggaatcctggtttgaaaaaaatagagtggctacttatgtttgagaaaaactgtttatactaaatcttgaaaaagccttctttatgatgacttgaaatttgatctgaatcatgaaattttgaaccttgaattttgaagtttggctttaaattatcttcttgaaatttggaatttttatggaatttattttgaacttttgaatagttcttgattcatctggagtgttccttgatgtatacaatagtcacttgaatgggtgtttaatagaatattgggatttttggtaacgcccttagtcatataattggggtttgattagtgtgtagattaataacctttggaacacctattatatccatggtaattttgtttacaccaaattttgccctttaaaaaaatttacccccttt

SEQ ID NO: 58328 - DNA, 630 bp, Glycine max
gaagccaaccgaacaagggggctaaaaaaaggaaggccccccccacaaagaaaagagaaggaaagtatgcaggaaagggaaaaaaaaggaagaaaggccccagcaaagaggggagaaagcaaaaaaaggaaaagaaggaaaaaccccaacaaagaggggagaaggcaaaagaaaagagggaaaatcccaaaaagaaggggagaaaggaaaaggagaagaagaggaaagaagccccggacaagacgaaagaaaacagagaaatgggcaagaggggatgaacaaaaataacggaaagaaaaaaagggaaccaaggaaaaaaaggaggaaaggaaacacaaccaaaaggggtgacccgaaataacaacaaaacgaagggcaaggaacaaaagaccggggggagcggaaaaagaagaagggaaaaggaaaaggcggaaaaagaaggcggagaacaaaaaaccggaggagaaagcacaaaagaaactggccaagggaggccaaggaacaaaagaaaagaagaaaggggaaggggagggaaaaaagggaaggaagagcggaaaggagaagggggggaaaaggaaagaaaacgaacgagggcgaaaagagaaaagaggaggagagaggaaggagggg

SEQ ID NO: 58329 - DNA, 317 bp, Glycine max
tcgaagtcgcgcacaacgccattctcgcgcttagcgcgaggaaacgaagaaacggctcagtgccaaacccgcgcaaaagccggaaggtggcaaacaaaacgcggaataaaccgaagaacgcgctgagaacgcgcctgcatgacaaaatcccttccagaatccaaccaaacggtaagcacatagaagcccccgcttagaaaaatacactcgctaagggcaatgagcacacctagcgagacatcaacgttaacaaaacttcaaaaaaacccccttttggccggaaattgaagaaaaaacgacaggaacatcaaaaggaa

SEQ ID NO: 58330 - DNA, 648 bp, Glycine max
  unsure (1)..(648): unsure at all n locations
ctatgaaactcagcttctcanttttcttgcttctcagccacttttttttttaanaattcacaaccctcacgagacaacacgtggggggcggggttttgcttcaggatggcctgtgcctttttccgcacatcctgcaaaaatcgaacagtaatgaaaatcattactacaatgtattataaaaactgaattttagcggaaaataattaaaatgacaaagtacatacctcccaggaggggtctatgcggttctgacaaaactgggccaatttctccttgctaatgccgtatttttgacaaaaaatgtcgtccacactatccttgacagttgcaagcgcccatttcctcattaaatgagatttaaactgtctctaccggtccccgacagtctgaagtacttttttcttttgccctactggcaaaagcttcagggatatcaaattcaccctggcaaacaataaactaggtttattggtagcaaatcttaattttgcgtcctcttgaaaataaaggattaatatttaaaacccggatatccctctccttataaattccttctggataactgggattccttcccccccttttattgttctcgccatttaatcccaagacatccctccttaaggttttatcattttaatagcagaa

SEQ ID NO: 58331 - DNA, 723 bp, Glycine max
tgtccacaaatataggtttttagtagagagccttttttatttctcactaaggaaaacggatcattttcaaggtccaacccctttttaatgaacacccctctttaagtccaaaaaataatcacttgacacataacagaactttcgtagggtctgaaattcctcacccgtaattgatgaatacgtttgagcccaaggaaacaccctgtcggccaccgaaagacaaaaatttttaacgggtataatggattttaagacatctaaaggggaacctcaaaaatcaaaatcatgttcgcacattctattaaaggctgccgtcccttttaccgacgtgtggggtgctaataccttccctgtgcggaaatacaacttcccaaccttttcccttaaaaatttcgatattggggcttttccggtttttctacggtttcctcaaataaacgttgggggggactacacgctaatttcttttatgacacccctcccgcagatacacaccccctaccgcaaaggtaggttcaacattgccatcccctggggatattttttagagttagcccataaacttgttcaaggtttaccccgcttttcccttgtggttaccctcattttgtcttgagaaaaaaaccttatgtgcttttaagccggtgttaaagtataccttgtaatgtccgtattttgatccctctataataggcttttcctttatgttagaaaaaaggcttc

SEQ ID NO: 58332 - DNA, 363 bp, Glycine max
aacaatatacttgggcctcggttaattgtctttgtatttttgcggccatgatcaacaaagtactttcgacacctactatatggtgacttaaccaacgctgttattgggatgctgcgacaatctttcaacaccttattcacacattctgaaaggttgggtggcatgtgaccatatcttcatccaaatgtatcgtaagccatgctccatttttcctttgaaatgctatcaatccatgttactatggctggactcaattgacgaaatttttctaagttttgatcaaacacatgcttgcaaggagtgtacgctgcgacaatctttcaacaccttaattacacattctgagagggtgggtggcatgtg

SEQ ID NO: 58333 - DNA, 347 bp, Glycine max
  unsure (1)..(347): unsure at all n locations
cccttgtgaacattctcgaagggctngaaccgcactttgtgatttttcagcgcngccgaacaaaaaaggattgttaattatgtcgcctcgttgccagaaatggggaaaaagggaaaaatgaaaggtttgttatttcaactcaatatctattttgtggttatctaatgatgcaagaactgatcttggactgaatttcatccctgttttgatattggtgttgttcaatgaaatttcaatcgttggagaaaagagttatgttgttgggaagtttggatattttgtatgaggtcttaggttttatttgggctgaaaccagggatccctcaacttagaatcctacaataatt

SEQ ID NO: 58334 - DNA, 113 bp, Glycine max
gctcccctctctcctgtccccctccaattgatgctcgtcctccagttttaagtttatgtatggatcactatattttctcactgaactgctataagatgaaactttttcttgag

SEQ ID NO: 58335 - DNA, 359 bp, Glycine max
  unsure (1)..(359): unsure at all n locations
tatattgcactcactttatggaaattctgttcaacatgacgcaaagtcaagttttagagaaaccgaatgcagaaccaaccatattgtcattttctaaaagcaaaacaatgtcgttatgaatctaaaatgctttgtaagccactcaatcaaatattctccatctttgttttggaagagaaacatncattttttatctcaaccaccaccattgaaactgaactgatcacactcccaaggaaacagcactaaaaccaatntctcatcttatgttgaagacaaacttctataatgacgagtaatttattcacaaaatttatcatgcactatannatggcaaatcatttatgaatttcaaaaca

SEQ ID NO: 58336 - DNA, 298 bp, Glycine max
  unsure (1)..(298): unsure at all n locations
gaacacttgttgaactctgatgaatgatagtcttgtgagacacaactcaaagttcaacttctctccctttntcttccttcaatttcgtgctcccccctctctctttctctccctctttcttttcctccattgaagcatcctctccaagcttcttatacaaggctcatcttggtggtgaagctccttcttccattgcttaatccttagtggatggcgcctactctcacctcttctcctttgtcttttgctgcatctccatggtgganaatcaccattaaaggacctcattgaagctcaa

SEQ ID NO: 58337 - DNA, 309 bp, Glycine max
  unsure (1)..(309): unsure at all n locations
tcacacactnctctataactaatgctcacctcctgagaagctttcttgagaagagttctagagaagctagagcttagctacacacactcctctaatagctaagctcacctccttgagatgagaagctagagcttagctacacacacccnctataatagctaagctcaccacatgccagaatacatgagaatacaaaaaagtccatactacaaagactacttaaaatggccctaaatacaagactaaaactctatactactagaatgggcaanatacaaggcccataagaagaaaaaacctattctaata

SEQ ID NO: 58338 - DNA, 303 bp, Glycine max
aggaagtcttagttctattacctatacttaatacaaaatacttataacactacaaaataatcattaattggaggtggttgatacacattacacaatgtttatacacgaatagtatgttgtatgtatcgagtaacacctcgcaatgctttcacactggtacaactttaatccctgccattgactaccatgattgtttgagttatgaataagacaaccaatctctactcatatgactacctcttgacgtaagcgcccacatgtcatttatatgacaaaataacttagctggataacataatcttg

SEQ ID NO: 58339 - DNA, 302 bp, Glycine max
  unsure (1)..(302): unsure at all n locations
gtgctcctctgctgaccaccatacagacctttgccctttcatgcaacaacctagagcaatngagcagcctgaagcttatgctgcaaatatatacaatagacctnctcaacctcagcagccaaaacaaccacagtagagcaattatgacctttccagcaacagatacaaccctggatggaggaatcaccctaacctcagatggtctagccctcagcaacaacagcagcctggctcttccttacaaaatgctgctggnccaagcagaccatacattnctccaccaatccaacaacagcaacaac

SEQ ID NO: 58340 - DNA, 276 bp, Glycine max
  unsure (1)..(276): unsure at all n locations
ctacaatctntcatctttctattctcttttgtgtaaaggaagcttcccagntatggaaagctaaatcctctgntggatcttcccttgaagtacttgatgtaaatatctntntatctatntaatgatgctttgtgtgttcactgtgctatcagaacttcattctacccatgctttgccttgatcacatnagatgcatgtgtttttaggatcattcaacagtggaaactgtgttgattcttagaacttgataggacagggcttagtttgtgtatatca

SEQ ID NO: 58341 - DNA, 223 bp, Glycine max
  unsure (1)..(223): unsure at all n locations
ttctcaagactgtactaatacatttgcgtgccaagattcatggtcttgtatgtgaagatcctcatcagcatcttaaggagatccatattgtttgtttcaccatgaagccccctgatgtccaggaagatcatatctttntaaaggcttttcctcactctctatagggagcggaccaagattggctatactacctcgctcccagggctattttcatctgggatga

SEQ ID NO: 58342 - DNA, 403 bp, Glycine max
  unsure (1)..(403): unsure at all n locations
ctttggattcttattgtaatctcactaacagaaacttatcgaacctataatgtgatatatccacgcagagatcatggcattcttactatggtttcacatatcatcattgcctctcctcactagtgaattacttgatacagagctntccaggagcatataatgaagatgcagccttgaacgcataatcataatgtgagacattgtcatgcgaagaccgagacttcattcaaggtttcatatgaaatgtatattcttttatcttggcttcttataaaacgatatcataatcacgaattatatatacttgatttaatattagataataatatgtattggatatatattagcaatattgactatatcgtagatataaatactaagtctaatattacatactaatatt

SEQ ID NO: 58343 - DNA, 289 bp, Glycine max
  unsure (1)..(289): unsure at all n locations
tctatccatcaatccatccatatagactgatggtgtttggatatctaatgngaattcctgtctcacattgcataagcagctgacaagatgagctcttctcatgtgaaaaatgaaatagagatcgctcacgtaaataaaatagagacaaacaagagagattgctcaagtgaaaattaaaagaaaagaggctttgtatgcagacaaactgtcacataagtggaagggcccttactggagatggaggaaaagctaaacatacagcgaaagagattcaccaggaagaatatat

SEQ ID NO: 58344 - DNA, 306 bp, Glycine max
aacaaactagtaatattgagttcatgaaattggtgcgtatgtatagctctgtgagtaagtgggtttgatacaatacctacgtggataaaggattcgtggcccaagtagcagatgttgcatatgagagatcgacttcagtgaacgatgaacaaagaggggaagctgtatagactgttgttggtgaatttagtgaagtcaaacatgttcggcgtattctctccatgggaaggttatgtctctctatacagtaactgatggctgtagctccattttttctgcttaagatcttgattcatgtcattcttg

SEQ ID NO: 58345 - DNA, 435 bp, Glycine max
  unsure (1)..(435): unsure at all n locations
cacttatctctctntcgaatttgcttggagaaaatgtttctgtgaagaanatacaagccgaggcgcttctgaaacgttttcgtaacgtttccgtgaggaatttcgcgaaggtttcgaccgttcttcgacgttcttcattcgttcttcatcgttcttcgatcttcaacgggtgaatacctcgaaccaggcttttcgattcattctatgtacccgtggtggtccacattgtgtttcgtggattattattcttcgttaatttactttttatacccgcctttgacgtgcttggcgcatttatttagatcattatcgcttaatctaatattaaataatattcaccgatcgttgattcgatataccgtactttgttaaattatttctatcttctgactgcgtctctctgggtctctatactgattctcttgccttatatag

SEQ ID NO: 58346 - DNA, 366 bp, Glycine max
  unsure (1)..(366): unsure at all n locations
ttatctctcttatcttagggagagtgattctcctaagttcttgagtgattcaagaacatcctggctatatcaaaggtctttcacatcctttgtgtgttgctctcgctggaaagggtgattctttccttccaccatgttatcttcaaccttggtctatcaaacttcaatttccacaaaatacaaatctttctagaattaactcgtgaccataactctcattntactcgttcaaattaagcgactctcgagtctaatatgaaattcacaacgagagctatcaccttggtttggaatcacctcatttggagccctgtagctggagttatagccatctttatatttctgtccagtcaccacttaacctac

SEQ ID NO: 58347 - DNA, 335 bp, Glycine max
  unsure (1)..(335): unsure at all n locations
ttctcgaaatttggtctgcagcttcacaagacacttggccataatattctagtttggttgctttcatcttcatctcgttcactatcgaatttcttttcttccattntaacgtgctttaactgggttattaagtcgttatctcgcctaataaatgataaaatgaatttcaaccgatcattngcgttgcaatctctgttaatcactattanagcaaaatctaaccaatcgttcacactggtaccctcgttaaaccagananagaanaataataatataataatcaaaatatcttggatanaataataataanataaatcanananatctatcggaca

SEQ ID NO: 58348 - DNA, 378 bp, Glycine max
  unsure (1)..(378): unsure at all n locations
ctagtcaaggtctgagagaccatacaagtttcctaacgatttctaattatgtgggccattaagtctatcatatgctgacaatagccgagaagcccatgaatctcttcggtggcggagtaggtgtctgccatcgccttggccttggctaacaagcggngaagttcttgacttccgttcaaggaagagcaaaaccgtccatccacatggttgcctcttggtgtaaagagtcgatcacccttcctctagcactcttttccgcgtatacttgggcatattcgtccgcaataatatgctcgtgggccggggctagacctaactcttcttggtactcggcgatgatagctagcatgttggtctccgtctcgcataaacgctgag

SEQ ID NO: 58349 - DNA, 392 bp, Glycine max
  unsure (1)..(392): unsure at all n locations
agctattngctttattctcttttacattgagacaagccagcttatgaattatgatctgttgctatgacaatgtacgtacgcgtggaacccanatgcaatatttcttattattatgcatgctcttgaccacatatctcattaccagtatcacataataacgaattaaggaagagactttgtttatagtattctcggacgcanacgtttaattagaatgcatgtgaagacacaaggatgacattttctaaaatactatataaagctctgcgtgacagtactattctctgtggagacagagtcggttagctagccatacatataatccaccacatgattggttcacacatttgcaactctccaatcattcttgtctccactatacattacatata

SEQ ID NO: 58350 - DNA, 372 bp, Glycine max
  unsure (1)..(372): unsure at all n locations
aatctattaatgcacacgaacataccagaatctattaatgcactagctctctcggccacaatacttggatctggttcaatatgagtcaatctgcatattttctctaactctgacctctctcttaaaacaagttctttcattctgcttgcttntagtttgcaagcctgtccacttctgctgaatcctaaaaaaggagatttcagtctaggagctccatctccacagaataaattggcaagaatgagaaaataataataacaaagggagagggaactgaatgaagcttccagaccttctctatcatttctgttgaaagaacacctcgctcagtgatttctgattctcagttncaacaatagaagtaatcttcat

SEQ ID NO: 58351 - DNA, 429 bp, Glycine max
  unsure (1)..(429): unsure at all n locations
tgatcaatcgtatgaattgagtgaatngaaatgcatagatcatatgccttgaatgagcatgcagtcattaaaagagaaagaacatggaattagaatcatgatatgaaatgcttgttggtttgttanggttgatgtgaaagaacacattatccgctacccggtgagagtgtgatctttaattgtgagagaacgactaacattgagtaatgattctngcatgaatctctgagtattgaatgaatgcgtganattgaagatgatgaatgccatgtnttgtatgaagataccacttatccaaaagctaccttgtgatgattgactatcccttgccccatttgagctgaagatgatttttgttgacctgacctatcattattcttgacctgctaagtatagaagcatatctaaacatattggggatattgggaa

SEQ ID NO: 58352 - DNA, 162 bp, Glycine max
gaccacagagtggtacctggagatatgtcgtcggggtcacgagaccttgtggacgtcacgtggggtgctattgcccaaaaccatacttgaccaatcccgacccaacccgggcatagtcggtctgtgagaacctgcgatgtacctaagcaagcgagctcctgg

SEQ ID NO: 58353 - DNA, 241 bp, Glycine max
tttcacaaagatagtattgtaagagctgtgtgtgcaaagataatatataagcaattgaaaataaacaagttatttaaaagcttcattaacacacaatgttatactggttactaacttggtatgctatctcctcacaaattaaatggtccctgataaaactgattcaaatgaatatttaccctaccactcttggctacaacaagtattcttgtggttgtcaaatatgtactacgcttgatac

SEQ ID NO: 58354 - DNA, 334 bp, Glycine max
  unsure (1)..(334): unsure at all n locations
taggtaactgantagaattatcactctctctcttttgtgtatcactcatttcctcgggtgatcactcttctttttcatattccttggtggagcctcanctatntctntctcttgatctctcttttctctcattctgatttggtcatcacacacttctctaggtgatagagggttaagagtaaacaaggaagattcggcaacaaacgttgcatttgtgtagtccacgccgtcagaaataagcgtngagattcatcccagtgatgatatacaccaccattgtcaccagctcttgccatgataanggacanagaaatctgcatatattaaaaaaatc

SEQ ID NO: 58355 - DNA, 367 bp, Glycine max
  unsure (1)..(367): unsure at all n locations
tctcctttcaaaaaatcgaaagatcgtttaattgttcaacgccttacatgacccatccgttcaataataatatatcttgcaaaaaaaggataaaaacaatntaaccaacgtttagttctcgaagaactacgtaggtctgattttcttaccacaattgaggaatacgtatgagcaagggaaacacccttgtcgaccacataaagataaaanatataataggcacataaagacatatagacgtaaaagtgaacatatcaaatattgaagtcatgttngcacactcggataaaggctgccgtcccttgtgacggacgcgtggngtgctaataccttccncgtgcgtaaatacaacttccgaacctttcac

SEQ ID NO: 58356 - DNA, 328 bp, Glycine max
taaataaagtcttaactctttatatgtaattttaagattgacataacatttctgttttcaatcttataccaaaatgtatcaacgtaaattaatcggtaacgaaactctggtccgacttactaattgaacgtcagggattgaggttctaaaatatgacagtgttcatttgatagttctttatattctcagttatcaggaaaaagattcgataacaaaaattgttgatgtattaacttacctacccatagcctcggctaaaataatttaaagtgatcgatttgacaaataaaaaaaaccacactacagctctcattatattaattaacgt

SEQ ID NO: 58357 - DNA, 343 bp, Glycine max
aacaaccttctggaggaatcttctggagggcccaagtgggcctggttgctatttgcacccccattattactaagtacacccctgccttcttttggtgattcttttctcgtaaagatacggaaacatacgaatttcgtaacgatacttgtgttcttttcgtaatgttactgaaccttgcggattacataatcatactctttttgacttacggaatggtacggaacctcactaattgtgcaacgatgctatcatttgattttcggtgtgcacggaaccatacggattgtgcatcaatattttctattgtgtctcgcatgtccgaaatttcacaattgcctatgat

SEQ ID NO: 58358 - DNA, 218 bp, Glycine max
tacaaacaacaaacaggcaaggagaaacttgccaaacacaactaaaatacagcttttacatacaataccctagaacatttctttcgtcattcgtaccgtggacactaaatttactgaagcttagactagttactttgacgtggactgtagaaattaaaccattgctactttacacagctaccacattttgatatcaaattgtgcatcacagcaattgt

SEQ ID NO: 58359 - DNA, 357 bp, Glycine max
  unsure (1)..(357): unsure at all n locations
ttgatcattctactaggacgactgagaacactggggcaaataanaagggtgagaaagagggagaaacccatgctgtgactgccattcctatacagccaagtttcccaccgacccaacaatgtcattactcagccaataaccaaccctctacttacccaccatctaagtatccacaatgggcattcctaaatcaaccacgaagactgtctgccgcacttccaatgacgaagaccacctttagcacaaaccaaataaacaccaacaaanaggaattttgcagcaaatagcctgtagggttcaccccaaatatcggtgtcatatgctatactngatcccatatccactcaataattcaat

SEQ ID NO: 58360 - DNA, 417 bp, Glycine max
  unsure (1)..(417): unsure at all n locations
gcttctgtgggacatcttgactngctntccaatctgacattcaccacattttctgtcttcttctattntcagattgagaatgcctctatacagcaccttgtcaatgattttcttcatgcctcttaagtgcagatgtccaaatctttgatgccatattttgacttcatcttctttggaggatagacatgtggaggagtaactgtgttcttgaggtgccatatgaacagatgtgctttgatctgctggccttcattagaacttcactcttctcatttgtcaccaaacattctgactttgtgaagtttacattgaatccttcatcacacaactgactgatgctgatcaagtttgcagtcagtcccttcaccagcagtactttgttcagactaggaagtccatcatgaactatgctttcca

SEQ ID NO: 58361 - DNA, 314 bp, Glycine max
tatatacacacacgcatacatatatatatatatatatacgtgtggatatacatacttataatattttttggataccaatctatacttatattatttttttggcacaaataaattatatctgaaactaacaaagtgtgattatacattactactccataatctgcattcatatattcgagtaagactttattactatttatgggcgagtcatgtgctcattatattcctaatattattttatagttgtcctaaagtaaatgttgcttttctatactttcctactagtagtaaagaatattaagattaatgtgata

SEQ ID NO: 58362 - DNA, 380 bp, Glycine max
  unsure (1)..(380): unsure at all n locations
gcctataggttggacctnccagaagagtatggcgtcagcaccacttataacatttctgatttaactccttttgctgtggagctgatattgaggaggaggaactaacagatttgaggtcaaatcctcttcaaggggaaggggatgatgcaatccttcctatgaagggaccaatcacaagaaccatgagcaagaggcttcaagaagattgggctatagcttgtgaagaacgccctatggttctcatgaaccttacggtagatttctgagcccatgggccaagggtgtgtccaattatctttgtacatattagactaggatgtcattatattnggtccttgtatatatggctccatattgtaggtagggtaccccagaaatat

SEQ ID NO: 58363 - DNA, 369 bp, Glycine max
  unsure (1)..(369): unsure at all n locations
atatataatcgaatgacgatcccttacatgagagttatgtatcatttcanaagtgtgcctcagattcccaaaggctataagcttataacacacattatgaataagaaccttaactcatgtctcanattaatgttaatgatctagaaagaagaatgaatatcaataataatttatactatgggttctaatttaattctctatattcttactctactaaccaggagatngacatcttgacaagcccataatatctcatattgtcaagtatctttttatcaataagtctcatgataatatcaatcaacaacgtttcaataatttatattatgcagtccaatttactanggttaaatgcaagaanacacatga

SEQ ID NO: 58364 - DNA, 307 bp, Glycine max
  unsure (1)..(307): unsure at all n locations
ctaccaactacaaaacctaagaagactatattatctacacaaaaggtacacttctctatatttgcatagagggtgttcttcctaaggactgaaagaactngtctgagatgtcctaagtgatcatctacgctcctactatacactaaaatatcatcaaaataaacaactacaaatctacctatganatcccttaagacatgatgcataagcctcataaagttgcttggtgcattagtgagccccaaaagcatcactatccattcataccaaccatacgtggtcttgaaagcagttntcactcatcacc

SEQ ID NO: 58365 - DNA, 345 bp, Glycine max
  unsure (1)..(345): unsure at all n locations
tactaagagtattttgagagaaatctgagagaagaaaaagaatgngagaataatgaggtcgaggcgctaccgaattgcgaccgcaatcgacttctacatcgttcttcgttcaaggttcattgtacatcattcggctcggatttgttttaatgatgtggatacagtctatgcacccttaggggtcctctntggtgctttgcgcatcttcatctcattcttctaccatcagttatcactttttttcttgtagactagtttcaatcgatcattaatgtcgtagatcattcttttttaagagaatgatagtaactgatataacaagagaatcatctattatgatttttt

SEQ ID NO: 58366 - DNA, 325 bp, Glycine max
  unsure (1)..(325): unsure at all n locations
cgtctcgatatattatgcgtccgaatcagacctccgagtaataagtatgaccatttgaatatctcgagagcttccgtcgttcaattgcgagcgtctctatatgagttgcgcctaaatgtgacctccgagtgagaacttatgaccatttgaatattcccagagcttccgcttttcatattcgagcgtctctatgtgngatgcgcctgaatcggactttcgagtgaaaagtaatgaccctctgaatctctcgagagcttgcgttgctcacattcaagcgtctcgatatatcatgcacctaaatcgcgcctccgagtgacaagtatga

SEQ ID NO: 58367 - DNA, 221 bp, Glycine max
tatttggcttcgattattatcggactcatattctctgaaaagtattgtgctgattgcctgaatctgttcaattgaaaccgattatacgaactaattggcatcgagtaaaagtatgtcttgattgctcagctttgttcaattcagcattgattatacggatcaaaaaattcagttaaggtttgctccgatctgtatacccagttcccctaacctctcattta

SEQ ID NO: 58368 - DNA, 330 bp, Glycine max
  unsure (1)..(330): unsure at all n locations
tctgcctatggtcaccatggcttgaataatccacctgtgctgaactgcatgtgaaatgtgaacagtgctaattaatggatgggatctgtcttcactggcatcatcatttgagtggttggaagcaaaatgacgtcatcaatttcaggatcctcttatgactctgcctcctcaagttaatgtactaatatgcttgacacgatacacaaccattntttcacaaactatattcactaatatatatgacataggttttgctaaactcacactaatcatctgtctgtcgtctctcttctccgtgttaagactatgtaactgctatgtatctgtcta

SEQ ID NO: 58369 - DNA, 228 bp, Glycine max
gaacccccacaggaggagcactcaatcgacacacaaaggaagtggtctcgctcgcaagggacgaagcccgattccaacctagaggaagacccaacaacagagggcgccaagaagggagatgaggaaaaaaaagacgcaaggacaacgccaacccaaaggaaagatgagggacaggtcacttgagccgcaaaaaaagccaaaaagggaaaacggggcccgcccaacaga

SEQ ID NO: 58370 - DNA, 490 bp, Glycine max
  unsure (1)..(490): unsure at all n locations
catgacatttatatttctgatttcaatggtacctatgtagcacatcatgggcgctctcgatatcaataagatcatatcacaatagaacatcttttcagagtgaacacaacttttattgcagttgataagcaattgcaggagttaaatgctaggtttagtgagcaaacaatggaagttataactttaatctgtgttttagttcctaagatattgttatacaactttcaatgttgatgatatatgcactatggtgaacaaatgttatcctttaatttagtaaacacgagaagattagttagaaatttcaacttcacttcttattgcgggtgctcctactcatctagaattaaagaagntactcaccatgcttcgtgtcaatcatcgggaagaatatggcactcatatacactttatttcgattgatcaattagttcatcttatnctaactctctcaatttctatagctaccacataaagagctttntcaaca

SEQ ID NO: 58371 - DNA, 495 bp, Glycine max
  unsure (1)..(495): unsure at all n locations
gctctatcgagtctattaatgtgccggtaatgacacagacactaatttgggagcagtatccatcaatggctccgaacctgagacagcggttaacattcatggaggtggttcattgccataataatcatgtgangtgaattttaagtaggtatcttatatttaatcttctaatttaattntaagaattgagatttatcgctcttatttctattaaaagaaattaatcttaattttggtaatctaatgattctaattagtaacttatttttaaccttcagattgtgttggatacacatcaagatatgaatacaggacaagaagaagaacgaacacctgataaagacatgataaagacacaagacattacttttttttttnttatcatgtacaccatactgtggatgaataatatgtagaagtaaaataatattaaatctattaaagtataattntaatataatttactatcaaattaatgtggtgatcaaaagtgga

SEQ ID NO: 58372 - DNA, 331 bp, Glycine max
  unsure (1)..(331): unsure at all n locations
agttttaaaactaaccccctttagtaaaattgccttaatttgttcatgatgaagatttatagtaaaaatttgcaaaatacgaaaaattatgtgatgattaacttcacgatgattctaaccaacaaataagttttatttgtgtgactgtagatacacagtctcaagatatgcgtccnntttattaagccaaccctttcgtgcttaanattaagaaaaatctaattattcgaatattgtgcaatcttaatgaaaagacaagtattataatgcaagntggcagtacaaattcaaaaatatgtaataactcttcnttttttatatatataagaac

SEQ ID NO: 58373 - DNA, 306 bp, Glycine max
ccttcttgcaagacaatccgctggattatgcgagcgtccgctaatcgcaacactcattggctaagcacaaggaagaatctggaagaagatgagctgtgtatgttcgctaagcgcaacgcttcatctcactaagcacaccgcttgagtccatccgctaagcgagaaaggcacacgctaagccgccgaaattaactaatgtgcactaagtggtccataattgcgctaagcgcacgagcacgaacaaggccacctatttaagcctgaaatcagattttgtgaagggagtttgggctgagagctgaagct

SEQ ID NO: 58374 - DNA, 384 bp, Glycine max
  unsure (1)..(384): unsure at all n locations
gtaaagacaagtgatacatatntganatatatatgttattaattatatattttctgncaaacataatggtcatgtatcaaaaaacatggtatggtcaaagtcataagattgatccttaaacttataaaaataaatggagttaatcttttttaaccttcataaatattatgaattctcataaatgagagactaaattcacatttttttcaaaatatgtgaagtttagcaatacaacaatataaagactttaattctatttgaccacaaatacaaaaattatagaatcagtgttccctatatattttcttatggtcacacaaacatcttctaagagaagtagcatattgggtccattcatgtctagaacaaaatcaattgaaagca

SEQ ID NO: 58375 - DNA, 452 bp, Glycine max
  unsure (1)..(452): unsure at all n locations
accgatgttgtctgcatatattaacatcggttgtggtaataacagatgttgatatgcagatatattactcttnttaattattattatataacattggatatttaaataactgatgttataattatatattaatatcggctctggataaccgatgttaatggtattactttctacatcggttaatacccgatgtggaaagtccttaataaccgatgttgaaaccctattatttagtagtattcaaatcttgtgggcaacctactatttgaaagttgaaaatgaaacaattagtgtttaagtcattctataattggtatgttagataatttacattctttacaatccatctcacatatgcacattatatatttctttaattcataagacatcttctattatatgaagtttgctaaatgtgctgaaacaactaaaataccttagtggattgattt

SEQ ID NO: 58376 - DNA, 363 bp, Glycine max
tttgataagggaacacatattacttaaactatcattgtatcatatatattgactattttagtattttatataaaggaagttactataaaaacattgaccaaaaaatgaaacatccattcagggaagattaattaaagtacaatgaaaattcggttaagtatttagattgtaagtatgttgttaatacgtacaatgattatgattgacttattacttaaattttttattatatatagtaatatcatattatttggcaaattgaatgctgtaaaatgattgattattgagggtctctattatattgatagccactgatattggtcaactctttcacttttataccaattatataacggatactca

SEQ ID NO: 58377 - DNA, 245 bp, Glycine max
aacaaacttcaatatgatggactgtctcacacggggaatttacattctattcccacctggttctgggagacacatgctcagatttagtagttataccacactcataatcatatccatggtgagactgagactacatttaagaatcctcaatccatccatactattgatcttagctcacatcacttgtgtggaaatcaccctaacttacaagcggtgtgtctcagatagatctttcaagcaatcac

SEQ ID NO: 58378 - DNA, 421 bp, Glycine max
ttgcaagatcatctttcttgacatcatgttgtataagattgttcccaatataaagagatgacgatttacagagtgatccaagactttctaacggatgttcactgaatgtatttgtagacagatcaagatatcttaattatgaatggttttcaaatgatctatgaagagcaccaccacttgagatgtcggaaaacagtatcgtgttcatatctgtttatgccccaatatgatctgtcagatggccttgaaagtgcgaactctgaactgcaagacttgtgagtccatggtgaatacaaggagcaagaatgctaaaagctcttaacctgtggttgagttgagattgagacatcaatgtccttaagtgcagaattacccacagaagtggaatgttcctctcagctgattcctgataatcacgtca

SEQ ID NO: 58379 - DNA, 441 bp, Glycine max
ctaagcttacccattttttatatataaaaacctaactctatatgagtgtctatgttattgaattactactatgtgtgcgggtggagtatctctgtgaatacaagttttagatgcgtaagaagaatgaaatatagaacactatgtgcaaaataaataaataattcttctgataaacaaaattacaatatatactctctcacaaaaatcactcattgaaaaacacttgagatttgtaggcgataatgtctatttatagaccaacaacatgaagagtacctattcaccaacactaatgaacttcaaagtgacctcttcatatgacaaaatataatggattagctattcataaacaaaaccatctaaaatattcattggactatctctagggagtgatggttcttaaatgacaaagatgtgattggtttacatatggatctccat

SEQ ID NO: 58380 - DNA, 188 bp, Glycine max
gtgttttattctacaagaaggacattcaggccccctaaagaaccttagaaaaagatcactgtaaaaaacctagctgatttatccatgaggtctagacaaggacccttgcaccaaagaaaaatataaggtcagttagattaaggattaaactcctcggagctcaccaaaacccaatgaactctctttga

SEQ ID NO: 58381 - DNA, 394 bp, Glycine max
  unsure (1)..(394): unsure at all n locations
ctactctagcattagcaaaggtgatgatgattttggaacacagtccaagatagaaacacagtttcttgaagtacaaaggcctgagatattacaagaagggattatattacacaatcatcatgactatcaaattataagatatcttgtggagtcttgtggggagcttttgctcgtttgtagatattntaataccaaacaagatgcggtgcttgagaccctaacattcgaggtatattcattggactattgcaattatcttggaagaagatgaggatttggtcatcaaatgatattttgggaaatgtcctcaacatcttcttgcatggaactgagctggattaaaacacattttttctgaatgatcattgtcctggtgaatgaagggattgacatt

SEQ ID NO: 58382 - DNA, 414 bp, Glycine max
cctgtttccctttcctttgtttgaagctcactacaagccttatgtgaaaaaccatgatattaccatatccttaaggaatattggagctttggaattgttttgggaataagtgtggggggtttatgtttcattggacaacttgttttgttggctatgcttcatgatgtattttgggccatacttgatatacattgtatatttgttaaatgttggacatgctgaatgaaatgttgtttctcacaggctaaagagtaataaaaaaaaaattcgaaaataaaagaaaagaaaagcataaagctgagtgaataagatcttatatggataagaatgatgaaactctcggttctactcttcatggttagattttatctttactttctctttatttttttcttaatatgcacttattcccct

SEQ ID NO: 58383 - DNA, 443 bp, Glycine max
  unsure (1)..(443): unsure at all n locations
ctactaatcgagctgtcatcaagaagtactgcgtccccaggcaggcgcagggcgaaacaccacagtcgcctgtggatggccagcagcgggcaacagacgcaccgccatcacctctagagttcaactcagctcatccacaaaaaggttagagcgttgcttacgacccatgtccgaccaatatgcgaccaagtccaaagccaaaggtaagcaaagtactatgtccgtgagcgacaagccatcatgcgtccagatcaagacgttaaagaagcgctactaggaggcaacctagtgactttanatctctgcttgtttgacacctttgttctcaagtatagtaggaacacctagttgtcatgacctangaattaataaaccagcatagctcggagggagtctacctccatataatatatattgtttatacacctattatattattatat

SEQ ID NO: 58384 - DNA, 328 bp, Glycine max
atgcgcatatatccttacatacgttctcttgtcatacattctatcaaccggaaaagaatgcgcccatatacaatcaaagcatgcttcgtacctagaatatatacacgtactttcaatgtgtatttgttacttacatcacacacatctccttggctaaattcacatacatgcatactcacagcatgttggtgtaccataaattgcacatgtccatatcttggtattcttatacctataccacacaatcttcatgatgaatcttgactattctacacataaggtgctacatatcatgctctgttcaagtatatgctacctatagccgcat

SEQ ID NO: 58385 - DNA, 168 bp, Glycine max
gtgacatctttgttttgaatggaattgtcatgacagggttattattactgtctttgatatttggtagttgatattgtgttgtgggagataattccgattggattaactcaccatctctcacttgccagtttgttatgacaatttggttttgatcacctattgatttct

SEQ ID NO: 58386 - DNA, 250 bp, Glycine max
  unsure (1)..(250): unsure at all n locations
gctttgtagnggaattcttggagattgaatttatattatcaagcagtccactggacctttagctaaatgctcaatactngtgttgttcatggaaagaacatcacatgttcacccacaaatatgtatagaatatgcactcgattcgtaatttcacgtatggctattatcatgtgtgtacagatttgaaaatgttatcattctgatgtcaaagtgtgaaagtgttttaaaaacattttcaagactgttacac

SEQ ID NO: 58387 - DNA, 337 bp, Glycine max
  unsure (1)..(337): unsure at all n locations
gcatgcatattagtcttttgatttttctcccattttttgataacgaagacaattgacttgctggtgtctggaagcaccctatnggctactatttctttgaaaagcaatatattaaacctctgctgaaagaatttntttcttttttctttttgttttagaaacctggaatgtaacctgcaaggtccctgatattgtttgaaaactataagtcttctgttagtgggcttgagaaattactactacaccaaatagtgtggcgttggacttattctacttatatcaaactgtangcgtgtgttttttttattaaacagtttcggttatatttatttttcaa

SEQ ID NO: 58388 - DNA, 331 bp, Glycine max
  unsure (1)..(331): unsure at all n locations
ataatgggaaacgacaattatctacttcagaactaattcaatttgttatcattattattatttgtacttatatattaagttatattttattatatcatggaatgttctactaatataaaaaccatttgaaccagagaatatgaagacaattcgcattcaatgggcaagatataatataatagtcaaaaatgacaaaatacgtgtttaagtaattttagaattgtaaagttatgttagcttacattatgttacaaatgattatatgtattgactatcattactttaaatattncttttaattcatatatagtaaataatcaattatatatta

SEQ ID NO: 58389 - DNA, 401 bp, Glycine max
  unsure (1)..(401): unsure at all n locations
ttgtcccttaatcatttctaatttctcaaatgggcaatgcagaaaatgcttatttcaaacatatncaatatccatctactctaacaacctgcaaatgttcttaatctccaaaagtataggtaactaaaacaaaggatattttttaatatgaagatatgaagaaaaattgagattcctatcatctagaataaaatcgaaaatagggtgtgcgagcatgttngcacgggtggacagacattacaaatatctcacgacttaacttccaatctggtaaaagaatgtaagtcccatcatanatcacatgatagtcttttgataaaagaatctaatctttatatgcttttattngatgagaataataatacgtacagatagatgaggcttccgngttcatgttaaca

SEQ ID NO: 58390 - DNA, 176 bp, Glycine max
ttcttcttaagggaatgactgaataatgtacatcttagtgtttcaccctacatagatattaagtctattaggatgggaggagtgaacctatataaacgacactaattgccttcaatatttcaatttcgaagaactaatatatattctctcacgcaatctagcatgttatattattc

SEQ ID NO: 58391 - DNA, 429 bp, Glycine max
  unsure (1)..(429): unsure at all n locations
cacacattcttctaataactaagctcacctccttgagaagcttccttgagaagattcctaaagaagctagagcttagctacacacacctctctaatagctaagctcaactccttgagatgagaagctagagcttagctacacactctctataatagctaagctcaccctcatgacataatacatgagaataccaaaaataaggcccgactaccaaaactactcaaaatgccttgaaatacaaggctaaaacnctatactactagaatggctaanatacaaggccgcaaagaagaaaaataaacctattctaatatttacaaagaagagtggacccaacctcggcccatgggctcagaaatataccctgaggttcatgagaaccctaaggccttcttagnagctctagcccaatcctcttggattcttct

SEQ ID NO: 58392 - DNA, 349 bp, Glycine max
  unsure (1)..(349): unsure at all n locations
ttgatcatcctactangacgactgagaatacttgggcaaatataaagggtgagaaagagggagaaacccatgctgtgactgtcattcctatacagccaagttttccaccaacccaacaatgtcattactcagccaataaccaaccctctccttacccaccacctagttattcacaatggccatccctaaatcaaccacaatgtctgtctaccgcacttacaatgacgaagaccacctttagcacataccacaaaaacaccaacaaaaaggaattttgcagcataaagcctgtatgtgtcaccccacaatccgttgtcatatgctaaacttgatcccatatccactcaat

SEQ ID NO: 58393 - DNA, 431 bp, Glycine max
  unsure (1)..(431): unsure at all n locations
taagctcgagagagatcttcgntatggtttaattgattaccctcatattcgtattctattactcagtacttntaagaccatgtnntgttttcttgggtctctactttaatcaattacgtgggtgtagtaatcaattacatcgtttntgaaagtgttcccagaagtgatcaataacactttaatcgattaaaacaagaatctaatcaattacattgttcttgaaagcttcctaagtgttgggaagaacactctantcgattaangtgagaatctaatcgattactcttttaagttaatagattacattagcaatntaattaattacatgcagttataactattttctctataaataaccaccttgtgttttcactttcaagcaattcataaagtgaagaagaacgagctnttacaatccacaacttcagttt

SEQ ID NO: 58394 - DNA, 377 bp, Glycine max
caagcgctaaatattgaaatatctgatatttatgaaccacaagccgacattgttacatgctttttgctaacatgttgaatggactgtgctactatccaatcaatcatagttataaattagtgatcatatcacaaactatagatgaagaatacttatccattcatctaaagactaaccatttggttagaagagaaacttatacgatatcgattaatcacatatataatatctatatctagaactataatgagctaattgtctatgtgacaagaatacatacgtctcgtttaatatctatccgtcaagagtaccatagctttatgttatatataatgtcgcaaccgacttctctgacattaatggtgaagtagttggcg

SEQ ID NO: 58395 - DNA, 383 bp, Glycine max
  unsure (1)..(383): unsure at all n locations
gatttactgatctttaccaattntgtataaatgtgngtacacatttgaagggtaaatgctgtgataatgttttctaacacccaagatagactcggatgaatgcacaaattgatagaagaacatattttggaaatactgtgttgacttataatagggaaaatgaatcctgagccctagtgtcacatgaccattaaaacctgatgcttgagtgtccacatgggtgcatgcatgaccagatntgcataaaatatcctaatcatctttgttgcatgtgtatcatggaaattatgtgggacgtcccctttatactcgaaccgctggccaaaccctgacatatatcgtgaccagccgttctacaagccttgagccaaaatctcaactta

SEQ ID NO: 58396 - DNA, 577 bp, Glycine max
  unsure (1)..(577): unsure at all n locations
gtccggatccttaagcactgagctgcagctgangatatggatacccatacatgtttctatgtgtgcggtcggcgatggtgcaaaacaattctccgcattcacaaatcatgtataacccaccatcctctgttgcccacctacaactgagctcatgtactctcacgtagcccttatcctcgttcctctcaacgccgggagcccatcaattctaccaagcttccacaacatgcaggtaatgtcacattcaatcatcatggactaacataaccaagcaaaacatgggcataggcagagaactctgctcataacacaactcagaatcacagcttgtcacatacaagtaccctattaacatatcctatcgtccaattcgttaaccgatggatcgactcaaaaattaactgggaagctctagacataagcctacatttgaccgttggatctgcagtaaatatctaaagcccatatgtactccctctacaaccagcatacacaagcatttttgactatacagattctgctgacattcaacacacaatctgataagtgcgatcagaaacattcttcctagcaattg

SEQ ID NO: 58397 - DNA, 304 bp, Glycine max
taaaagcaattatctctgttaagaagaaaactggcaggaaagggaaataactgcttctatcagcagttccacaccacatgttttctatcataaaaccttcttccacgcagtttacaagcatctaatcacacaagtttacgactcatgaaactactttaccatccaaatccccagaagaattgagagaagcttaaatcaccaatcaggctagtgctgtccaattactgaataaggagcataccaccagtataactcgttcgaatcatccgataaattttgacgttctagttcgagtcaaaaacgt

SEQ ID NO: 58398 - DNA, 315 bp, Glycine max
  unsure (1)..(315): unsure at all n locations
cagatggatgacatatgaaaggcatgtccctncgattctctctatgccatctcatgtgagatgatggggccattgaagagtacaatctatgaagtcttggaattagaggaaaatatcacatnttttaatcaaaattttctcttcaatccctctcattgtgatagtcatgtactgacccttttgattaacaaagcaatatggtatgcttatatctggggtttttttccaagaacatgtcaaccacaaattgagataccgttctgccatattatatatagatntgaagcctagagcttccaagtatttacaattctt

SEQ ID NO: 58399 - DNA, 395 bp, Glycine max
  unsure (1)..(395): unsure at all n locations
cattctatgtgcccgtagtgggccacattgtgattcgttcattttattctcgcnttggttactttttataccccctgtggacgtgcttaagccattntacttaagtcatttctcgcttaaccttaaaacacaatacatttcaccgaacgtttgaattgtattatccattaacttcggttaaaataaattccgaccgttcggtcgtgccgtaaccacgttggatatcataaagaggtgaaaaataatatagtaatcaaaacgacatgttttagtaaaataaagcggaaaatcaagtggacgatntctctttgggatttctcattcttaatcgaattgattaataactaatgtgaaactcaaggctanaatcaattcgcctagtcatgctcgccata

SEQ ID NO: 58400 - DNA, 399 bp, Glycine max
  unsure (1)..(399): unsure at all n locations
tgacctatatgagtttcatggncatgcacctcttgctntctatngcangttgatgtttattattgattacaaatgaatttggaactggtggtgattgcaataaaatatataggttataagggaacttttgctnttgttttccttggattgtccttatcattgtggtgtttttccaacccctccaccataggcaattagtgaagggaggtatgctatggtgaaaccatagtctgcaatagcatgtttgtatggcaaagttatgggcttccgccattgataacattgattcgntgtcataatttattattgcggttcgtactctgctttattatggagatgaaattgtgaatcattaatgtgttatgagaaatattgttatgattatatcacatataacct

SEQ ID NO: 58401 - DNA, 420 bp, Glycine max
ttatgcacttctctctctttcgaatatgcttatgagaatatgtttcgtgaagaatatacaagccgaggcgcttccgtaacgcttccgagatgtttccgtaagcaaatccgtgaagggtttcgtccgttctttaccgatctttatccgttcttcgttcttcaacgggtgagggttcgaatccgagacttccaatcatttcttattttttaagctctcatcttatatcgacattttcagttctttttttcttcataacgcgctttactggttatttatctcgtttctccctaataatgataaatgacttccccgatcattggttgtatctattatcactttaatcgaatttccgatttctccttatttcgttacctcaacgtaatattccttgttggatataattctatacctcattttgtc

SEQ ID NO: 58402 - DNA, 369 bp, Glycine max
  unsure (1)..(369): unsure at all n locations
catgtatacataagntgttataacagtcatgcacttggaagaaaattccccttttatggtgcactttcttcaatagcctatacacatacctctgcattattagaanatatgctttctacatcggttatttatgactttcaacatcggtttttcaaccgatgttgaaagtaccgacgttgatagtattaatcgtaacatctgtctttgaaaaaccgatgttatcgtaaaattaccaacatccgttatataaataaccgatgttgccaatatgaattacacccacaaaatgtatattaatgttgagaataacatcggttttatataaaccgatgtaacgatgtgttactatgacgttacatccggtcatat

SEQ ID NO: 58403 - DNA, 502 bp, Glycine max
  unsure (1)..(502): unsure at all n locations
ctatgcgcaacttntttagagcgttcacttgcacaagacattcttattatctagtaaaatgcactcatatacaatcaaggcaccttcgttacctatattatttatatgtactttccacgtgtatttgatacctacatcacacgcattatctttgcttaatttacatatcatgcatactctaagcacattggctattaaaaatagcatacgtgcacattctggtattctaaaacctatacatacacaaacttcatgatgaatcttgactatctacacaagtaggtgctacaattcatgctcttatcaagtgtatttactaaccaaagccgcatgcaaattcaaatatattctcttttgccgacttataatgtatacaatattataagagatttttgtaatggatatttctttacataacacgctacatatatatattactttcttctgtgagacacttttactatcaaaaatacatatcataccttctgtattctgctcacac

SEQ ID NO: 58404 - DNA, 448 bp, Glycine max
  unsure (1)..(448): unsure at all n locations
gctccttcttacatggcttattccctagnggatggtgcctactctcacctcttctactttgtcttccactgcatctccatggtggaaaatcaccattaaaggacctcattgtagctcaaagatccagcctccatagaagccccacaagcangcttccatcactatctcctatcttttgagattaggatgagaagcgctttctaagagtcaatcttttgcttcatataaggttaagcnctatgtactagtacctgctggcatgtttcataggactgaacgtactttgctgtatgttttcataagactcaacatcctttatttttgtttataagacttaacgtgcttcgcctttatgttttcttggactcaacatccatcatctttatgttttcataggactcaacatccttcgtcttatgtttcttagactcaatgtcctctgctttat

SEQ ID NO: 58405 - DNA, 213 bp, Glycine max
cttggataacagaggataggcatgcgtgccatattagaacactagctagcatccacaccccataacaataactgattcctaatgtacaatgcacattcattaacataaggtatgaagtaaccagaggctatgctgggacagcctaagagcaaccaagggctggaaaactctccggtgttttataggtttccaatttcctctcacttcataatt

SEQ ID NO: 58406 - DNA, 302 bp, Glycine max
  unsure (1)..(302): unsure at all n locations
caactcgtaaatcccgcgggtattgctcttgaatggngggaaagatttttgaatgcaaaaacgtcccccttcttctttttatnttattttggtgcaaggggttgcttgtccaggcgagctaacctacactcttttttgttgccgtagttatcaacatcgcccaaaaccttgattggacaacatcccagggagttttaaaagtcgaatgattntatgagacaactgtacacgggaatgactcgcgtgaggggaccaaagctcttgatgctccgccagccactccgtagggactgatcaaaccc

SEQ ID NO: 58407 - DNA, 155 bp, Glycine max
caatagcctatcttaataaactaactttattgattagagactaccttgtttcatctaaccaaagatcagggaaataatggaagaaccacgccgactactaaatgaagtcatggaatgaggttctcaaatcatgaagtgtttcatttgataatttt

SEQ ID NO: 58408 - DNA, 266 bp, Glycine max
tgacttaacaaacttttataaaaggttggtcccatatttttctatacttgtagcaccactcattgagttggtgagaaaccatgttccttcatgggaagattcccaggaaatgggttttcagaccttaccttacttcaacataccaaacaccactatatacatatgttttgtttttgtacaagtgttgagggaaggatcccagcgtatgaagaacctcaagatttgaggtcaaatcctcccaaggtggagggaatgatgtaatccta

SEQ ID NO: 58409 - DNA, 394 bp, Glycine max
  unsure (1)..(394): unsure at all n locations
tccttaagaggacccaagatccagactatatgtaccaagcctggtgcatatgatctatatgctccagcttgacggggagtgttgaatatccttgcaatttagccatggttggtaacttacttggtagcctttttttcacaaagcaacagtgcattgtcactggtatagactctttcctaacctctttctcttttgaactctctatatatatgnacctatttgaattcaagcgataacagaaaaagctgtttactttggtccttcaactgactaaaacaaatttgtagctttgggctgagaaatataaagcccaagctctatctgagccatgaacaatgaaaagatcttatatatactcaagaacaagattatgcctacaaaagaactctaagct

SEQ ID NO: 58410 - DNA, 481 bp, Glycine max
  unsure (1)..(481): unsure at all n locations
ctcgcccaggcgagctcagctcgcccaagcgagcatggttgcttcctccataacaacaaccttctggaggaatcttctggagggcccaagtgggcctggttgctatatgcacccccatttttactaaatacacccctgcctcttttgttgatatctttttcgtaaagttacggaaacttacgaatttcgtaacgatacttgttntctttccgtaatgttacggaacctcgccgaatacataatcatccnctttttgactacggaatgtacggaacctcactaattgtgaacgatggtacacttgattttcggtgtgtacggaaccatacagatggtgcatcaatattttatttttgttttcggcatgtcccgaaatttcacatattgtctaatgatgggtgccaagcacctcacaaggaccnaacataagattgatgttatctagcaaagatacacggacgataatatggtatgacacatg

SEQ ID NO: 58411 - DNA, 431 bp, Glycine max
  unsure (1)..(431): unsure at all n locations
cattggatatttatatggcacaatctgatgacctgntactgtataaccctgcatagccgaataaccatgaccgctggtaatagcctgacccacttgtccataaggataaatagttgttgtattcactgtcccaagcacttcatatatatgaaggtactgttgccccatatatgggttgtacagactctatcacacatgatggatgctgtaaaagtcagcagttgcttgagtgcacaaacaacacaaacattcttcctaatacaatcaagaaaactaattcaacctgtgggtagatgtactcacgtccgtatgacgtattacctgcaagataatacaaacacatatattgttgaaggatcacctctatagcatgactctggtgtaaacatcctgaccacaacttaaaatatgtaggaacacccacacacatg

SEQ ID NO: 58412 - DNA, 380 bp, Glycine max
  unsure (1)..(380): unsure at all n locations
aacgtcattatttcttctttctttcttccanagccatctctatagttgcaagaactntcttcatcacccacaaccaccattagccaccacataccatcgttgttctccacatcgagaggaacccttcaaccgaagcggaatcttccaacttggcttgcgaattcggtagagaacgaaaccctaatctgacctttcatattcttcgacggaaccatggntctacgctcgttacttgatagtatcatctcgtctttgcatcttttctgactatggaaccgccatngtatgtcatatgcttcctttgaaaaacttatgagaaagagactatgtacacgctatcctttcatgaaatgcatgttattttcgtaacctacactgaa

SEQ ID NO: 58413 - DNA, 82 bp, Glycine max
acatgaacgaacattatatcatgcgctgaccgtgccagacgaacaagcgaagtcattgcacaaattgcacacatactatatt

SEQ ID NO: 58414 - DNA, 383 bp, Glycine max
ctagctggaagacttacttctataaaatcttagtacttatttattgaaggagtaacatgaactgaagtatcaaatcattaccgactccatgagattactggactcatttatccttatatctatgtaggatttgataactatgaacttctaatcataaagaataagttgcggataataactctgaataaggttttacttgaaactcaattctaattcacacagaagcttttgttaactttgtaaatatgaaatcaatatgaaacatttcgtgtgctaagatataagaaatgtataacaaactatgatgaaaatttattctatgggattaaacacacaacatttcaccgataaatcgagaaaattaatataagacagactttgct

SEQ ID NO: 58415 - DNA, 452 bp, Glycine max
  unsure (1)..(452): unsure at all n locations
tgacagtctggaccaangtctaagagacatatatacatgaacaggaaagtgtatggcactaagtttaccaaccataaaaaatccataatgaattatttgtttgtacaatgaacgcaacaccctgcacatcattcaaatatctcactnttgcactacgcacacataacttataagagacatgataatgacggngacatctacgaaagataacaagtcatgtgatgttaggaatctttgacaagcttccaactatattaagagtgaccgagttaccatcaccggcagcgcagcaagagtacttacacactccttttgatactcattaacccacttctcacctcatgataatgaggagtcgaggatattgcaaaattgattaaagaatgtgctatagcctaatgttaaacctctttacataataatacagaatacaataggacaatctattctat

SEQ ID NO: 58416 - DNA, 492 bp, Glycine max
  unsure (1)..(492): unsure at all n locations
ctaagctcgaggattatggngtacccatcacatgtggtactatgnggcggtctggctatggtgcacaacaagtntntcacatgcacaaagcgcgcataaacccaccatcctctgttgcccaccttcaactgagctcacgtactcacacgtaacccatattctcgtttctctcaacaccgggtgcccatcaatcctcccaagcttgcacaacatccaagcaaaacaacattcaaacaggataagctatcactgccaagcaaaacagagcaaaggcagaaaactctgccaaaataaaacccaaccaaatcacagctnttctcacttaaagatcccagtaacaattccctcgttccgggtcattaaccgttggatcgagtcgaaaaatatacgtggaagtctctagtacataagcctacattgtgacccgtgtgatctactaacaaacatccagaactcattgngactactcttccacagacaacacacacaacg

SEQ ID NO: 58417 - DNA, 115 bp, Glycine max
  unsure (1)..(115): unsure at all n locations
acacagagactaagctcagcatccactctaccaagcaccaatccacaacagaaattcttatatctcccaacncnccacactggaagagttcaaagaggttgattcgacatatata

SEQ ID NO: 58418 - DNA, 245 bp, Glycine max
aattaactctgatattttactactttatttttgatatagattatttttatttgagaataaacttttttttaaatagagattttggagacactgtcacaaaaagagcaacactgtaatgcgagctcgttgtgtaaacgactggccaaatataaggtaagagtcaaaaccaattctcctatatgcttagaaactttagaaaaatatctgcgtattttctaagtttttaaataggttaaatggtatga

SEQ ID NO: 58419 - DNA, 228 bp, Glycine max
atgagcaactcacgattcaacagatgtgacatggaccattgctgctacgttaagaaatatgctaatagctatgttatccttgtcgtgtatgttgatgacatgttgattgcaagatctagtatgacagaaattaacatgtttgaacagtagttggcagaaaactttgaaatgaaggatcttggtctagctaaacaaatccttggtatgagaattcttagaaacagatca

SEQ ID NO: 58420 - DNA, 263 bp, Glycine max
  unsure (1)..(263): unsure at all n locations
tcacatcatctttttcaacatctgtttcaacaatcaagaaatctatctttcaatcttctctctcaacatcgntcaactctttcaacagatattttctgattcatcttctcttcatctttctaaaagtttttgttcacaactttttctttcaagaaaagttctttgatcaaanactngtgctactcatcntttttattctctgtctcctttgccaaaagaacgaaggactaaccgcctgaagtcttntatgtctctcttctctc

SEQ ID NO: 58421 - DNA, 289 bp, Glycine max
  unsure (1)..(289): unsure at all n locations
gaatcttctggagggcccaagtgggcctgtgtgctatttgcacccccatttttactaaatacaccccctggccttttttggtgaatctttnttcgtaaagttacggaaacttacgaaattcgtaacgatacttgttntcttttcgtaatgttacggaaccttgcggaatacataatcattcccttttttgacttacggaatgttacngaacctcactaatggtgcaacgatgcttccatttgatattcgatgtgtcacggaaccttacggattgtgcatcaatattttc

SEQ ID NO: 58422 - DNA, 160 bp, Glycine max
catactccacaccagctaccactgagcctgcaggaggcccatgctgctcatctatgatccgaacacgaccattagaatgtccttgcgaagtagatgatggcgacatctccacagtatggaatgttcccgataaaggattgtatgcactagctggtacacc

SEQ ID NO: 58423 - DNA, 481 bp, Glycine max
  unsure (1)..(481): unsure at all n locations
nnnaaagatgggcttagacccacgtantacggtcactatgctactcagctgtcttggccaatagggagagaatagctgcacagattttntttattcagatttaccataggccaactttggaaaaggctctagggcagaagaggacaagtcctcacacaacctatggtagttaaggagtggagtaatgttcctgctgcaggtctgctgactgctgatatagtgaaccctctctggcttctctcttttatgggtgtgctggattccatccgccacacatattatctagagcgaacctttgaaccccgtgtatttttatggtttgcaattttttacagccttcctgtgtctctaatcccaatcggcaagacaacacctcttgccatctttcatgctgttgtaatatttgtgtcagatgctttttagaatccgacttttatgcttgttggccctctcctaaccacattaattggtttgtgctcct

SEQ ID NO: 58424 - DNA, 365 bp, Glycine max
  unsure (1)..(365): unsure at all n locations
gacttgatagaacctctttttaagcgaaggcatttgacttgatcccatgttntactaaagtgaacaaaaatcgatgcgaatcanaactccaacatctatcatgggtggaatggatgaatgcatgaagaaatgcatatgacacatatgcaatttatgaatacgggagccagggaaattgtctccttcttagatacaacgtcttggggtaacanagtgcccaacgtatgtattaaagaatgtgactcggaccgtccgttggttttcaatgtgcgtgatgtatatgcgaaagggcaacacgggagatacaatatgaaatattcacaaatataagcaaaggtcgtgacactatcatggagtggaaaatg

SEQ ID NO: 58425 - DNA, 293 bp, Glycine max
  unsure (1)..(293): unsure at all n locations
atgccccacattttccatgacacanaatgcanaaatgatgaattggaaattntatgcaaaactggtcatgcatgcacctatgcggacactcaagtgtcaaatatttatggtcatgtgatgctacggttcaggaatcatttcctctattctagtcaacccaatgtttccaaaatatgttcttttatcaatatgtgcattcctccgagtccatttcgggcgtccggtgaaatttcacagcattcacccttcaggtgtagacacgtttttttcttcacaaatcggctatgatcaat

SEQ ID NO: 58426 - DNA, 148 bp, Glycine max
gtgtcaaaacaagcctatcggacttgactttacaacttattcgttatgtcaacacttttatacaagctcctcaactccaaattgtctccatccttggactggacatacattgtttatgttacaatatatctctgcttgaccctcaacg

SEQ ID NO: 58427 - DNA, 305 bp, Glycine max
  unsure (1)..(305): unsure at all n locations
attgagccacactattgccgaataacctcacattcattttctctttcaacgcgcctcccacacctntgtggatgtagccacatcgatgtatggagcgtcagaattctatttacaaatcttttattggtttcattagaaccttgtaacttggtttagggtttaaaatagacctttgaaaaaagaatggaggctagactgaactctcttgtgacagcttaagaatgaagatcattntcctatcgattcttctgctttgtccattctcaatntctatttcttttgggttctctatcatgactatatct

SEQ ID NO: 58428 - DNA, 167 bp, Glycine max
  unsure (1)..(167): unsure at all n locations
gctataattatangctgggaataataccaataatactttatttttatatgagttagcaaaaaattctaatagtgtacatacctagatcatgcccttggagcaatgaaggcccaccgacataaccaaaggagacatatttagttgcaatgcacacgagaagtaacact

SEQ ID NO: 58429 - DNA, 323 bp, Glycine max
  unsure (1)..(323): unsure at all n locations
tactaagcttgagccaaatcctgactcaccataacctttgcccattgtgagaatgtcaatccttaccctcgcgagcanaaaaggagagaaggaaaatnttcaatcaaagtaaaaaagagaggaaaggaaattcccaatcaaagagtgggagaaagcataaagaaaagaaagaaaatttccaatcaaagagtgggagaaagaaaaaagagaaggagaagaaggaaagaaagctccttgtcaaggatcgaaagaaaaaaagaagaaatgtgctgaaggtctttggaccgacaatatctgaacatacagaattgtcccaaatgaac

SEQ ID NO: 58430 - DNA, 335 bp, Glycine max
  unsure (1)..(335): unsure at all n locations
tagatatgcnaaaggcacacactgatttggaataagataccattatgctaaaaacttcagacttcatggntattctgatagttgatgggctggatgtgctgatgatatgagaagtaccttcaggtatctttntagctntggttctagaattntctcatggtattcaaagaaacaggaagtaatagctcaattcacagcagaagcagaatatgttgctgcaactgctgctgtaaatcaagctctttggatcagaaagcttatgacaganttgcatatggaacaacaggacagtacgcatatatttgtggataatcaagctgcaatctcaacttcaa

SEQ ID NO: 58431 - DNA, 539 bp, Glycine max
  unsure (1)..(539): unsure at all n locations
ntatgtccatgatcactgccccgagactaagcgtgcaaccaatngaaaganataggaaatagagaaagacagacaacaggattaagaacgtttgtntgtatncngaagcggacaanacaacaagaagaattcttctacagtcgggtgctctctttctccactggagagcatagtttctgtatttaccacacagatgtgttcctaatagaanttccgcatttatactacctaacctcctcactgaccctganacacaaataacaaancactagcctctactaactattcatctggaatattcccttccaaccttattcctccttatacgagntggctcatcccagtgcagacgatgcatccaatttatacatattctcacaactcacaataatatagacatgtgataggcaccggattaattatataataccaaaccctttacatttacaactgtatgagggggtgtcatctaaacaattcagcaattcccgttaaaagtgttaagcccgtatggactctactatacaacttttttttct

SEQ ID NO: 58432 - DNA, 148 bp, Glycine max
tcaattcaattaagaatgaggaatcccaaagagacaacgtccgattgatctttcgcttttattttactaaaagggatttttatattattattttacctcttttctgatttccaacgaggttacggcacgaccgaacggtcggaattca

SEQ ID NO: 58433 - DNA, 243 bp, Glycine max
  unsure (1)..(243): unsure at all n locations
catctcacactacaccactacgcttattctcaaaaccntttatactttatatccaaactcttcactctcaaaaactactccaacgatttaaacgcaaacaacaacgcgtttgaatgatatagtgccggttcaatttcgctggttcaacacgagaagaccaaatgcaatgaaaaacaaaactcttacctctactgaaaaacaccgattggcgcaatcaacattggaggcggacgatgatcgacg

SEQ ID NO: 58434 - DNA, 146 bp, Glycine max
  unsure (1)..(146): unsure at all n locations
gagaagaatcactctgttcgctaatacaagcggaaaggcgcacgagaatttgagaataatgttctggattgaactacaacaggaaagntccagcaaaagtgaatatgatataatacaagaaaacacaaccaagtacaagtaacaac

SEQ ID NO: 58435 - DNA, 318 bp, Glycine max
  unsure (1)..(318): unsure at all n locations
acaagatactaagctcgactcattattaaatggcacattaaagctggtcgctttttatattatgaagcnccagcttgattgggttcttatttataacttaaaacattctctcccttgaggagngctaggaatactctctctaacacactccttcaaacacactctcacttattgggtaaaacttattgaaaattacaaaaacaggagagagagagagtcattaaataggatatgggatccgcaactttttttaattccaatatatttcaaccaataggagggagtgtgttcaaaatagtgggttagagagcatattcc

SEQ ID NO: 58436 - DNA, 461 bp, Glycine max
  unsure (1)..(461): unsure at all n locations
ctnggccttatccaaggctgaatgctctgaaagctaagagttcaaaaaatttatntcaaanactattcatggatagggggtaatggaacaatgagagctggtaggaccatggtcagcttcaagacttagtggtctcgataattatcttgaaagagaataaaccccgtggtcagctaagtaaaaatcgaggtggcccatcacaagaacactaacaagataagtaaatgactagttgtaagaatttaagtgcttaattaagagaaaaatagatagttgaaacactcattcagaattctttgctcacaagcagaaataaacaatctattgatacaatgtatatgaaagcttgtgcatggcatacccgtttataaagtgaggtccacaccatttatgcctcccctgcaagaaccaatactgtttattatggggtgccccccattaaaccccccgactttctgact

SEQ ID NO: 58437 - DNA, 196 bp, Glycine max
  unsure (1)..(196): unsure at all n locations
gagcagctgtgtaaattgaaatacataagaanatccacatattcttaacaacatggtgtacttacccgacaataggcaagaattaattttggtctcaagatacaaaatcgagaactaggtccagtatatgtggcatcacgaggaattacccttcacacatcaagaagataatgtcagatttggtacaaaaagagca

SEQ ID NO: 58438 - DNA, 560 bp, Glycine max
  unsure (1)..(560): unsure at all n locations
cggccgatgacccttgacccctgataccctgcattacggacctatgaaactcagcttgatgcacatntgggaggtcatgaacttacagattatgcgcttatgagaggtggagcaagggagaatagagacataatgcagaaccacgacgagaagatggaatgatggtgntcctagacaaaacccaaattgatggtattaaactcaacatttctccatctataggaaagaatgatccggaggcctactaggagtgggagatgaaaatagagcatgttttctcatgcaacaactatgaggaggaccatatggtgaagcttgccgccacgggagtttccgactatgctctngtgtggtggaacacgctacacaaggagagagcaagacatgaagagcctatggttgatacatggacggtgatgaaaagaacattatgaggcggttgtgccttgtattacttatggacttgaattcaacttctatacaacccccgcaccacggggtgagggtgtttatgaaaggtgtgctctgtttcaccattattacacataagagggacctcg

SEQ ID NO: 58439 - DNA, 207 bp, Glycine max
  unsure (1)..(207): unsure at all n locations
ctaagcttacataactgatctcaacttctcacatagtatttaaatgaaggcagccatcnatctgtcaatgtattcaatacagctactaaaatgattgggagtagactaattctctgacaacggatttgagtaatctgaacaattatagatgcttgctatatacaactatggagcattatttacacgatagaatatcaacactgactt

SEQ ID NO: 58440 - DNA, 356 bp, Glycine max
  unsure (1)..(356): unsure at all n locations
ctaagctggacgtccaggtgtgaaagagatatcttaagagacaaacaagnnatattattgttatattaaaaacacaaagnntatacatgttcacttaatctcatgagctcgatatggattactttggcaagtacaccagtcgaacaagtaatacaatgaataaatcaagatattgttttcccatgagactcgtgcaatataagtaaggcactgtactattaacttacgctttagaactacacatgaaagcactaataccatgagctctaaagtggtttgtgaagtacacatagataagtgattgaacaagacagtatatatttatgtggttaaaaacaaaatgcattataagatta

SEQ ID NO: 58441 - DNA, 55 bp, Glycine max
tatatatatatatatatatatatatatatatatatatatatatatataccatata

SEQ ID NO: 58442 - DNA, 245 bp, Glycine max
  unsure (1)..(245): unsure at all n locations
catgcagggggaccttcttcaagtaaatttgacttaccgcagcctcctatccctcttccattcccacctagagcaattccaaacaaataaaatggaagaagcagaaaaagagatcttggagaccttcatgaaagtagaggtgaacatacctctgctagatgccatttagcagatntcaagatatgccaagttcctaaaggagtggcacccacaaaagaagctcaaaggaatgaatgattatcatg

SEQ ID NO: 58443 - DNA, 278 bp, Glycine max
ccatggggactgatctgaatctactcccacccatatagtgttgtgttaccaacgtataaagcgctgtgcaccattacacacactttgccctttatatcgccaccaggtggccccaccaccccctccttggcctccacacaatcaacctcttctctcccccttccttagccctatcactcatatcgaccccctctctcccacctctcttcctcgccacctcccgtctcgccttcatctccatctccttccttatcacttctccgccactccactccccc

SEQ ID NO: 58444 - DNA, 304 bp, Glycine max
ctaacatctaactcttaaataaaacaaccaacataaataactttaaactattaaacccactaaaaattacaagctattttatctaaatacgacttaattatatttagtcataattgagatatggatttcttgtctaaattaaactgatttttaaacacaaatttgaaaattatttttaattctaacataaaagtacatttatgagacttactgaataataattttattttaattgcttaataatttaagggactacaaaaacgaagctttgagcaggctatcattggataactatactatacta

SEQ ID NO: 58445 - DNA, 142 bp, Glycine max
  unsure (1)..(142): unsure at all n locations
aataaagaaaatcaaagaagataactaaaatacctaaatatcctcccatattaaatccttctgagcagcagggactntcttccagctctcgtatgtcacgtcgaccttatcacaagtgacaatccccaaatatgttcttaat

SEQ ID NO: 58446 - DNA, 208 bp, Glycine max
  unsure (1)..(208): unsure at all n locations
ctgtatgacgccgtaatctaagacagacctgacatcnccaccacaccgttctcttatcactctcctcctcttcctattatctcctctcagatatccttacttatctgtctctcaccaacatctcctactattggtcctctcctatcccccagtgtatcaatctcttatcgcatttctttacactcctctctttccgctccctcgcccc

SEQ ID NO: 58447 - DNA, 107 bp, Glycine max
agagcacgagctgactgaaaaaaatacatcaccagctttttttttttttggaacaagggatatggaccaattaacaatcgcacacggctttttaccataaagcttaa

SEQ ID NO: 58448 - DNA, 105 bp, Glycine max
aggatgaagctatgtaagactggacctaacacgacattgttcttcgatgtcattgcccctcgccaaattatgaccagacttcgcgagcttacctttgggacttac

SEQ ID NO: 58449 - DNA, 206 bp, Glycine max
  unsure (1)..(206): unsure at all n locations
cagctggctaagcttgcatgtcgcgttaaacctaacaacatctttgctntgtaatatctcaaattgggctaagcgtgcaggcacaggctaagcgagtcatgcattcccggtaagcctgtggtgctcgctaagcggattatgcaggaaatttccttctgcacaactctctatgccctatgtggcatgcgtagcncaaaaatatctct

SEQ ID NO: 58450 - DNA, 332 bp, Glycine max
  unsure (1)..(332): unsure at all n locations
ctgactngagntatcaagagantataaatatatggccatgacatngaattcattaatcaataatctatctttcaatattctctcaacatcattcaatatctttcaattctttctacangaatttctgantctttntctcttcatctttctaaaagntattgttcaatactctctctttcaagaaaagttctttgatcaaaaacttgtgctattcatctttttcattctcttctccctttgccaaaagaacgaaggactaaccgcctganntctttgngcctctcttctccttacaaagatcanaggacaaccgctgaatctttgtgctctct

SEQ ID NO: 58451 - DNA, 89 bp, Glycine max
  unsure (1)..(89): unsure at all n locations
gcaatcttgttaacttgtcttgcacgatatgacagnncgatttatgtgttcagtntcgtttgtggaaacaggcgtcgaggctatctgga

SEQ ID NO: 58452 - DNA, 187 bp, Glycine max
cactaaactgctgtgagttggaggccatcttctccctacaaatctggcttcagcaggagtcatgtcttcaagggctccaccactagcagcatctatcatacttctctccatattacagagtccttcataaaaatattggagaagaagctgttctgaaatctgatggtgagggcaacctggcacatag

SEQ ID NO: 58453 - DNA, 253 bp, Glycine max
  unsure (1)..(253): unsure at all n locations
gaagaaaagcaacccccccaacgcnggaaaaggagaacgaggacaaggacgaagggagaggcaaggaaggagcgaaagagacgcagcaaagagaggagagcggcggaggnagaagaaaaggcaggacgaaaagaagggagaaggaagagaaggaaggacgaaaaggaaaaaacgagggaagacgagggaagaaagagaggaggagcgagaggaaaggagaagggagggagaaaaagagcggaagaaaggagga

SEQ ID NO: 58454 - DNA, 202 bp, Glycine max
actatgagactaagcttctaagagggagttagtattaaggggcggagtttactttactttttagaagcctctcaagagctttcattagtagcgactacctctcaaaaagcagtgaacacttgcataacctgagaagagaacttggagactcattcaatttaactttctcctatctcttaatttacgcactcttcttcttctc

SEQ ID NO: 58455 - DNA, 205 bp, Glycine max
  unsure (1)..(205): unsure at all n locations
taacccgagagaaccctctgaggcgtattgcgatgcatcaaagatgggtttaggaggagtgttgatgcacaatggccaagtagtggcctatgcttctagacaacttaagactcatgagacggaatatcccacccatgatctggagntggctgctgtggttttgcccttaagatgtgaggcactacctgtttggctcacagttgag

SEQ ID NO: 58456 - DNA, 333 bp, Glycine max
  unsure (1)..(333): unsure at all n locations
ctcaagctcgagaatggagacatgcactaagcaatcactacgcatagctctcaactttatggnggagtaatatgaacgaaaacacaattcatggngctcctgaaaaggtgttgagaatggagaattacactaagcaatcactacgcatagctccaaactcgaaggtggaggacacatgaacgataacgcaattcatggggctccgaaaagagtgagaatggagaattgcactacgcaatcactacgcatagcttcaaacgcgaagggggaggacacatgaacgaaaacgcaattcatggcgctcccaaaagagtgagaatggagaattgcact

SEQ ID NO: 58457 - DNA, 194 bp, Glycine max
  unsure (1)..(194): unsure at all n locations
agcttctccctattgtgtatataagggggagaagngaagaatattatgtgttagcctcttatgcactncnctctctctcaaaaaggctgaggaagatcatttncgtgaagaaaatccaagccgaggcgcttccgtaacgttctcgtgagtaaatacgcgaagattctcgaccggtcttcaagaatcatctttcg

SEQ ID NO: 58458 - DNA, 270 bp, Glycine max
  unsure (1)..(270): unsure at all n locations
cggcctatcagggctacattctcttgagctgttcaaacttgcggccattgaataangatntgacacangtgttctcaccttactcgattcctctactctctgatgaaacatgttttccaaagccactgacaaggactggctagttcctgcactctcaattctcggtggaatattctgctcaagttgctgagaggattgttggtagagaaccatcttncactgatcattttgggtctcacagctcttctgatgcatcagaactgcagcttc

SEQ ID NO: 58459 - DNA, 171 bp, Glycine max
  unsure (1)..(171): unsure at all n locations
tataactcattaatatatgcaacaagccagctgcttatggtcaagcatgtttttcctgcgttcagaatgtatttccctgcaaaatggtttatttgcactactagcanaatanaagggaaaaagaacaatatactcaggcactacttccacatgctaggctaagttattcca

SEQ ID NO: 58460 - DNA, 244 bp, Glycine max
  unsure (1)..(244): unsure at all n locations
gacaaattgaggcaaactctcacctcacacaagtctataacatcaatttaaacttgtttaaactggatttacgcttagaatctcaccgaatcaaaattngactcttcaacacccaaatttgccctagaaatggctctttgntcactttggtcatttggttttctctctagcacagcctaacctttctcataagtcctaaatggcatttcaagctaagattaactcactctaacctctaattact

SEQ ID NO: 58461 - DNA, 376 bp, Glycine max
  unsure (1)..(376): unsure at all n locations
cacataccattatgtttatgttcttcgggaattttccttgctgctgccattaagaatngaaaagaaaaactnntttaacctttntctattttctnagttttaaaacactttttaaacaggttntaaaattcaataggttttataagataaatngattaataagtaaaggaaattagttntgaaggcaacttttataacaaaaaggtgaaaagcaaatcaaataggctcttaattatctttagctcatctctagtacccgaatccaatatagaaattcagcatttttgttgcatcataaatgatatttaaaataaactattttttatgctntanaaatgtaattataattccgatgtccatgttgttcttatgcaat

SEQ ID NO: 58462 - DNA, 312 bp, Glycine max
  unsure (1)..(312): unsure at all n locations
gcttcatgctagggacattcctgannatagtggtttgcattatcaacactatctccactttgagaacaaatagaggcaaaagaaataaaaccctacgttcaaattatcatctgtaggtgaacaatcatgaatccatctccaaaacaaaaaggatgttgatggcgagattccttttctccgtaagatcttatgccatgataatgactacaagttagtttggaagaaagaaaacactcctttaaaagtcatgtttcctaaaattgaggggatccanatgggtttatctatgatctcctctaaaggaataataac

SEQ ID NO: 58463 - DNA, 234 bp, Glycine max
  unsure (1)..(234): unsure at all n locations
attatgtgaccttaaaactatataattgtaactagactggtatnggtgcanatctaattatgtatgcatgtacctataatatcatagatgtagctttggaatggaaaaacattttggaggtngatatgatgttcattttcttggtgtaaagtgcccctattataagaaaaagcagtacaaccactaaacagagaagcgtcactttcaaacaacatatggcagaaatcacaactc

SEQ ID NO: 58464 - DNA, 281 bp, Glycine max
  unsure (1)..(281): unsure at all n locations
cgttctctngcacaagacattctattatttaagattaatgcacccatacacaatcaaggcagcttcgttacctagattatntacacgtacttccaaggtgtatntgttacttacatcacacacatctncttggctaaatntacatacatgcatactcaaaagcatttggggtaccaaaaattgcacatgtgcacatcttggtatttctaatacctatacatacgcaaacttcatgatgaatcttgactatcttcacaaaagggtgctacatttcatgctct

SEQ ID NO: 58465 - DNA, 144 bp, Glycine max
cggactctcagccacttatgatagccgtcgatgatcccactactgctgtcgctaagctctctgtactttcttcacgccgcatcccatgccttgcgaactccttggagtaccctcgcgttgaggcactataaccccgcgcgatga

SEQ ID NO: 58466 - DNA, 310 bp, Glycine max
  unsure (1)..(310): unsure at all n locations
cactcagtattctttgtctataccaagacattgttgactctatacanatcattatacattnngtcggtgggtntgcacaatgattaaatctatgattgtcttaaacacgtgtatataattagcacttacgtttttctctcaatatgttcaatgtattttgagagttntttctaactctataagaatatacatatatttttctacataaataaaaattaatgttctcacgtacaatttggttttcatatctgtaatacttctagaatatataggcctcatcttcaagtgttcagtgtctcacacacatgta

SEQ ID NO: 58467 - DNA, 556 bp, Glycine max
  unsure (1)..(556): unsure at all n locations
aaggcagagtannccctgagacgnactgatnacgnttgctatacagaccccagctcgnngctggggtgttgaattgtgtgtaagctcgagacgtgttattatatttatgcgctgtgtgtctgatggaacctcgaatttataagagtggagcccaactgcggttccttgtgtgtaagggctgttatatgcctatgcagataatcttcgacttatagatgatagtcgggatcttggagactatgttagatataaactatatcttagagatagaagctactacaaaattgtaccttgtagataatgtgcggctctgtatataattagctacctcgcacaagataagagtgtcaaatatattcaaatataataggttaacataacctgacagtttgacgccggctgtaacggtcggtgttcgacatctgtgcccggtgactgaaggttgcacagtctatatttatgtaggcgcactatgtctggggtctaatagtcattgatattccggtcggtatacgataattgtttaataaattcttaatgtcaccttgtggcatcn

SEQ ID NO: 58468 - DNA, 152 bp, Glycine max
caagcacgagctcgcttaagggaacgtttttttttttactaccacttctaggaaattgatgaagcttccagcgtgactatcaatacaaaatcccttaagcttgccgtgggccatttcgatatttatttctcaatcgccataagggtcatcgg

SEQ ID NO: 58469 - DNA, 461 bp, Glycine max
  unsure (1)..(461): unsure at all n locations
ctacttgtggagacaatcaaagaccctctgtgtacagattttttgggtgttttatggntatatntattattntcatctctaataatcaacttaagtnggtccccccaacccctgaaaaaaattctgaaaagattagaattatatcccctttggattaatttcattntatttgagtattgatatctttgaagctttattctaccggtttctgattagatgcaatacagtaccatcatgaataggactaaactgcattcagtagattaggggggatagactaaaaaaaaaaagataagaattagattaatgggaatgtgtgtttctactttctaacacttgaagggtgaattgtattaagaatgcttgtttgaatttgctctgttggtaggaattgctgtaatgatataaattcgctatctatcttcttcattaatataaataatggatttgtgactcatgtc

SEQ ID NO: 58470 - DNA, 326 bp, Glycine max
  unsure (1)..(326): unsure at all n locations
acattgaccacttcatcctcantaaatttataatttttttaattttactgtccactattcacgaaataatgcacatgataaaaagttatcaatgtaacatttgtaactttatgtttgtgatgctntattctccttgtattatacttaagaatgtatatcaaacgcttttttaaagtacaagaaaattagcattagtcatgactcaatttatatgtaatttattaaaaattctcactaaaattntcatgactcaagtattagtgacaaaaagaaaaatttgtcccttaatgcnnttgaattttgtggtatttctaatgtaagaactc

SEQ ID NO: 58471 - DNA, 120 bp, Glycine max
  unsure (1)..(120): unsure at all n locations
agccaatccaatccttgnngcccggatctcagccacttatgatagcctccgatgatcccatcactgcataccctacgctctctgccctttcttcacgccgcatcccatgccttgcgaact

SEQ ID NO: 58472 - DNA, 358 bp, Glycine max
  unsure (1)..(358): unsure at all n locations
aagcttctcgggccattcctgcaaggcaaacattggaagggagnnnacttgtggatcattctcttaaagcanacagggcatataaccttctcccatcaatgtaaatctagggcaagctcatgcgcatatttccttacaaacgttctcttgcacaagacattctattaaccgaaaaaaaatgcacccatatacaatcaaggcagcttcgttacctagattatatacacgtacctccaaggggtagtttgtacttacatcacacacatctgcttgggtaaattcacatacatgcatactcaaagcattttggggtaccaaaattgcacatgtgccatcttggttttctatacctatcata

SEQ ID NO: 58473 - DNA, 112 bp, Glycine max
  unsure (1)..(112): unsure at all n locations
acccacccgccgtttcaaggaggcacccacacgcacngccaaggaacccccgcggccgacaccaactgcacccaacctaacaaaacggcgagaaccaacccccccaaaaacc

SEQ ID NO: 58474 - DNA, 170 bp, Glycine max
  unsure (1)..(170): unsure at all n locations
tctccncctttttgatgatgacaacttctganatcaatttatacttatcacacacatactntntcctaggcgatcactcatataaatntccattctcccctcttgtttngaatttatgcttctcttaaaattaagntgattactcgtgtgagntcttgatttaatcccta

SEQ ID NO: 58475 - DNA, 541 bp, Glycine max
  unsure (1)..(541): unsure at all n locations
aaaacacgatgatgcttttacgactgancancgacacnnaaaaacnaagctccgagntcagcagntacacttagccgccaccagaaacattgtgtcctttttctaattcacnggcccagagccgagaaactagccggcactaagaacaatgagcgcactctctaagccctagatctagagctgcagacatatactgcggtatgaccagcgaccaagagaagttgcacccacataccaccgaggcagaacgcagcactatattgtctacacggaccctcaaggagcaagtctactctgcatcaacgcatgacttggctccatcccgtacagcatcgccaagctgcgggtgacctacacacgcacagtcctctatctgctacgaactgcctgcaccatacactaatgataaccgtcgtctcgcccaacagcgcgacatacagggcgccatcgctaggaacaggcgcgagcaactaggcaggctcctncgccaaacggatcaactgcgaggcacacccgtgcagcgtgactcacacacgccacg

SEQ ID NO: 58476 - DNA, 159 bp, Glycine max
  unsure (1)..(159): unsure at all n locations
caatctaattgcttatacgcgtacaacgatatanggttnttgcattctactaatcatgagctattgcgattgacaagaaaagattagatggattatatgcatattgcgggtactaatcatgagttaatattgagagctttgtattatatggatgcaaga

SEQ ID NO: 58477 - DNA, 249 bp, Glycine max
cactaccttatacaatgagctattagcgatagtttctgctcttgagaacacttgctcatatttgcttggtactcgtgttattgtatatactgaccatatagctcctgaagtacttgttgaagaacgctgaatcaaagtctatattgatcaggtggaagctctggctccaatagtttgattaggagatccatgcttcggagtggtgcttataacctcagggctgaccatctgagtaggattgagcatgtg

SEQ ID NO: 58478 - DNA, 281 bp, Glycine max
  unsure (1)..(281): unsure at all n locations
taagctntactattactcgataagaggtcggcannagacttttaaatgttctctcaagaacgaataaagatcatcacatatattactataagtcaaaaaactgctgctgacttgacctaagtatcaagaagctaaatcaacatantacctttaagttttaagaggttaattgggacatctatcagtggaacatacaagataataaaaaatatctcataaaaagacataaagaatactgtttacctcatcagtttttccagaccagacaggttgattatgta

SEQ ID NO: 58479 - DNA, 229 bp, Glycine max
  unsure (1)..(229): unsure at all n locations
tgcacaccatggatttggcggaagacacaatgtcagtatgttgcngctatttacacctcctcctcgaacaaggccattacgaaatgcatagttcacatctaactggtgaagagactaaccataggcgagagccacagagagaagaagtctcactgctatgggcttgatgacaggtgagaaagtctcagtgtaatctgttccatattgctgatgaaataccttagctacc

SEQ ID NO: 58480 - DNA, 473 bp, Glycine max
agggccggtgcgcttggccccatgttaccatgtattacgcgcctattatactcagctttataaacgttattctaattctctacagtgctacctccatgatctgtgaaaagataggcataacctgagtaaaccaacacaagacttctttgtctagaaaagttactaggtcctgtctagctcttctgactttctaaacttggagcagcaaggatgcctctaagaggagctggagctgatcgtcaatgtgggaccctatagctatttattgaaaacttatagtgcaccttactacccacttatgaaaaagcttatgcctataataccttatctcagaattgcgttataggacataatcactagtcttaagggacacagttacagagggtgcaaagggaagaccaagcacttcttgttttatccaaagaaaaacaggggcgagctcttgagcccatgtttgtcctggccaatttgac

SEQ ID NO: 58481 - DNA, 556 bp, Glycine max
  unsure (1)..(556): unsure at all n locations
nnncccgcgtgaactatggattacctgcactcacgtatactcacgctcgggtcgaggtacttacccgctgaagatcgaagaacgatgaagaacgaatgaagaacgtcgaagaatggttcatacctttgtgagattnctcacggaaaacgttacggaaacgtttcggaagcgcctcggcttagattntcttcacggnaaacaatttttcaagcaacatcgaaagagacagaagtgcctaatgggctgggacccttccttcctcatttcctccnctatntatagcaacataggggaaggtggtcgnccgtgcaaatctgncgcgcttctcctactcccgtatatacgctccgatcctctatattgattcatcttccctctccatgctctcctcgcgctccgccgttacactcttcctgtcttctttgtctctacctgtctacgcgttcgtcctctttttttgtgttgccttccctctccacctcgtcttgactgtttggctcacgtaatcaactacatttatcnnctattttctcgtactccccgaccacacctatcg

SEQ ID NO: 58482 - DNA, 221 bp, Glycine max
  unsure (1)..(221): unsure at all n locations
aaaacattgtaatcgattaccaacttttgaaaataattggaacgctgtaaattcaatttgaaaactttctcaaaacaattctgctactggtaatcgattacaacaatctggtaatcgatcaccagagagtaaaaactctttgtgaaagggtgttgtcaaaactcatgtgctatcaaagtcttaaaaacttttaatacttatcttgaccggncttctcttca

SEQ ID NO: 58483 - DNA, 199 bp, Glycine max
cagcctaacaatactaactctgaggaatattcctctttcattccgaatcttccgcatactatcacgttaaacgcaacaccaccgaagatatagaccgagttcatgaagccactgctggaaacagagctcaaaagctacggcttaatcgtcaacgactttgcggaactcggaggagaagagtacatcgagcactatgagc

SEQ ID NO: 58484 - DNA, 687 bp, Glycine max
  unsure (1)..(687): unsure at all n locations
gggggagagagagcgacanannncnnnttnntntnnntcnttttttnttnnnnnnnnnnnnnnnnnnnnnnnnnnnnnagaagatgataccttgnaccatcgcannancnganacannananccnnaagcnngangcaaaaacannccaggccanaaaagggcagcacgctcatttgttctactctcgaaagtccaataacattgcaatcagcaacgtctctgtatacctgaaacttgccccatgcttttctgagtgacacagtattcaacttacggtcaataacaaagactcgcagacctgataaggaacctctcttccattgtgtttacatatctatatatatgtcatncttctgttgacaagaacaaagttatgtgagaaagattattgagccaccttntacccactgtgntangttttcaaactacatcatngtcttatgcatgtttagacggcgtggacttggagaacactgtctcttttatcttcaagcacgccagcatgntctgtctgactccatcctcctgcaagaaatactatggccgttcgtttccttattctgctgatcaactactagcctcttcactctcctaataacactttgttcgcgcgtcttngataatccacacagattatatttaataacatcgctcatatcctcgacactagatattacnatatcgct

SEQ ID NO: 58485 - DNA, 252 bp, Glycine max
  unsure (1)..(252): unsure at all n locations
tcatggtcttgcaggtgaggatcctcataagcatcttaaagaattccatattgtctggttcaccatgaagccccttgatgtccaggaatatcatatctttctaaaggctnttccttattctctgtagggagtggcgaaagaatggctgtactaccttgcttccaggtccattaccagctgngatgaccttaagaggggttcttggagaaattcttcctgcatctagaccactaccatcagaaaagacatttc

SEQ ID NO: 58486 - DNA, 150 bp, Glycine max
gttatgggtctaacacactcactcctcttgatcttatgcctatgcctcaaagttcctgtttttaagcataaagcaagtcaaacacaggcggactatgtgaagaagcttcatgagagagtccaagatctaatcgagaggaaaaattaaagc

SEQ ID NO: 58487 - DNA, 308 bp, Glycine max
  unsure (1)..(308): unsure at all n locations
attcaatagagaatatgatagactcacatcaccgacataagaatctttatcgtttaaccgaaaaatatgatataggacatatttctctcagattatatcatattcgaagggaaattaagatcccaacatctaatttcacctctataaaataggttaatcaagcgttacgtattttaatctgattccaacctacatataattgcttacctctacattgntaacttgagcgtcgagtgccattgtatgacacctcaccactgtcgcgaggagctaccactacataaagaaacacttcaacatcggtatta

SEQ ID NO: 58488 - DNA, 515 bp, Glycine max
  unsure (1)..(515): unsure at all n locations
ggggattctgatcctcactactgcancagtgacnacggncanagatgctgatttcgcatagctcctcttattgaaacgatttgccttttgcacgttattcgcncaccggggggaactggncgcattgcgctccttcaacgctagcaagaagtttttgggttcaccatcgactctgtcataatcagcataacttntcttctctttcttagtcaatccgtccggcttatggatgtgcaactaaggacttcgcccaatcatgattatgaatgccacaatgaacttgaccatccaaccttccctttatggactggttcccacggagctgagggactaccaacttcttttcccgggcgttctacgaaactttattcttcttgtcctacctcccttgccccgattacattatttctcccccttgctttgccttcgatctatctcattccttctcatcgctccatttccttccccttctaacatcatccctttctcttctctattcaactccaccctcctct

SEQ ID NO: 58489 - DNA, 176 bp, Glycine max
  unsure (1)..(176): unsure at all n locations
ttcttgagaagctgagcttactacacacaccccttctatatttattctatcccccngagacagctctttaagaagattcctaaagaagctagagcttagctacacatacctctctaatagctaagctcacctccttgagatgagaagctagagcttagctcacacaccctataata

SEQ ID NO: 58490 - DNA, 105 bp, Glycine max
atatatgtatgtatgcccaggtagccagataccttggatatgcatgtatatagcaaaaatacctcacacaaatatacacacgtttaggtagcaaaatacctcatg

SEQ ID NO: 58491 - DNA, 259 bp, Glycine max
tattttcccgcagagatctttgtattcttactatggcttcacataacatcattgtctcttctaactagtgaattacttgatacagaactttccaggagcatataatgacgatgcagtttcgaacgcatatccaaaacgtgagacattgccatgtgaagaccgagacttcattcaatgtttcatattgaaattatatatctttatcttcggttcttataataggatattcatatcagtagttatcatactgtatttatat

SEQ ID NO: 58492 - DNA, 499 bp, Glycine max
  unsure (1)..(499): unsure at all n locations
nnnnntttactatnctagtagcttgatcacgcncacaaganacnaagctcggatggccatctattcataatccaccatagaacttangggttgttattttaanggaanccngnccacattgcaaagcagctgaaagatagctcttctcaagtgaaaatgaaatagagatcgctcaagcaaaacaatcgaataaaaaagagagatgctcaagtgaaattaaaagaaagaggttctgatgcagaaaactgcacataagggaagggccttatgggaaagcaggaaagctaacatacagcgaagagatcacccgaaaatatatggggataaccagatggtccaactttcagctanaaatgacgagtttctacactaatattactggagcgtgcgactaaaaaaaggcgctacgtagatcttttcttttcccccaattgtctgctttcctctacccttcccctactcaaattctttctcctccctcttccctcctcccccattc

SEQ ID NO: 58493 - DNA, 302 bp, Glycine max
gcatcttaagtgctattactcagacgcgcatttattttatttattttgggatcgccgacaacaatactactactctaccaccgggtgatctcgattatgcagctgattactacgtgacacgcatcagtttccctaagcttttatttcagagagaagagaatctgtggccctatggactctctaaaacaaaaattattcttgcactgatgggggagtcgagccattttcatcaatcctagcttagaggtatatcacaaagctcccactggagatcacatactcctcatgtgtaagtcctcaaa

SEQ ID NO: 58494 - DNA, 142 bp, Glycine max
tggatgtacctatcaggcagctctgcagtaacagataaagaaacaagacccaagcaggaggcttgggggtggcagctggaatttgtggaatatggttgggctctggaatcgataccaaggtgggaatcgattacatgctaaa

SEQ ID NO: 58495 - DNA, 160 bp, Glycine max
cgagctccctcgaggtagcccatatcgagacaatgtccggcgacgacactcgtttgaacgcgaaaacaacaaccacgacacaataccagattcttccaacgattctgctctcacctttcctttcaacgttgctatcacaatccgaaatcgcaagcgagag

SEQ ID NO: 58496 - DNA, 181 bp, Glycine max
  unsure (1)..(181): unsure at all n locations
tcatttacctctttatatccncttttgacgngcttaagccattctacttaagtcatttctcgcttaacttaaaaataaaataaatttccactgaacgtttgaattgtattaatccgtaacttcggttaaaatgaattccgatcgttcggtcgtgccgcaaccacgttgtaaatcaaaaaga

SEQ ID NO: 58497 - DNA, 333 bp, Glycine max
  unsure (1)..(333): unsure at all n locations
agcttggctattccaagttcattaatcatacctttaagctttattgctttcttcactcctcagctagggccatgtactctgcttcagtttgtgaaagagcaacaactgaatggtgattggttctcaactgattggtgaccaaacanaggtaacacatatcctggtaaagatttcctgngtctacnattccttgcaaatctgcatctacataacctgtgattgctgcctcatatgctgtcttcttgtaccttaatccaactttcgaagatccacttagataccttagtggccacttcacacacttccaatgtgcactgccaggatctcccatga

SEQ ID NO: 58498 - DNA, 181 bp, Glycine max
gtgagaggtagtaggggggtgaagtattttttgacctcatacaacgattatgggtgatccgccaaattttactaatgtgagagatgatctcactaggttagatatgcagtgcagactatttaaactgatatggggcattctgtgaagaacaataacgcgtgaaatggataactgatgcgtg

SEQ ID NO: 58499 - DNA, 317 bp, Glycine max
  unsure (1)..(317): unsure at all n locations
ctacagcagattntagtaatgacccactaacctagaattaanataactttatgccattaacctagggaattaanaaaacttaatggctgagtgtaactgaaattgtggcaaccaaaagtcaccctcaacagccaacaagtcagccaccatttggtctcccaaaaggctgatgcctaggttgtcaattgggcccttattacaacttgaactaaacctaactaaagcccttttagttgattaacccaaaacatatttttggtcagccaactttacacnggatgggccattatttagacanactaaacactctaaaattg

SEQ ID NO: 58500 - DNA, 555 bp, Glycine max
  unsure (1)..(555): unsure at all n locations
ngcgccgcttggcctttgaccccgagtccgatgcattacgcgcacatgatactaagctcgaagaaantaataatgaataaggtatatataagtggngaaattaatgttgttaatggcgcaccacatttcatagaatctgaaaggngaactaagtcataacaggtcaaagtggagggcattctcgtaaatgactataccactaagttaaaatgtctaactatatgatgtagaataattaacatcagttagacgtgctacacccttaaaaattacaactccaactaatagataaaactctgtggtggggcatctatgcgtggatganattaacttcaatagctatatatatgtttgtaactataaaatcttttggcggggngcgcgaacgaatgaatcgacactacttgtcttgtaactatattcgcctcgggtcactctagtccctgctcccactgcgcccgcctcctctcccttcgcgcctcaaactccacctgctgcgtcctcttttttctttcatcgccttcctctcctctctccatcctcacttccctcccc

SEQ ID NO: 58501 - DNA, 221 bp, Glycine max
  unsure (1)..(221): unsure at all n locations
gttaaagggaataaattaatacaattcaaaagctgataagaaaaacttctatctacacaaggtagaatgtattatctaaacaagcttacttatataatcgaatcaggaacctataaaaaaaattcatattatgtcacgaatgtcttagctaagtggatgaatatacagntactcgcctaattatcatctttttttctatagaaaatgatacaagagctatc

SEQ ID NO: 58502 - DNA, 119 bp, Glycine max
  unsure (1)..(119): unsure at all n locations
ggttatgacccttacaattcttcattttaactccaaagattctctgagcttgtccacacctctaacataaatcaaggcccatctgntcaggctcaattcgccaaaactcactaaacaca

SEQ ID NO: 58503 - DNA, 406 bp, Glycine max
  unsure (1)..(406): unsure at all n locations
atagagctctcatcacatgacgctgtattgtcacagaacaagctgttttctaagcagcttgagactttaacagaaacacttggtaagtagccaactaagatgtctatgggtcaacctacacactcttctgttttgtaggttacagggtgcaccatctatggtgaggctcatgaaacaggccaatgtattcccactgaagaaaacattcaagaaattcattatatgggaaaccaatagtgacaagggtattctcaaggaggattttcaggctttcagcaaggtccctataatcaacaaggacaatggaggacacaccctgngaatcagttcaacaaagaccagagtggaccttcaaacaggccaatccaacaaggacctaacatatttcagagaactactaagctgg

SEQ ID NO: 58504 - DNA, 391 bp, Glycine max
tagcttgtagaatggctagacatgatacatgtcagggtttggtttggttcaaggataaaagggatgccccacattatttccatgacacaaatgcaaaaatgatgatttggaaattttatgcaaaactggtcatgcatgcacctatgtggacactcaagtgtcaaatttttatggtcatgtgatgctagggctcaggattcatttcctctattttagtcaacccaatgtttccaaaatatgttcttttatcaatttgtgcattcatccgagtccattttgggcgtccgggaaaattttcacagcattcacccttcaggtgtacacacacattttccaaaaattggttatgatcagtgaattttttcaaagaaaagttggaaatcatctcttt

SEQ ID NO: 58505 - DNA, 399 bp, Glycine max
  unsure (1)..(399): unsure at all n locations
tgaagtcagctatgaccactactctgtgccttgccctgccggacttcagtatcccatttaccgtcgagactgacgcctctggctccggcatgggtgtagtcctcatgcagaggggacatcccctggctttcttcagcaagcaattttgcccaaaattgctccgctcatccacgtaaattcgagaattacatgccatcaccactgccgtcaagaagtggaggcaatacctcctgagtcacaccttcattattctgacggaccacaagagtctcanggaattgatgactcagccggtgcagaccccagagcaacacgtgtatctagccaagctcctcggctacgattacactatacaatacaaagccggtcacaataacgccgtggcagatgccctatctc

SEQ ID NO: 58506 - DNA, 384 bp, Glycine max
  unsure (1)..(384): unsure at all n locations
tgatggggacctggttgaaaattcagaggtggatgatgattgcatggtttctccagatctgtttaaaagtgttagtttgcctacatatccactggaaaattttgaaggtcgtgcgttctgctttttacctttaccaatcagtactggtcttcctgctcatgtaaatgcatactttgaattatcatcaaatcgcagggatatctggtttggttctgatatggctggaggtggaagaaagcgctcagactggaatatttacctcctcgaaaatgttgttgcccctgcatatggtcatttgcttgagaagatagcatcagagattggcccttgcaatntgttcttctcgttatggccaacatcattagggttagaaccttgggcatc

SEQ ID NO: 58507 - DNA, 393 bp, Glycine max
tattagaccgattgaattgtgagagtgagatttttctgagagaagtttttaaaatgtttatgagagaaataaaaaatatgaccatgaactcggaaagaactttattgttattatattttttattataaatataaataaaatacgcaattgaaaataatgttagatttcattgaatgggtaaacaaatctttaaaatgattatgtttgttccaatatttaaaaagatttgatttctataaagtatcaatacatttattacaataatacgagggttttcttttcacaagaattggaatgtatgatgagtaatttttccttttagttcacgggacttggtatattgcaactaaatctatcttactaactctattattgttttttgtttattactag

SEQ ID NO: 58508 - DNA, 461 bp, Glycine max
  unsure (1)..(461): unsure at all n locations
gagctggagaagatgcttcaatggaggataaganagttggagaganagagagaggggggagcacgaaattgaaggaataaaagaggtatagaagtggaactttgaagtatgtctcacaagactctcattcatcaaagttacaacaagtgttacacatgcttctatntatagactaggtagcttccttgagaagctntcttgagaaaacttccttgagaagcttctttgagaaaacttccttgagaagctagagcttagctacacacnaccctctcataactaagctcacctccttgagaagcttccttaagaagattcctaaagaagctagagcttagctacacatacctctctaatagctaagctcacctccttgagatgagaagctagagcttagctacacacccnctataatagctaagctcacccncatgacananaacatgannataataaaaaaa

SEQ ID NO: 58509 - DNA, 386 bp, Glycine max
cgagatgaggaagtgttgtaaggtgaaactttctgcttttattgttgaccacagagtggtacctggagatatgtcgcgggggtcaggagaccttggggacgtcatgtggggtgctattgcccaaaaccaagcttgaccaatcccgacccaacccgggcatagtcggtcagtgagaacctgtgatgtacctaagcaggcgagctcctggcagtcaacagataaaaggaaaacaagaccacaaagcaaggaggcttgtggtggctggccagctgtgaattttgtgtaatatgtggattgtggcctctggtaatcgattaccaagggtgggtaatcgattacaaggcttaaaaatgaagacaggaggctaagatggtctctggtaatcg

SEQ ID NO: 58510 - DNA, 385 bp, Glycine max
  unsure (1)..(385): unsure at all n locations
ntgcagatttggtcttcttcagtgaaaggatctatgtgggtccgtaaagaggcaaatttgatcatcctactaggacgactgagaaaactggggcaaataaagagggtgaggatgagggagaaacccatgctgtgactgccattcctgtacggccaagtttcccaccaacccaacaatatctttactcagccaataacaaactttctccttacccaccacccagttatccacaaaggtcatccctaaacctaccacaaagtctgtctacggcacttccaatgacgaacaccacctttagcacaaaccaaaaaacaccaaccaagaagtgaattttgcagcgagaaagcctgtagaattcaccccaattccagtgtcctatgctgac

SEQ ID NO: 58511 - DNA, 496 bp, Glycine max
  unsure (1)..(496): unsure at all n locations
agcttgatccaacattgaatactgattgtgaacagtcttcatgggtttatgattgctgcagcattttatgaaacaatctgaattctgaaatactatttatctagtgcttcatgattgttgtatgtatgttttaataagtaatcttcctttgttttaggaggaacgatctcttctagtgacaggctatgggtatgatcatgatgatgcatgggctacgaacatagacttattcaaagaatttacggatgtcagcagggtatttgtctgaaatctattaaatagcacctcatttctctgccttccacttcatattcttgactttgatgtttagggtgtaagacgacttggcgcagctgccgtggacatgtgtcatgttgcattgngaattgtagaagcttattgngaatatcgtctaaagccatgggatatggctgctggtggtttggtatgctctgagtttatatcatcgaaatgaatctgactagaagcttgaatc

SEQ ID NO: 58512 - DNA, 357 bp, Glycine max
tatccttatggcttaccttcggacttcactcctcgtgccaccccggaagatttaagccaagcccctacttttgagggggaactcccgccttatgacgactatcccgggcaagacgatgaggaaggagatacccatctcggccccctgctccacctcaaagatccgtccccacatgaactaccccaaccgaacatagtccgccatatcctggcctcacccacacccgtaaaagaatctgttcccttcacggaagataagggaaagattgaggcgcttgaagaaaggttaagagcagtcgagggccttggcaattacccattctcggatttagcagatttatgtctcgtgcccaatatt

SEQ ID NO: 58513 - DNA, 329 bp, Glycine max
cttgaaatatacaagtcttagttgtgattattagtcttgtttgtatgatctgaattaagcgctgtcatatgaggaaaagtgtaaatgcttgttgtacttgaacatcaaaatcagattatatatagatggatggatggatatatataatcacttttactttgactgtacaatactattataaataacagaaattttcaatacttaacactgtcggctaagtaggcaatataaacagtctttatagaattaaattgataataataaatcctacattttatgtcctctccttatgtatcaagcttgggggtgaaaatatgcatacctcacgt

SEQ ID NO: 58514 - DNA, 370 bp, Glycine max
tgagccttccacaaattctggaatgtgacctgttataaaattgtttgacacgtctataacctccaaagagctgcttgtcctgtcatttatgattgttgatagtgaacccaccagcagattatcatgcaaatctatggaagacagttctgttggtaatttgatttcagaaatgtcaaacctcagctggttgtttgagagcttgaccttttgcaagctggacatgtttgtgaagaaatttgaaataccatccaccagatagttatctgataggtcaatagagctgagagagtcaggtcttgtgaagtgtggaagatctcccttcaatttgcacccagctagatggacatctttaagctgcttgcttctgatc

SEQ ID NO: 58515 - DNA, 418 bp, Glycine max
  unsure (1)..(418): unsure at all n locations
tgctgcagctgaagcngagccggntgagatcttgaatattttatgagttattgngagatcctagaggtgaaggagacatcctcaccacttgtatttctgcaatctttcatcttgttcttctcttggtagaaagaaggcttcctggttatggaaagctaaatcctctgttggatcttccctgtaggtacctgatgcaaatatatttctatctatttaatgatgttttgtgtgttctctgtgctatctatttttcactccaatatgcctttagcttgatcacgtagatgcatgctttgttagggtcattcaacaatggaaactggtctgactctaaagtccttgatagtacagggctaagttgttgtacaatcacgagaaaattgggtgcgataatctagttgtgtatgtatgtcttaat

SEQ ID NO: 58516 - DNA, 390 bp, Glycine max
tccacatcaagcaagtttatctcaaagctcttattcaaacaatagaattcaaaagttggagaatttgcttggaaatcttgtagctgtgcttaaagtactatttgcagaagatccacaaattaatcaagtcttagaagctatagatcaagaggtatgaatttataattctacttattcaacgatttaactatgatatgatactttacaaagaaaaaacattcttttaatttaggtacctacaaatggttataccagtaaagatcatcaaactacaaacaatcttaactagaggtgagttgaaatttaaatggtaatgaaaatgcgagccggcgacaaaatgttatttcaggaacatgatttagatggtaatgaagatgtgagtgggcgaca

SEQ ID NO: 58517 - DNA, 374 bp, Glycine max
  unsure (1)..(374): unsure at all n locations
ntatttatcttaagacttgtctatgattgactttgcagtcaaaagaaggacttacctaataagactatcgtaaaactaggctctatgaaaattgataaatgcctctttatatttctaagacgcacgtgtgtcaagctttaactatcttaagagttgcctaaaattgattctgcagtcaaaagaaggacttacctataaatactatcttaacagttagctctatgagatttataaatcgctatttatatttctaacacgagcttccttacagctgatcaagacatagagaacaaattcaattataacatacaggaaaaaggataagacttttgacccacagacacaaaagaaacgtattatagtaaaaaatattt

SEQ ID NO: 58518 - DNA, 373 bp, Glycine max
  unsure (1)..(373): unsure at all n locations
agctttgtcactccacccgaatctggcctttatgttaaccaaagctagcatagctgataacctactaaagcttgtgcatccaacatacaatggcgtctgcacatctatttgaagagcatcgtaaatatctgcatgacattcccgaaagccctctagcccaagatcacgtatcatgtcttccatgagatctccgctttgtagctcaaccggatgaggtggacatgttgctgtatgaccaaccaactcaccatgccatatccactctgtgtacgtcgtgctaaagccatcacatattagatgcgatctaatgtcatccaacgaatgacgcctcctcgtgacacanttaacacaacagtagaaaaagttggcatct

SEQ ID NO: 58519 - DNA, 346 bp, Glycine max
tatccaatgaatgaatggcctttcgtggttgtgcccgcatatatagtaatatattaatattcttcatcagataactcataacgaaacagtattacattttattttgaacactataataagctaactataactatattttagtataaaaaaacataggaacacgcatgaaccatagaaaatgaagaaatcggcactgacccgtttgcaacccagtacctgttgttcagaaaaggaagaaattccctgcaaccaacattacgaaacatcagccgtaaaagaagttccctcacacttggttattttcaacgccattcttaaagttttaccatttatttataattttgac

SEQ ID NO: 58520 - DNA, 374 bp, Glycine max
  unsure (1)..(374): unsure at all n locations
gactaacttanactaagcttcatcctcagtcccctcttggtgaactagactcagcttatataacttatgagagtgtagcctaatttaccctaagcttcgtgctcagatccatcttggtggactagacttagaccaaacaacattattgtaacaacatatataaaccanaacttaatccgcagatccctcttgtaagactaagttccaatcctgcttcaatcaagttctaaggcaacaatacatctcccaatgctaaagtcacctaactatgcacacaagtgggtgatcacaccaagagcatacataatntaagcacttaaagaagcatngaacacangaaacacaatcaattagatattaacataattacatct

SEQ ID NO: 58521 - DNA, 368 bp, Glycine max
ctttcatgatgaagcagccatgaagtatttttcactaggtgattctagctgcataaatcaaaagacaccattggtttctatcttcaactaaaccctttgccagtccatttagataaaatataaacataaaaaaaatccaggttttcatgcctactctagtcatgatgatgaggttttgggtaatgaaacacaaataactgttaaattttttgagagaactaaataagaaaaatcctaacaataaggggaaaaaagtaattaagaaaatcaagagatgtacacattacagatgtacaagaaagaaggataatgagacccctagatcaaccaaaaaaaggatatttagatttccaaatgtttttattata

SEQ ID NO: 58522 - DNA, 389 bp, Glycine max
  unsure (1)..(389): unsure at all n locations
atcaattactactgaattccttaattcattgaacacatncggntngccaactcattctatcaaacttaaaattggaagtnctaataatgtgntaaggaacctcgaccaaaatcaaggtctatgtaatggtactagattagtggtaacaaagatggcaaaacatgtaattgcagctgaaattatctcaagtaaaaacattggtctcgcttgttatattccaagaatgtcaatgtccctttcacaatcaccctggcccgttaaactattaagaagataatttctgattatgctatcttatngcaatgacaataacaagtcacagggacaatcactatnncatggtggactnntattgccgaaacccatattcactcatggccaattatatg

SEQ ID NO: 58523 - DNA, 348 bp, Glycine max
acaaaatgaatgagttagagagaagttcattatatgctaattgattaagtttgaggttgtttatatttacctcttcatctgatttaaagtcttatctttctgatgcaatgtctgccatcaaataaaggtaagctttttttcctcttctgtctcctcatcagacaatgtgtcgtccagttcttcccatgtgctcatcaatactttattgtcctttgtaatgccctgaaattttgataactgaaaatcaatgtttaatgtatttcttgtgtcatttgattaattgattgatttggatgagttggggtgttgtgtgaattatctatatgtgaatgctttgtgtgaattatt

SEQ ID NO: 58524 - DNA, 394 bp, Glycine max
  unsure (1)..(394): unsure at all n locations
gcttacaactggagaaaaagntcatgaaaatcattatcatgaacttgatggaatcccttagcaaccatttggccttgtctttgttgatagacccatcagcattttcttttacacgaaatacccatttacatcccactgcctgtctcatgaatgattattcctgagagcagcatactcctgctgcatggcagaaacccaattggaatctgccaaggcctggttgacattnttaggttcagtgtgggttaaaaaaagagaaggatgaaatccaaactttgaccctgtttgcatagggtgttgttagaaggtctaggaggagactcataatntgagtgtgtagacttagaggaagtggaagaggaactntgaagaagatgataccagaacctatcct

SEQ ID NO: 58525 - DNA, 364 bp, Glycine max
ttaatttttataggatgtgcaaaagaaggaactggtcatccagaaacatttcactacctccacgtgttgtctcgtgggggttatgaatttctacaaaacaagttaatggaggagaagaaaaagaaacaactggaggaagctgctaaatctggaagcattgacaccgtcattgatcctccatctcccatcagatgacacgtgaagtggaagatgtcccgcaccaagaaaattaggcaaatgacttctgagacaactatggaaattgttgacaagattgtaagtcactttcaattgtgaattgcaattatttatgtttattgtttgattgagtaaacgaataaatgtgttcgttataggattcctt

SEQ ID NO: 58526 - DNA, 491 bp, Glycine max
  unsure (1)..(491): unsure at all n locations
cgtggacggattaacgaagaaatcatgtgttttctcgtattcaaacacttangntctaggaaagccttcacacattccctatttacctgaaaaaccactttctcacaatcaccaaccttattttattgccaaattaaagaataatttgtcttgatccataacagtgctctcctataacctaagatagggtacaaaacaacgacatttacattcaactcaaggctcaatgacaaattcattcacatttaggctcanaaggatgcaagggattcattcattcactaacaacatnggtagctattggcttagtggctaanantaaaaataaacaacagggccttaatcatatccacatcatgtatgcattcaagcaatccaagaatcatgcanaaatcanagaattaatatcatttgttctctagcaatcaaggttcacacaactcacccggtaatatgaaaacattagtttntcatcaaccaattcatgtcat

SEQ ID NO: 58527 - DNA, 384 bp, Glycine max
gagcggtttttttagccatgaagagatcaaatttgctctttttgattggtccttggaaagcttcaagacccgatggtttattacctgttggcttttattagcacacttggcatattgtaggagaaagaaaggtgcaggaagatgatatctttattcacatgagagaatatgtttatatacacatattgtagtacaatcgtgatcctataattaagctaggattaattacactaattatagaaatgaacatatatggaaagaattggtcttgatagctacacatacgcagaaaccaaatcatagagcaatcaaggtcatgatacaggatcaagagattgacataatgatattgtaatcaatgtgtaatcattagaattattactt

SEQ ID NO: 58528 - DNA, 458 bp, Glycine max
  unsure (1)..(458): unsure at all n locations
catgttntaattatcataatcaactattgaacttgactatgcgtaaataaaatgccaaatttatgaaaaaatattggcgtaactggctggtgagatcaattntatataaaattcagctcaaaataagaatttattggatgattctttaataattataaaaaaaagtgaatagactaacaaaaacaagatacttagcagactaagtaaaaaaaatactgtgtcggagcaattgccccactgtggatccaattgacggtcaaaccacaaaattgaannaataatatattctttcctagatattgtgtgattcattatgtgattntcaccaagtttatcgtccttcttgattcaaacgtcaatctgattatgtggttgtcatggtaagtgaatttataagacaagtctcatgtattacatttgtcacaaaggatcacaatatctcccaagtacaaaatatg

SEQ ID NO: 58529 - DNA, 405 bp, Glycine max
aagcttgtgaggatacatcaagattttattagggagtctaataacctaattacaactatggcaatatttaaaatattgtgatctcgttgatgtggacttttgcggtcttccacaatttggaaaaaaaatgattaatctaaatgattggtcatttacttatcaatatacattgttagttgcaatattaggatgcttaggtggttcatataccctttttcaattcttctcttgtactctcacttttcttgctactccctttttggaaaacataatttctattaacttctcttatggttcttaatctatattttggtgcataagtcctttccattcaccaaaacacatcacaaaataaaaaggtgccctatgaaaaaatggaattataactttttattaaatgatgtg

SEQ ID NO: 58530 - DNA, 378 bp, Glycine max
  unsure (1)..(378): unsure at all n locations
acactctnnttggacaaacaaagaagatggaacgggatggatggaaggttgacctaacagcaagttcatgtaatttgaatggaagtctttgcgtaagctttttggataactggtgtatcagaactgctcttgattcacgtaaagaaattgtaaaggaaaaacgcagcccaacccccagtttaacatcttatacctttaagtttcatttcatccacttaagataacaaatcagctacataagtggcaatcgagaactagtttagtacaagttggttacagtcagttccttggataaagtacccacacacaaaacacagccattaatggcacatgacanataacatctcaagtctacatggttatatntataaacatgtc

SEQ ID NO: 58531 - DNA, 393 bp, Glycine max
tttccagcctttgtgcatgatttttgtcagccttttgtgtcaaaacctgtccagcaagataaccacactctttccttacctggaaaaaatttagtaaataaaaattaattcaccctcagtatacaaaattgttccaattaggaactacaattcataatagattatcatactagtagttgaagcaataagatattaagcaaagaggagttcaatcatgagaaaacaaagggaaaagtatcaattgaattaaagatctttatagaatacctgaatttcaagttcaagtgatgatattgtttccacaagctgagagtacttgcaatagtacttcatggcaggatcaatgtccttacagctaagcaagagattaatgcgtaatgctccaacgtgagc

SEQ ID NO: 58532 - DNA, 384 bp, Glycine max
  unsure (1)..(384): unsure at all n locations
gtgagcaaattcaaacgttcattatactntngactttggatgtccgattgtgtcccgcagnatatcgagacgcgtcgaattgaaaagggaagctcttagaaaaatcaaacgacaataacttttaactcggatgtcggatagagcccggtaaaataccgagacgctcgaaattgaaaacagaagctttgagcatattcaaacgacaataacttttgactcggatgtccgattgtgtcccgtagtatatcgagacgctcgtaattgaaaacagaagctttgagccaattcaaacgacaataacttttatctcgggtgtccgattgtgtcccgtactatatcgagacgctcgaaattgataactgaagctctgaggaaaatcaaacg

SEQ ID NO: 58533 - DNA, 387 bp, Glycine max
  unsure (1)..(387): unsure at all n locations
agtttatacctgctctattgcgaagtctaaataaagaaaaaccaacctgcatttntgaaggcccgagacctacttaaaaggtgtaaatccagaagagaataatcaaaatttaccgaactttaactcacgaagaacattcaacctatctgttaattggagaaacaacagtttcttttaacataaaggtggtgaagatgctgtaacacaatctcccttatcctctagcccttctcaagatattctaggatgatgccttgagagtggcatcttcaccctctcagctaacgtagattgtacacataagagttgcccaacatcaccatttgagcatatataaactctaaccaacgtctgtatacaagatgagccacaatactctattttcca

SEQ ID NO: 58534 - DNA, 372 bp, Glycine max
  unsure (1)..(372): unsure at all n locations
taaaagagcactcaaaccggtgtattaccatcttgcctagactctgaagagcccgtcaaggcctctccctcctgattcaggtctaacttagaaaacattntaacacgttcaaagtgattaaactcgtcaggttcccacagtggatcccatcataatactcattatgcattaactcatcagccttaaagagtcttacaacatgtgtgattgtacggttcatagctcacaactcaatgtgcacaacatctcaatacatgtgtgatctcacaatttaacacatactcaacttatgacatacacacaatctcaatcacaaagttataatcctaaagtaacatgttatcacacctcatgaatcatatacacatcaca

SEQ ID NO: 58535 - DNA, 467 bp, Glycine max
  unsure (1)..(467): unsure at all n locations
agcttatattgatttctttgaaccctatctntactctttttcatacccccaacaagaaagaaccacaacttaggaaccaacatgattgatcattcatctagtgttaatagtaagggtactagtcatacggaccctctatctagaatattaagtgagttgagttccctcaagttatggaaagaacaactagaaagaaaattaaaaggaaaagaaagggtagaaataagtaaagatgagagggaacatataagggaagaagaaagaaggaaaatactaatagttaagaatagagcaacatgctctctatagtagtcatgactccttcaagagcctaagtgaagaacatagtgactattatggaggaaagcataggtcacatnctagacctcactcncataggagaaaaaaaggaaagaaaggatcaagaggctaacattaacctctcatacttccatgggaaggacaat

SEQ ID NO: 58536 - DNA, 374 bp, Glycine max
  unsure (1)..(374): unsure at all n locations
ttgcgaaaacctctatttgaaattcatttgctttgactagatgctatgntaaatgggttttgtgaaactgtatttggtgttgttgggacgctttttcaagtgccatgtttttanacctcttttaataacaactttgtgaaaactttcatgttatgaaaaagattccaaagtttgtattaactcactattctaccccttttctagtgtgttgctcatatttcaatgacaacaatcatgtgacttttttaagttgccatgtgatcattaaataactttttatcttaatcacttatgtatgatttagatttaggatttagttagatacaagttaaaaaagcttttgagaaaataggtaacaattacattgtaaaact

SEQ ID NO: 58537 - DNA, 302 bp, Glycine max
  unsure (1)..(302): unsure at all n locations
ctacgctcttgaccttgactagatagatcctctttttaagtgaaggctcttgactggatctcatgttctactaaagtgaacaagaatcggtgtgaatcataacccccacatctatcatgggtggaatggatgaacgcatgatgaaatgcatatgacacgaatgctatttatgaacacgggagcccgggaaattgtctccttcttagatacaacatcttgnggtagcaaagcgcccgatgtacgtattaaagaacgagacacggatcgctcgttggttttccaatgtgcgtgatgcatatgcg

SEQ ID NO: 58538 - DNA, 393 bp, Glycine max
tataagaacaaaattgttttattcatttccaaatatgcatgtgaattatgacacatcaacaagaatcaagccaaggctattgtgcaagcaatcaatggggcaaaacacaccaaatgattatgatgatggatggctcaaattctcacaaaggtaaactcatcactttcaaattgagctttcaaaactatcatgacatgtagagaagaatcaaggatttcaagtcacaaaatgtcaagaacttttattttcaaaacaattacccatttcttgaacatatcctataattcaaagaaaaacatgcaaattcgtacgtgcacacaaaattgacccaaaatattaaactgaaaatccgacgaaactaacaacattaacaaattaacacaactaacaaat

SEQ ID NO: 58539 - DNA, 277 bp, Glycine max
  unsure (1)..(277): unsure at all n locations
agctngcatccactagaagagtattattatgtgattatatctntgactggaaagggtagtcagntggtcagattgattatgaaggaatgcattgactgtatcccggtaagagtgtgatccttaaatgatctatccctgaagtactgattttcgcatgaatctctgaagtatggactgaatgcatgaaattgaggatgatgaaggccatgtttgattatgatagccacttatccaaaaaggtaaccatgtgcttgaatgatttatcccttgcacccta

SEQ ID NO: 58540 - DNA, 380 bp, Glycine max
  unsure (1)..(380): unsure at all n locations
tttgttatttatagaccttcatcttcaatcgtttgttgtctttaaatggatagaattcttcacttgaactcatgtgtgtcgtttgagatcattagagcatttaatgaacattcttcttcatgttagaaaaccactttggttagctattgtgttgaacactacaacagaaaaccacataccttgagtcaaagtaggtctgtcacaacaatgttcatcttttgattntgtttgataactccacgaagctngaactttatttattcttcatgggatttgacagatcctaggagaacgtcttgtaagacagttattgcaaagcaaatttcagacatagagtattaaatgttgtctttaatgttgtatcaaattatggattaaac

SEQ ID NO: 58541 - DNA, 358 bp, Glycine max
  unsure (1)..(358): unsure at all n locations
caagcttgaatngngtgtcattgttgtgacaatgcttattggaggccatacctgcatatgaggcgtttctagttgaacttctccacctcgctcattgtgatttctcgcaatggtcttgcctcgatccacttggtgaagtagttgatagcgactagtaaatatttgactgctcacgattcaacaattgtcctagtatgttcattccccatatggcgaagggctaaggggaactcgggttgtggagattgtcaggagaggtgcgcggaatgtcagcgaattcctggcatcgtctacacttctttgtgaagtggatggcgttagccatgagtgttggctaatagtagcttgcgttcaccac

SEQ ID NO: 58542 - DNA, 361 bp, Glycine max
  unsure (1)..(361): unsure at all n locations
ngtctaattgaaataagctgtttagagcttattctaataagcttttccatcgagtttattgaaacaagttgttcaatagactgcaaaacctttttttttttgtctttattaggattgaataatgcaccaaagttattgttattgctgatgtgcatagatgttgacagggctgatttttggtcttttgggattacggcacttgaattggctcatggccatgcaccattttcaaaatatcctccaatgaaggtatttacatcccgtggttgttcagagacaatgtctagacacatgttaacattggaccgattgaagttcatgtgatataatttgtaataaaagaaaaagagagttcactttt

SEQ ID NO: 58543 - DNA, 109 bp, Glycine max
  unsure (1)..(109): unsure at all n locations
acattaaaaataccagatctangaagtgatcctaggtcgtcttccaatgagcaatggtcaaccaacgttcataatagatagtgataaaatagtaacgacatcggggggg

SEQ ID NO: 58544 - DNA, 405 bp, Glycine max
  unsure (1)..(405): unsure at all n locations
tcaagcttgaaatgaggaagtgtggaagggtgagacttttacttttattcattgtccacagagtggtacctggagatatgtcgcggnggtcaggagaccttggggacgtcaggtggggtgctattgcccaaaaccaagcttgaccaatcccgacccaacccgggcgtagtcagtcagtgagaacctgtgatgtacctaaacaggcaagctcctggcagtcaaccgataaaagaacaaagaccacaaagcaaggaggcttgtgtggtggctggccagctgtgaatcttgagtgatatataggatatggcctctggtaatcgattaccaagggtgggtaatcgattacaaggcttaaaaacgagatcaggaagctaagagggcttctggtaaacgattacaaagggg

SEQ ID NO: 58545 - DNA, 328 bp, Glycine max
  unsure (1)..(328): unsure at all n locations
gctcanaagtcaagaacacttcatgttaacaaagatgatgacttcaagaatcaaagaatgagttcaagattgaatcaagaacacttcaaggttcaaaaggaaatttgatttcaagaatcaagaatcaagtttcaagattcaagttccaagaatcaagatcaagattccagactcaagattcaagaatcaagagaagactcaatcaagataagtattaaaaagtgttttcanaaactgagtagcacatgagattttctcanaacccttctgccaaagagttttactctctnggtaatcgataccagattattgtaatcgattaccagta

SEQ ID NO: 58546 - DNA, 362 bp, Glycine max
gctttcataagtgaaattaggtatagccatctcccttttagtcctctcatgtggtgggggttgagccatgttctcagtatgaaaattagtagtcgaatgctcaaaatcagaatgttcagaatcaccagcaacagaatactcagaatgctcaaaatgctcaaaatgcacaaaatgaccaagatgcccactattcctaagtaatcattgaaaggttctatttatttcaaaataaaagggttgtaaatcactagaattgccctactcatgcactatattcagcaaatcatgtggtttttaaccagcaccacgggaaggattaaacttccacttttgtccaaccatattccaatgaactgaaattt

SEQ ID NO: 58547 - DNA, 156 bp, Glycine max
  unsure (1)..(156): unsure at all n locations
tgaactaacatgttcttaataatggtcactttacatgagtgtaaagaaaatgaggcaagagagacaattaattcaaaaatgtgaatagaaaaaaaaaactcccacatctaaattgtagttctttattngatccaacaaaatataattgaatacatc

SEQ ID NO: 58548 - DNA, 320 bp, Glycine max
  unsure (1)..(320): unsure at all n locations
caggttcaannncccngnatctcctttaattctttcatgagactcgctcaaattcagaaaggtagtttctgttttgtaaaaagcataaaaagtttcttagattctatcctaacaagttgtggctaagtttcaatgagttgtgatcgagctcctggtcttcatagaatctttgatctcctactccaatgtcgggggaggtacttacaaaaaggactctaacaatcaagtcagttgagcccaaagagttcgtgtatttgtgtatggggtgataaaaaatgtatcttgtgtgttctttgggtctatattgtacacgttcaacc

SEQ ID NO: 58549 - DNA, 398 bp, Glycine max
  unsure (1)..(398): unsure at all n locations
tctggctactgactatttattctaattgatagttcatannctcggtctttctttgtctaacatacatacttgctcaaacttatgaaaagaaacacaaactccatcacaatcatgcattcaatccaaaatcaattcataacatcaattntcacaaaaagataaaagtgtctcactgcataatcatcatgatcaagtaaaactgttttgtatgcttcaaaacatgcatactaactatccaccagaaaaacataagtatataaacgtaaatcanaatcactaanaacaatgtactgaaactaatatagttataattattatccacaaagcanaatcatcaggaaattaaaagtcctgagatagatcttgggtatcctgagtctgagcctcctcctcatcta

SEQ ID NO: 58550 - DNA, 409 bp, Glycine max
  unsure (1)..(409): unsure at all n locations
tcttatccaaggctcatcttggtggngaagctttttcttccatggcttattccctagtgtatggcgccgcctcttacctcttctcctttgtcttctgctgcatctccagggtggaaaatcaccattaaaggacctcattgaaactcaaagatccagcctccatagaaactccacaagcaagttttcatcaataagactaatcaaataaaaatttaaaagactaaaaatataatttattctattattttttaatgcttaacttaataactattgggtcactttaaatcttcttggtacgtttcactcaagtttgttgtaagaatcagagtttgtgttgcatagcttgcttcttattattatatatagattaaattttatgattcaattaattaatcatgtgttattttat

SEQ ID NO: 58551 - DNA, 320 bp, Glycine max
  unsure (1)..(320): unsure at all n locations
atcattctttcctttanatggaggaatggtgagtttaataccatcaattcggtttttgctaagaacaccatcattccctcttctcctcctttcttcttcattatgatctctattctccatttgattcaacctctcatggagcgcatcatctcgttgtttcattaacctctccaaatgttgcatcaaagcttgcatttggaattgcgaaagccccactccatcattangaatagtacctgacatctcaaacaaacaaatcanacgtaacaagaacaatatagttgctggttgaatacctcacccactcaagtgtatcacac

SEQ ID NO: 58552 - DNA, 387 bp, Glycine max
tgaccaatcccgacctttactcggcatagtcgttcattgagaacctgcgatgtacctaagcaggcgagctcctgacagtcaacagataaaaggaaaacaagaccacacagcaaggaggcttgtggtggctggccagctgtgaattttgtgtaatatgtggatagaggcctctggtaatcaattactaagggtgggtaatcgattacaaggcttaaaattgaagacaggaggctaagatggtctctggtaatcgattaccaaggggtgtaatcgattaccaggcttgaaaacgaagttaggaaacttagggagcctctggtaatcgattaccagcctgtgtaatcgattacacagaggaatgggtcactggtaatcgattaccaggca

SEQ ID NO: 58553 - DNA, 151 bp, Glycine max
  unsure (1)..(151): unsure at all n locations
atcggactnccgagattaatgttattgtcgttagaattagctacgagcttcggctctaaatttcgagcgtctcgatatatttcgggactcaatcggacttgcgagagaaaagttatcgtcgttagaattagctgcgagcttgggttttaaa

SEQ ID NO: 58554 - DNA, 373 bp, Glycine max
  unsure (1)..(373): unsure at all n locations
attctactatcttaacattncacttggaagtccgattgagtcccgaaatatatcgagacgctcgaaatttaaaaccgaagctactagcaaattcgaacaacaataacatttcactcggaagtctgattgagtcccgtaatatatacgggacgctagaaatttaaaaccgaagatcgtagcaaatttgaacgacaataacttttcagtcagaagtctgattgagtcgagtaatatatcgagacgctcgaaatttaaaaccgaaacttgaagcatattcgaacaacaataacatttcactcggaagtccgattgagtcccgtaatatattcgagacgctagaatttaaaaccgaagctcgtacaaattcgaacga

SEQ ID NO: 58555 - DNA, 448 bp, Glycine max
  unsure (1)..(448): unsure at all n locations
actcgactcacaatataatacccttcattatagtttacgtctttaaggcatgaatgtggtataaccttttcttgaaaaataaataggcataattgcactaaatactcttaatgcttattacacccaanatccctctcatatgggaaattactgccctttactttatgtaatgttctcacacccctacacccttggttgcataagaaattacagatacctcccctactntctgtacaaaccttacacagagtcgcctggtagatattataaaacatgcaattccncacacaaaaatggtgttagtgtaacaagcaataacaataaaggagtngaataatcagcacctatgaagcacggacttcgacaccaatgccgcgacacgactaaattctaaaacataagacacggngacacgcatatatatatatatatatatatatatatatat

SEQ ID NO: 58556 - DNA, 374 bp, Glycine max
  unsure (1)..(374): unsure at all n locations
tgagaagaaagaacattataattngaatcttttcgtgtangttcattagntacagctcttcttcaaaacctttggtatttataagccctcttcttcaaggttctaatgggcctaaatgaataaaaattttcaatggaacctggggttgaaaaaagtggtcgtggggcaatccatggttgaataaatgcatgtccgcttcatgctggaaaatcactctctttagcttccttgaaggatactntagcaaanaatcacttattttttgttagaccaggtctatcacaacagagcacgagttttgatactatttgaacttccaggctcttaaagttcttttattcttcttaggaatttgagagatcctangagaatgc

SEQ ID NO: 58557 - DNA, 77 bp, Glycine max
  unsure (1)..(77): unsure at all n locations
gcttagctcgcctaggcgagcttatttcgnccattattgcttctctctatanatagccatgatgaggggggggggga

SEQ ID NO: 58558 - DNA, 374 bp, Glycine max
  unsure (1)..(374): unsure at all n locations
ctcagctngctctaaatttacattgatgttngtatttgtgttaggaggttttatgccatttttgttttaagaagaatgttccactggtaaaactacctttccaaaggttggccttcgcaggaatggccccgaggaagcttgcctcaaagaggtccaggaaggacaaggcggccgaaggaactagttccgttccgaagtacaacagtaaccgctttaggagcgctgtacaccagcagcgcttcgaagccattaagggatggtcgtttctccgggagcgacccgtccagctcagggacgacgagtatactgattttcaggaggaaatagggcgccggcagtgggcaccactggttactcctatggccaagtttgat

SEQ ID NO: 58559 - DNA, 359 bp, Glycine max
atattactaacacacacacacatgtctttcactctcatataggctctcccgaatctgagcgtttgccagacctgaactctataacaagattacatgtgtaaagataaaagatttttaattcaacatgcaaaactaaaaattattaccaagctcatgagcttttttctttctttgcactatggcaaatgctattgtgcatgccagaatacccatgccacttccaaacttcaaatgggatttcatgtagaccaacaactttaccctaaaataacgaaaacaaatattcccctggctatatagattagaatctaatagactattctttttagtgttgtaaatctgaatgaatctccaaaaat

SEQ ID NO: 58560 - DNA, 420 bp, Glycine max
  unsure (1)..(420): unsure at all n locations
ctgagcacctncttggacactaaatcaacacagaaacctgatacatcagagcataacaaatttcatttttatcgtcccaccctatcatgaatattgaaatgacatgcactgtggtttttctgtatttggtttcagtctagcttgctagctagctgtaagcaaaatgcattntaagtgaaacattaatcgatctaagatatttatatgcatacacttacaagacaggacacaatgtatgtgaataaacacatcataatgttattcttcaagtgaagtcattaaaaatatataaatattaacattcatacactaatggagaggacaagagagaataaggtcanaatgagttaacattgacatcatcatgaaatacagtcataaaagtaaattggcgatctttcatgaataatattatgctct

SEQ ID NO: 58561 - DNA, 375 bp, Glycine max
  unsure (1)..(375): unsure at all n locations
ngttttaatgtaaganacatcttctttgaccttggngatccttgactccatctcatcgaatcgcatgtccacttgtaactccaaagtatcaaacctttcaccaacaaaggtttgaagaccatcgaacctgtccaaaatcttttgaaaaagagaggaatcttctccaccatgtaaatntccttcttcatcaatgggttgagcaccctttttcacccaagagccatcatgctctttatgtaaccaaaggatgcaatcacagtggcaccgattaagaaggatctcttgattggaacataaggttcaaaatcaagagggatgttaaagtgtttaaggaagagagtgactacgtgtggatatggcaatggagcatttaat

SEQ ID NO: 58562 - DNA, 391 bp, Glycine max
  unsure (1)..(391): unsure at all n locations
agcttcatgatgaatcaagattgattcanagaatnttgatgataacaaagataatgacaaaaagctcaaaagtcaagaacacttcatgttaacaaagatgatgacttcaagaatcaaagaatgagttcaagattgaatcaagaacacttcaaggttcaaaaggaaatttgatttcaagaatcaagaatcaagtttcaagattcaagttccaagaatcaagatcaagattccagactcaagattcaagaatcaagagaagactcaatcaagataagtattaaaaagttttttcaaaaactgagtagcacatgaatttttctcacaaccttctgccaaagaagttttactctctggtaatcgattaccagattatttgtaatcgataccagta

SEQ ID NO: 58563 - DNA, 349 bp, Glycine max
  unsure (1)..(349): unsure at all n locations
aagtgaaattaggtatagccatctcctttttatcctctcataaggtgggggtggacccttgtcctcatattaaaaataataatccaatgcctcaaatccaaatggttcaaatcacccaccaccaaatcctcaaatgctcaaatgctcaaatgccccaaattgaccaagatgccccctattcctaagtaatcaatgaaaggttctatctatttcaagataaaagggttgtaaatcacctagattgcccctactcatgcactatatgcagcanatcatgtgtttctcaacaagcaccaggggagggataaaactacaactatagtcaaacgatatccanatgagctgaaat

SEQ ID NO: 58564 - DNA, 448 bp, Glycine max
  unsure (1)..(448): unsure at all n locations
agcttagtgcgcagctagcccgcccaacaaggatgttgtctcttctcactcttagcgtgcccaagctcgcttagcggaatttcacttactctcgctcagcgagacatgctcgctgagcgcaccttcatgtgctgagaagtttgagagcccttaaaacaatgagttggtgggaaaccatatgacaccaagctagaccaagccattactacgtaaaaacagagagaagaaggcagagaggctggagagaagacattcatctccatccttntccattntctttcacanaaacactagcttttctttgtattaagctctccttgtcaatggagggctagaaacttctttngtggngagtattctactgagcactcttaatgtaaacctctaactatctaattaatggctatttctagtgttctttgcttctatctgcatttaatttacattc

SEQ ID NO: 58565 - DNA, 397 bp, Glycine max
gcttaacaccttgcaagttctccatattttcaatgtattaatagttgctgaaccttgtctttatcctcttctaactacaggcaaaattttcctgaaatccctacccaaaatcacaacctttccaccgaatggtttatggatgctatcttcaaattgaaatcccattaggtctaaggtgcgatcaaacacttcaaagcaaaacttgttcatcatgggcgcttcatcccaaatgattagtttagcttctataagtagttttgctcaattgttgccttgtttgatattgcaagttaaatccttattgataaccaatggaagacaaaaggtggaatgagatgttttatctccaggtaatagcaaagaagcaattccacttgaagcaacattaaggacaatg

SEQ ID NO: 58566 - DNA, 371 bp, Glycine max
  unsure (1)..(371): unsure at all n locations
ctccacagaggccatttccttcctcgcccagtattatgatcgaccgttgagatgctntacctttggggacttccagctgtcacccatggtggaagaatttgaagagatcctaggatgtcctctagggggaaggagaccatacctcttctcagggttctatccctcattagctagaatttcaaagatagtccaaatctcggggcaggaattagaccatggaaagcatgtcaaaaatggggtggttggaatatcgagaaaatgtgtggaggcaaaagcaagaaccttggcaggtaaaggcgaatgggccccgctcatagacattctcgcactggtgatctttggaggagtcctcttctcgaatatggatgggt

SEQ ID NO: 58567 - DNA, 400 bp, Glycine max
tcaactcttaaagtaccaccctaacatcccttcttgggaccactccctaactctaaaccccatgtgtctctcttgacctttttaaacaccccattttttttcttaaaagaaattaaaaaggattatatttaaaaataaatagagttttagaaaaataatgaagattttggaattaaataaataaataggcaaataaaataaatatatgttcttaaaaaatgttttatttattcatttgataggtagtaaaatagagtttatttttataaaatgataaaatcactaccacaaaaatggtcttctacaatgcaagttttattatgggtgtacaaaaactgatgtcataagtaaagtggtgacatttttgtaaacaactggaaattttcaaagaggattttat

SEQ ID NO: 58568 - DNA, 369 bp, Glycine max
  unsure (1)..(369): unsure at all n locations
agcttgaatgctctattcaatggagttgacaagaatatcttagactgatttacacatgnacagnggccaaggatgcatgggagatcctgaaaaccactcatgaaggaacctncgaagtgaagatgtccagattgcaactattggccacaaaattcgaaaatctgaagatgaaggaggaagagtgtattcatgacttccacatgaacattcttgaaattgccaatgctcgcactgccttgggagaaaggatgacagatgacacactggtgagaaagatcctcagatcctttgctaagagattngacatgaaagtcacttgaatagaggaggcccaagacatttgcaacatgagagtggatgaactcattg

SEQ ID NO: 58569 - DNA, 379 bp, Glycine max
  unsure (1)..(379): unsure at all n locations
cgcaaaagncactcaaaaccgnntcaattttcaacgccttaaacggtcctctttgcttttatcgggtaacatggaccgctcaaaagcataaaatcaacacataaatttaccgcttttgcaagaactacgtaggtctgagttcctcatcgcaattgaggatacgtaggagcaaaagccccgcctttgtcgaccaccccaagaggtcgttaatggtccaatgccttaacgtttctctcttttcaaaaacaaaagatcgctaatggtccaacgccttaacgtttttctcctttcaaaaaaacaagatatccttaatggtctaatgccttaacgtttctctcctttcaaaatcaaaacatcgtttaaagggccaacaccttaa

SEQ ID NO: 58570 - DNA, 278 bp, Glycine max
  unsure (1)..(278): unsure at all n locations
cgaagacaaccttctttctccctttgcnggcctagttagcatagcttttatgtctgctgttaatgtgancattgactgtctgatgaagcttgttcacatagtccgcctttgcttgaccttctttatgcttaaaaacagaaacattaggcctaggcaaaagatcacagaagagttagtcgggttaaaaccataaacagctgtcaaaggagaacaattagtggtgctatgaacagctctattgtaagcaaattcaacatggggtaaacaagcttcccaag

SEQ ID NO: 58571 - DNA, 404 bp, Glycine max
  unsure (1)..(404): unsure at all n locations
attttgctataaatcgggggagatgtgattaagannagggttcagcccctgttgtacttctctctctctctctcaatagctgaggaaaattagttccatgaagaaaatccaaaccgaggcgcttgcgtaacgtttccgtgagtaattacgcgaagattctcgaccgttcttcaagattcatcgttcgttcttcgttttcttcggtcttcaacgggtaagtacctcaaaccaagcttttcaattcattctatgtactcggggtggtccacattttgtttcatgtatttttattctcgntttcatttactttttatacccccttttgacgtgcttaagccatttatttaagtcatttctcgcttaatctaaaaataaaataaatttccaccgatcgtttgaattgg

SEQ ID NO: 58572 - DNA, 390 bp, Glycine max
agaggagtgttgatcacaaacccatcataccacttaggtgcaacaattcaacgcacggttctggaggagcttcttgactctgtgactcgcaagaacatacaacttgtctcagatgaaatctactcaggctcggtgttttcctcctccgaattcgtgagtgtagcagaaatcctcgaagctcgccaatacaagaacgcagagagggttcacattgtttatagcctctccaaagaccttggtcttcctggtttcagagttggaactacttattcatacaatgataaggttgtgaccacagcgagaaggatgtctgagttcaccttaatatcctcacagacacagcaccttttggcttctatgttgtctgataagaaagtcactgataactac

SEQ ID NO: 58573 - DNA, 448 bp, Glycine max
  unsure (1)..(448): unsure at all n locations
cccccccnagntttgaacttgtaatttcgggcttgataaaccccgctnnaacacnnagcgttctaggcgaacagcccaagtggggtaccacgcgttacactagaccgtcatgtgtcctcagcgagaccatctaccgacaccccattctttttcttcaaagaaatccctttaggctcataactggcgataaatagtagttgttaagcaccaactagattttggtaacaaccaaccaatgaggccaacaccaaaaattgatgcccttaggaaatgatttatcacatgccatttgcaaggtcgcacagtagagcatatttccacaaagtgaaaccacctctaccacaaaaatggcttgttacaacgcccgcacattatgggcgtagccaacctgagcactcaatcagtggggacttcttgtcaccccaggacaactgtaagacggcttagg

SEQ ID NO: 58574 - DNA, 365 bp, Glycine max
  unsure (1)..(365): unsure at all n locations
ctgaacagaccattcagtcgttggaggaccttttaagagcatgtgtcttacagcacaagggaagctgggagagttntcttccattgatagagttcacttataacaacagttttcattctaccattggcatggctccctatgaagctttgtatggcagaaggtgtagaacatccctatgttggttagagcccggagaaggcctcaccttangaccagaagtggtacaacanaccactgagaaaattaagttaattcacgataggatgagaactgctcagagtaggcagaaaaagtatcatgataagaggaggaaagatctggaattcgagggtggtgatcatgtattcttgagagtcactccatgg

SEQ ID NO: 58575 - DNA, 511 bp, Glycine max
  unsure (1)..(511): unsure at all n locations
tcgaacaaccnctaacccacaccatgacacaaaaactngnnatccctctcagatcaaagagcattgatacctgaantctaaactcgataacccctgcaaccacaacagcagagccgaggacatatgtgggacgcacgtcaacactcagatgtccccgcgcgatccggataacaagacgccttcaagccctgagacgaccaccgttccaccaggaaaggagggcaaccctagcgagacgggtcgagacactggatacacgccacgcaaaacgaggcttacaacccaaaagccaccaggagcggcgcaaaccaaggagcccccacgaaggacaaacacagtctaatactcacaaagaaaagagggctgatgcccaacccaagggctcgaaaagggaccctagaggagcgaagagaacacctagaggaccctccaccgggaagctcctggccacaaacaaccgcggaaatcttacgattcaacgacccgtagcgggagcaagaagggcatcccg

SEQ ID NO: 58576 - DNA, 341 bp, Glycine max
ctaaagagagacaaaagctggtgcaaatcacaactccgatatctcatgggtggaatggatgaatgcatgaaggaaagcatataacacacatgtcatctaggaatgcggcggtgcggtgaattcgtccccttcttagacacaatgtctaggggtagcaaagcgccccaacgtactgttttaagaaagcgacacggaccctccgttggtttgtatacagaagggatcaagacagaacccatatgcgatgcctatgcaaaagacacaatgcgggaatgtacacagtatgataatattcactgaacataagcaacagggtatatgatacttatgcctggcactgt

SEQ ID NO: 58577 - DNA, 367 bp, Glycine max
tacagctaattatttatgacccactaacttattattaataaaactcaatgccattaacctagggtatgaaaacaaaacttactggctgattgaactgaaattgtgggcaccaaaagtcacccccaacagtcaataaagtagccaccatttggtctcccaaaaggctgatgccctatgttgccaattgggcccttattacaacttgaactaaacctaactaaagcccttttagttgattaacccaaaacatatttttggtaagccaactttatagggattggaccattatttacacaaactaaacactctaaaattgaaacaaagtggtgtcacttagtcctccttcatttgggccatgatacaactc

SEQ ID NO: 58578 - DNA, 371 bp, Glycine max
tgtcgaaacgaaaaaccaacacttggaaagcatctttagccgttgacgaagctgccggagcaactcggacaagattccgatgacggcacggtggtgcgtggactacacgcgtcggacaacacccgaagctgtaacggtgcgtggaggcgcgtggaagcttcgatgacggagcgatttgcagggttttggtcgcacttttccgacgatcctaaccctgatgtcgccagagataatgacggcggtggacggtggaacccgttctgatgccaacttgaagctctgagttttagtgagttgaaaagtagactcacttagcttaatattattgcctttaacacacatacatatatacacaatacatggcataatga

SEQ ID NO: 58579 - DNA, 397 bp, Glycine max
  unsure (1)..(397): unsure at all n locations
aagctatataagnacctataatttctatgcgaattcattaaataatccatanaagaaaancgaacaanatcaacacgcaatagaaagcataaggcataaaattaaagagcaaagtttagagatactaggttaccttctaggagcacttctttaacgtctttagttggacacgtggttgtagtcaaggctgtgccatctcacacttcctaattcttttcttcgatcgtgagcaaatccgattgtggacttagcacctgttggcacctgctctaatgccttgacaaagagaatgtttacatgcaaatgtttaaaatgctatgaaattcttgtatcacctttcccatttgaccctaggtttacccaagttggtgtggcaccaaccataacccaaaatgac

SEQ ID NO: 58580 - DNA, 368 bp, Glycine max
tatgctgcaaatatttacaatatacctcctcattctcagcagcaaaatcaaccacagcagaacaattatgacctctccagcaatagatacaaccctggatggaggaatcaccctaacctcagatggtgcagccctcagcaacaacaacaggagcctgctccttccttccaaaatgctgctggcccaagcaaaccatgcattcctccaccaatccaacaacagcgacaaccgcagaaacaaccaacagttgaggcccctccacaaccttccctcgaagaacttgtgaggcaaatgactatgcagaacatgcagtttcagcaagagaccagagcctccattcagagcttaaccaatcagatgggacaatt

SEQ ID NO: 58581 - DNA, 440 bp, Glycine max
  unsure (1)..(440): unsure at all n locations
agcttgaatgctctattcaatggagttgacaagtatttcttcagactgatcaacacatgtacagtggccaaggatgcatgggagatcctgaaaaccactcatgaaggaacctccaaagtgaagatgtccagattgcaactattggccacaaaattcgaaaatctgaagatgaaggaggaagagtgtattcatgacttncacatgaacattcttgaaattgccaatgcttgcactgccttgngagaaaggatgacagatganaaactggtgagaaagatcctcagatcctcgcctaagagattngacatgaaagtcactgcaatagaggaggcccaagacattngcaacatgagagtnggatgaactcattggttccttcaaacctttgagctangactctcggatagggctgaaaagaagagcaagaatctggcgttcgt

SEQ ID NO: 58582 - DNA, 330 bp, Glycine max
aagccttaaacggctctctttgcttttatcgggtaacatggacccgtcaaaagcataaagatcacacataaatttaccgcttatgcaagaactacgcaggtctgaattcctcatcgcaattgaggatacgtaggagcaaaagccccgcctttgtcgaccaccccaagaggacggtaatggtccaatgccttaacggttctctcttttcaaaaaccaaagatcgttgatggtccaacgccttaacggttttctccttttaaagaaacaagatatccttaatggtctaatgccgtaacgtctctctcctttcaaaatcacaacatcggttaa

SEQ ID NO: 58583 - DNA, 422 bp, Glycine max
  unsure (1)..(422): unsure at all n locations
gtcacacacaaatgataaaactataacctaagttaacaaaaaanaattacaactgtcaactggtaatcaaggtttaaaaaaaaaagtctgcaacatcaaggtttccaggtggcagggagaggcggagagctaataacaaaatcaccaaatcaaccaacacaaatctcaatatctatcaactaactgatcgaatttcttcaagcaaaaagctaacatttaacaagaatttaccaaaaaccaaggcatcacaaatccgatcgaatataatacaatctcaattcaagccaactgttcaaagattntaccaatctcgacgccaagaccctacatcccgcagatgagaaaagtggaaccgaagagcctntgcatgatctctcgcccatacacggcgagttgtcggctgtggagatcctcatcgatgt

SEQ ID NO: 58584 - DNA, 416 bp, Glycine max
acactatatagaaccctagcttaggctaccagaaatgccgagtacttatataatgatacaaacatagaattaaacatagaggtgaaacataatgaagactccatccaacattcaaggtaccgcaaccaatgtaacatggaattcagaatgtagatccattccatccaaagttggaaccctgcagaacaaacaaagtaccattaccatcaatcatcagccatgaaaacaaaaaatttcttgggtgtaaaagcagacactggaaaaagtgagaattgatgttaaaagaaaacagatagtattatcaaagtgtaaattataaatggcggatggcggaacatggcagaaggtcgaaattctgccatataaacacgccattgccccttatgttatcgccatggggggcctcccttcacaaa

SEQ ID NO: 58585 - DNA, 352 bp, Glycine max
atgttcagtagctgcttacaggggaatgctgttttttactgttatgctgctaattacaatacacgatcattgatgttactggttgcaaatgttgaataggaatatagaaacatattgctacagtttgtctatgacgattagatgaatggaaattctacgaccttgaatttgagagttaatagctaatcttagtctgtagttgtctatacaagaagttgcacggcaaaggctggttatgaatgcaagttagaaatgatatgctattgtgggaaaacataacttcggcaaagaggctgtttccggattcgaacccatgaccaacaagtcaccaaggcacaactttaccgctgca

SEQ ID NO: 58586 - DNA, 396 bp, Glycine max
ctctgcagagaacaatgcagaaaccaaaaaatacccctggttttcatactttcgttgtccatcgaggtactgaacaaaaccatcaatgagatatggaccaacataagaagccaaagtgtttaacaatacaagaaaagctgtgataagaatctccttccatgctgaaattattaacgatttcaccaacttcagtgtggtgacactattaattccaccacaatcagcctcaactttctctctgaaagttggaaaagcaccaattacactatctctgctgtctagttgaggaacatcctcaaggtccagggtcttcttattaccaacggctataagaggacccacccaagagaaggtaagaatgctcaaaattccagcatatgagaaaggggtaactga

SEQ ID NO: 58587 - DNA, 250 bp, Glycine max
  unsure (1)..(250): unsure at all n locations
agcttctcgatatattatgcgcctgaatctgatcttcgtgtganaagttatgttcttttgaatgtctcgagagcttccgttgctcaattgcgagcgtgtagatatttcatgcgcctgaatcgggcatccgagtgaaaaggtatgaccatttgtatttgtcgagagcttccgatgttcaattacgagggtcgcgatatgttatgtgcacgactcgaacatccgagtgaaatgttctgacgttggaatgtct

SEQ ID NO: 58588 - DNA, 392 bp, Glycine max
tgtgcaaatcaaatcactcctacattttatctctagcatgcattgtatgttggtctcgtcctttgtcacaggaagccggaaggtccatatcaccttcttaattgtacacatggggcactgcgcccccaaatgcgcgagtaagaagagataattttccgggctctcgtgtccgtaaaatgcattcatatcatgcatcgcataagcatctcttcataacatcataatggacatatcctgcatttgtccgttatcatattccagcctcacattttgcatgagtcatggcatcatcatgcatatgcgttcaacaaactttttgatctgcaaaattgcataccatttgttttcatgtttgctcatccttgcgttttcctctacaaaacaaaaacaaa

SEQ ID NO: 58589 - DNA, 327 bp, Glycine max
  unsure (1)..(327): unsure at all n locations
ctgcagctatgggatgaatggcaattatcagcagatttctctctgcacttatggaggatgcaagtgtgacgttgggatcaaaatggagaaacaacgagaagaagagaaagttcatcaattcttgatgggtctagatgatgttttgtacggtacggtccgctctaaccttcttgcaactgatcccttgcctacattaaatagagtgtatgccactttggtgcaagaagaaagagtgagaaccatatctcggngaaaggaggaacgaggagaggctgttgggttctctgcacaggcccgtggaagaaccataggactcgctgaatcaaa

SEQ ID NO: 58590 - DNA, 386 bp, Glycine max
gcttagccctagaggggatggaccttttcaggtttttgagaggatcaatatctttgcctataggttggacctcccagaagagtatggagtcagcaccacttttaacatttctgatttaattccttttgcaaatggagctgatattgaggacgaagaactaacagatttgaggtcaaatcctcttcaaggggaaggggatgatgcaatcctccctaggaagggaccagtcactagagccatgagcaagaggctccaagaggattgggctaaagctgctgaagaaggccctagggttctcatgaacctcagggtagatttctgagtccatgggccaacgttgggtccaattatctttgtacatattagactaggatgtcattatattt

SEQ ID NO: 58591 - DNA, 352 bp, Glycine max
cctgattagcagccattggagttttttgcacttctaacttatcaactattgtggtgaattaatgtttcttatggattcctaaggtattctcctcttattgagccgggaatcaggactagtattcagcggatacgtcatcagtttgataagatgtgttatatatttatagaatgcggaaaaataaatgatgtaagagattacgtcaaccgtatagaattttttttatatatattctcctaatgaatagtcaaatatttactttttactccatagataaaacttagatagtaacacacaccgtggttttattcgatcccataaaatacacacccttgaaaaggagtgattatgg

SEQ ID NO: 58592 - DNA, 271 bp, Glycine max
actccttttattatttttcccttataaagctaagcctgttggtaggtgccttgaactggaacaaccattcttcaacttatgtttctattaccaattctacgctacatacgacgggagaaggtcagattacgtattcaagatcaattgactatttcaaattcattgaagcagccatactcctcatcttcttggagatctctgaacaagatggtctttcttcacgatcagaagccctacaacttttcattagagatttccactcaggatcaca

SEQ ID NO: 58593 - DNA, 374 bp, Glycine max
tgttaaagaacttagaataaatcaagaacacacttgttcgtacatcgttcgcatgtatgacatccactccacaaggtttgaagtacaggagaccttcaatcctattacgcaacgtggcagacaaaagtgggcagttaacttgaatggtcattattgtcaatgcggaaggtattctgcgcttcactatccatgttcacatattattgcagcttgtggttacgtgaggctgaactactatcaatatatagatgttgtttatacaaataagcacatcttaaaagcttaattcccacaatggtggcctcttaggaatgaagcgactattcctccttctaatgacgcatggacacttatcccttacccaactacaattc

SEQ ID NO: 58594 - DNA, 193 bp, Glycine max
atataaattaattattattattaaaattagtaaatttaagtacttaagattaaatataaatatatgctatataattattagaacgtatatatgtaataatatttatatatttgattacatgtattaagggcgtcattttaacagaatatttatgctgataaatttcgtatatatataaaattattattgtaat

SEQ ID NO: 58595 - DNA, 347 bp, Glycine max
  unsure (1)..(347): unsure at all n locations
gagaatgtcaatccttaccctccgaagcgaanaggaaagaaggaagatctccaatcaaagagaaagtctaaaataagaaagagcagaatgaaaattccccaatcatagagtgggagaaagcaaatagaaaagaaagacaatctccaatcaaagaatgggataaagtcaataaggaagaagaagaaggaatgaaagctcctgatcagggattgaaggaaaacagaagatatgtgcagagaggtctttggaccggacaatatctgaacaatacagatatgtcaccaaatgaacataaaaagaatgaaaggagaccacgacctagaatggtcttctccctttgattacca

SEQ ID NO: 58596 - DNA, 370 bp, Glycine max
tgggtcgataccaagcatgtttgccgcgaatttgcaaacaagtcaacatgttctcgaatgacttgttgtatctggttgtagtcatcctcaggtagctgattcttatcttgagtgacatgtggaaagtagtcatctttttaaccaaggtcacttatttatcatcattggttataggctcaagctcaagtgcttctacttcttctgcctcaattctagtctccacatagtggacagcctcggccttgagggtcctccccttcatttgagggcataatttaaggttggccatgtaacgttccctagtcatcctctggtcagtgtgtacggttataatgttcctgtcctaacattcaacaggaatttcatcatg

SEQ ID NO: 58597 - DNA, 146 bp, Glycine max
ctgcagctacatcagactttgtcatgttcttatccattcttgtctgggaccacattgcatcattggatatcctcatcactagacttctccgcatgcctggtgtatttaaggatgaaaatcctgctgatggtgtggagacatcagtc

SEQ ID NO: 58598 - DNA, 381 bp, Glycine max
  unsure (1)..(381): unsure at all n locations
taagagtgaagaattacaaaatatttattcaatttctgcaacatgtaaaaacaaacaattacaactttattaaataagtaaacaaaatatataatattttcagcaataaaaacaaacaacatatttaattnttcattgtcactaatatagcattgttactaacgaacacattaactcgtttatactgctcactcgtagcaatgaaaatgtgtactctttcctcactaggcctttcgcacacataaataggaaagaaacttgtttcaattttatcttcaacctgaacttttgaaaaagaaaaaaaaaatgagaaaatgaaacatcaaaaccaaagtccataaataaattccaaacaatgaaacttataaggattgttatgtc

SEQ ID NO: 58599 - DNA, 383 bp, Glycine max
  unsure (1)..(383): unsure at all n locations
tatgaagaaagatgatgttatgattntaaccctttcacattatttttagaagtttaattattttgatgtgaaacatgtttctactccttatgactcattcattaagttaaagaaaaatttgagtaaatgaattttttcacataaatattctcaaattattggttctttgtcacatttgacaaacttctctaggcctgacattgcatatgcaattgatagattagaaagtaattgagggatttagtgatgcaaattggatttctgattctgatgaaataaaatcgacaagtggttatgtctctactttagctggcggtgtagtatcatggaaatctgttaaacaaactattatttcacgttctaccatagaagcaanaactatt

SEQ ID NO: 58600 - DNA, 428 bp, Glycine max
  unsure (1)..(428): unsure at all n locations
gtatgaaaagagaggacttgaatacaggtaagtataaaagatagaccagttctgtggtgaaagaaaaaatgaaatatctggctcaaacttgattcaatgacctgaatagctcaaggaaatataagcacctatgatggttatggcacgtacttcaacaattaattcattntagaaactataataattgatacgaaataaaatgtgtggaaatattgagaccatactgcaaatgagcaagtaatattcatcttgaggttcaagtatatattgatggctacacagattaatcccttgaagttaaaatctaacaagcaatttgaagatcaacttctcaggtggtgtaaacacaggattaggatcgcctacagntttataaagaactgcatcaatctagtccattgattaaatctataactggtaatctatct

SEQ ID NO: 58601 - DNA, 371 bp, Glycine max
tttatttggataaaaggctttctattcactttcttctacatcatattcaaacttgtccaaataaataataaagtcatctcgactcaaagaaaatcatataagtctcatacaattaatatagaacctatatcctaatgtcacatcctatcagagcgtggtgttcccgtgtcctctagcatgaggttcttcatagtcatccacctattcatctgctcccccgaacacaagttcaagatcatcacaggatccaaacataacaacacacagggagtgagttatcacattcctagctaatagagaaacaagacaatcaaatatacatattatataaatgagataccacttgcttaaacatagctcacgtaacttca

SEQ ID NO: 58602 - DNA, 370 bp, Glycine max
  unsure (1)..(370): unsure at all n locations
ttctttatagacttgttgccgtatttttaaatttcagaccagactggggtggttggacctattcgactaataatcaatgcctaatctgatccgagtagataattggatcaaacttgtcttcaaactggtgtgatccagttaattagtttttcggatgaaccagtaaatcaatgggtataacaatccaaccagttcaagtaaatttatcttttttttaattaattggtaaatgttgtgctacttttcaaggtgagagttgttattgctttgggaagcgtgcatgcacaatgaccacctggaaaatggtggggtgttttttgtcttccgaagccctacacttgngaaacattgtgcttatgtcagacttaaa

SEQ ID NO: 58603 - DNA, 78 bp, Glycine max
  unsure (1)..(78): unsure at all n locations
gcttcagctcgcctatgcgagcttcaaccgcccanatanggntntttctctataaatagccatgatgagggggggggg

SEQ ID NO: 58604 - DNA, 395 bp, Glycine max
  unsure (1)..(395): unsure at all n locations
gcttgccctaaatttacattgatgtttgtatttgtgtgatgaggttatatgccatttttgttttaagagtaatgttccactggtaaaactaactttccaaatgtttgccttcgcaggaatggccccgaggaagcttgcctcaaagaggtccaggaaagacaaggcggccgaaggaactagttccgctccggagtacgacagtcaccgctttaggagcgctgtacaccagcagcgcttcgaagccattaagggatggtcgtttctccgggagcgacgcgtccagctcagggacgacgagtatactgattttcaggaggaaatagggcgccggcaatgggcaccactggntactcctatggccaagtttgatccagaaatagtccttgaattttatg

SEQ ID NO: 58605 - DNA, 383 bp, Glycine max
ataaaatgcgcacaacaaacaagctacaatatcatcaaagtagtttctataataggccttgtacggattggataatttacacaagatccttaaaaacacacacaagttaataaaggaaataagaaggaaacttgccattgtattttacaaatgaatgaatatctctacgaccagtatctctaaataaccttatgcttatttgaattaccctttcgagcccgagaaaacatattcattgtccatttgagagaagcaacacacttttaaagttttcaaagggtaacacagacatgctatttgtcaaagaaacctccaagctgagattgaatgcattgaggtccctttccatcccactataagacacttgccattattttttctat

SEQ ID NO: 58606 - DNA, 462 bp, Glycine max
  unsure (1)..(462): unsure at all n locations
atctttagattaanaacaatcaaagagagttgggattcattgagcatcaattatgaaggaacanaacatgttcaactaagagaaactgccattctctaacaaggcactatgagagcttctccatgaaagaaggagagtctattgatgacactcattatactctaacatgtgctntgtccatgaatgagtataacaagatctgcagattaaaaacaaccaaagagaattgggattcattgagcatcaattacgaaggaacaaanaatgttcaagtaagaaaaactgccactctaacaaggcactatgagagcttctccatggaagaaggagaatctatngatgacactcattatactctaacattngctntgcccaggaatgagtataacaagatctgtagataaaaagaccaaagagaatgggatcattgagcataatacgaaggacanaagatgttaacta

SEQ ID NO: 58607 - DNA, 394 bp, Glycine max
  unsure (1)..(394): unsure at all n locations
gcttgtgcaaagatagagatgatacacaaagagattttatttttcattntatatgttnggtgaatggaaaggtttgttctctaatcattgatggtggaagttgtaccaatgttgcaagcactaaattagtggagaagcttggttaaaaaccacccctcaccctaagccttataagttgcaatggttgagtgacaatggtgagttggttgtggataagcaagtgttacttacattctccattggaaagtatgttgatgaagtgctttgtgatatggttcccatagaagtcggacatgtgttacttgggagaccttggcaatatgatagagatgttgtccataatggggtcaccaatcgatattctttcttgaataaaggtaaaaagttagttctc

SEQ ID NO: 58608 - DNA, 356 bp, Glycine max
  unsure (1)..(356): unsure at all n locations
aacaacggctcacaaatggtggagagctgcgatatgaatctggcaatataattcaagcgtcccaggaaacctcggacttgcctgtctgtacggagttctggcatctcaaggatagccttcaccttttcggagtctacctctatccctttctggcttacaatgaaaccaagcaatttccctgattcgaccccaaaggtacacttagcggggttcaaccttaattgatatttattaagcctttcgaacaacttccgcacgatgacaaggtgttcttactcagatttagatttagcaattacgtcgtccacgtagacctcgatctcttgatgcatcatatcatggaacanagctaccat

SEQ ID NO: 58609 - DNA, 383 bp, Glycine max
actcttatataacctgaaccattgtatcgataaactcttgttgagttttattcataaaattagagtttatctcttttatcttagtgagagcgattctcctaaattcttgagtgattcaagaacaccttggctgtatcaaaggactttcacaacctttgtgtgttgccctcgctggaaagagtgattctttccttcctttcatcatcacccttgttctttcaaaccacaattccagaaaatccacctctgcccagaattatctcgtggccataactcccattttatgcactcaaattaagtgattcttgagcctaaattgaatttcaaaacgagacctttcacctcgttttggaatcacctcatttggagccctgtagcttcag

SEQ ID NO: 58610 - DNA, 180 bp, Glycine max
tatctttcctgtcagatcctgtttcagaaacaaacgggtttatttttgtacggatacaaggaggttttcatgagatcaggaattccgtaagggtatcaagctcaagatctgtatcctattatatttatatcaaacttaaactgtagcattatctgtactttatcccatatatgtgatgat

SEQ ID NO: 58611 - DNA, 389 bp, Glycine max
cttgcatatttgtcttctcttgctagtcaaactttgtcttctttataattcgttgattactgaactgatgttgcggtgtttctgaatctgatctccagactagtgtggggcaaaagcttttctgatatttcccagcatcttcttttttgtattgcaaactaataacttgttctacaaagattgagattttagggggtgaaattacatgctacgtgcatacagatctttaggtacttgtgtgggtgttcgccaattagaatcgaagctttacctcactaatttgtattgatctataatgcaaacttttactgtatgaaattctaatctgactgaataacaggactaaaaacacttgagaaactggatctttgttttgtctgagaattatt

SEQ ID NO: 58612 - DNA, 409 bp, Glycine max
  unsure (1)..(409): unsure at all n locations
agctntgacgaccatgactgcatacaattcttgaatgttaccctgactttgcatgaaaagaatggcattangtgaaaaagagaaaaaaaatctgattattntacatttaaaagctctatgacttgtatattacatttccaatgaaataaacggtttgtgattttgaattgtgaaactcatgctatgagtaaaataatggattctgccagaaatttacacgaggtaattactcggattaactcaagatgtgatcctaatccattttagtgtcagagaaaggcttatatggtcgcgtgttccttcagtgacactaatttcgaatagaanatcatgatcaaccaccattatccttctaagctaaagcagttntgaagaaagtgagacaacaataatggtaggctgaaaatgc

SEQ ID NO: 58613 - DNA, 334 bp, Glycine max
ttgatacattatttgctttgactgacgcatatttctatttgtctcgtttgggggattcgcaagaacctttgccctgaatcacggagaagcaccaaattatgctgacgccagcaataagaactatttctgtcaatgttttttctaattgtaacaatttgggacttgttatagaccaatatatttcctgctaggcatggagaacctaattaagaaaagtaaaaagaatttatcttagagtgtaacttttaaggatattttcatgttaactattttgggtgtaattactatttaataatatttttttaaaacgagagaaattaaatagagtttcagt

SEQ ID NO: 58614 - DNA, 417 bp, Glycine max
  unsure (1)..(417): unsure at all n locations
angctgcagctatgctganacattacaatagatttcctcattctattatcaaaatcaaccacagcagaaaaattatgacctctccagcaatagatacaaccctggatgaaggaatcaccctaatctcagatggtttagccctcaacagcaacaacagcagcctgctccttccttccaaaatgttgttggcccaagcagaccatacattcctccaccaatccaacaacaatagccccagaaatagccaacagttgagaccgctccacaaccttccctagaagaacttgtgaggcatatgatgatgcagaacatgcagtttcaacaagagaccagagcctccattcagagcttagccaattagatgggacaattagctacacaatngaatcaacaacagtcctagaattccgacaagct

SEQ ID NO: 58615 - DNA, 356 bp, Glycine max
  unsure (1)..(356): unsure at all n locations
tcaacatcagaccacttttagggtgctggaactatttcacatggtcttgatggggcctatgcaagttgaaagccttggaggaaagaggtatgcctatgttgttgtggatgatttctccagatttacctgngtcaactttatcagagagaaatcagacacctttgaagtattcaaggagttgagtctaagacttcaaagagaaaaagactgtgtcatcaagagaatcaggagtgaccatggcagagagtttgaaaacagcaagtttactgaattctgcacatctgaaggcatcactcatgagttctctgcagccattacaccacaacaaaatggcatagttgaaaggaaaaacagga

SEQ ID NO: 58616 - DNA, 417 bp, Glycine max
  unsure (1)..(417): unsure at all n locations
atccttagagtcacctgangctgcagctatgctganatattacaatatttctcctctttctcagcagcaaaatcaaccacagcagaacaattatgacctctccagcaacagatacaaccctggatggaggaatcaccctaacctcagatggtccagccctcagcaacaacaacagcagcctgctccttccttccaaaatgctgctggcccaagcagaccatacattcctccaccaatccaacaacagcaacaacctcaaaaacagccaacagttaaggcccctccacaaccttccctcgaagaacttgtgaggcanatgactatgcagaacatgcatggaataaatgatgtgagttatggaatggaatttttatttgatggagaatctattattnggaattgtggaaaaatgttatg

SEQ ID NO: 58617 - DNA, 384 bp, Glycine max
tgcctagttaacctaaaattgagagaaaattattattgaacacttttaataaaagtactaagtatttattacctatacttaacagaaaatacttataatcttacaaaataaccataaattgggagagtttgatacaatttatacaagttttatacacaaaagttagtcattttcaccgactaagaagtcccccaaatttacagttttgcttgtcctcaagcaaaaagagaacaactcacttgtcctcaagtgacaatgacatgcagtgactatgtacaaaggtgtatgctacaaagtgactgattgcatgataagagaatggagtaaaatgccctcatcacttgtctttcacaaggtatgcagttatccaaagagaagaataaa

SEQ ID NO: 58618 - DNA, 371 bp, Glycine max
tcaatataaagatggcctcagcaaactccttattttcagaagggaattctatcaatagacctccaatctttaatggagagggttaccactactggaaaacccgaatgcaaaattttattgaggcaatagacctaaatatttaggaagccatagaaatagggccttatatacccaccacagtagaaagagttacaatagatggcagttcatcaagtgaaagtataacaatagaaaaacctagagatagatggtctgaagaggatagaaaacgagtacaatacaatttaaaagccaaaaacataataacatctgccctgggaatggatgaatatttcagggtttcaaattgtaagagtgctaaggaaatgtgg

SEQ ID NO: 58619 - DNA, 370 bp, Glycine max
  unsure (1)..(370): unsure at all n locations
tcctctccaaggagtggtgggtctaggaatcttgttcaatgagccgggccggatccaggaacacgagccctttgcggcagaaggttgttaagaccaagcctatgggtttggatgaggaaacacttgccacgtttggtaaggtagtgcatgctgatgttcaaatggaggataatatatgggcaatgttgccagaggacctgttgcatgagatcctagctagggtacccccttttctgattntccggcttcgtttggtttgtaaacggtggaattcgctgcttcaagacagtagttttctcaaattccattccagtgtgccatcacatgggccatgcctctttacgttttggaagacacgcagaccccacag

SEQ ID NO: 58620 - DNA, 521 bp, Glycine max
  unsure (1)..(521): unsure at all n locations
acctgcggcatgcaagctntgatagtaccacctgaagtggaanaataactatttaatatatatttgcttagaaaganaagagaagaaaggtttaacctcaattttatgaagttaattagagaagtatgaaaaacaataaaaagaaatgttacactttaaggaatacactnggtttaattctcatgaaatagactagaagctagcattcttaagactagactagtattcatatgttggtgcgaatatattttagaatttcatccaaaattctaggttaagaagaattttcttgcatctattactaatttctttgatctaatngatggcttttctggatcgcaggcagctctacctcagataattgcgcatactgaagaggttttcttcaagaacaccattgataattngaggcatgctgcatatatantgctgaaagaagtaaaggataatccatacattatttgcccttataaaccagaacggtccatggctatgatggtgaggaactaaggatatatcac

SEQ ID NO: 58621 - DNA, 386 bp, Glycine max
atttagttttcaccggcgaaaggatcgtatttggtctgaaaataggaaaatttgtttatccttctttgataaatgagaaagttggggcaaatgaagagaatgagaaggagggaggaacctatgttgtgactgccattcctacatggccaaatctcccaccagctccacaatatcaatactccgccaatatcatcccctctcattacccaccactcaatcaaccacaaaggtcatccctaaatcagccacaaagctcgcctgccacacatccaataccaaacacaaaccaaaacaccaaccagggaaggaattttctagcgaaaaaacctgtagaattcaccccaatttcggtgtcctatgctaacttgctcccatatctgctcgat

SEQ ID NO: 58622 - DNA, 527 bp, Glycine max
  unsure (1)..(527): unsure at all n locations
ttacagncacctgcggcatgcaagctagtagaatggctagacatgatacatgncaggatcttggttnggttcattgataaaagggatgccccacattatttccatgacacaaatgcaaaaatgatgatttggaaattntatgcaaaactggttatgcatgcacctatgcggacactcaaatgtcaaatttttatggtcatgtgatgctagggctcaagattcatttcctctattntaaatcaacccaatgtttccaaaatatgttcttttatcaatttgtgcattcatccgagtccatttcgggcgtgcggggaaatttcatagcattcacccttcaggtgtacacattttttccaaaaactagttatgatcagtgatattttttcaaagaaaagttggaagtcatctcttttcaaaagcatgtnggttctcagctagacaacttatnnttctttttctccttcttctttattggggttctttntctcttattcgctctcttcttcttttcacttctctttcttttc

SEQ ID NO: 58623 - DNA, 399 bp, Glycine max
ttagcgcatatccttgcggcagatgttcagctcattgggcgctttcccgttaagctaattctgcagaagctaaaattttgcaacttccgctaagtggctccacatgtcgctaagcggtagtgtttttttttttttttttttacaaaggccagctaagcggaccatgtctcgctaagcggccagggtctttttcaattttattttttttcagtttttaaaacttgaataacttgtgtcctgatgagttgtttggttcctttatatgcagatggcctctaagaaacgtaagagtagtgattctaggccacaggatcagaatgataacaggagatttcaatcaaaggaagcctggaaccgatatatcgataatattttagaccaaaggatcctttcgtaaag

SEQ ID NO: 58624 - DNA, 411 bp, Glycine max
  unsure (1)..(411): unsure at all n locations
cctgccgcatgcaagcttaatcggacttccatatgagaagntatgaccatttgaatttcttatagcttccanagcgcaatttcgagcgtctcgatatatgatgcgcctgaatcggacatccgagtgaaaatttgtgatcatttaaatttctcgagagcttccgtggttcaatttctggcatctcgatatattatgcgcctgaatcggacatgcgagtgataagttatgaccatttcaacttctcgagggcttccattgttcaatttcgagcgtctcgatatgtgatgttcctgaatcggacctccgtgtgataacttatgaccatttgaatttcttgatagcttccgtctgtcaattccgagcgtctcagtatgtgatgtgcttgaatcacacatcngagtgacaagttat

SEQ ID NO: 58625 - DNA, 401 bp, Glycine max
gcttatccttatggctggcctctggacttcaccccccgtgccaccccggattatttaagccaagcccctactttcgaggggcaactcccaccttatgacgactatcccgggcaagacgatgaggaaggagatacccatcttggccccctgctccacctcaaagatccgtccccccatgaactaccccaaccgaacatagtttgccatatcccgacttcacccacacctgtaaaagaatctgttcccttcgcggaagataaggggaagatggaggcgcttgaagagaggttaagagcagtcgagggccttggcaattacccattctcggatttggcggatttatgtctcgtgcccaacattgacatccctcccaagttcaaagtaccagactttgataagta

SEQ ID NO: 58626 - DNA, 448 bp, Glycine max
  unsure (1)..(448): unsure at all n locations
agcttcaccaccaagagagngccttgttattaagtttatataggaagctccacggatgaagagaatgagagagagagagatgggcatggaatcgaaggagaattaaggagagaagttgaactttgaagtgtgtctcacaagtttctcattcatcaaagatgtgacaagtgttacacatgtttctatttatagcctaggtcactaactgtttatgaatatcattntcatttcatgtgaatctaagaggaatattccaaggatatgccaaaggcatcttatcatattccaagaatatgccaaaggcatcttagcatattccctttagatgctacaagaatggaaggtgtgactctagtacgtggaaaaggaatatgccaaaggaatattctaagaatatgtcagaggcatcttatcatattccttgagaagctagagggggaaactacac

SEQ ID NO: 58627 - DNA, 376 bp, Glycine max
tccatcaggatatgactcttcacaattgatttttaatttcaacgtttagatacactggtaatcgattaccaatatcttgtaatcgattacaccattttgaaatcaattggaacattacaaattcagttgaaaacttttgaaatcaaactttgcaactggtaatcgattaccagagagtaaaaactctggtaacttagaaaattgtgaaaaaaactcttttgaaaaacaaaattgtgctatgtttgttttctgaaaaatattttcaatacttcccttgtgaagtcttcttgatttcttctcttgaatcttgaattcatcttctcttgaattttgaaatcaaacttctcttgattcttgaaacatgttgactcaatct

SEQ ID NO: 58628 - DNA, 424 bp, Glycine max
  unsure (1)..(424): unsure at all n locations
agctagctcacacacaccggcatttcatatcttatcttcttgagaagcncncnngagaagactccaaaagaagctagagcttagctacacacacctttctaatagctaagctcacctccttgagatgagaagctagagcttatctacacaccccctataatagctaaggtcaccctcatgactaaatacatgataaaacaaatagagttcctactacaaagactactcaaaatgcctcgaaacacaaggctaaaaccctatactactataatggccatacaaggcccatacgaaggaaaaacctattcatatatttacaaagataagtgggctcatacttagctcatgggctcaaaatctaccctaatgctcatgagaaccttggggccttcgcttggatctctggctcaacctacatggagtc

SEQ ID NO: 58629 - DNA, 380 bp, Glycine max
  unsure (1)..(380): unsure at all n locations
tgttaaaaacggaagattagaaaccgaaattgatacttaataaatatgatagccanaaaacaagaaatgaattaaaaagtctcggatttggaaacttacccgttgaagaatgaagaacggacgaagaacggtaaagaacggaggaaaaccttcacggatttgcttacggaaacctctcggaagctttacggaagcacctcggcttggattttcttcacagaaacaatttttttttacccaaaacagctgaaatgcatagccaggggaatcaggcacccttagaacaacccccttttgcctttntataggaaaaagggggaggaggttgccgcccagctcgcttangcgagctgggttgcttccaccttaagcaagaaaat

SEQ ID NO: 58630 - DNA, 462 bp, Glycine max
  unsure (1)..(462): unsure at all n locations
aaggcncannnnnnnagattgaaaccctttggagacttagttngctagtataccaccngattngannaaaaacccaagcttgttggagnnnaacttctttgttgnncngcatccattcnangagcgggaaacnccggagggggctcagcgcgcncacccaccaccagacagggaaagaccgnaccttagaagggaaacaaacctgcccacctcgtaatcagcggcccccgggacgggaaaaaccaccccaacncaacaaagcacccgagaggaaggattgacattctcaccctaagacaaggttatggcgaggcaggatatgggctcacagcttgtcgaagggctagacatgatacatgtcagggtttggtttggtcaaagataaaaaggaggccccacattatttccgtgacacaaatgcataaatgatcagttggaaactctatgcaaaactgggcacgn

SEQ ID NO: 58631 - DNA, 373 bp, Glycine max
ccgatattcatccctagagtgttgtcgaagtattggcgatcagaattgccattccttggattatagggttgaaccaagctcatgcttttacaaaaaggttcatcaagtcaagttgaaatatggaagtaaccgtcttgcaaaattggggcaaaagatgaattgagtcacatcactgcttcgtctactgccaaacatatttaggattattgatgtccttgttacttccagtttcaccttgacaaagatgtcatggaccatgttgaaaatctaaattgattcaaccccatatcttgcgtaaaaattcgcaatacttcaactgtgcatcattcgcatgcatccatgcttttcattggttgcattgctcgttgcattc

SEQ ID NO: 58632 - DNA, 358 bp, Glycine max
  unsure (1)..(358): unsure at all n locations
aagcatcaaccagaatcaagccaaggctanttgtgcaagcaatcaatggggcaaaacacaccaaaaaattatgatgatggatgactcggattctcacaaaaggaaacttatcactttcaaagtgagctttcaaaactatcatgacatgtaaaggaaaagcaaggatttcaagtcacaaaatgtcaacaaacttttattttcagaacaattacccattacttgaacatatgctataattcagagacaaacatgcgaatttaacacaacaaaactaagaanaataaactaatttaacacgactaacanaaccaaaaccaaagaacacattcctccccccncccaatacttaaacaacaca

SEQ ID NO: 58633 - DNA, 323 bp, Glycine max
  unsure (1)..(323): unsure at all n locations
tgacatctgatgtgtggacatcttgtacttcttatgttatatttcattaactgcgcattatgttgatgcaaattggaagttgaatggtaaaatggntaatttttctcattttcctcctccacactcggggcgtgagatggctaaagttatatatggntttttttggaagaatggtggattgagcacaaaatattttcattaattctagatgatgcttcttccaatgataaaatgcaagactatttgaaggaaagacttttgcatactaatggtttagtaagtggtggtgaattttttcatatctgatgttgtgctcacatttt

SEQ ID NO: 58634 - DNA, 485 bp, Glycine max
  unsure (1)..(485): unsure at all n locations
agcttatgaagctagaatgatatatattgatctttctctatagcaagcattccaatctaaaattaatatctctaataacgatggagataacaccaataaccacggtaaatttcctcatagaagaggaggagcatatactaatcgtggtaaaaggagcggaaagcaatgcagccataacgcttcaagctcctattgcacattatgcaagaaaaataatcatgatacatatgattggcggtacaaatgcgaaaagtgcaaatgacacctacgctacgaaatagattgtttntaccgacaaaaagaagaagcatattctctagaaaataaagaatccctcgatcatactttgtactccgctntatcttttcaagaattaagagatgtatggtatgttgatagtgtgtggtcacaccacatgacananaacataagtngctctgtgcaactagatgagacaactatactccaaagtacacttagtgata

SEQ ID NO: 58635 - DNA, 368 bp, Glycine max
tgccttacttttcaaatgtatctctttaactttttatcagacgttgaccatgcaaggccaccaatgaagcaacgaaactcttccacgtcagacattttaaactgcataggaaggcaagcattaacacgtaacattgaattaactgtgcaggataagcagtcccactatccaaacaaataagtggcagaaccagccgctgttaataaaaccaattaacttccaaaaaattaaggaatgggattctttatgaaccaaaagacagcataatataaggattaaaagtagaaaatagcaaagaaaacaaagctgtcatccaactccctgattattagcatctacacttcaatggcataaaagtatgtaagccc

SEQ ID NO: 58636 - DNA, 399 bp, Glycine max
  unsure (1)..(399): unsure at all n locations
agctntacagcagaatttagttatgacccactatcttatatttaaaaaacttaatgccattaacctaaggaattaaaacaaacttaatggctgagtgtaactgaaattgaggcaaccaaaagtcacccccaacagccaacaagtcagccaccatttggtctcccaaaaggctgatgcctaggttgccaattgggcccttattacaacttgaactaaagctaactaaagcccttttagttgattaacccaaaacatatttgtggtcagccaactttacaaggattgngccattatttagacaaactatacactctaaaattgaaacagagtggtgtcatttagtcctcctccatctgggccatgatacaactcacaaccttggactcttctccttgaaac

SEQ ID NO: 58637 - DNA, 370 bp, Glycine max
  unsure (1)..(370): unsure at all n locations
ntgagtaaattcaaacgacattagctnnntacttgtatgnctaanagagngcccgaantatattcaggacgcttaaaaatggatggtgaaacttttaacccattcaaaccaacataactttttacctggaagaatggatgaagtccggaatataacgagacgcctcgaaatgaatgttgaagctctgagcccattcaaacgacaataactttttactcggatgtctgattgagttccgtcatatatcgagacgctcgaaattgaatgttgaagcacttagccaattcaaacgacaataactttttactcagatgtctgattgagtgccgtaatatatcgagacgctcgaaattgaatgttgaacctatga

SEQ ID NO: 58638 - DNA, 523 bp, Glycine max
  unsure (1)..(523): unsure at all n locations
agctngtctcaatgtgctctcttgatgaacacgcatttacgtgtgttattagntaactataattcattanaaaaaanaaacaattgctcttgcacgtatactatggggaaaatactatntagccatatcgatcccacgaattatatggcatctcaggttaacttacatgtggnacgacaaaatttaaatatatgaagctgacaataaaattttctccaatttatggctactgtatttattgaataactgcgtaccggtagcatccaggggaattacatgaatgntatcgaggtttgtctaattgaccccaagtgcanataagaataaatagctcatcttcaattatgaatatacgaatttagactatgatcttatattctaaattntatcatcaatatataatatgactagcacagttaatgtatcatttttaattntcttttcatataatttaggtttattaataacaatttataatttctaattaagggtaataattaaaattatactanaatatataaat

SEQ ID NO: 58639 - DNA, 367 bp, Glycine max
  unsure (1)..(367): unsure at all n locations
ttttgactcttgattctttagcatcatcaaaattatcttggaagtcatttcatccacagcttctacgtatcctcaggtacgatgaggaatttagacctatgtagttctttaagtcagaaagtttgtgtgttaaattgtttttatgttttagaaagattcattttaattgtgaacaaaaattcgtttaaggcgttggaccttgaaacaatgttttaaactttgaaaagtggagagtcgttaaggcgttggaccttgcaacaatctcaagtgatatttgataaaaagaaattagttatgagttggttntatcttggttttgnttattaactttcaatctctttanaagatgacttacgacattgatgat

SEQ ID NO: 58640 - DNA, 438 bp, Glycine max
  unsure (1)..(438): unsure at all n locations
tctacagncacctgcggcatagcaagcttgatgatatggtcttcaccgacgaaaggatcttattgggtctttattatgcanatctgatcatcatgctgtgataaatgccanacaaaaactacagcaaatgaagagggtgaggatgaaggagaagcccgtgctgtgactgccattccaatacagccaagtttcccaccgacccaacaatgtcattactcagccaatagacaaaccttctccttacccaccgcccagttatcgacaaaggccatccctaaatcaaccacaaagtctgtctaccgcaccttcaatgactaacatcactgttagcacaatccanatacaccaaccaagagatgaatttggcagcgagatagcctatagaagtcaccccaattccagtttcctatgctgacttgctcccatatctacttgata

SEQ ID NO: 58641 - DNA, 245 bp, Glycine max
tcacatgacatcagcactcaaaagctttcacctgtctttacaaaatcagagccatcaacagacttcaaaatcatggtacgagcttgagagttaataaaaaaattaatgatgcatctttgtttccgatcagtccatgcatcagacataatagtacaaccatacttgacccattgctccctgtggcctttcatcaaattttcagtatattcaacttccttcttcaggagtggaactctgatgtcatg

SEQ ID NO: 58642 - DNA, 288 bp, Glycine max
cattgtaggagaatgatcaagatgcgttggctctgtgcagcatagatctggatgatctacacaaggatgtgcgtatatatatcgagcatgagttacacgccgtgccagagatactctctgatgctttgactgatgttcgaagataagctcatttgatagacaacacatagcatacgctgagcctgatggtgatgatgcggcagtagacgacggtattgaagctcacagtctcaatgatgatgacaagattcctagtatggatgcacatgtattatatcacatcatgga

SEQ ID NO: 58643 - DNA, 405 bp, Glycine max
  unsure (1)..(405): unsure at all n locations
tctagagaagacattcaatataatgggaagntgattttatttttatgtgtttaaacatatacataagagaaaaaataataattgagtatttgaggtgtagttcctaacattgtttcacatcttattacatattagcatttgagaggaggggcataatanagtagtactatgttggtctaaatattttacacgggcataattttagaggtaactcacttttgcagctagacaattatgaggtagctcactttccagctaaacatataacgttttttttgtcagcaaaattaaatatatattattaggggcaaggtacaaaaaatagaaaattttaacgaggttatggtgtatttcaatcataaccagatagaaatactacataaccaccactgacaaccgctatcg

SEQ ID NO: 58644 - DNA, 394 bp, Glycine max
  unsure (1)..(394): unsure at all n locations
gctatcacagccaagcaaaacagagcagaggcagaanactctgccaaaacaccaaccaaatcacagcttttctcacttaaagaccccagaaacaattgcttcgatccaattcgttaaccggtggatcgactccaatatattactggaagtctatagtacataagcctacattgtgacgcgtgggatctactagcaaacatccagaactcattctgcactactctttccacagccaatcacacacaagcattattctgcactcatgcaaaattctgctgcacaatntcacagcaaaaatctgcacaaagtgcagatttcgaanatcacacttccnctcatccaatcttgcccaaatcaaatnctacaagtnccagatcatgtatcaatcatgtct

SEQ ID NO: 58645 - DNA, 375 bp, Glycine max
  unsure (1)..(375): unsure at all n locations
tctatataagctgaactattttatcaataaattttagttgagttttattcagaanattagagtttatctcttttatcttagggagagtgattctcctaaattcttgagtgattcaagaacaccctggctgtatcaaaggactttcacaacctttgtgtgttgccctcgctggaaagagtgattctttccttccaatcatctccacccttgttctttcaaaccacaattccagaaaatccacctctgcccaaaattatctcgtgaccataactcccattttacacactcaaattaagtgattcttgagcctgaattgaatttcaaaacgagacctttcacctcgttttggaatcacctcatttggagccctgtagc

SEQ ID NO: 58646 - DNA, 362 bp, Glycine max
  unsure (1)..(362): unsure at all n locations
ttaagcaccgccgctgcagctggattcctttagtagggaatctttcctttttattatggagccaaacccagcccccctcattaagaactagctcctttctttctctattgcccttagatgaatacaccttttgttggttctctatttggatcttaaccctctcatgcaacttctttacaaactctgacctagattccccttctttatgtataaaagaagtgtcaagtgggaggggaatgaggtctaacggtgttaagggattgaacccatacacaatctcaaaaggggattgcttggtggttctatgaacccccctattgangcaaattctacatgaggaagatactcatcccaagacttat

SEQ ID NO: 58647 - DNA, 375 bp, Glycine max
  unsure (1)..(375): unsure at all n locations
tcattcttaattcggtcatgttgttgaacccattttccattaattgaaaaaaccctggaaaaccttataggttctttcgacatttatagctttgggaaaaatagcctgtttactaatcccttccttaatccatntatctctagatttttgtctcagcagggattcataagcatttgaaacctcccacaactcttgttgcagtaatttcttgactttgacctcctcttgagataaaactctatcaccagctgtagtttccaagtcattaagcttctgtctcaaattctggattcgactaacattgatatcagcaatatctttactccattgtttgatggtatttttaagatttctcagcttgtttttaaggacaat

SEQ ID NO: 58648 - DNA, 309 bp, Glycine max
  unsure (1)..(309): unsure at all n locations
tagagagnnggcaagtattagatgtatattatgtgtccctatgcaccagcggtcttaaaattggcatacgagcctaattctaagtgtcaaaggaaaagttagagtataacccaaggtctcagggaaatatattattagaaaggattaattatgaatatgagaactatctaaagactacaggggtaggaaaaggatacctatgataaagagtcagcctatagtcctaatagcattcactgagacattatgtgttatccctttagttntcatgttgtacaggatagcaaatggacacctcgaggagaagct

SEQ ID NO: 58649 - DNA, 379 bp, Glycine max
tcagtgacaccgacatttctgcagtgccaccttgttggaaaggccaatgtcaatcaggggagggattcaattcctcatcatgcaacaggtttaaggctgaaaccttatcctcatctagtttcatattcacttcacagaccaaacatgacgtcttcaacatggttttgtcatcttcaatggctaacaattttgtggataataatataggaaagtgataggagcaagatactacaggagtggatatgaagctgctgagggagattcagatgcaaaaaagtccttcagatctgcaagggacagcactggccatgggagccacacagcctccatagcagcagggaggtttgtggcaaacatgaactacaaggggctggcaagt

SEQ ID NO: 58650 - DNA, 517 bp, Glycine max
  unsure (1)..(517): unsure at all n locations
agcttcttaaaaatccaaggggagtttgtattanatttcnttcgtggnctaanccatgtgtgactaccttcataggacttaatctaataagtttctttgtttgcagctggagatgcatgaatcctccatatgccgtcatcagccttacactcaacagtcaccctatatttctcatttgtgacctgccataattcaaatctttcttgtattacaaattcatttatcaaccctaaaatgtgttacatttaacaacaactggccaatcttaaaatggatcttgccatcattgtccaactcacactggtttccatgcaatctgttctcctcatatatatcttctggggctaaattggaatgcacaactcatgctccaattacatccactgattcatcaaagtcacttagggcatccncatttgtcaattctgcatacttatcagaaggactatactcactatcagatgaagaatcttactcaaccccttagaaagcanatctgcatcactttacatacact

SEQ ID NO: 58651 - DNA, 389 bp, Glycine max
tgtcccctcgaacccgtttctccatcagacatgtcagctgctgcaaaccctaattagcaatcgccgacgtggtcaaactcccacattaagaaatctcaagtgtccgcaaatgaactggaaaaccaccttctacaaaagccagcaaattcgaaatcccataaacactcatttgataaagtctagagagagcgttgattggttcaggaagtgatttcagttttccgaaagtggacacgaggaaattgtttaggtttggagtgaccaatgatccgctatcgggaactgtctccagcttcaaacacgcgtatatggataaactctcaagacacaagagactctgccatgatgaacactgcatgacgctaatatgtttaagattcttgcaaccc

SEQ ID NO: 58652 - DNA, 372 bp, Glycine max
tgcttttacaaaagcatgcaaaatgggtagagttcatagagcaatttccatatgttatcaaatacaaaaagggaaaaacaaatgtggtagctgatgccctctctaggtgacaaacattgttttgctccctaggagctcaaattttaggatttgataacattaaggacttgtatgctttagatgaatatttctctcccatttacgagagttgtgggaaaaaggcctaagatggattctatttggctgaggggtatttgtttaaagagggaaagctttgcataccccaaggatccattatgaaattacttgtgaaatagagccatgaggttgggctcatgggccactttgggataaacaagacccttgtcttac

SEQ ID NO: 58653 - DNA, 327 bp, Glycine max
tgttagtttcagatgatgctgttgggttcgtatctacctcatgcactcctctaatgactatggcatcatttatggcgctaaactgctgggagccggaggccatcttctcaattaaatttttggcttcagcaagggtcatatctacaagggctccaccactggcagcatctatcatacttctctgcatattactgagtccttcataaaaatattggagaagaagctgttctgaaacctgatggtgggggcaactggcacatagttacttaaatctctcccagtactcatacatgctatctccactgagatgtctaatacctgagatat

SEQ ID NO: 58654 - DNA, 495 bp, Glycine max
agcttcaacctagaggagacgatccattcattgtgttgtataagatcaacgacaatgcctacacgattgacttgcctagtgagtataatgtaagtgccactttcaatagagtctgatctatcctcttttgatgcagatggacgagccttggatttgaggacaaattcttttctaggagggagtgatgaggacataaccaagggcaatgaccatgaagcacttgaaggtcccatgaccagaggcagacttaaacaagcccaacacataatagagacaaggctggtcatttgtatagctgtcattgatgatgattgaaggcccaagtggagaaagatgaaggcccagaggcagaggcactaccaagactactaattgctgctgaaggctcaaactaactcgaaggcccaagtaaataagtattagtataacttatattatagaatctcgcccaactgattagacgccatgctatcttatcctttgtcagaacactat

SEQ ID NO: 58655 - DNA, 334 bp, Glycine max
  unsure (1)..(334): unsure at all n locations
tgcctcatagaggtccaagattgataaggcggttctaaggactagttccgctcctgagtatgacagtcaccgctttaggagcgctgtacaccagtagcgcttcgaggccatcaagggatggtcgtttcgacgggagcgacgcgtccaactcagggacgacgagtatactgatttccaggaggagatagggcaccggcggtggacatcactggttacccccatggccaagttcgatccagaaatagtccttgagttttatgccaatgcttggccaacagaggagggcgtgcgtgacatgaggtcctgngtaaggggtcagtggatcccgtttgat

SEQ ID NO: 58656 - DNA, 145 bp, Glycine max
aaaaatgatattttgtgtttttcacattgggtttccgaatacgagaaagataataatttaatgataagaatataatatttttctatattattatttaataattaattataatataattaataattaatatatttataatatatta

SEQ ID NO: 58657 - DNA, 52 bp, Glycine max
cctgtgcctgtgcaaacccaaaaccgaaagattttccttttacgattgggtt

SEQ ID NO: 58658 - DNA, 153 bp, Glycine max
  unsure (1)..(153): unsure at all n locations
ttatatgaccactctgccctgatcaagaatcgcccccatgtggatgctctatgatggacaaangccacgccaatcatgtactttgttgtccctcatatgagggtggtatgccaagctcatgcggagcttcgcgccgcttaacttacacaattc

SEQ ID NO: 58659 - DNA, 456 bp, Glycine max
ctaagctccctggaagtagagcttgctcacacacccctctaaggcggagctcttcttcttgagaagcgcgcttgagaagcgttcttaagagacttccttgagaagataactagagaagcttgagcttggctacacacaccccctttaagagctaagctcacctgcttgagatgagaagctagagattagctatgcacaccccctatgatagctaagctcacccccatgtcaaaatacatgaaaatacataaaagtggctactacagagactacttaaaatgcctcgaaatacatggctcaaaccctatactactataatggccaaaatacaaggcccatacaaaggaagaacctattctaatatttacaaagaagagtagacccaacctatgcccatgggcgtagaaatctaccttgagggttatgagaaccctatggccgtctttagcagctcta

SEQ ID NO: 58660 - DNA, 200 bp, Glycine max
  unsure (1)..(200): unsure at all n locations
gcttctcatatgttatgcgtctgaatcggacatgctattgtaaaattatgaccatctttattttccgagagcttccgtcggcaatntctagcatctcgatacgctatgtgcctgaatcggacatgcgagtgaaaacctatgaccatttgaatttctcgagagcttcccgtggtcaatttctagcgtctcgatacgctatg

SEQ ID NO: 58661 - DNA, 467 bp, Glycine max
  unsure (1)..(467): unsure at all n locations
caacgagatgatgcgctctatgagaggttggatcaaatggagaatagagatcataatgaagaagataggaggagaagagggaatgatggtgttcctagacaaaaccgaattgatggtattaaactcaacattcctccatttaaaggaaagaatgatccggaggcctacttggagtgggagatgaaaatagagcatgttntctcatgcaacaactatgatgaggaccagaaggtgaagctcgctgccacggagttttccgactatgctcttgtgtggtggaacaagctacaaaaggagagagcaagatatgaagagccaatggtngatacatggacagagatgaaaaagatcatgaggaagcggtatgtgccggctagttactcaagggacttgatattcaagctccatatactaaccccaaggcacaagggggtaactatggctcgattcttaatggatgtctcatg

SEQ ID NO: 58662 - DNA, 312 bp, Glycine max
  unsure (1)..(312): unsure at all n locations
gctgctgattacatctncctctctctcaagcatattcttcttgatatcatacaaatcttcatgattcacattctcccccttcttgatgaagaccaccacctgcatgttaggagcaacaacaaagaaaatatctatttgcatatagtcgactccctcttgtgtctacaatgagtgcttatatgagacaattgaagattccatatttttcatatataaaaagttggctataaaactagcaatgttaagattgcagtctttaagcatttcaaagaaagattctcataacagaatcattgcagaccaaccctggat

SEQ ID NO: 58663 - DNA, 404 bp, Glycine max
agctcccatggagctacatcatactggtcttaaagtgtgagaatagtggctttgctatagtaagtcccactctacaggagaatgtataaatatcgcctgagaagacaagctctcttaatatctcctattcggtggactagctcatctaggtccctatattgaaggagttcaaccttgtcccccacttgcatattaagcccacttatgaacctatctatgcttagtgattttcacactcctaaagttcagctcttataaagagtagttccatttgttgactatattctctgacactcatacttctttgtctatacctgtggagcccgtccatatgctccctttcatattaggaaggaatgtgcctcttcctaatggcattcttaagatcattccaatacttcact

SEQ ID NO: 58664 - DNA, 207 bp, Glycine max
  unsure (1)..(207): unsure at all n locations
ctgcagctgtggagtcatgccattcttattcagtattattattggtggaccacctgaactgggcttacccaagcactgtcgaagatggggtagataagcccatcctctagaagcttaatcaccttctttctcacctcttccttcattgattggtagaggcttctctggggatgtntgactggcctgtaatcctcttctatcattatc

SEQ ID NO: 58665 - DNA, 378 bp, Glycine max
  unsure (1)..(378): unsure at all n locations
taactatggcagcttgcagnggctatcggtggttgtgggtggtggacaagaagcttgaggcattgaagaagggtcttggaagaaagaaagagaaaggaatggttgttttccaaggctacacgaaaaataagacttgaaacactcaagtgtntctactctcaggaaaagaagcttttctcacacaccanaagacatattgtagatcgtaacgatcaggtcgtagaaatctgtcctatgaacctccagaccaaatttcgagaagatctaacaattaacgattgcagaatggcgcttttaccaaggtagcttcaggtagcttccttgagaagctcttctcgagaggcttcttgataagcttcctcgtgaggcttctttgag

SEQ ID NO: 58666 - DNA, 175 bp, Glycine max
ttaagctcacctctttgagaagctttcttgagaaactccttaagaagttagagcttagctacatacacccctctaatagctaagctaacccccttatcaaaatacatgaaaatgcttagctacacacacccttctaatagccaagctcaccccatgccaaaatacaagaaaatat

SEQ ID NO: 58667 - DNA, 424 bp, Glycine max
ctcagctacacctgccaaatcatgaaatacaaaaaggtatacttcttgtctactcattatggcctgagatacaacgcgaatactctatactactagaatggccacaatacaacgcccaacataaggaacaacctattctaatatttactaaaaagagtggacccaaccttggcccatgggtttcgaaatctaccctgaggttctagagaacccataggccttcgttaacagccttagcccaattctcttggagacttttatccaatacccttgggggtaggatcgcatcatatacctcgacattcttgtcgatctactgtataaagactcgatccatcaatcattacgtacggtatgcctgcatttattaggctgaaaggcatgaccctgtagcaaatgatgccatctttagcgataaatgaca

SEQ ID NO: 58668 - DNA, 449 bp, Glycine max
  unsure (1)..(449): unsure at all n locations
gatgccccacattatttccatgacacacatgcaataatgatgatttggaaactntatgcaaaactggtcatgcatgcacctatgtggacactcaagtgtcaaatatttatggtgatgtgatgctatggctcaagattcattccatctattttagtcgacccaactgtttcaaaatatgttcttttatcaatttgtgcattcatccgagtccatattgggtactcgggaaaatttcacagcattcacccttcatgtgtacacacattttttgtttctaaaaactagctatgatcagcgaattttnttctcaaagaagagttggaagtcatctcttttcaaaagcatgtcggttctcagctagacaacttattctcttctgttctctttgtttatctctcaagaggagtatgtaccaaacatgtgttattttggaagggagtagtaatcgt

SEQ ID NO: 58669 - DNA, 288 bp, Glycine max
  unsure (1)..(288): unsure at all n locations
acaagctacttttttaacttctgagtaaagtaataaaactggttttattntgggcttttgtgttttttcttcctctaaaaccaatctaattataaatgttaaatatattttctaattaaaaccttatttttcttaagaaaatctcaaacaaacaggcctaaacccccatctgatgctatgtggagatctaaacttttatatgcagaaagaatggtgcaatctttttagttaatgggcttgtctttgtcatctagctcttgtatactctgggcgtccttcttgatttgt

SEQ ID NO: 58670 - DNA, 403 bp, Glycine max
  unsure (1)..(403): unsure at all n locations
taattgagtgtcaaaacgttgtagaagaaggaagaatctgcaacttatgataattgattgtcttcctagatgatcaattatcctacttgtagaaacatgcggagctctttgtgtaattctataattgattacccgaagtgataatcgattatcccataaaacatatcagcatgagaagcattcttattgaaacagaacaattgattgcccaatttcataattgattacccagtttctgaacatacataacaaaagagatnttgacatagtaattgattgtctactttcatagttgattagatatgttttacctatatattgaacattataagtatcctttgcgtcttttcattagagactctngatacattatatctntgagatacatatttcaagagactct

SEQ ID NO: 58671 - DNA, 403 bp, Glycine max
  unsure (1)..(403): unsure at all n locations
agtgttaattattgattagtttaaacacttgagcttgagtgaaacagtgactatgaggcactggttaagcatccttccatgaaatctgtctgctgattagtttcattcagttgtgttgcttaataaaaatgctcttatctctcaaaatctgcatgtcttgtgaaaaaccatngattgagtcattgtatagatctcttatcatatgattaatggtttggaagcaaacaccctgtgtaaataatcactgcattattattgcaattgaggacaagtgagttgttctttattngcttgaggacaacgaaaattgtaaatatgggggagattgttcgtcggtctatacgactaactctcgtatagaaacttttgataatatatagaattctccaagtacatacagtct

SEQ ID NO: 58672 - DNA, 432 bp, Glycine max
  unsure (1)..(432): unsure at all n locations
gcttacctgctggaaaccctgccgttgattgntctttgcttgtcttagtgagacacaagctggtgcacatcaaaactccgatatctcatgggtggaatggatgaatgcatgaaggaatgcatataacacagatgtaatctaagaatgcggcggtccggggaattcgtccccttcttatacacaatgtctaggggtagcaaagtgccccaacgtacgtttataaaaaagcgacaccgaccctccgttggtttgatacagaagggatcaagacagaacccatatgcgatgcctatgcaaaatacacaatgcgggaatgtacacagtatgataatattcactgaacatangcataagggtatatgatacttatgcatggcagagtataaatggcacgcagcgtgttagctccgtgcccctatttaatggacctat

SEQ ID NO: 58673 - DNA, 281 bp, Glycine max
  unsure (1)..(281): unsure at all n locations
gtgttgaaaggtgaaactctcttctttattgtngaccacagagtggtacctggagatatgtcgcggaggtcaagagaccttggggacgtcaagtggggtgctattgcccaaaaccaagcttgaccaatcccgacccaacccgggcatagtcggtcagtgagaacctgtgatgtacctaagcaggcgagctcctggcagtcaacagataaaaggaaaacaacaccactaagcatggaggcttgtggtggctggccagctgtgaactttgtgtaatatgtgga

SEQ ID NO: 58674 - DNA, 469 bp, Glycine max
  unsure (1)..(469): unsure at all n locations
gaagctagagcttagctacacatacctcttctttatctaagctcacctcctcgagatgagaagctagagcttagctacacacccnctataatagctaagctcacccccatgacaaaaaacatgaaaataataaagaaaaagtccttattacaaagacaactcacaatgccccgaaatacaaggctaaaaccctatactactagaatgggcacaatacaaggcctagacgaaagaaaaacctattctaatatttacaaagataagcgggctcatacttagcccatgggctcgaaatctaccctaaggctcatgagaaccctagggcctntccttggatctctagcccaatctacttggagtcttctatccaatgcccttgcggcgtatgaatgcatcattccctccaccttggaagggattgacctcaaataccgaggttcttcatactctgggctcccttcctcaacac

SEQ ID NO: 58675 - DNA, 320 bp, Glycine max
  unsure (1)..(320): unsure at all n locations
ttaaaaatcaaccatttttacacaacaccatctnttttctttcataaagnttattagctttgtcctcaagagaaaaaaaaactgactagtttttgagataataaacagtcttgaccccttcaaagacaaaacttgttcaaacaaagatggaaatatcatagaagacaaatcacaggtgcaccttcaacttcttcgttggctttctatgttggtagcaacgaatacaattgtagcaacaaattcaaagggttccttggacttgaaaatgatgatcttgtctccattgtggttcctacaatgacagtagtgctagtgggtca

SEQ ID NO: 58676 - DNA, 489 bp, Glycine max
  unsure (1)..(489): unsure at all n locations
tattccaatggtagggtagttagtatgaaaatatatattggttggtgtatatattcttagatattatatgtgtgatatatatatgtatgatattttagtgaggcacacgaaataatattagttgtagtaatattaggcagaagttaatattagctttaggtatatatttgtaaattttaggcacacgtaaatttgtagttttttttttaggcacacctaaataagatttatatattctgttagtattaataggtattctaaactttggttaattaatattagtagggattntggtctttaattttatgtattaatagatattctaaagttaggatattagcttaagtaatattaggcacaagttaatattagctttaggtatatatntgtaaattntaggcacacgtaaatttttagttttataatattaagcactttacatgcanataaataattataatattacacatttcacacacgtaaatttgc

SEQ ID NO: 58677 - DNA, 387 bp, Glycine max
  unsure (1)..(387): unsure at all n locations
acaatatttactaatagaattaatgagtttaatgttaatatgatattnttattttagatagaaataaagtattgttgtagcatgataaaatataaataaaatcaagatagagataaaaacaactttaaaaagaaaaaaaatcatgagtgatttaatttaataaattatgtgagctaacaattaatgtggttcgtatctactaattaatttatatataataataaattaaattataagatatgagttgagttgagttgggccgagttgaataaaataaaacctgttacccaactcttatntgatcgggtcttaattggtgtgggtcatgnttgacctgaagaacactctaaaaacttaatccaatataattagatcgnagtgagtcat

SEQ ID NO: 58678 - DNA, 434 bp, Glycine max
  unsure (1)..(434): unsure at all n locations
aaagtaggtgacattgtgcatggcacaataaacatggaactaatngctgcctgctcctacaaagatgctgctatcaatgattctgctgacaaatttgtgatgttcccagcacaaactggttgacatgaatttttagcgtgctaaaatatgttctaccgcaccccagcaactgcaagaattaagttctattggaacagtatatacagggctgaaaactgtaaataagactgataaacttctgcaccctatgaagagtttagtntctaacattctgttcaatactaaagttcatataccacatagtacgctcgactaatctttctggattctatatggtgaggatgaccaatgtacttgtttatctatcaacaagctacttcatgatgtggtgtggactcgagcttagactagacactatagttgatacatgaata

SEQ ID NO: 58679 - DNA, 443 bp, Glycine max
  unsure (1)..(443): unsure at all n locations
caagactttctgtgattggtttaaagatacaatctttgcaaatgagaatgctttagaaacattaagaaagctagcagatgggcctaaaagaaatgttatatcttggaaaggatatgacatacacatgtattcattntacacaaaagcacaagatgacaaaagtacaatgcagaacagcggggtcatcctaagggctgaatctcaacacttcgcaagtgtgaatgacgccaatccctgtgtagcttccatcccttactttgggttcattgatgaaatntgggagcttaactatgggaaatttactatatggtttttcaaatgtaaatgggttgacagcaacaccggtgtacgcaccaatgacataggaattacgttggtagacctgaagaaacttggtaccacaatgaccctttatcatggcagacaagcttacaaatatttat

SEQ ID NO: 58680 - DNA, 440 bp, Glycine max
  unsure (1)..(440): unsure at all n locations
ttatttattntactacttcataaaaatatttttatttactccctatcaagngaataaataagatatcatttttattttctaaaaatatatattcattgtatttaccttaaaatcatcgttttaattaataaaactatttcttcttatttatgtaatcacaaaaacctcattatatttctaacactctcattattttcaaataaaatcctttttaatatattgtaccaaaatagaatgttacatgttaccacaacctattgtcaaaagattattgggtcgtgacatggactcacagatgagtgaacctcatgctacgttgtccaaatcttgtgtggggtacaccatcacgtatcctgtctacaaaccacttattctttacaacaattgatgtgctcaatggtaccgtatcatgtacgattgatggctatactcactgtaaa

SEQ ID NO: 58681 - DNA, 87 bp, Glycine max
tgaatgtacaaccttcaaattgttgctcgttcccctctttgagaatgaggaggatcttcataggacttcctccccgtgagtggtgcc

SEQ ID NO: 58682 - DNA, 406 bp, Glycine max
  unsure (1)..(406): unsure at all n locations
tcattctacacctgtaaaagaggancgagaagttcttataagagattgcttctaacannaaatttcatgcaggtggaccttcttcaagtaattatgacttaccgcagcctcctatccctcttacattcccacctagagcaattccaaacaaaaaatatggaagaagcagaacaagagatcttggagaccttcaggaaagtagaggtgaacatacctctgctagatgccatcaagcagattccaagatatgccaagtttctaaaggagttgtgcacccacaaaaggaagctcacaggaaatgaagggattagcatgggcagaaatgtgtcagcattgataggtagatctcgtcctcacattcttgagaaatgtaaggacgccgctatantttgtataccttgcatta

SEQ ID NO: 58683 - DNA, 196 bp, Glycine max
  unsure (1)..(196): unsure at all n locations
ctcttgcctcactcaccgcctttnnggttttatttctatctatcctatacttatcccaagnttcagaatttctacacctagaccactccttgaaacacctccttttttacgctaactttgctctgaacgctttcattccaccaccacgattctntacccctaggtccaaaacctctagattcaccccacgtctctt

SEQ ID NO: 58684 - DNA, 430 bp, Glycine max
  unsure (1)..(430): unsure at all n locations
agcctctcccttatcaacatcttcataagttaatgtgatgttcaaaaatgaagagacgaagaagaatatgtacattaactgaaattaagacttactttcagctagagttctggaagaaaattacacaaattcaaagtttgagaacaagaaagtatgagagagagaatagantcgagataactctcacaacttgcataacaaacaatactatcaattagtctttatatactagctcaattgcgtacgtagtccctcaacttggtgttagtcatgcgagtcctgattcctgtcctttgccccatcatttctggaccgatgctaacaacattattccctcttttccatgtgggtacacttagctgactaggtcgagaacatgccttccctatnttccttcattggaataccagtcccatttatgacaaccatg

SEQ ID NO: 58685 - DNA, 122 bp, Glycine max
  unsure (1)..(122): unsure at all n locations
tacaacaaattattgcgtatgtctctgaaattataaagatgtcacaatgntatgatgacacataactcaacaaactttctgcttgctaggtctcacgtatgagcctactataaccctcaagt

SEQ ID NO: 58686 - DNA, 517 bp, Glycine max
  unsure (1)..(517): unsure at all n locations
ccatcaccgcacacaacanatcagcaggagctngagcaactacatctctattgatgtctttgttcaatccactaataaaacaattaagcaacgcctcaggagtcaaaccttcagagcgatgagctaaccccataaacttcagataataatcagcaacggtaccaacttgttaaagtttgaataactcagccatagggcaaccaaatagtgaggggtcaaatagagattccatgctcgtcggagctcagcccacatattaaccgtctgtcaccgttgaagcatctagaaccaaggtatcacatccttctcaaaatgaatggaagcaatatccacacgatcctgatcaggagtgtggtgataattgaagaattctcagccttaaaaatacactcaattattggtgatggaccatcagaatggggaaaactcaatgaaatttccttccacctatagtagatgaaattagaactgaatggataaccggagtatatggagtacctctgtttgagctcgaacc

SEQ ID NO: 58687 - DNA, 193 bp, Glycine max
  unsure (1)..(193): unsure at all n locations
ctgcagcttgatatgatgatgggacccggtgtgatatttattatgatatgggctacgcgggaagacgngagctcagttggaggtgcgcaacacgagacggtgggtttatgcgcgcattgtggatgtggaaagcttgttgtgcaccatcacccgaccgtcacctagtaccacatgtgatgggtacacataatcc

SEQ ID NO: 58688 - DNA, 462 bp, Glycine max
  unsure (1)..(462): unsure at all n locations
gatgccccacattatttccatgacacanatgcaaaaatgatgatctggagaatttatgcaaaactggtcatgcatgcacctatgcggacactcaagtgtcaaaattttatggtcatgtgatgctagggcttangatttatttcctctattttaaatcaacccaatgtttccaaaatatgttcttttatcaatttgtgcattcattcgagtccatttcgggcgtccggtgaaatttcacagcattcacccttcaggtgtagacacnngttttttctcttcaaaaatcggtcatgatcaatgaatttttttttcgaagaagagttggaaatcatctctcttcanaagcatgtcggtttttagctagacaacttaatttctctgtttccacctttntccttacttgccttcttctntttttcttaattgctctctttatctttactcgccctcttcttttttctt

SEQ ID NO: 58689 - DNA, 252 bp, Glycine max
tgagagctcttggcatataaatttgctaaagctatgagtgcggctataatataggatgtatggatgccagatattggcgcaaaggaagatggagcatcagctgctctgagcgtggtcttctttgcctctggaaatgtaactgtctggtcattatcatctcaacagttccttatgatataagctcagtctatggtcggccttaatttttcataggaggtaaaggcatcatatcccactcctcttgatctacac

SEQ ID NO: 58690 - DNA, 303 bp, Glycine max
tcaaccagcacgcgagacgatgcaatgctaccccgcaagggcattgtgtagaagactccaaccagattgggctatagatccaagggaacgccctagggttctcatgatccttatggtagatttcgagcccatgggctaagtatgagcccgcttatctttgtaaatattacaataaagttttccttcgtctgggccttgtatgttggccattctactagcatagggttgtagccttgtatctcgggtcattttgagtagtctttgatataaggacttctttctgtattctcatgtttttcgtca

SEQ ID NO: 58691 - DNA, 267 bp, Glycine max
tcagatatcttaagaaaggagggtgaattaagatattgcaaactatctccccaattaaaattctatttcactttctattcaagttacaaattcccttaacaatgaactcttaaataatgattcaaatagaacaatctgaatataaatattaaataataataaataaaagaggtcaagggaagagaaagtgcaaactcggatatatactggttcggccacacccttgtgcctacgtccattcctcaagccgcttgagagttcactatc

SEQ ID NO: 58692 - DNA, 464 bp, Glycine max
  unsure (1)..(464): unsure at all n locations
tccagcaccaacgattcaacctagatatcaagagtagtgtttatgttgcttatagcttggatacttacaatttgtgtttgcttatgctcaattatcttgaataacacaattcaatagagcttaagacttattttgattcacaaatgtagcaacaactcaacttcttcataggcatcatgtaggaaacttagaaaacaaaaaaaagttcaagaacaagactacttctaggaattgatttaaacatgttatgaactaaataacatgcatgaattagactcaaaattcacaagatagtctaagaatgacaagaatacatgaacaatngtatctaaaattcaatcaacaaaatcaaaattcaacacagacttagaacataatgagacaattattatgactaaacataaattaagtggattacacttagctnnttgtgtgttttttctaacaatattttggaagaaatt

SEQ ID NO: 58693 - DNA, 351 bp, Glycine max
  unsure (1)..(351): unsure at all n locations
ccacaagaactnttaactccaatatccgttagattctccgttatatatcgagacgcacganatcgaaaacataagctctgagcaaattaatacaacaattactgtttactcggatgttcgattgaatccattattatatcgagaactacaaattgaagactgaatgcttgttgccattgcgaaccacaaatagctttgactcagatgtgcgattaaggcccggagatatctagacgcttgaaattggaaacacaacctttagcaaatgtaaacgacgatacctttactcggatgtgcaagagaacctgtcatatattacagagctggaattgagaacaaagttgtacaatt

SEQ ID NO: 58694 - DNA, 421 bp, Glycine max
  unsure (1)..(421): unsure at all n locations
atccttaagtcaccgcagctgcaagcttaatccatataaaactaatgtgtcatatanttctctaattagatcatacaaaaggagaanagagagaagattatactcacagaaggaatgagaaatatattattgaggtgatgtaatcttgagttacaacactctatttatagaggtatgagggtgagtgcaatatagttagggagttaggaagcaattatttagttatgacaaccatcaacaattgtcaataactaactgtacaaactgacacaatgtgctaactactaactngagatagtgtagctgaatattgcacttctcaatacaatactcttacangaggtaactcatgcttagcgtctttatcctgaaaaagttattttgtctaattatactccctctctttgtattctgcctatca

SEQ ID NO: 58695 - DNA, 265 bp, Glycine max
  unsure (1)..(265): unsure at all n locations
actttccctaagctccttatctttccattccactgtattccatgctttacggattctctacagtatgattgataatgaagcattgttgagagaacatgtatgagtggatatntcaaacagaatttaaactaacttttatgctaaaaactataaaatgcaaagtaagtaaagtgacagcagtatgtagaaatgttatgtcttttaacaaaccagctgatgcatataaatatatttctctaatcatcatgctcttgtgtctatgtat

SEQ ID NO: 58696 - DNA, 344 bp, Glycine max
  unsure (1)..(344): unsure at all n locations
ctcagctaagatggatactactgngggagaatatttctcaacttttctaaaangcgacaaatagtgatcctaagggtgcaaactcgtatatcccgtgggtattgctcttgaatggngggaaagatttctgaatgcaaaaacgtcccccttcttcttcttttattattatggtgcagggggttgctagtccaggcgagctaacctacacttntatttttgccgtaggttatcaacatcgtccaaaaccttgattgacaacatcccacggattgttaaaagctgattgatttangagacaactgacacgggaatgactcgcgtgaggggacctatgcttttgatgc

SEQ ID NO: 58697 - DNA, 353 bp, Glycine max
  unsure (1)..(353): unsure at all n locations
aagactcttcacatattggcgaagacacaccactggcagaacatgctggagacaagctaccgtctgaattctcttgacaaattgttgaagagacaccactggcagaacatgttggagacaaccaaccatctgcatcctcttcaataattgatgaagagacaccaccggccgaacatgtgacagacaactgtgaatcctcttctaaaactggtgaagagtcaccactggccgaacatgttgtggacaagctaccatctgactccactacatgaatagctgatgagatgccactggcagacctcnctgaagattatactgatgtgatatacgcacctggctatcaatcttccact

SEQ ID NO: 58698 - DNA, 152 bp, Glycine max
tggctcaaagcttcaacattcaatttccaccgtctcgatatgttaagggactcaatcagacatccgagcaaaaagttattgtcctttgtattggctcagagcttcaacattcaatttcgagcgtctcgatatgttacgggactcaatcagac

SEQ ID NO: 58699 - DNA, 341 bp, Glycine max
ctaagcttgagccactagacgatataacttttactcagaagctgagattgctcttatcatatcgacacgctcgagagcgaatgttgaatctctgagccaattcatacgacaataactttgttcacggatgtctgattgagtaccgtaacatattgagacgctcgaaatagaatgttgaacctctgtgccaatacaaacgacaataactctatactcggatgtctgactgagttccgtatcatattgagaccctcgaaaatgaatgttgaagctctcagccgatacaaacgaccataactgtttactcggatgtctgattgagtgcacgaacatatcgagac

SEQ ID NO: 58700 - DNA, 242 bp, Glycine max
  unsure (1)..(242): unsure at all n locations
agtcacctgacgcatgcagcttagccttcatgaaagttataccttgagcttctcatgggctcttggaagcaaaatccagattacatagtagtggggatgtctcctccacctctatgaacctataaatcactctaaaacctagaatcctcttgaaagctgaggtttgtggtgctctttctccctgtngcgtctctcacgtatatctntattcttccacaggctaaagacttctctattttatg

SEQ ID NO: 58701 - DNA, 141 bp, Glycine max
tgacatttatcacagaagatgccaacttttgctacagggtcatgcccttcgccctaaaaaacacaggcattacatgccaacgactgatggaccgagtctttgaatagtggatcggatgaaacatcgagatatatgtggatg

SEQ ID NO: 58702 - DNA, 382 bp, Glycine max
  unsure (1)..(382): unsure at all n locations
ctaagcttgtgaaactgggtaataacatggatgaatagtcctggtntgcttttatatctatctggttacattcatgggatgatacactttaagtccagtatttcaacatatgtctattagcgaaaatcatattctttgcaaaataaacttaaagaattgagcctttttcccctnttttttaaaaaaataatgatgatattaaaataattaaataagccatgtaggcaagtgcgcaatngtagcatgttactatggagtggtagaaaaatcaagattctatttttattgtataaactatataaaanaaaactaaaatcacattgatatatcctccaatccaatcaattctaacataacagtgatgtttagtaggaattttaac

SEQ ID NO: 58703 - DNA, 149 bp, Glycine max
cttcatcacctgcgctgcaactactcgctggcaacaccctgacaaactattattaatagggggagtgagtttttaccaaaactatcccctactagatccgacccttgatgaagtttttctacctagccacatttgtgcttttgctccat

SEQ ID NO: 58704 - DNA, 407 bp, Glycine max
  unsure (1)..(407): unsure at all n locations
tcaacctcaacagcaatattattcacaacaacatatctatgacctctctagcaacaggtacaatcctggatggaggaatcatcccaaccttagatggtcgaatccttcactgttgttggcccaagcagaccatatgttcctccatcaatccagcaacacaacaacaacagcaacagccccagaaacaacaaacaattgaagccccttcgcaacctttccttgaagaacttgtgaggcaaatgactatgcaaaacatgcagttgcaacaagagaccggagccttcattcagagcttaactaatcagatgggacagttggctatacagttaaatcaacaacagtcccagaattctgatagaatatcttctcaatctgtccagaatcccaaanatgtgagtgccattaca

SEQ ID NO: 58705 - DNA, 551 bp, Glycine max
  unsure (1)..(551): unsure at all n locations
ctcagcttaatgggantattgtcaacagcactacanaagngctctgattgattatatcactgaccccgctattctgcacactacttntatcatcctgngactttgtgtagaaagaatactgattgatatcatatcccttccaagtgggaacattcatatttggacccacagctagcaatcttaatgtgtctgaagcactgtcatcggcgaagattgtttgtctaaaccatgatatgaaagttctattgtgctcttgcaacaacctcatcatgttcatttntgggtgaatacgacacacatgttgtttgtgagcatctatgtaagggaatacctcagctgtgttgtgtaatacatatagatgaagcttgtgccagctgtggcgatccatggttacaacattgaacccncgtgtgcccctaccttccatggtggatccatgacgactntgangaagtcccactggtgtagccatttctatatattgtgaacaaaactcaatagcttncttagcaaacgtatcgtcaacaatgctagcctctggtcgacatgga

SEQ ID NO: 58706 - DNA, 452 bp, Glycine max
  unsure (1)..(452): unsure at all n locations
gcttatctacccacacncctctattaactatattattcttcttgaaaataattacngataaaaataacacaacaaatataatcaaacatcaaacataattactaataatatatagatatatatcaaggtgttacaactctcccactcttttagaaatttcatcctcgaaatttacgttactcaaacaaggatggataagcttctcgcatttgactntctaattcccacatgacatcatctcctgatgcacctccccagatcaccttgaccaacagaatctctttccctcttaggtgttttgttggtcgtcataccctaatttcgtctagggaaccattcttgatggcatacaacctttgcttgaccgcttagaggtacttggcacccattngtgcacaatancgtgaagtttgaacatgccagaaatcaaaaggaagcattgtacacaatcc

SEQ ID NO: 58707 - DNA, 432 bp, Glycine max
  unsure (1)..(432): unsure at all n locations
ctaagctcctcgtgggttcttgaaagctttntaagaagcttctttgttattctatatccttatctatccacacccctctattaactaaattaacctccttaaaaataattacagataaaaataacacaacaaataatcaaacatcaaacataattactaataatatatatatatatatatatatatatcggggtgttacaagggaggcaaagaattgggaagtacaggcggcccccattttgtgcaagttcaaaacaagcatgccttcccaccatacggcttgtctcccaactatacaccacccaatgttgcacacactcccgatgagaataactccactcccatactcattgagagccaacaaccttaatatgatcatgcacatgtctctcaacccatggnggagacacatgaagtaccccaccacaatct

SEQ ID NO: 58708 - DNA, 315 bp, Glycine max
  unsure (1)..(315): unsure at all n locations
cctcggatccctgtcagatacaatactagaaggaattccatgcaaccttactacttccttgatgtacaactccactagcttctccattctatacttcatattcactgggataaaatgagcagatttggtaagtcgatctactatgacccacacagcatcatgttcacgactagtcttgggtaaactagatacaaaatccatagagatgctctgccatttccacttcagaantttcaatggcttcaattctcccgatggtcggtgtgctcaacctagccttntacatgtaaacatcttgctacatatcagctacat

SEQ ID NO: 58709 - DNA, 415 bp, Glycine max
ggcctgtccgatgcagcagtaatgatggcccgagttatgtcgttgtttgttacgaacccggaatgggtgtaagcacagataacagcggcataactagcctgataaatgccaaaggaaatcgtgggaagtatggattacgctataagcccactcatgcggatatgaagagaagcatcgcgggaaggaagagcggtggtcaaagctcgagttggagacaacaaagtgaacgaagcccgccctgtcacataagtagaagctgtataagcgcgggtctgggagacaaaggtcaagtggtcgcgatctgcgaagataatgttccgagtacattggatttggtacaaccatgccctcctgatttgcagctgggatattggcgagtggaggaacgccccggcgtgtacgcaatgagcataat

SEQ ID NO: 58710 - DNA, 321 bp, Glycine max
cttgcgatgtctgttgtgacgatattgtttgctgcacttggattcatgtcaccggcatctcgcggaacactaatcacaggtatcctggttttctatatgatactcggtattgctgctggttatgtctcagttcgcatgtggaggacgatcggctatggcgaacacaaaggctgggtgtcaatctcatggaaagctgcgtgtttcttaccaggcaatatctttttgatcctcacaaccttgaacttcctattgtggggaagccacagcaccggagccattccatttgcactcttcataatactaatcttgcgttggttctgc

SEQ ID NO: 58711 - DNA, 499 bp, Glycine max
  unsure (1)..(499): unsure at all n locations
ccgctcgctgggaaatcatgaggctgatcttgagctcaatgaggtcctttaattgtggnttccaccatggagaagcaactgaagacaaatgagaagaggtgagaggaggcgccatccactatggaataagccatggaaggaggagcttcaccaccaagatgagccttggataagaagcttggagaggaggcttcaatggaggaaaagaaagacggagagaaagagagaggggatagcactcaattgaatgaagaaaaaggagagaagttgactttgagttgtgtctacaagactctcattcataaagttcaacaagtgttacacatgcttctatttatnactacgtagctctcttgaaactcttttgaaaaacttcttgaaagcttcttgagaaactctttgaaactagacttacacacacacccctcattataaccaactctgaaacttcttataaatcctaagaactgacttactccaacctttatactaagcactc

SEQ ID NO: 58712 - DNA, 326 bp, Glycine max
  unsure (1)..(326): unsure at all n locations
cctgatagaaaaaggatatgaattttgtctacgaacgtagtangatatgataggatatgatttttgtttggtttggaacttatttggaaagtttaaaaaaaaaggaagcctgatagacaaaggatatgatttttgtataggaacatactatgatatgataggatatgattttcgctctacagtacaggaacgtagtcaatgaaaatggagacctaatatgaatagaataaggaactgttcacagaaataggaaaactattataaataatgagaaatataaaggaacatctgactcacacattgtgattaaaatttacttaattata

SEQ ID NO: 58713 - DNA, 167 bp, Glycine max
ctggagatatgtcccgagggtcatgagaccttgtggacgtcaagtggggtgctattgcccaaaaccaagcttgaccaatcctgacccaacccgggcatagtcggtcagtgagaacctgtgatgtacctatacatgctagctcctggctgtcaacacaattaaggaac

SEQ ID NO: 58714 - DNA, 329 bp, Glycine max
  unsure (1)..(329): unsure at all n locations
agccatttctatggcaaatttgggtgttgaagagtcacaatttgatttggtggaattttaggtgtaaatccaatttgggcaagtttatattgatgttatggattggtgtgaggtgagagtttgcttcaaatttacctcattctaaacttcacctttcaaacctagaaaagccattgaattgaggggttntggacacctanattntgtgttgctgtggttngaagcttggctttggttagacatgttngatacatgaattgggacttgtangatttgatttgagcaagattggatgaggggaagtgtgattctcgaaatctgcacttatt

SEQ ID NO: 58715 - DNA, 398 bp, Glycine max
  unsure (1)..(398): unsure at all n locations
acaaactccttaaaacttggtaaataaattaaacgtgaaaataaaaaataaaaaatcaaagctactgatgcacacgttcaaacactcctccttgcatcaatagggccaaattctaagtctttctcttaaatcttcaaatctgctttttgcaagagactntgtgaatatgnttgctagttgatcttcagttctgcaatactctagtctatctacaccatctntctgaacatctctgatggagagtagtttgatgctaacatgnttggtcttgccatgaaaaactagattggttgagatagctatagccacttgattatcaaccatgactttggtactcattntntgctctaagtgcagatcatttaanannattctcaaccatacagcattattaacat

SEQ ID NO: 58716 - DNA, 449 bp, Glycine max
  unsure (1)..(449): unsure at all n locations
acaacaatatcatacctagaggacatacttgatgggtcttgagccttcaacttatgcaatggaagtgaaaagcatggttacaaactcttgtacaagattcggtcagagcaagcaacaatttgagtaattctactcttgctaagccaaaatgtaacaagtagagaagcatatatactaggagaaaaaacctgcgcacttttttaaaaatcctaaaaagccttcaatatnggattttaccctatngtgctctgtgcggngaataggtacaagtatctaatacaatatgcaaatgtgataatattttgaaaaaaattaacagtgacaatatattgaataaaatataaataaataaaatattatccagatgtggttatcctatcacaactcanaaacccaagcgaaatgcatttattctctcttgaacttcaccacaccattattccctacta

SEQ ID NO: 58717 - DNA, 112 bp, Glycine max
ttcaccatggacttcgtcatatcaacaataagtgtattttcagctttaatcaattgccccacatatggatgttcaactaatgacttggccaattcatgattatgcactccac

SEQ ID NO: 58718 - DNA, 381 bp, Glycine max
  unsure (1)..(381): unsure at all n locations
tgactntgagcgttngcttatggaggagtccgagtcaatttctgattatttntctcgagtattggccgtagtcaatcaacttaaaagaaatggtgaagatgttgatgaggtgaaggtcatggaaaaaatacttcgaactttaaatcgaagttttgacttcattggtatcaacattgaagaaaacgnattanagaccatgactatngaacaactcatgggttccttacaagcatacgaagaanaacaaaagagaaaaattaaacanaaggagactatggagcaactactacaactcaacgtaaaggaagcanactatgcaaattacaagacccaaagaggacgaagtcgcggccaagatcgtggacgtggacgaagacatgg

SEQ ID NO: 58719 - DNA, 94 bp, Glycine max
ctgagcttcatttattgccatatctatatttctgtcctgccaccacttaacctacatattaccatcccattcattcatattatcgcacgaacca

SEQ ID NO: 58720 - DNA, 473 bp, Glycine max
  unsure (1)..(473): unsure at all n locations
ctaagctactcttatggcctgcctccggacttcacccttcgtgccaccccagtatatttattccaagctcctactctngaggggcaactcccaccttatgaagactatcccgggcaagacgatggggaaggagatacccatcttggccccctcctccacctcaaagatccatccccgcatgaactaccccagccgaacatagtccgccatatcccggcctcacccacgcccgtgaaagagtctggttccttngcggaaggtaagggaaagatngaggcgctngaagaaaggttgagggcagtcgagggcctcggcaattacccattctcggatttggcagatatatgtcttgtacccaacatcatcatccctcccaaattcaaggtaccagactntgataaatacaaagggacaacatgtccaatagggcatcttcggatgtattgccggaagatggaggcgtattctgcgga

SEQ ID NO: 58721 - DNA, 353 bp, Glycine max
  unsure (1)..(353): unsure at all n locations
gctctgagtaaatcaaacgacaatatcnttttattcatatgtccgatagagncctgtaatatatcgaacagctcgaaattgaatgtagaagctctgagcaaattcaaacaacaataactntgtactcggatgtctgattgagtcccgtaatgtatcgaaacgctcgaaatggaataccgaagccctgagcaaattcaaacgacaataactctttactcggatgtctgaatgagtcccgtaatatatcgagatgctcgaaatggaataccgaagccctgagcaaattcaaatgacagtaactgtttactcggatgtctgattgagtcccgtaatatatcgaaaagctcgaaatt

SEQ ID NO: 58722 - DNA, 500 bp, Glycine max
  unsure (1)..(500): unsure at all n locations
ctgcagcttgagatgttttctctagcattttatttgtttagtttgagtatggaatcggataagagagaatgcagataagaaccatggaaaaggttaaatgtnttttttttgggtacagaaaaggttaaaatgggtggttgcaagcttatgacgatgttatcttttgacaatnttatttagttatggagcgtgcgcaaggactgacatataattagnttttaaatatatctgtaagtcattttatatttgaatatatcttatgagtgtcttaaggaaatatataacctgtataaagggttttatgtgggaaaaaaaagacacatttgtctctagatctagtntaaattaactatagtctctataacttggttaaattaagtttaaaatgaatttttttcaacgccgactcgagtagtgagttattgttttaattattggaataacttaaattgggaaaatatactctacccttctttaaatattntcactataatacttat

SEQ ID NO: 58723 - DNA, 279 bp, Glycine max
acaccctaaatgaaaacttattttgtcttatgctccctcaaatgatgaaacttgatgtaattcgttgttttttctctttcatttgatatgatgctcaattatttcgatgtgttgtttttatattagagcaagacaggagaaggaggtcttaagtgtaatcttctgtgaaacaaaagcgccttgctttatttgcaacacataagggccatgtatagatttaaaccttctggcgtcacgtggacattttaaacccatacatgctatgtgtactttattatc

SEQ ID NO: 58724 - DNA, 379 bp, Glycine max
acataacaagacacgccacacaatgggtatgtcaagtcacttctactaagtaaaatcataaagtgaccagtcatgatcactctgttttgcaagaatgcaccaaccatatgggatcaacatagacttaacagagcactcaaatcaagtgtgtttactctcaaagcttaaactctgaagaattcgtagggccttactttctggttaagtccaaccttaaacaactttgcacgcgaattgtcatgaatatacatatcacaactcccatatttctaccattgacacatgactatattaacacctggttctacttaaatctacactttctttaacactacgctcgcctcaattacacctaagtctactcgacctaccttcttta

SEQ ID NO: 58725 - DNA, 444 bp, Glycine max
  unsure (1)..(444): unsure at all n locations
gacaacaatgacatatctngggagattcctcctcttattggcaacttgagaagctngactctcttctttgcatggcagaacaagctcacagganaaatcccagacagtctttcacggtgccaagaccttcaggaatttgatctctcttacaacaatttaactggtttaatacccaaacaactntttgggctgaggaacctcactaaactgctgcttctttccaatgatttgtcaggctttataccacctgagataggtaactgcacaagcctctatatgttgaggctaaatcacaatagacttgcaggtaccattccaactgagatcaccaacttgaagaatttaactctctggatgtgagcacaatcatcttgtaggggagattcctcaacactatccagatgccanaatcttgnagttcttgaccctcactcanatagtctc

SEQ ID NO: 58726 - DNA, 58 bp, Glycine max
  unsure (1)..(58): unsure at all n locations
gtatagactattctattatccttcttattatagagaataaattntaaagatatataat

SEQ ID NO: 58727 - DNA, 269 bp, Glycine max
  unsure (1)..(269): unsure at all n locations
tgaatgtacaaccttcaaattggtgctcgttcccctctttgttttctgcaataaagaaaatcaatatctcagaaaacatggatgaagtcctaaggatgccatgtacatgtgtatttatgaagatatagtatatatattccatcagcatacattgactggtgattacatgtaatagactttatataacatggntgccccaaatcacaattaataagcacaactaccaatctttcagagacctttggntaatttatcttctctccttctgt

SEQ ID NO: 58728 - DNA, 390 bp, Glycine max
  unsure (1)..(390): unsure at all n locations
atcttcttatcaatggagtcttttgtcttttgtttatcaatggcagcaaaacggagaaggaagaaagatgattgtagacgccacttcaaggagaagatgagtcaagaacaagcttaccaccatatgaagcaatggataagagcttgaaggtaggagaagataagtggagggagaagaagaataagagcacagaattttatgcctcanatgaggtcttaaacttgaagtgtaattctcagatgatcaaagttgataaaatgcatacacaaggcctctatttatagcctaagtgtaatacacaattagaggaaaatttgaatctctattcacatttcactcgaatttgaatttgtggagccaaatttgatgtcaaaatttcactaattatga

SEQ ID NO: 58729 - DNA, 277 bp, Glycine max
  unsure (1)..(277): unsure at all n locations
ttaagatattacaaactatttccncaattaaaagtctatttcactttctattcaagttacaaattcccttaataatgaacctcttacatattgattctaatagaacacatcgagtataaatataagacactaataaataaccgaggttaagggaagagagagtgaaaactcatatttatactggtttggcacaccctcgtgcctacgtacagtccccaagcaacccgactgagagttccactatcttgtgaaagtcctttacaagttctaaacacac

SEQ ID NO: 58730 - DNA, 123 bp, Glycine max
cttaatgccattaacctagggaattaaaaaaaacttaatggctgagtgtaactgaaattgtggcaaccaaaggtcacccccaacaaccaacaagtcagccaccttttggtctcccacgacatt

SEQ ID NO: 58731 - DNA, 399 bp, Glycine max
  unsure (1)..(399): unsure at all n locations
gcttgagaatcaatggctactttactcgatgcntattcttgctttaacatattgtggcgcgtcgaaatgaacgacgaaagctctcgagaaattcaaatagtcataaagtttcacacggatgcccgattcatgcgcataatatatcgagacgctcgaaattgaacactggaagctctcgagaaattccaatggtcataacaatgcacatggatgccggcatccgtaatataatatatcgagaggctcgaaattgaaatatgcaagctcttgagaaattcacatggtcataacttttcacacggaggtcagattcagccgcataatatttcgagacgctcgaaatttaactaatggaagctcacgagaaattccaatggtcataacattacacacggatgc

SEQ ID NO: 58732 - DNA, 249 bp, Glycine max
  unsure (1)..(249): unsure at all n locations
ctgcagcttgagccattcaacgacatacttttatttgtgtttattgagcctgtttatatcgagacgctcganatcgagatgtgaatctctgagccaattcacacgacaataactctttactcagatgtcggattgcggcccgttctataacgagactctcaaaattgacatgttgaagcctctgagctcactcaaaccaccattactttttactcggatgtctgattgagtgctgtcatacatcgagac

SEQ ID NO: 58733 - DNA, 411 bp, Glycine max
  unsure (1)..(411): unsure at all n locations
ctcagcttcacattaatnttgagcgtctcgtaatattacgggactcaatctgtcatcttagtaanatattatgggcgntgggattggctcagagattcaacattcaatntcgagcgtctcaatatattacgggactcattcagacatccgagtaaaaagttattgtcgcttgaattagcttagagcttcaacaatcaatttcgagcgtctcgatatattacgggactcaatagaatccgagtaaaaagtattgtcgntggaattggctcatagcttcaacattcaatttcgagcgtctcgatatatgacaggactcaatcagacatccgagtaaaaagttattgttcgttgaatttgctcagaggttcaacattcaatttcgagcgtctcgttatattacaggactcaatc

SEQ ID NO: 58734 - DNA, 197 bp, Glycine max
  unsure (1)..(197): unsure at all n locations
tctagaatattcttaaatataatatggatgaaaatgggagaatatcctacaactatagtgtgtatgaatatggtagaacaatctanaactataatgtgtataaatatggtagaacaatctacaactataagtgtatatataagatagaagaatctagaactatcatgatactaatctatcatgaaaactttagaaag

SEQ ID NO: 58735 - DNA, 392 bp, Glycine max
  unsure (1)..(392): unsure at all n locations
ttatgcgattcatattctctgtctgntccatcaattgtgggtgatacgagaagctcattcgcaaaagtgtcccactcaaacggaagagttcttgcaagaatctgctgatgaaaatagggtctcgatcgaagaccaagctccagagaatcctatggattntgacgacaatgttgatgaataaagaagcagtcgtgtgagatgtgtgcgtcgtgggtaatatgccaaggtggatccatttggaaaaatgatcaacgacgaccaagatggtggtgttaccctggtatggtggaaggccgacgatgaagtccaacgagaagtcctcccacggtcagcatggtattggcaatggacataagagacccgccgtcttttgagtcttgtatttagttatc

SEQ ID NO: 58736 - DNA, 347 bp, Glycine max
ttttcattcctcagaacggcattctccttttggatcctaacagccactgatgtgaaccttcctttgactgtttgagcttgctcgagttctgtcctaagagcctacacctcttcctcttactgcggtgcctcaacttcctcccttatagcaggtctcaaacttgggagccaatccaaacccttgcacgtgggctttcaaccactcacggtagccaccagtgggccccctacctctgagctctttgtctatcttttgtaccacctaccatgccttgcggaccttctgaagtgtctccatgttggtcttcttgaagcctcgagatatgacaggtgcgagctcatcctcta

SEQ ID NO: 58737 - DNA, 291 bp, Glycine max
  unsure (1)..(291): unsure at all n locations
gaccacagagaggacctggagatatgncgcggcggtcacgagaccttggagacgntaggtggggtgctatttgcccaaaccaagcttgaccaatcccgacccaacccgggcatagtcggtcagtgagaacctgtgatgtacctaagcaggcgagcttctggcagtcaacagattaaaggaacaaagaccacacagcaaggaggcttgtggtggctggccagctgtggattttgtgtgatatgtgcgagatggcctctggtaatcgattaccaagggtgggtaatccattac

SEQ ID NO: 58738 - DNA, 476 bp, Glycine max
tgggctctgcagttctccgagacctgtcccactagcttgttattatacccgctactaatcgagctatcatcaagatatactgcgtctccaggcaggcgcacggcgaaacaccacagcagcctgtggatggctggcagcgggcaacagacgcaccgccatcacctctagagttcacctctgctcatccacaaaaaggtttgagtattgcctacaccacatggccgaccaatatgcgaccaagtccaaagccaaaggtaagcaaagtactaggtcagtgaccgacaagtcataaggcgtccagctcaagacgttaaagaagcgctactaggaggcaacctagcaccttgtgaatctatgcttgttatttgatcacttcttatagtaggacgcacctagttgctcatgatacctgcgaattaaataaaacatgcgcaagctcggaatgagtcatacctcacaagatatatatatgtatg

SEQ ID NO: 58739 - DNA, 143 bp, Glycine max
  unsure (1)..(143): unsure at all n locations
atcgaagaaagcgaaaagtagagatcctatgggtgcaaactcttaaattccgtgggtatggcttttgaaaggagggaaaagaggtttntgaatgcaaaaatgccccccctttcgtcacttttattatttggtgcaggggttgc

SEQ ID NO: 58740 - DNA, 416 bp, Glycine max
  unsure (1)..(416): unsure at all n locations
ggaatcttgttcatgaatattcatatgttctaaagaatctgcaatatcatctagcatattctttcttgacaagatagcattagattcatcaaaggtaacatgaatggattcctcgatattcatagttcttttattatatatcctatatgctttgctctgttatgaatatcccagaaaaataacttcatcagagtttgcatcaaattttcctagattatcttttccattattgagcacagagcatttgcaaccaaaaacatgtagatgagaaatattaggttgtctaccattaaataactcatatggngttttctttaaaataggtcttattaaggccctattcatgatgtaacatgcagtattgaccgcttcacccananatactntggaaggggaagtatcattaataaagtcta

SEQ ID NO: 58741 - DNA, 403 bp, Glycine max
tgtgttagatggcgggatatctttataaattattctccattcttaggatggacataacttagaactggatgcaatcctaccccccaaaggtattggatattgtggaagcaatgcttaccaagttcattctgatgatgccaaacactctagtcgagaatcaagagtcaagcaagtatcataaatcaaagagtcgctcaatcaagaatcaggattaacgtgaagattcgcgagaagactatagatataccagaacttcaatactagcatcgagatatggttaataagaatttttcaaaagatcagatagaataacacatttctgttcaagagaatatttcaaagagaaatgctttaccaataattttactctcttgtaatcgataccacaagagaggtatcaata

SEQ ID NO: 58742 - DNA, 167 bp, Glycine max
gatcaaatggagaatagagatcattatgaacaacaaatgaggagaagagggaatgatggtgttcctagacaaaaccgaattgattggagtaaactcaacattcctccatctaaaggagaaaatgatccggacgcctacttggagtgagagatgaaaatagagcatgt

SEQ ID NO: 58743 - DNA, 410 bp, Glycine max
  unsure (1)..(410): unsure at all n locations
ttattgttttatacagagtggtacctggagatatgtcgcggcggtcaagagaccttggggacgtcatgtggggtgctattgcccaaaaccaagtttgaccaatcccgacccaacccgggcatagtcggtcagtgagaacctgtgatgtacctaagcaggcgagctcctggcagtcaacagataaaaggaacaataaccacaaagcaaggaagctggtggtggctggccagctgtgaattatgtgtgatatgtggattatggcctctggtaatcgattaccaagggtgggtaatcgaatacaaggcttaataatgaatacaggagactaggatggtctctggtaatcgattaccacggcgtgnaatctaataccaagcttganaatgatgtcatgaagctaatgaagcctc

SEQ ID NO: 58744 - DNA, 136 bp, Glycine max
  unsure (1)..(136): unsure at all n locations
tatgcacatatgaagctaattgtatgtttctggaaatgaaatgaacaaactatcagtttataaatataagagacataccctntctattgcatgttgctgcgntggcgtcacattgatggaatgaggcatatcttgc

SEQ ID NO: 58745 - DNA, 104 bp, Glycine max
taaacaggtgacgaattttttggtttatttaatgaaaggtgaaaaagaacttatgtataggaaggggggataaaagggaggaaatgattatataacgaaatggg

SEQ ID NO: 58746 - DNA, 346 bp, Glycine max
actctaggtattagtcaattcaattaagaatgaggaatcccaaagagaacacgcccgattgatctttcgcttttattttactaaaaggcatatttatattattattttacctcttttttgatttccaacgtggttacggcacgaccgaacggtcggaattctatttaaccacaattaacggatgatacaattcaaacgatcggtggaaatgtactttatttttagattaagtgagaaatgacttacataaatggcttacgcgcgtcaaaaggcggtataataagtcaatgagaacgagaataaaatacatggacataatgtggaccccacgggtcataaatgaatt

SEQ ID NO: 58747 - DNA, 381 bp, Glycine max
  unsure (1)..(381): unsure at all n locations
attcacatatttacttttccacttcacttagcatccttaatctttcttctaataagctgacatccttaacattcaactgttgtcaaactttagccttaatttgaaatgagctttatctttgggataataacattgctntgtcacctcctctcttcccaagcttttcttttcttgtcaatgttgacctttcttttaataatatgacatcatcaatctttcaggtagttcaacttcattagaagttaaaatcttattggtaattgtagtctacggatgcagttcttatgcactctccatataattntcattttattgctcttgacttcgtcatatgtgaagaaactatatttacggtcctaacactgcatcttgacttgactt

SEQ ID NO: 58748 - DNA, 176 bp, Glycine max
  unsure (1)..(176): unsure at all n locations
tacagaatatggaanaagggtngctcagtctctgacagagaaactagctccagcttctggaaaagatgctggtgtaagaagaggtgtgaagtccaaagtttctggaactcaaactactagtgtgggtgtggaacaagacaaggnggtttctgtgaaagactatttggtggacaaac

SEQ ID NO: 58749 - DNA, 307 bp, Glycine max
ataactatagtcagactaaaatagttataaaattataattaatcttattataatgattatctcagatgactgatgttgatctatctatcagctgattatataactagctattctttggttaatcaaatgtattccggactcactggttagtgaccgaatgatttgataacctggtatataactagttatattcataatttatttgggagagagatatatacatacattgttctatacctgttaaaattgatattctaattcaccctgtgtggacaaataaatgaacgatatacagagcttagtagtt

SEQ ID NO: 58750 - DNA, 325 bp, Glycine max
  unsure (1)..(325): unsure at all n locations
atttcgagcgtctcganatattattatccttatntctgacatccgagtaanaagntatgggcctttgtattggatcagagcttcaacattcaatttcgagcgtctcgatatgttacaggactcaatcagacatcagagaaaaaagttatcgtcgtttgagttggctcagagattcaacattcaatttcgagcgtctcgatatgttacgggactcaatcagacatccgagaacaaagtattggcgttgaattggctagagcttaacattcaattcgagcgtctcatatgtacgggactcatcaacatcgagaaaaagtattgcgtt

SEQ ID NO: 58751 - DNA, 436 bp, Glycine max
  unsure (1)..(436): unsure at all n locations
gctgtagtgtatatttgtgaatcttactacctanatggcttacttatttttattatattagatngagtngngcttgatgttatcatgaggtcaaagaagttaaaaaattaaatatgtttatattccaaactcagtgatatgtatcatgcaaggtttgtaggttttgtgtcatattttggaaccttttccttttccattcatgaatagaacttggatatatctgatgtctttggtctacacaatgtngatgagcctaccgtgtgaagtttgaatggttgtaaggttgtagatcacattctgaagcttgttcctaatgttgaggtatttctaggatgtttcttctgattgcattaacccttccatttcataatatttactgttcacctaatacttctacactttatattttatggcttatagcactctctcacaacac

SEQ ID NO: 58752 - DNA, 143 bp, Glycine max
  unsure (1)..(143): unsure at all n locations
accatganagagnngccaagcaaaaccatcaatttattattgacaaagctaatcaaaggttgagcaattggaaaacgtccaatttatccatagcatgtagaagaactttaacaaaagttggtattcaagccatgcatatctat

SEQ ID NO: 58753 - DNA, 470 bp, Glycine max
acgcattgacatagaaattcgtctatcagaaattcattatgccggtgccatgaacccatttccaaactgactcgactgttctggcacccacttctccttagactcaagctctaacaaattaggttcgtttcagtcaataccatcctcaggccgggttcctccacattataactcttctctaatgctgacggtcttaactgtcctttgtcagcaacagaaataaattccactcccaatacaatcccaagcaaaatgtactgggagctactaacaaaagtcacccccacgatatcactcacctagcccctaatagcagtcaaccaattctgtcatgccctgtcacgccctgcaacactcacgtgtcctcatttaactactcaacaactgtgtcagcatcttgggagaatacatacacgtcccactcacacatctccaatggacacagtcatcatgaactaaaactatctctg

SEQ ID NO: 58754 - DNA, 357 bp, Glycine max
  unsure (1)..(357): unsure at all n locations
taacaacttctgngaaataacaaattcgtgtctcttaatctgtattagaacttgcagctggtgatacttataatgctcatatggtgggaacctgatttctttgntaatctggttgtatagcttgtttcttgggaagaaggagggtatctgacatcacataaaccaatgcccacgggagagattgtagttggaggatttagtgtgacagctggttactttaagaatcaagaacaaactaacgaagtgttcaggtaatttcccaattacagttgatgcatgacatttntcttttaattcctttactgtctaaatctgttttgatattactaaccctcgtacatcttttttgttttaact

SEQ ID NO: 58755 - DNA, 425 bp, Glycine max
  unsure (1)..(425): unsure at all n locations
actagctgctgataattctcccttgtcagcaattctttttatattatctaacctgcatgagttacattctccccctctttgatgatgacaagcattatccaaggcttgatctttntgacatcatcaaaatcttcatgatntacattctccccctttttgatgatgataaccacctataagttaggagcaacaacaaagaagaaatatctatttgcatatagtttactcccccttgggtttggaatgttggcttatatgagacaattgaagattcatattttcatattaaaaaggtgctcataaaaatagacattntccttacatttatcttgatattctctccccttgcgcatcaaaacaatatgaatgagagagaaaatgtaccattgtgaatgttaaaatcaggatccaaacgattaaataac

SEQ ID NO: 58756 - DNA, 265 bp, Glycine max
  unsure (1)..(265): unsure at all n locations
acctgccgcatgcaagcttcanganacctccctctcatcntntgttttggtcattctagtactgtttacactnnnaccananngagtaaagcgtggattgattattctatcctatgcgtcttccataatcagagtcacaaaaatataaatcatgattattctacattgtttaacacctttctttacagaccttgaaaaagacctcttttgtggttttgactcttattctctcttctacatcacctatcatatcatcactcggcat

SEQ ID NO: 58757 - DNA, 333 bp, Glycine max
  unsure (1)..(333): unsure at all n locations
tatagaccactcaagctcgtcagattcgtcgtcngtttgaggtgcacggagagagggcttccagtgattgatgtgttcaagnnggncgaaggcggacttggccttgttgatgagccaatcgacggccttgctggggcggtcgtagcccaagcggtcctggacgtcgtagaattggatcgcggtgtgggccgatagtctcacccgtcggtcacgcgggcctttggcggtgcacactntgctgtgacggtccttgcgtcctgtataccgcacaatgtgaccgcacttaacctccactatctgcccaacttctccaacacttgctcttaccatccc

SEQ ID NO: 58758 - DNA, 341 bp, Glycine max
  unsure (1)..(341): unsure at all n locations
tgacatccactccacacaagttgaagtataagagaccttcaatcctattacgcaacgtggcggacaaaaatgggcagctaacttgaatggtcattattgtcaatgcggaaggtattctgcgcttcactattcatgttcacatattattgcagcttgtggttacgtgagcccgaactactaccaatatatagatgctgttatacacatgagcacatcttaacagcatactccccacaatggtggcctcctgggaatgaagcggctattccttcttctaatgacgcatggacacttaatcctgaaccaactactattcgtgcgaaaggtcnngccaaatcaac

SEQ ID NO: 58759 - DNA, 455 bp, Glycine max
  unsure (1)..(455): unsure at all n locations
ctcagcttcctattacatanatccataagatctntaacaatttaatgctttatataacttctaaatatgaaaaggaaattgaaatggtgatntcttttgtgaactatattatattggtagtgtgtactttgttggaaaatgacagacatagggtttaaggcaactagtgcatgaagatcattntgaaagatatgttacgtcaaatgaatctaaattgttatttgtngaaacaaccttctctatattatttccccataaaccaaatgaaagtctaattgttatttgttgctttagctntattgcttanagctactagtgcattttccttcctccatgttaaatggttttatgtatatgccttatgccaatgatgttaactttngaatagggaaggtttcgntntacaaaggacaatnttggtaacagtcaagcaaccagttacacatttgatacct

SEQ ID NO: 58760 - DNA, 425 bp, Glycine max
  unsure (1)..(425): unsure at all n locations
atacaatttctcattcaaatcattctcaaacactcatttcaaacaaaacaatccactgcatatcattttcaatcaattcactgttcaaacacacttnttgttcaagcaaacaactcaaagtactaaaatttaaataattgaaatttaaagaactgaaacataaaaacttgaaattaaatgactgaacataaatcataaaatatctgaanataaaataaaatgttcaaaatgcacaaatttaaatgtcctgctcctgtgcatgctcattaagatccaacacctaagcagctggtgaatcctgagagatnaggtgctctaactcagatgctggtgcatatgctatggcatcattaggtatgggtgctgaggatggctctgggatctggtctattgaagtctnctncacatgagccatgtgtacacct

SEQ ID NO: 58761 - DNA, 339 bp, Glycine max
  unsure (1)..(339): unsure at all n locations
aagtttctcanagaagcttctaaaggaagttttctcaagaaaacttctcaaggaagctacctagtctataaatagaaacatgtgtaacacttgttgtaactttgatgaatgagagtcttgtgagacacaactcanagttcaacttctctccctttttcttccttcaatttcgtgctcccccctctctctttctctcccttnttcttttcctccattgaagcctcctctccaagcttcttatccaaggctcatcttggtggtgaagctccttcttccatggcttattccctagtggatggcgcctcctctcacctcttctcctttgtcttccgctgcatc

SEQ ID NO: 58762 - DNA, 201 bp, Glycine max
cacagccaagaaacagagcagaggcagaatactctggctaaacaccaaccaagatcacagcttttctcacttagagacccgcagaacaattccttcgttccaattcgtgaaccggtggatcgacctccaattcttactggaagtctctagtacattaagccacattgtgaccggggcgatctactagctaacaatcagaac

SEQ ID NO: 58763 - DNA, 434 bp, Glycine max
  unsure (1)..(434): unsure at all n locations
ctaagctatgcctattcctacaacgcctctgccattacatctataaccgtaaaaaaaggcactcatatacaatcaaggcagcttcgttacctagattatttacacgtacttccaaggtgtatttgttacttacatcacacacatctccttggctaaattcacatacatgcatactcaaagcattttgggataccaaaaattgcacatgtgcacctcttggtatntctaatacctatacatacacaaacttcatgatgaatcttgactatctacacaataaggtgctacatttcatgctcttttcaagttgttgctacctaaagccgcatgcaaatacaagtatattttcctttgctgactaanaatgtattcaaattaaaagggatacattntttggtaatgtatcttctttacataacatgccaacatattat

SEQ ID NO: 58764 - DNA, 388 bp, Glycine max
  unsure (1)..(388): unsure at all n locations
acgctcgaaagcgaataccggagctctgagcacacttaaacaacaataactgtatactgggatgtccgattgagccccgttatatatcggaacgcttgacagtgattgctgaatctctgagaaaattcnaaggacaatacagttttactccgatgcatgagcgagtctcgaatggaaaaagacgcttgaactggattactgtagcctgagcatgattgatgacaataactttagctcgatgctacagactccctataatcagaatgctgaaatgactgccaagcttgaccgatcatacacatatcttttctcggtgactgattgatgccgaattatcgagctctcagctttatgtaacacttgatcaattctactacataactatcac

SEQ ID NO: 58765 - DNA, 241 bp, Glycine max
  unsure (1)..(241): unsure at all n locations
atgaaaatataagtttattatgtttntttaaaacaaaaaatacacaataaaaatatgattttattgtgtgtctcaaccaagatgacaacagaattgtgtttccgttgtgtatttattttttgttttaaaatgtgaaataaaaatacaattctatagtgtatcttaacaaagatcacnaacataatcgtattttggtgtgtatttaatatggngtgaggagaagacaaacacatgtaagatg

SEQ ID NO: 58766 - DNA, 396 bp, Glycine max
  unsure (1)..(396): unsure at all n locations
acttcccatcctgggatcgagtacttttatgttctgctattcttcaaccacaaagtctggcttgaactagaaaaccctctcattgtgttgttgatcgaagaattccactcaacaccaattggcggacatttgggttttgccaaaaccctgcatcgagtatagaacaaatattactcggctaatatgcatgcggacatcacacgttgtcttcgtcagtgcatcacttggcagcaaatgaagtatataaccaaaaaacccatgggattgcttcaacctttaccggtcccaactgccccatggcaagacttatacctcgnattcattacgggtcttccgccttcatagggatacactgccatcttggtcgtcgntgaccatttcacgaaaggagctcat

SEQ ID NO: 58767 - DNA, 95 bp, Glycine max
  unsure (1)..(95): unsure at all n locations
cctctgatctcttgttctgtagacaccgacgatcagagactnttgtcctcatttgtggagcggaggcccccggagacntctatttttcatctccc

SEQ ID NO: 58768 - DNA, 365 bp, Glycine max
  unsure (1)..(365): unsure at all n locations
gggagaatgngaatgtatgtatacatgatcttgatgatgtcaaaagaagaattanacaaggctcattcttcttcaagattaatacaagattgtttcaacaaacaaagccctgattcaagatttcttcaagatcaagccttgcctcacaatgaaagttttcaagtcattcaaggcacatgtaatcgattaccaatggtttgaaagtgtgtaatccattacacatcatatgtattngattaccagagactctgaacgttgggaattctattntaaatgaagggcacaactatcaagaacaacactgtgtatcgatacactattctgaatcgataccagaaggatttctaggatatcgccacagcaca

SEQ ID NO: 58769 - DNA, 253 bp, Glycine max
  unsure (1)..(253): unsure at all n locations
acctccaatctntaatggagaagggtaccactactggaaaacccgaatgcaaattnttattgaggcaatagatctaaatatctgggaagccatagacatagggccttatatacccaccacagtagaaagagttacaatagatggtagttcatcaagtgaaagcataactatagaanaacctagagatagatggtctgaagaggatagaatacgagtacaatacaacttaatagccaacaacataataacatct

SEQ ID NO: 58770 - DNA, 436 bp, Glycine max
  unsure (1)..(436): unsure at all n locations
acaaanattatgaaacccaagaccaacatacttcttatggatggcgatgtttctcttaagaaataaggtggcaacaacaattattaacaatacttccccatatgaaatctcgacaaattttctcaaactctttacaaacaaagagactcacaaacaagtggttggcacgacataaatgtgtaaagacagagtggattgtgtgaaagtgattatacccgctagagatagtgctctagatttctagcttgataacttattgtgaactctataaaaaaaacatagctattaaaagaacttcgatggtgaagcatggcgagtctatgtaatttgaatgtcacttgtcattggaatatctaaaggggttgtcctatgagagttaaattcacatgtccttcttacattcgttgaaagaaaactatattgttgcattgatata

SEQ ID NO: 58771 - DNA, 422 bp, Glycine max
  unsure (1)..(422): unsure at all n locations
agcttccatcaagtggtatcagagcacaagagcttattgttgtgtctccttatacctccattaaatttntgctntaccttctcttccattggtgnttcttcattattctccatgtatctcctcacatgtcttgagctaaatgttgntaacatgattctttatagtttccaccgactaaacttgctatagaagctagatttgattttctaatgttcaaatttcttgttcttgttcttgaaccatgaattatgttgagtttaggttcctttgagttttgtcttgtatttttnttggctgaaacctaaaccataaatatcttacaaaaatattaaagtagaagaacacctcacaaatctagagtgacatcgtcacctattgtagttttgtcatagaagtcatgtctagtcatgaaactcgcacat

SEQ ID NO: 58772 - DNA, 522 bp, Glycine max
  unsure (1)..(522): unsure at all n locations
ctcagcttcatgtanaggatggactcttacattgaattgaatttaatgttataggcactggtaatcgannaccaaaacattgtaatcgattacaactttttgaaattaattggaacgttgtaaattcaatttgaaaactttttcaaaacaattttgctactggtaatcgattatcagagagtaaaaactctttggtaaacatgttttgagaaaaatcatgtgctactcgatttttgagaaaacctctttatacttatcttgattaagccttctcttgattcttgagtcttgaatcttgatcttgattntttagatcttgaaccttgaatcttgattcttgactcttaactntcttcttgagtcttgaattcttcttgattcttatcttgaactcttgaattcttctttgatcacttgagttgatctntgagctctttgtcatcacctttgttatcatcatttgtatcatcaanacacctttgaatcacctttgatcaccatgaagctttgttctacaatctc

SEQ ID NO: 58773 - DNA, 235 bp, Glycine max
agcatgtgtgggaaaagaacacgtgattgatgaataacatgcttaattgacacgccgaagatatatattcgatgaataacataacagcgtttggatttccttctaccttgatgatgccgcaccgcaaagaaaatcaaatgcctctctgtcgtaatcaaataaacatacactaaattccccaaagataagaagaactaaattattggcgagaatgaataatgccgacaatcaagtt

SEQ ID NO: 58774 - DNA, 355 bp, Glycine max
ctatgacactcaacttgacgatttgctcatgatatccccatggagggttgctttttcttaactatgctaaagccatacttaactgagccctgatggatcttgcccttgccagagctacatgaagagcgtaccgcctaacactatgcgagttaaaatacaataatacaagaatctgctgtgtaacatgacaaatgcaatgccatacaaagagcatggctgaaattataaataaattacttcaaagacaaagatgcgtgctagattatataatggaacatagcatacatgcatagcatggaaatttgacgttgacaataagcacaacgttcagatatataacagagatacacactct

SEQ ID NO: 58775 - DNA, 380 bp, Glycine max
  unsure (1)..(380): unsure at all n locations
atcttaagcaccgcagctgcagctgctttaaaatttcaccaattcttaatgatagaatcnnctgatcaccacgccacaaagatggaagaaaaggtggattctgatgaagctatctcttttaacatgtgantttccaaatgctcaggggagcttcagatcttgaaataactatggcagcttctagcaatggaactaaatgatcatttgtcggcggtcaagttggtgttgctgtacaaaagagctatactcttgataaagtatagtgcgtcccattatgcaaaaatgcatgatgctcgactagttttagtctgtcctatcgagatcaatcgattcactgctagactcaagtgagagatttangtccatctttgcaactagta

SEQ ID NO: 58776 - DNA, 349 bp, Glycine max
  unsure (1)..(349): unsure at all n locations
atgctggtagattggatgctaagaaatccatcttatatatctggtcactatctttctcataatatgtattttctcataatacccacattcattgactgatagaccatattctngcagttgtgtagaaaggcatatgaaatggatatatgttgcaaccacccaacagcatntatctgcatctaggtaccagatccacctgtaaatctatatctccaacccaacctctccaattacttgtaaatctatatcttcaacccaacctgtcaaaaaattcaacttcattagattgaaaaagtctatttactggtagaaagctatatctcctacccaacctctccattacttgtaa

SEQ ID NO: 58777 - DNA, 403 bp, Glycine max
  unsure (1)..(403): unsure at all n locations
agcttnctcgggccttttctgctaatgcaacatttgtaaagttagctttagtggcgcattactcttaaagcaataatggcatgtaacctccttccataaatacaaacatcaatgtaaatttagagcaagcttatgcgcatattntcttacaaacgttctcttgcacaagacatntaaccgaaataatgcacccatatacaatcaaagcagcttcgctacctatattatctacgcgtacctccaaagtgtatgtgttacttacatcacacacatctttgtggctanatcacatacatgcatactcatagcattgtggggtaccaaaaattgcacatgtgcacatcttggcatttctaatacctattcatacgcaaacttcatgatgaatcttgactatcttcac

SEQ ID NO: 58778 - DNA, 292 bp, Glycine max
tcgctaagctcacctccctgagatgagaagctagagctaagctacaccgcccctataatagctaagctcacccccattccaaaaatacatgacaatagaaggataattcctactacaaagactactcaaaatgccttgagatacaaggctaaaaccctatactactagaatggtccaaatcaaagcccataagaagcaaaaacatattctagtatttattatatagagtggacccaacctgatggaagctcgcttgtggggcttctatggaagctggatccttgagcttcaa

SEQ ID NO: 58779 - DNA, 413 bp, Glycine max
  unsure (1)..(413): unsure at all n locations
tcttgcgtagccgctcttggtggctcagaaatcccatataacacatttctcttattactagctatattgaattctntagttcctgaatgtacaaccttcatattgttgctcgttcccctctttcttttctgcaaaaaagaaaatcaaatgctgtcaaaacatggatgaagtcctaagaaaatcaatatcaaagaaaacatggatgaaatcacaattaaaaagcacaactacctatctttcagaggccgttggataatttgtcttgtctccttatgtgctgcggttttgtttaataatcttatactcttgccttccaaaaaaaacttatcactaatcctctgttcattaatccaattatgtatgttattgtataacagattantgggtgcttcacctgcctccactcctactcc

SEQ ID NO: 58780 - DNA, 332 bp, Glycine max
  unsure (1)..(332): unsure at all n locations
catcatggaagcatacctttacttttgaataaagaacaattgatgtctggttctgtagtatactacgtgtcatgtgagttaaaactatgaacttgatattttggagggcttaactcgtctcactcaactgagacttgcatatataaataggaaataagtacatgacaagatatgataagatagggtgcagactgcggcccttgtcagcagagaaagagtgccaaataagaaagataataaaacataaaaaaaacacattaatctaacaatgtgcaaggcagcacataagtatctgttgcataatgtgctacangacattacactcctgatca

SEQ ID NO: 58781 - DNA, 105 bp, Glycine max
  unsure (1)..(105): unsure at all n locations
ccccaatccaanccccccnnancgagagagagaaattttttcccaaaccatcccttatagaaaattactacacccccaatcacaaacattaatcacattgctaac

SEQ ID NO: 58782 - DNA, 65 bp, Glycine max
  unsure (1)..(65): unsure at all n locations
ccttaatctcctcattatanattaatnnaaaagaggggtgctggctgaactcaacccaaacaaac

SEQ ID NO: 58783 - DNA, 371 bp, Glycine max
  unsure (1)..(371): unsure at all n locations
gcttcatgatgatgaatcaagttgattcatgttgttntgatgatgacaaagatgatgacaaaaagcccaagaaaatgatttcaagattgagtcaacaagttcaagatcaagattaatttcaagtttcatgagaagaaatcaagaagattcaagaatcaagagaagttgatttcaagattcaagagaagatgaattcaagattcaagagaagaaatcaagaagacttcacaagggaagtattgaaaagatttttcaaaaaacaaacatagcacaattttggttttcaaaagagtttttctcataattttccaagttaccagagttttttttactctctggtaatcgattaccaattacttgtaatcgattac

SEQ ID NO: 58784 - DNA, 271 bp, Glycine max
  unsure (1)..(271): unsure at all n locations
gcggttctaatgactcctctgcggcctccacataaggcatagaggatgggcagctcaccaagatgtcttcctcgcttgatacgaagaccagatgcccttccactacgaatttcaacttttggtggagtgtagagggaacaactcccactgagtggatccacggacgggccaacagacagatgtanggggggttaatatccattatttggagggaacttgacaggtgtgagggcctatctgtactgggagatcgatctcttccctaacctct

SEQ ID NO: 58785 - DNA, 531 bp, Glycine max
  unsure (1)..(531): unsure at all n locations
ttgaaaccttganacctgagatcttaagtcacctgaggcatgcaagcttgtctcctatgcagtgacactatcctcttaattataaaaaatgttgtgacagatccaaatgcaaaggaacttgcgaaccccaccactccaaacacaatctccacaccattgctgaaaactcatactacaagaaaatatgatttgtagattctccacaccattgctgaaaactcacactacatagagtttccgaggctggaataacattcctacgagccaaattctatttagagggaatgtgatcctaaagcgctttccatgcaaagccttgaatctttaaagcatcttctncacctncaatccctccccacaccaccctccctacaaagacacatctccttcaccgaaacttgcttatttatagccacatcaaataatcgaggataactcaataccaatgtcgcctcacccacccaatgatccctncaaaataatactactntacctaantcataataccttgtcccctttcttaaacaatgg

SEQ ID NO: 58786 - DNA, 425 bp, Glycine max
  unsure (1)..(425): unsure at all n locations
ttattttttgggtgatagttggaaaaaaaggccatattcctatgctgatttctgcatttttttaaatttctcaaggttacaggtttgacctgggcattcggtggaagatttttgtacagctgtagccaggttataatcttttccttaggtgatttgaccattttcctatcaaagtatgattgaatntaactacatggcacanaagaaaatcatagttatgtggacataaatatgttgcatagtccttaccaagtttcctcaccatttgtatcttcttntttattttctacctgtgtttaaacttganttgtaattgtcttggatatggattccagctgggtccttgctnngatagaaatagaaagataaaggaaaggggtggagaaatacagaaatttttggagagaattggaaagtacttaatt

SEQ ID NO: 58787 - DNA, 400 bp, Glycine max
  unsure (1)..(400): unsure at all n locations
gcttagtgacatccgtgacttgatcttgagttaagatgttcgcaagttagatnctttagaatcttccagtcgtgtttcctattcagcattgaatactgaaggcaggggaaggactacccagaagggtcagaatggtcgaggcctatcatagtcaagagggaaaggtcacagaaaatttcaaagtgacgatacttgttggaattgtgacaagagaggtcactttagcaatcagtgcaaggcaccaaagaagaacaagtcgcacaaaaataaaaagcgcgatgatgatgaatccgctaatgcagcaactgatgaactagatgatgcattaatttgcacgttggatagtcctgttgagtcatggatcatggactcangtgcgtcgttccacactactccctct

SEQ ID NO: 58788 - DNA, 452 bp, Glycine max
  unsure (1)..(452): unsure at all n locations
ctgtagctatagttagtgtgcacttcttccttattacanatcagattgatctgttgaagcaataagtcattttgctgtaaggaatatttaacacgactatcttgaagagtttagtgtaaaactagggtaaagccagaagtggtttgagggaagaataattgtatttttgtgaaagttagtagaaattagtatgtttgccanaaattacacgtaatctcgatggttgaaatacaataatataaaatcttctatcttatcgcttctcttttttattcatatctaaccttatattatgatttttgttaaagatgctcttcaaaatgattactgataagagaatgcttattcaaaactatagcctatactttatatcacgtgcttttgataacatgttctataatatgataaggctcatatgtgacagaggtgcaattnttttaaaaacacaattc

SEQ ID NO: 58789 - DNA, 162 bp, Glycine max
tctcacacttatattcaacgagaagtgccagagacggctcttccctatattcgagaattcctctgctgaggtatgataacggttgatttgtgaagctgattgatccgactcctgatgaagagcatataacctatatgctgaccaaacgcccattaattgttg

SEQ ID NO: 58790 - DNA, 463 bp, Glycine max
  unsure (1)..(463): unsure at all n locations
actaagctttagctcgaaaantgaaaaacagttagtggtggagagacaatatttanaatantnnagcatntnaaagggataagacaatatgtttcactacttgtaatgagaataagtgttataattgcacagcctacgggcgtacgtgggccacgtggattgtaattaacattatgattcggcctaattacagtgaatcgatctgtgtcaattcagtccttataaccttatttttgaaatcgaaacctaactgaatcgatccataaatggntcggtttgattctaaccaacgcgttatccattctgaattaagctgttttcgtagaactatcattttacaacatatttcattcagatatttaatgtcatgaacacaatattattaaatgtgagctgtacaattgcattagtcaatatcctcaacataatattctattatagactaggaccaatgaataacata

SEQ ID NO: 58791 - DNA, 342 bp, Glycine max
  unsure (1)..(342): unsure at all n locations
gcttgatcaaaacacttatctaatcattcctatccactcagagcatattatngctttattaaatcattcgcaaacactcatttcatgcaaaacaatccactacatatcattttcaatcaattcattgttcaaacacgctcttggtacaaacaaacaactcaaagtgctgaaatttatataattgatatttaaaaaaattgaaatataaaatctgaaattaaaatgactgaacataaatcataaaataatngaaaataaactataatgttcgagatgcacaaatntaaatgtcctgctcctgtggttgctcctatgcatgctcattaaggtccaacacctgag

SEQ ID NO: 58792 - DNA, 465 bp, Glycine max
  unsure (1)..(465): unsure at all n locations
ctaagctcataagtgcgggtctgggagacgaaggtcaagtgttcgcgatatgtgaagatgatgttccatgtactttggatttggtccgaccatgccctcctgatttccagctaggaaattggcgagtggaggaacgccccggcatttacgcaacaagcataatgtaaacctttacggttttaaaagctctatagttgggcctaggctttagagatttcatattgctaagcgctttgtgtctttagcttttgaatatataatacaaggatctttcttcatctgttcctggtctctacccattctcattcattngcatgtttacttctttntctaaaaaatggcagattcgatgacaagtcccccgaaggtactaatacctgngacccgtctatcaacttcgagcaagaaatgaatcanacggaagatgaaggagatgangatgtgggactttcttcggaactagaa

SEQ ID NO: 58793 - DNA, 506 bp, Glycine max
  unsure (1)..(506): unsure at all n locations
nttgaaacccntttgagaccctgaganccttagagagcnccgaggcctacnagcacctgaggctgcaagcgtaacaccattagctcttagcgcacttttaataattcacaacccataagagaatggagctttgcaccctcttggcccgctgatgccagactataaaactcaaggtaccgaatggatctgaggcttatcgcatgataacgcgcttaacggtgctacaataaaatttttcccgagaagaagtggcgcttagagcatcattcatgctaagcccactaggtaaaggtcaattaccgtaaagatgcacggcttaacatagtgatgtgcgcttagctgaactattcatccaaccaatcaggggtctctgtgttatcacgagaaagctcggttttcgcggaagactggcgctaccgcagggctgcgcttacgataacaatggaaaaattatgagctttttgctattctcaccagcttaaaccgtgtcgtacaacagctgagag

SEQ ID NO: 58794 - DNA, 351 bp, Glycine max
  unsure (1)..(351): unsure at all n locations
agcttctatctttcttatctaaaagtattatttctacctctagagngttngaacttttacatttaaatatntttggtccttctagaaccatatgcattagagggaatcactatgctttgattattgtagatgattgctctagatatatctagactttattctatcttctttgagtaatgcttttaaagtctttcaaaaacttgccaagcttattcaaaatgaaaaggaattcaaaattaaaagtttgagaagtgaccacggaagagaatttcaaaatgactctgaattgttttgtgaacaaaatggcattaatcgtaacttttccgctccaagaacaccacaacataatgg

SEQ ID NO: 58795 - DNA, 427 bp, Glycine max
  unsure (1)..(427): unsure at all n locations
aattgcacttagcgcacaggtctcgctaagaaagttgtccgcagatgttatatgaaaaatctcactagtcaaaaatgtacgcatgaatcaagacagttgcacttcatgcttgaaggtgatccaacggttcacgagtctgggatcatggctttactggaataggttaaacagactccacataaccttattgttcacaccaagcaaccgcacacagataagtcacacaacacctcaactaagtcaacttaatcaaagaatgcaagaattatattaaacatctattctcagttatgaatattctanggctgtacaaaagagcttttcttgggtatcaacaccanagtattcaagagtcttggagatcagatctgcatatggacacctcgnaaaaacaatcctctggtcatcnatatgatatcnnacatat

SEQ ID NO: 58796 - DNA, 318 bp, Glycine max
  unsure (1)..(318): unsure at all n locations
agctntatcctgcttttcttcanaactgctttaacaaagcaaccaanagctttaatggctctcggtcgtggcaactggcaaaggccttaaataaaaattaaaaataaagttgctttgttaggcttaagctcctaagccatcatgaattntttttagtatatattatgaaattaaataactttttaatagtccgnttaaaagttccattaagcacacttctagattagggcactcctattagcaactacgactataagtctaacacaacaactctgagaattgcatgatgaaaacagagaagactttntttgttaacta

SEQ ID NO: 58797 - DNA, 301 bp, Glycine max
  unsure (1)..(301): unsure at all n locations
cctgctccananagaatctntaaaataagtcatccagctttattgtttattactntcctanngccccttatnnttttcttttgggttaaattataaacgagattcagagccttgcgtgtttatatcatcaaggtgtgtgactaataaaatatcgaattgtttaggatggtccaaattttgntgtctctggaaatgctttaaaattccttattgcattgtangtgaaatcgtataaattgtatactatctgctcaaggtgcagagcaagcagtggaaaaagcagcgatgctcctgaaattgc

SEQ ID NO: 58798 - DNA, 168 bp, Glycine max
agctggcgcattatataaaacacattaatttatggaaaaagaaatgtgagtgtggtagaagaaacacaatatctaggcaaaacatgggttgtaatttagaacataataagtttgactaacaattaatttattcataaatatgtggtgcagaaatttaaaataacactc

SEQ ID NO: 58799 - DNA, 497 bp, Glycine max
  unsure (1)..(497): unsure at all n locations
ctgatagatagaatctcatgtatttgggtgtgggctaatgtattctttgtacctaatattaaaaaaaatgccaatcaaaagaaaaacatgttaggattcttattgtcattctcacatgtaaaaacttattaagtttctatattctccatgggcaagcattattggtttggttgtatcacaatgacaccatcactaacaatcattaacaccttaccctatctttaatttatatttatatatgaaatgcattcttaatttgatcctcgtatctataacgaaatcaaatcaagaatgaataagaaggttaatggttattattcaatatagtacccttagagacaagtatcacaatgacatataccanattatcattaataagaactaaactatagcatttgtcataggactannattaataattttntatatgtatggatcanatcatanatcaagagtcttcattatgcagcataaagattaaattaatatgttcacct

SEQ ID NO: 58800 - DNA, 270 bp, Glycine max
agtcttgcatttgttattgaagaaataaattatttatgtcttgataaaataatgaaaacaaattcagcacaatcatgtttggctgcaaaaagtaaacacaaaaagaagtttaatccacatgtgttgaagcaaacgaactacataagagttataaaagatattcgcatattcaagtgtcgtttgtgatatttctacacacagatatagaggaacaattacagatatttgttatgctccatgcttcaatattggattagatacataatagta

SEQ ID NO: 58801 - DNA, 290 bp, Glycine max
  unsure (1)..(290): unsure at all n locations
agcttgttactcttccataaatctttnttgttgatataatatattcaacataaacttttcttttaaacggctgcattgatataattgaatatatcaaaagttattgaacgaaacaattctattaaaagatactcttaaaaaaacttaatttcaatcaaatgtaactccacactttaagttttaagcaaaggatatctcanacaccagtgacataaacaaaacatcaaaagtaacagaaggaatataaactgcaaaagcataatataaattcacttaagaaaaaaaattag

SEQ ID NO: 58802 - DNA, 296 bp, Glycine max
  unsure (1)..(296): unsure at all n locations
ctccggagtacgacagtcaccgctntaggagcgctatacaccagcagcgcttcgaggccatcaagggatggtcgtttctccgggagcaacgcgtccagctcaaggacgacgagtatactgatttccaggaggaaatanggcgccggcagtgggcatcactggttactcccatggccaagttcgatccggaaatagtccttgagttntatgccaatgcttggccaacagaggagggcgtgcgtgacatgagatcctgggtaaggggtcagtggatcccatntgatgccgacgctatc

SEQ ID NO: 58803 - DNA, 389 bp, Glycine max
  unsure (1)..(389): unsure at all n locations
agctngttttggaaacttacccgttgaagaatcgaaaacggatgaagaacggtgaataacggaggataaccttcacgaatttgcttatggaaacatctcagaagcgttacggaagcacctcagcttggattttcttcacggaaacaatttttttcacccaaaacagctgaaatacctcaccaggggcatctgggatccttagaacagcccccttcagcctaattataggaaaaagggggaggaggttgccgcccagctccagaagcaatccagcttcaaaaaaacattctggaagacccacttcaaaattcaaaatgctattcgacccccactttgataagtcaccccctctatctatttacgaaaggtacaaagcttacggagctata

SEQ ID NO: 58804 - DNA, 289 bp, Glycine max
gttgttggggcagcaagacacaccacaaccttctcatgtcaattcggtcaagccagtgggtccagtaacaagcatcagttgcttagctgttactttaagatgcactgattgttctacctcatgcctccttaagatatcatcattctgcgctaactgtagagtgaagccatcttaataattttgcttaaagagcggtttatgctcacctgcagactatatactcttcatatacgatctataaatttgaaacgtgtctgaattgtggagcatggcatgtttaatttcaatt

SEQ ID NO: 58805 - DNA, 321 bp, Glycine max
  unsure (1)..(321): unsure at all n locations
ttgaaatataacaacaatgaatanaagaaatgaaataacatttggagaataaaataaaccctaagcctcttcatataccgaagcatcatggggagcatttgaatatgcaagagcaatgttgccataatagatatcctagttgtgaagagagtgaggatgaaagagaagagaacaaatgagaaagtgaagactagagtatagaaaaaaaaaaggagagagcaagtacaagaagagaaggagagagaccaaggataagagagaagagaacaaggattataacgagagagatagagaagaacactatcatggaagatgatgaca

SEQ ID NO: 58806 - DNA, 315 bp, Glycine max
  unsure (1)..(315): unsure at all n locations
tctaacttagaaactgtgtcttcacacaaaccatgatgatgcatgatgtctgatgcaatgcanatatcagatgtactaagatgtcacaaccaagttaacaaccaatacaaatgccactcaagggagttgggcatgtaaaagccaaaacgttcttaaaaacgttgtcaaactattccttgagcttcaagctntagcctttagggtggtcaccatgtagctacccttatctctaacaataagttgtcataattaaaaccaaggatgtggattcaatatgtttaacccacaaacttagagaactatagtagtagtctc

SEQ ID NO: 58807 - DNA, 378 bp, Glycine max
  unsure (1)..(378): unsure at all n locations
gctacatagttctcattgtgaaattctccttatagaanagagagatatgnttagcatctaacacataaattcaatcagtcccacaatcttcatgctcggcattgccctttagtccttcatccacccaagaaatatcttagttgttcctctggaatatccagtacctgcaccaccaagattttgaaatcttttatatactcattagctgatctccattgctgctaaggtgttggcctttcaaacatgctgcctaaatatcctcttccaaatcaaagcaccactgatccttccttgcttataaatgcaatgtacacctacacttttggcttcatctgttacacctcanaaaatttctctgcagtagcaatccaaatcatc

SEQ ID NO: 58808 - DNA, 533 bp, Glycine max
  unsure (1)..(533): unsure at all n locations
taagctctaagactttaatctatatttgctaccttacgaanatatgtattatatatttcttatgtacgtattnntttagattgaanaatatttctaacaaacacagaatattaaataatagtgaaattatatgtcataagaagaacatataataagatcatatctttattttaaagatggaatctgagaggtttttttttttaacgaaattaanactcanacttataatataactattaatataaaactagtgttaacaggagcaaccgaaattccaaattagagtaaatacacacaaacacaagattaacgaggttgagcaagtatgtttacacatccttgtgaggaagagcgatagtngcggttggttctactatccgtataacannatagggtacatcaataaaatacaatacaaatttactatatcagtcatgtattgggatgtgtcctcacccctaacccatgtcgtataactctaacattttgtctgctatagaatatgagtcataagtaaatattatgatgactta

SEQ ID NO: 58809 - DNA, 402 bp, Glycine max
  unsure (1)..(402): unsure at all n locations
agcttgttccctccttgttctaagggctnggttactgtgaaaacagtcttattctgtggcacaagaaccagcttgatcttccaccacagaataactccaaagctgcctccaccacctcctcttatagcccaaaatagatcctctctcatggcttttctatcaagaaccctccctttagcatcaacaattctagcatctataacattgtcagcaccaaggccatactttctcatcatggaaccatatgcacctcctgtgatgtgccctccaatccccaaggttgtgcaaaggcctgcaaggaagccatgaactgcactcttctctgaaatcctgtagtaaactccaccaatagtggcaccggcttggatccaagccgtgtttcgcgcaatatcaacattcact

SEQ ID NO: 58810 - DNA, 322 bp, Glycine max
  unsure (1)..(322): unsure at all n locations
tgcttaagcgccanaagaaagaatgcggtanaatataatctcatttggtcaggagggcattcaacattttggttgtgcgcttaagcgccactctaggtgctcttaagcatcagtctgcatgtgatgacttttttttttggtacatgttgaaccttatttaatggatttttgtgcaattgctatgggagctttcgattatcaccattcccaaaatatttgttctctatgatagctttgatagcgacctatanagctctgtcatggcttcttcttctcaattcttcattcctatatggatatattacagcttaatggctaagag

SEQ ID NO: 58811 - DNA, 243 bp, Glycine max
gcttctagccaaatggacttaccttgaatattttcctttgatagcccttttgagccttgttccctttctttttgaactcactacaagcctaaggaaaacatgaataccaatcctaagaatttgagcttggattgttggaaaatggggggttttgtcatgacaactgttgtggtagctcatgagatttgggctacttgagacattgatattggttaaatggtggacatgctgaatgaaatgttg

SEQ ID NO: 58812 - DNA, 358 bp, Glycine max
tatcgattacccaaacattgtaatcgattacagctttttgaaaataattggaacgttgtaaattccagttgaaaactttttcaaactcatttttgatgcaagctccattggagcttgtaggcctaggatcttcttcatcaatggattcctttgcttcttggaagataaatgggcgcgtaatggagaaggaagagagagaggagacgccacttcacggagaagatgagtctagaagaagctcaccaccatacgaggccatggataacagcttggaggaagaaggagatgaatgaacggagagggagagaagagcacgacaatttgtgctcaaaaggagctctgatatctgaagtaatat

SEQ ID NO: 58813 - DNA, 456 bp, Glycine max
  unsure (1)..(456): unsure at all n locations
gagcgttggangttttctgtgccaatacgcttcttctttttccagncttcttctggcttcaattcatcagtgggctttccttctgtgtccagcatcttgggatgctcccagcctttgatgacagctttccaggttctgctatccagtgatttgaggaaggccaccattcttgctttccagtattcataggtgcttacatcaagaataggtggtctgctcactggtcctccttctttctccatgttcatcacaatttatctgcccagatctcactctgtgattacgagtgtttgctctgataccaattgaaattctgataccagaggacagatagccgacccgacgtcacgacatcacgcttcagaacatgcagttgatgtgcgtccgtatgaacagattanacaagtaatatcacaagagaattgttacccaggtcggagcaccttacctacatgt

SEQ ID NO: 58814 - DNA, 443 bp, Glycine max
  unsure (1)..(443): unsure at all n locations
catgttttcaaagcccgtactaaggcatacaactccttatcataagttgaatagttaagggtaggaccacttaacttttcactaaaataagcaattggatggccttcttgcatcaacacatccccaatccgaacatttgaagcatcacanctcaattcaaaagaattttgaaagtttggcaacgcaagtatggnggcattagttagcttttgcttaagaacattgaaagcttcttcttgtttctctccccattngaaaccaacattgttcttgagcacttcattgagaggtgctgccaatgtgataaaatccttcacacaatgtctataaaaacttgctaagccatgaaaactcctcacctcngtcacggacttangtgtangccattcttgaatagccctaaccttctnctcatcaactagcacttctttttgaactcacac

SEQ ID NO: 58815 - DNA, 332 bp, Glycine max
tcgcggtgtaactgtcggcattgtgatccttcaacgttagcaagatgtttttcggtttcaccatcgactttgtcatatcagcaataatattcttttctttcttagtcaatcgtccggcgtatggatgtccaactaaggacttcgccaattcatgattatgaatcccacagatcaacttcaccatccaaccttcccctccacgcactggttttccacgaagcctgaagggacaaccacatcttctactcccggtgtcttttctaacgaattttttatttctacacttgctcgtaccactcctttcacacccaattaacacaaatgaacttctt

SEQ ID NO: 58816 - DNA, 393 bp, Glycine max
  unsure (1)..(393): unsure at all n locations
gagcttgacaaactttgtatctataaagagggttttatatttgtattgtcnngcccctttagttatcgaacctcgcacagtgtgtttatcaatgttttaaagagtggagcatggcactattatagatcttactgcataggatctacactctagcactattatgtagttccttagctttgccaaaagagaatggtgtattaatgtttcattctatgcactccatatcaaagagaacattgagaacacacnctacaatgtggcagaggtgaacttaaaatgccatttacaacaaaacaaactntgaattttcactccttcgcttatttgatctcacggtcttttcgtcgatgtattaaagaagactatttactgtctcattatcagcataaaaaa

SEQ ID NO: 58817 - DNA, 385 bp, Glycine max
  unsure (1)..(385): unsure at all n locations
gctctgataccacttgtttgacttgtggnctcanatatcttaagaaggagggggtgaattaagatattccaaactacttccccaagtaaaaatctatttcactttctattcaaggtataaattcccttaacaatgaacttcttaaatattaattcatataaaaaaatgttgaatatgaatataaagcaataataaacaaagggagtttatggaaagagaagggcaaactcagattatactggttcagcaccccttgtgctacgtcagtcccaagcaacccgctgagagatccctatcttgaaattgctttacaagttaaacacacaagacaatccttctttggctaaattcttacacaaagacatggtcttaatccttaaaataa

SEQ ID NO: 58818 - DNA, 315 bp, Glycine max
  unsure (1)..(315): unsure at all n locations
agcttcatggngattattagtgattcactttgttntgatgataacaaagatgataacaaaagatgatgacaaaggtgatgacaaaaagctcaaaggtcattcacagaatgagttcgagatgttcaagatagaatcaagaacacttcacgattcaagagatcatgattcaagactcaagattcaagaatcaagacaaggctattcaagaatcaagaanaagcataatcaagataagtatgaaaagtttttttcaaaaactgagttgcacatgaactttttctcacaacatagttaccaaagagttctttactctct

SEQ ID NO: 58819 - DNA, 350 bp, Glycine max
  unsure (1)..(350): unsure at all n locations
ctacatccttatctatccacacccctctattaactaaatcaacttccttaaaaataatgacagatgagaataacgcaccgaataatcaaacatcaaacataattactaacaatatatagatatatatatcacggtgttacgacgaactaacagagttgatgtcaaatcctcattcaagagaatgggatgatgcacacctccctaagaagggactcagcactacaaccatgagcaagatgctccaagaagactgtgctatagcagctgaagaatgccctatggttctcatgaacataatgatagagntctgagaccaagggccaaggatgtgtccaattatcttcgtacat

SEQ ID NO: 58820 - DNA, 414 bp, Glycine max
  unsure (1)..(414): unsure at all n locations
agcttatgcagcanatatatactatagaccttctcaacctcagcagcaaaatcaaccacagcagagcaattatgacctttccagcaacagatacaaccctggatggaggaatcaccctaacctcagatggtccagccctcagcaacaacaacagcagcctgctccttccttccaaaatgctgctggcccaagcaaaccatacattcctccaccaatccaacaacagcaacaaccccagaaacagccaatagttgaggcccctccacaaccttccctcgaagaacttgtgaggcaaatgactatgcagaacatgcagtttcagcaagagaccagagcctncattcagagcttaaccaatcagatgggacaattggctacccaattgaatcaacaacagtcccagaattctgacaa

SEQ ID NO: 58821 - DNA, 392 bp, Glycine max
agcttatgagatgctggaagagtctaagaattttctgagataaaatcttctaccttagcttccaacaagctacgtaattgatatggaatattacaaagattcacaacaaaatcactattagaaaataatgttttaacatcagttattaaggactctcaacatcagttattgacattgaaagtaatactgttaacatcggttttccaaaaccgatgttatcataaaatgacaacatcggttttttaaataaccaatgttagatattaagaattatataaaaaaaagtcatatatcttcatatcaacatcggtgtttaccagaaccgatgttaacttattcatacaacaatcggttttaaatcaaaccgatgtaatatatacatacaacattga

SEQ ID NO: 58822 - DNA, 379 bp, Glycine max
  unsure (1)..(379): unsure at all n locations
cagcattatcagaaaacacattaatataaggataaaganatgttagtgtggtagaagaaacaaaatatctaggcaaaacatgggttgtaatttagagcataataaagtttgactaaaaaataaattaatcataaatatgtggtgcagaaatttaaaataacactcagtaccattcagattttgatgtatagaaggaaacaaaatagtcggaaatatgtttaggaatcctttcttctttttcatcacatttcaatttctttatgaacataatatttaacanactgcttctggatntgataaatactngaaaagtangtttgacacgttgcagacagaatcacggaaagtagagacaaaaaaagatttaagtcattttatg

SEQ ID NO: 58823 - DNA, 315 bp, Glycine max
  unsure (1)..(315): unsure at all n locations
caaaagaaaaacatgttaggattcttattgtcattctcacatgtaaaaacttattaaatttctatattctccatgggcaagcattattgttatggttgtatcacaatgacaccatcactaacaatcattaacaccgtacctaactttaanttgatatttatatatggtaggcactcttaatgagatcctcgnatctataacgaaatcaaatcaagaatgaataagaagggtaatggctattattcaatatagtacccttagagaccagtatcacaatgacatataccatattatcattaataagaactaaactat

SEQ ID NO: 58824 - DNA, 353 bp, Glycine max
  unsure (1)..(353): unsure at all n locations
ctacctcatgctctcctctaatgactatggcatcatttctggcactaaactgctgngagttggaggccatcttctcaattaaatttctggcttcagcaggagtcatgtctccaagggctccaccactggcagcatctatcatacttctctccatattactgagtccttcataaaagtattggagaagaagctgttctgaaatctgatggtgggggcaactggcacatagtttcttaaatctctcccagtactcatacaagctctctccactgagttgtctaatacctgagatatccttcctaatggctgtggtcctggaagcagggaaaaatttttctaagaatactctctta

SEQ ID NO: 58825 - DNA, 455 bp, Glycine max
  unsure (1)..(455): unsure at all n locations
tactcaagcttgatggagaaggtgtggacacccctatgtggtaggacccttataatgcctcaccttangaccagaagtggtacagcaaaccactgagaaagttaagttaattcaggaaaggatgagaactgctaagagtaggcagaaaagttatcatgataagaggaggaaagatctggaattcgaggttggtgatcatgtattcttgagagtcactccgtggactgggcgtggtcgagcattanaatcccaanactcacacctcgctttattggtcctttccaaattcttaagaaaagtggccctgtggcataccannatgcactacccctgtctctttctaatcttcacaatgtctttcatgtgtctcaactccgtaagtatattcgtgatccatcccatgtaattgaatnggatgatgtacaagtgaaggagaatttgcatatgaaacattg

SEQ ID NO: 58826 - DNA, 147 bp, Glycine max
agggaagctctcgagttactcaaatgatcatatcttattttcagagggtcgattcacgcgcttaatatttcgagacgctcgaaaatgaacaacgaatgctctcgaggaattcaaatgttcatatcttgtcacactgatgtcccattc

SEQ ID NO: 58827 - DNA, 486 bp, Glycine max
  unsure (1)..(486): unsure at all n locations
tctcgatatattatgcacatgaatcagacttccgttggaaatnatgatcatttgaatttctcgagagcattcgntgggtcaatttgagcgtctcgatatattatgcaccagaatcggacttccgtgtgacaagttatgaccattttgaattctcgagagcattcgttgttcaatctcgagtgtctggatatattatgcgcctgaatcagaccttcgcgtgacatgttatgagcattttgagtttttcgagagcttccggtgttcaatttagagcgtctcgatatgttacgcgcccgacttggactcttgtgtgacaagttattaccatttgaatttctcgcgagcattcgttgtacaatctccagcgcctggatatcatatgcgcctgaatcggacttccggggacaagtatgaccatttaattttcgaagcatctgtgtcaatttcagcgtctcgtatttatgcgcctgaatcgacatcctgtgt

SEQ ID NO: 58828 - DNA, 442 bp, Glycine max
  unsure (1)..(442): unsure at all n locations
gcttcctcggggccatttcctgcgaaggcaatcatttggagagttagttttaccaaganatgctattcttanaacgaaaatggcatacgacctcccccaataacacanacatcaatgtaaatntagagcgaactcatgcgcatacnttctttcgaacattcactcgcaccagatattcttctaactaagaggaatgcacccaggcacaatcaaggcaccttcgttacctagatcacttatatgtacttccaaggtgtatttgctacctacatcacatgcacttcctttgctaaatttacatacatgcatactcaaagcatnttggctaccaaaaattgcatacgtgcacattctgggtattctaatacctatacatatacaaactttgtgatgaatcttggctacctacacaataaggtgctacatttcatggcttattcaa

SEQ ID NO: 58829 - DNA, 388 bp, Glycine max
  unsure (1)..(388): unsure at all n locations
ctgtacttggatcatggagtgtgtttcttccacttcctttagtgtggcagtcaatggatccatttatggtcacttcaaaggacagcggngtcttagacaagaggatcctctctccccttatctgtttgtgctctgtttggagtacttttccagagatatgagcagcctcaaggatgatgccaatttaaatttcatccactatgcggtattcactatctattggctttgcagatgatatatgctctatcagatgagatatcattctggtactatgttgcaagcttacactttgtaggttcaggcttcatcacttgataattgcctatctagcggttaagctatgacttctattcactactgattagttggtgatcctttaatactaggt

SEQ ID NO: 58830 - DNA, 353 bp, Glycine max
  unsure (1)..(353): unsure at all n locations
gcttgttccacctaaatagcataggttcttttttggtaatcagcctaggctgngtttgctaannngnnaanctctcccacacccaagtttggaccaagtagtaaaagggtggccaaagagttaactacaattccaattcttcattaccagtcaaataaactatggttttcttcgataaaccaaaatcatttcatatgttggataacactggtggccacaaagctgattctctctagcaagatgaacaacaataaggataacaaactttctcaccaagccactaggagagaagccaatcattgcctagcaagttgcacgggatgtttcatgctcaatctcactcccactattga

SEQ ID NO: 58831 - DNA, 512 bp, Glycine max
atggtaacaagaagtacctccacattatttaatgttattaatgaatatagtgaccaaaacttagataacacaactgagataggatcagtgtcagaaaagaatataaatccattaaactccaaacactggaaaaccccctccaaattatattatcaacgtccaactgcccctgaccttctattagaagaaagaggtgaaaacaattttaaaaattttagtgcaaataacatctatgaatggaacatagatgcacaaacggagtataacatcatgaatacactccaacatatgaccatggtagccacggcttaccaaacctcccatgaatgttcggaagagaccattatagatatcttagtggcaggattttccggacaactaagaggatggtgggataattatctcactaatgaagagaaactcaaaattacagcgcagttaagacggatctcaatggaaaagtcattactaatgacgatgaataagagattctgacgctgtgaacacgttaa

SEQ ID NO: 58832 - DNA, 423 bp, Glycine max
  unsure (1)..(423): unsure at all n locations
gtcacctgcggcatgcaagcttatngaagtttttgctgatttaagcattggcataactgccaccggtaggagataatattttgttggaacctgtgtatctatccaacatattttacttctgcaaatattcttctttctcagatgcatcattctttattacacatttactgaggacaacttaacacctattgtactctgngaggggattaaattgtgttgggggaggatgtttatttgtccttggaaacaggcggagatgaagagctttcttcgttggaacttatactctctttgcaatttaatttgcggtggngtgatattgaattatgctttaggttcaatgccatctttattttcaaaaattagatgctctgggaacaaaccaaataatcattatttaatcccatatatcgaaagatatat

SEQ ID NO: 58833 - DNA, 339 bp, Glycine max
  unsure (1)..(339): unsure at all n locations
tgctgtaatattaacacgggtacgctctgatgtaagatgatgtgccctagttagaggttcgtcatggctacgagtatgagtaccgctgagctataatatttttttatctatcgatctctttctgggcccaggagtggttgtagatgtacactttaatgtccattatgtgtgcagacttctatatcaaatgcctagcacganacgaactatntatattatcggcgcaacggccgaatagtatactatgacaaacattaataattcttaactgtgcgtattacttaataacgttgatctaagaaacagattaatcttgtaacaaacttaaatggtgatctg

SEQ ID NO: 58834 - DNA, 469 bp, Glycine max
  unsure (1)..(469): unsure at all n locations
agcttcctcgtggtttctttgagaagctagatctcttatctattcacacccctctattaactaaattaacctccttaaaaataattacggatgaaaataacgcagcaaataatcaaacatcaaacataattactaataatatatatatatatatatatcagggtgttacaccacctattntagggacttggtgcctaataatacctattntgggcaccaacaaagcacaaggatttaagctcttgcgaaacaaaccctcatccaacaacttctttacttgaggaataaaatcaagcccaagaggcgtgacaatgctagcaagtgtctttntacaaaagagaaaatgtggaggttgtctaagagggaaagtttctttaatgtttgtatttattgtaaaatgagtttccttcttagctaacctcttggaggagacacttacctncttacacttctctttaaccactaatgg

SEQ ID NO: 58835 - DNA, 350 bp, Glycine max
tgaattacaaagtctcggagttggaaacttacccgttgaagaatggagaacggacgaagaacggttgagaacggaggaataccttcacgggtttgcttacggaaacctctcggaagctgtacggaagcacctcagattggattttcttcacagaaacaattttgtcttacccaaaccagctgaaatgcattgctgtggaatcatgcacccttagaacaacacccttttgcctgtttatacgaaaaaggaggaggagggtgtcgtccagctcgcttaagcgagctggatgtgttcaccttagcagtatattgctatacacctcagaatgcgttgatgatgtcactattgga

SEQ ID NO: 58836 - DNA, 334 bp, Glycine max
  unsure (1)..(334): unsure at all n locations
agctgtgagccatatatctgactcaccatattccttgacccagggtgagaatgtcaatccttaccctcggaagcgaaaagganagaatgaagattttcaatcatagagaaagccaaataaaagaaagagcagaatgaaaattccccaatcaaagagtgggagacagcaaaaagaaaagaaagaaaattcccaatcaaagaatgggagaaagtaaaaaaggaagaagaagaatgatagatagctcctgatcatggattgaaggaaaacaaaagatatgtgcagagaggtctctggaccggacaatatctgaacaatacagatatgtcaccaaatg

SEQ ID NO: 58837 - DNA, 433 bp, Glycine max
tagtggatatgtgtctaacattgtgtgccaacttccttttctgaatatcttcacattctctaacaactacttcaatggggaagctcaaacttgtgtgccttcatctaattcattggtggctttggatgactcacaaaatcgtttatcaggaaggaagaatcaaaagtcatctaagcaatgcttgtcggtgctaactcgccctgtggattgtagcaaacattgtggtggaggcaaatggtattgacaatggtaatatcaatagccatgtcgcctcaacaccaaagccaacaccatcaccttcacctatccagagccacccaagtctgaccctcctaggcctgagatatcaaagggtcaaccacccctaactccagaggtctagccacccctcacactcaaggctcaaccacccccacaacacaggttgacactc

SEQ ID NO: 58838 - DNA, 448 bp, Glycine max
  unsure (1)..(448): unsure at all n locations
agcttgtaactcttgttaatttctttanaactattcacttataaaagntatgactntagaaagaatcttcagaaacaagtcacttgaagaattgtgacttttggaaatatatntattcgaaatcagtcactggtaatccattaccattaaggtgtaatcgattacacatcaacatatgtgactcttcattntgaattntgaaaatcttaacgttttaaaacactggtaatcgattactaccttctggtaatcgattaccagagagtaaaactctttggaatgattttgtgaacacttcttgtgctactcaatgttttcaaaaactttttaatacttatcttgattgagtcttcctcttgattcttgaatcttgagtcttgaatcttgatcttgattattcttgaatctcgattcttgaaactngattcttgagtcttgaatcttgaaa

SEQ ID NO: 58839 - DNA, 392 bp, Glycine max
  unsure (1)..(392): unsure at all n locations
atccgatccgatctaaacatttatttaatctaatatatgatagctcgaagtaggtacctgtcaaaataataaacataatagtagtaggtagggtcaaatctgttgaccacaaaattcaaaatgaaaaaaatgttacctcataattgtcttttcttatgtgataaaatcctataattgttataacatgacgagcttcttatattatttngcaatgatgtttcaattttcttttattatattatactcattttttgtgtgagatgaaatccatcaagttatgattccgtcatatattatctattaattaattactcttaatggtttaattcaaaacgatatatatatatatatatatatatatctcgcgtatagtcgaaaacaaggatagtata

SEQ ID NO: 58840 - DNA, 368 bp, Glycine max
  unsure (1)..(368): unsure at all n locations
agcttgtagaannatggagtacccatcacatgtggtactaggnggcggncgggcgatggngcacaacaagctttccacatccacaatgcgcgcataaacccaccatcctctgttgcccacctccaactgagctcacgtactcccacgtagcccatctcctcgtttctctcaacaccgcgtccccatcaatcctctcaagctccacaacatccaagcaaaacaacgttcaaacagcacaagctatcacagccaagcaaaacagagcaaaggcagaaaactctgctcaacacatcaaccaaaatcacagcttttctcacgtaaagaccacagtaacaattccttcgatccaattcgttaaccggtggatc

SEQ ID NO: 58841 - DNA, 380 bp, Glycine max
  unsure (1)..(380): unsure at all n locations
agctntgaacgtgtgtagcccattttntccnattagaatactggtaatgtgtctactatcattgtcatcgtttttttcatcattgaggtgccacttgagctgccaggttctccaccttcgggtgtattctttgaaagatccgtgcccccttttttgcacatattttgtagttgcatcctatccgaagccattataccgacactgcctaacgaaggcaaccattagtgtaccaggtaacaactaccccagtaagactttcttggaaggaatgtatcaacaattcctcatcttttgcgtatgcccncatcttccgacaatacatctttagatggttcttggggcaagtaatccccttgtacttgttcaaagtcaacaccttg

SEQ ID NO: 58842 - DNA, 431 bp, Glycine max
  unsure (1)..(431): unsure at all n locations
gctataagaacaaaagtgcctagatcatttccaaatatgcatgtgaattatgaagcatcaacaagaatcaagccaaggctattgtgcaagcaatcaatggggcaaaacacaccaaaatattatgatgatggatgactcaaattctcacaaacgtaaacttatcactttcaaatngagctcttcaaactatcatgacatgtagaggaaaaacaaggatttcaaaatacaaaatgtcaagagactttattttagaacaattacccattacttgaacatatcctataattcaaagaaaaacatgagaatttaacacaacaaaactaacaaaaattaacctagaacccaacaaaactaacaaaattaacctaatttaacacatctaacaaaaccaaaaccaaagaacacacttccccctatactaaaacaacaca

SEQ ID NO: 58843 - DNA, 359 bp, Glycine max
  unsure (1)..(359): unsure at all n locations
aagctatatgatatatgtggnnntttggattattctgattccatcattgttagctattaaaatcttggtattagaattatgtgtttgcaggtattgccttgctaaaacaaatcgggttaaaatttgggattttcttctagatggaaccttaatatgcatgactatgaactgttcttaacagctaccctcagacgagggagtgttgagccttaattctcttgaacagagtatgacttgattcattcaaaacattattctattctatgtttcgacgttcatatccgtggatgaattctgaactcttctgatacgatgacattactatgctgtcatgagacctgtgattctttagatgacgc

SEQ ID NO: 58844 - DNA, 597 bp, Glycine max
  unsure (1)..(597): unsure at all n locations
acacaacgtncctcgcgaaatnattatatgttnttcgtanatcactcnccctcaggaggacacgcggagttgacccccatggaanactgagaccttagnancgcccngccgcangcaaacnnataatggaagattcaactacgtctcctagtgagaagcatcaatttatttgacagagcccatccgtagaagaggtcagcgctctcttctaaggatcacaaacatatcgcgtcatgcaacagtccaaacaaaccacactagaatgagagagactcagaggcaacacacggtgagggatgcatagttgagtggcactcgaaaaataactggcactcggatacaaacacgatgcatctaaaatgcggcgctcatcactcaaaagcgacatagctaagggcgcacggttcggagcaactatgggaagaatgacctctggggaaattaactgaatcacatgcaagtgagaacaaagcatcgcacacagagaaggatcgtgttgtgtgctgaaggcacccgacgatctcgcaagaaaccatacatatcggtcacgcaccaaacacagatacctactaaggttgctgaccaacaaagatgacg

SEQ ID NO: 58845 - DNA, 525 bp, Glycine max
  unsure (1)..(525): unsure at all n locations
gcttgngttcgatggcccccaatgacatctatccccacatggaaaatattcattgttctgacatgacattcagaggatgtggcggaacattgacattgtccacgtaagcttgacatttatgacatttccttacatgggcgcagcaattgctntccatagtgagccagtaataaccggctctaaggatcttcctggccatagcatgcccattggcatatgtcccacatgaacccaccgtggattttcctcaatcatgtagttcgcctctatggcatctacgcatcgtagaagggtcatgttgtggtttcgtttgtacaggatggtaccactcacaaagaaaccaggtgtcaatcttcttaacgttctttttcattgtcggaaatccctggtggatattctntgttctcaacatattgtttgatgtcaaaataccacggattcccatctcgttcttctttatcgacaacatgtgccgctngcccgagactaaataatgatggagatcccatgtgggaagtgaacatg

SEQ ID NO: 58846 - DNA, 394 bp, Glycine max
  unsure (1)..(394): unsure at all n locations
agcttgtagcanatgcaaacggcaataacgttttactcggatgttcgattgagtcacgtaatacatcgaaacgctcgaaattgaaaacagaagctctgtgcaaattcaaacgacaatacattttaactcggatgtccgattgagtcccgtaatatatcaagacactcgaaattgagaataaaagctctgaacaaattcaaacgacaataactttttactcggatgtccgattgagtccagtaatatatctagacactcgaaattgagaatagaagagctgagcaaattcaaacgacaataactttntactcggatgtccgatggagtcccgagcgtctcgatatattatgcgcctaaactggacatccgagataatagttatgactattttaat

SEQ ID NO: 58847 - DNA, 287 bp, Glycine max
actaagcttactcgatgtcattcaggcgctaatatcagacacttttattttatacagattctctcgagaaattcgaatggtcataacttttcacacggatgtccgattcgggcgcataatatgtcgagacgctcgaaattgaacaacggaagctctcgagaaattctaatggtcataacttttcactcggaggaccgattcacgcgcataatatatcgagacgcttcaaaattgataaacggaagctcctgaaaaattcaaatgggcataacttttaactcagaggt

SEQ ID NO: 58848 - DNA, 445 bp, Glycine max
ttagagcacctgcgggcatgcaagcttgttgagatacttccttaagaagctatttcttagctacacactattaactaagctcatctccttgagaagcttcctagagaagctagagcttagctacacacatccctctaatagctaagctcacctccatgagatgagaagctagagcttagatacacccccctataatagataaactatcccccatgtcaaaatacataaaaatacaaaaaagtccctactacaaagactactcaaaatgccctaaaatacaaggctaaaatcctatactactagaatggtcaaaatacaaggtccaaaagaagaataatcttattctaatatttacaaagaagagtggactcaaccttggcccatgggctcagaaatctaccctgagggtcattagaactctaggggtccttcttaacagctctag

SEQ ID NO: 58849 - DNA, 438 bp, Glycine max
  unsure (1)..(438): unsure at all n locations
gcttctaaggaaccttgtctataatagaagcatgtgtaacacttgttttaactttgatgaatgagagtcttgtgagacaaacttcaaagntcaacttctctntctcttttcttccttcaatttcgtgctccccccctctctctatctcgctctctttcttttcctccattgaagcatcctctccaagcttcttatccaaggcacattcttggtggggaagctccttcttccatggcctttttcctagtggatgtcggctcgcctcacctcttctcctttgtcttccgctacatctccatggtggaaaatcaccattgaaggacctcattgaagctcanagatccagccttcatagaagctccacaagcaagcttccataagcatagaacacaggaaccatcttaattagaaaaacatctttaattgcatctacttact

SEQ ID NO: 58850 - DNA, 274 bp, Glycine max
  unsure (1)..(274): unsure at all n locations
gctcagactgcatgcgtaccaccatttcttctcgtgagggttgtacaccccttatacgaagagagagaagaaccttctcaaatgttaaaacctactcaacttccctctcacactaacgtgccttaaatttcttcttgcctcaactttcttcttcacaaaccaactccattagttaaaagaacaaaactataccttctcaacccccanatgtttgagtgttttgtatagcgcatacactactactgatagagagagacaagaaacaatcgaagtg

SEQ ID NO: 58851 - DNA, 464 bp, Glycine max
  unsure (1)..(464): unsure at all n locations
gtcacttagctcagttgtgtttatctttgtgacttttcttctccgatatcattatattttatattggcgcatcatcagattgttgcagtcttctcagttctgtcgcgatcttagttgtgtctgataagatatttcagttaatacttatcattttttattagctgaattggcctataaacaaaccatttttgatagtttctatcatttattaaaatgctacctcgaatttagattttgttaagcacttatcatttaataagttaggttttcaatctctagttattagctttcaacttccaactaattgtttagatagtcttggcatacatagtctntatgtctatttcaacacgatgactctaataattccctttatcgtggtattcttatattggtgcactctattattgtcttgcgctatcaaatatgaatatggagaaggatgattatcttcaatcaattag

SEQ ID NO: 58852 - DNA, 404 bp, Glycine max
  unsure (1)..(404): unsure at all n locations
agcttgcactatcacacatgtgatcattagctacatttagtanaaagttcctaagatcttttgacaacatttaanaaatgttgccaaatatgaataaatgttactaatatgtttttgcaacattntatcgaatgttgtatataactcacgtcactaaaggttttggtgacatgaactatacacaacatttgataaaatgtttcaaaaatatattagtaacatttattcatatttggtgatattttttaaatgttgtcaaaagcttttagcaacattttcctaagtgttagggaaaaaaatgttaataaaggtcatatgtgtagtagtgttgaaagctcaaaagacgactcgaagtgtccttggttgtactgcaatgaataagtcaacatactcactgcatgaag

SEQ ID NO: 58853 - DNA, 477 bp, Glycine max
  unsure (1)..(477): unsure at all n locations
ctaagctttatttcanataatcatgaagctatntaagtagattatagtatttctgacttatgctttgcgcctaattcagtgactgtattggtggcctttcttttccatcctttgactnttgaacaattcatttgaatggttaaagaatatttatgaatgaatgtcattggattcaataattcaacacctatttgttctgtctattgtacgattaggctactcattgtgactttttcattttcaataaattntcagttaaaaaaaactgatatgacatgattaanataatttacattctatactaaaagatcnattataatggagatattatcattaatatggctcgttaattttttgaagccaatatatanataaaattttaaatttaatttccagaatacactgaataaatataatcatagagctgatattattggttaatataattctattaatatataatatattataagaatt

SEQ ID NO: 58854 - DNA, 617 bp, Glycine max
  unsure (1)..(617): unsure at all n locations
ttctctactcagtccattctccgntctccgactcatttatatactcntcctttgcnancccccagaatctnatagaagcggcatganacccaatgcggaacatgaaacccttgnancatcatgcgtacctctagagacgatatgacgcatgcagagctatgctcggataatgtactactgacattgacatgttcgaagaaacaccatctcccagctcaccatgcattacgcaccatgttcaactatatcttaaagtgaaacggcgtcacgatcccaacatggtcggctcgcggcgcctaacacacgaaaccaagaatgtaccgtgaagccacacgcttcccccctctatcgctctgcttgcacacgaaacccaaggataccaaacatgaaacaaccggcatgcgaccatgcagaacaaaaagcttgcggaacgcatatgcaagatgatgccatgactcatgcaagatgtgaggctggaataagacaaccgacacacgcgggatatgtccattatgaagttatgaagagatgctcatgcgcagcaagatatgacagcanttcacggacactgagagcccggaatataacttctttcactcgctcatctagacgcgccg

SEQ ID NO: 58855 - DNA, 510 bp, Glycine max
  unsure (1)..(510): unsure at all n locations
tctaaggaggtgagcttagttaggagagggtgtgtatatctaagttctagcttctcaaggaagatntctcanagaagcttctcaaggaagttntctaaagaaagcttctcaaggaagctacttagtctataaatagaagcatgtgtaacacttgttggaactttgatgaattaaagtcttatgagatacaattcttggtggtgaagctccttcttccttggcttattccctagtggatgggtgcctcccctctcctcttctnctttgccttccgctgcatctccatggtgtaaaatcaccattgaaggacctcattgaagctcanagatcctaggcctacaagctccaatggagcttacatcaagtatctcanatggtgaaaccatcaaagaagcgcaaaggttcttcgagtagaagccaacgacaccacgaggcttangatactncaattccttcctncattntctcatcctcattggtctcatncgaagaacaacgtacatggtacat

SEQ ID NO: 58856 - DNA, 560 bp, Glycine max
  unsure (1)..(560): unsure at all n locations
cccgccccaccccgcacaccangcttgtacgtacctcttnctccantantccacagacgaaaagcggagttgagacccttgagnactgaacatggaaaccncggacccgagaacgacagcagcacgcgagcggaagagcattgtttacccaaanncctttacaanagcaaacacctcaacgagccggagaaaaagaacgcagcctctacctgaagagaacaccaagagcaagcctaacgtccggcgcaaagaaaagcgcaccaaggcaccagtactacctcgaactgacgagacaacactgaagagccagaaggtgacgccactggagtgcgagacggagccggagtgcacaaggtgggcaccccatcgctattgaaaagaaaaacttagcgggacaccccgaccaccccactacgaaaaagagctaaggcctcagaagaccctccaacctgggacagtacctcattccagggaaccccagcctagagaccacaacactaacacaataagggcaagcagtaaacagaggctgcaaatgggagagaccagagcaatacacc

SEQ ID NO: 58857 - DNA, 456 bp, Glycine max
  unsure (1)..(456): unsure at all n locations
cttaatgggtattagataggaacctaaccatntatgcctatttctttgctcgtacagtcttaccctcttcatttaatgttctcttgaaccacaattaaacaaactagaccagtgtgcctgctctgcacgggcagcagaaacaaaacagtggcccgtgttttaaaactgcanaagataaaaggttagattgcacgtgtagctntgtttggcggctggacagttttataaatactattgattacaggtcagaactgcacgaaagccatactgattcaattgcaattgctataaaggatttgccttaataagaattgatacgagaattctntccatgttcttaggctattcattctcatatcaagaatgatgaactcttttatgtagcacaatataatagtggtaaattactaaccatgagatatctctgaagctcgataggagatggaatcatgtatg

SEQ ID NO: 58858 - DNA, 204 bp, Glycine max
caacgctatgcgaggccgaccgtgcattttcaaacttatctcacactaccacgcacaatagtgaatagtgcgctgagaacactttattagtctccaaaaatacattttttcccctaatgaatagatattattctgatgcgacatagttttaaatatttttattgaaaaagataaattaatagttaaactctcatacaaaaatat

SEQ ID NO: 58859 - DNA, 127 bp, Glycine max
gagagacataacaaatatgaccatgaactctgaaagaactcttatcttattatatcgcttaccatcaatataaataaaacactcaattgataacaatggtggagcacactgaacgaggcaacaaatc

SEQ ID NO: 58860 - DNA, 364 bp, Glycine max
  unsure (1)..(364): unsure at all n locations
agcttgcagtcattataagaaaaagaacatgttattagaagtatgactganaatgttagtcagtttgtcagattgattgtgaagaaatgcattgaccgtatcccggtgagagtgtgatccataaattttgagagaaacaactatcatttagtactgatttttgcatgaatctctgaagtatggactgaatgcatgaattgaggatgatgaaggccatgttttgattgtgatagctacttagccaaaaagttgaccttgtgcttgaatgatttatcccttgcacctagttngagttgaatgaatgattgattcattgaaccttgagcctatacagtcttagacttctgctaccttgtcttaggat

SEQ ID NO: 58861 - DNA, 454 bp, Glycine max
  unsure (1)..(454): unsure at all n locations
ctaagctgaggaggatgttagtttgtcgcagtgcttgatcttccccttcattctcatagatttagattattactatatnttgtttctaaagccttgtatttggctatataattatgacatttgaacacttagtatttcttttaatatttgcttagtatgactgaacatgttgtttatggcttgtgttatatgactaagtggtttgcgtttcaatttggttntattcaaaatatactttatgtatgtttagaatcattatgtttgtttacaaactatgtttctgtatgtttaaattatcatgtttatncactttggccttntgatgtgccaaagggaagaaaatngtatttaaaatcaaaattatatttaaagttaaattaagctgaatcaaaaaaagggaaaagaatgatgacgtaaacaaactgatgatctctgattatgatgcatcatcaaa

SEQ ID NO: 58862 - DNA, 297 bp, Glycine max
agctattctctcttatgtccgatttcggagtatattagatcgagacactcgacattgagcaacgttagctcttgagaaattgaaatggtcataactctccacacggatgtctgactcagacgcattatataatctagatgctcgaaattgaaccactgaagctctctagacactcaaatatccataacttttcactcgtggggccgaatcttgcgcatataatatcagacggtcgaatttgacctccaatctgcttgagaaatactaacgggcctaactctcctacccggattatcg

SEQ ID NO: 58863 - DNA, 447 bp, Glycine max
  unsure (1)..(447): unsure at all n locations
tanccttctggtcctactcatagttgttgtatgagataacatgctctattntcatctgccactccacgtatgcctccggatcattctttcctttacatggaggaatgttgagtttaatagcatcaattcggttgtgtctaggaacaccatcattccctcttctcctcctttcttattcattatgatctctagtctccatttgatccaacctgtcatggagcgcatcatctcggtgattcaatcacctctccaaatgtgcatcaaagcttgcatttggaatngcgacagccncactccatcattaggattagtacctgacatctcanacaaacaaatcagacgtaacacgacaattatagttgctgttagaatacctcacccactcaagtgtatcacacaattatggctnttctctaatgaaacactcttgccttttaccactctaat

SEQ ID NO: 58864 - DNA, 479 bp, Glycine max
  unsure (1)..(479): unsure at all n locations
ctcagcttaagagctntaaaccttcacctatcctattattgatgcacaaccttttcatcaaaantcgaaaagtgtaattaatatattaccaaaagattactgataggtcactacaagatcttataatcttcaattatcctattagtaattaaattctatgtacaagcctaacagattcatgaggttagccactatctcatgggctttcttaggtgaaattccatttctatcattactctagcccttttaagttgagaacaaagatggaagcgcacactcatttggtgtagctaaagcatcaattgaaatgggtggaccccaaaattaatattgaacccaacttcaccaaatgaatgagttcttcctcattaattaacggtaaaatattctatgatataatggtaaaatctgcaattagaagagaacactagctagctagctaggtaataaatacccagggtgaacatcacatccatcta

SEQ ID NO: 58865 - DNA, 448 bp, Glycine max
  unsure (1)..(448): unsure at all n locations
gcttcatgatgatgaactaagcaatttgattatgccaaaagtccaagtaattgattcaagacttcaagatcaagcatcaagaatccaatccaagattcaagagaagaaatcaagaagcaacaaggactaaccgttccccattgtttttcacaatctttctctaaccattccccattgttttttctttgccaaaaaactntccaaactttgtttttctgcaagtggaaattttgcagaaaacaaaaatgtgctatcttttcatcccttctccctcttgtcaaaagattcaaaggactaaccacctgagaattcttttgattctcccttctccctcttgacaaaagattcanaggattaaccgcttgataattcttttaattcttccctttcccttaaacaaaagatttcanaggactaaccgcctgagatatcttttggttccccttac

SEQ ID NO: 58866 - DNA, 331 bp, Glycine max
  unsure (1)..(331): unsure at all n locations
ccttctgttccaacccgaatacccaaatagctttgaatgttggcgccggctctgtcaccggcgaggaacactttctcanaatctacgtgttcgttcagccactcatcaacgccgttttcacccacgtgagaagccacccatttgagtgcaatccacgaatcttcgtggccggtgggaaccgggtgctccggtgcccgccggtagtggacggagacagcgagcacattagcctttgaaacaaccttngtgaggaggttgtggtagttcggagaaaacggggtttcgatgcataaagcgccgccgtgggtgtaaacaaggagaagggagcttt

SEQ ID NO: 58867 - DNA, 495 bp, Glycine max
  unsure (1)..(495): unsure at all n locations
atcttagagcacctgangctgcagcttttattttgggtatcttggttntattgtgacatgtttatgctttagtgaatntaaaatgttaaaatgtgttacatttcctagtttgagatactttactagttcaactattcatccctgttacttgttaaagcaattagcagtactagaaactgctttagcttgaaattactccctggacaaaatgaatcaagaaataataaaatgttacatacacacagaactaaattagagcatgtattttactcctctatttcacatcaatatgtgctgcatttgtctacccatcttggattgtgagttatagtcatgtcaaatagtgttatgttgcaatgagaaatttgcatttaacaactcatgcatagagtagcatagaaactatttatgaaacaagaattntgcatttaacaactcatacagtgtagcataactatttatgaaacacgactagaagatactgtatgagtaagt

SEQ ID NO: 58868 - DNA, 428 bp, Glycine max
  unsure (1)..(428): unsure at all n locations
tgcagaccctggaatagacttgactgntacagttntgactactggcttctggcctagttacaaatctnttgatctcaatcttccagcacaaatggtatttggttgttgataataactgttcagacattattggcccagcgtttaattcaacttaactagattagctcattctggtatacgattaacacctcttacatantttangttagatgtgttgaagttttcaaggaattttatcaaacaaaaactaagcacaggaaacttacttggatntattccttgggaacctgcaacactagtgggaaattcgatccacaaactggtgagctgattgtaacaacttatcangttatatttcttttgatacccttattgtgtgaagggactgttatatcctcattgcttcatttttcanntttgatgtctac

SEQ ID NO: 58869 - DNA, 106 bp, Glycine max
gcgtaataaaatatatcccgcgcctcccacctatccatttaaagattgggaatattaatagacttctcggcacgagagaatccttcaaatcggcttgtgacccgct

SEQ ID NO: 58870 - DNA, 379 bp, Glycine max
agcttctagcctacgaaatccttgtcaagtgtttctgccactggaacattaagagacaatgcaaggattcataggccaatttgagaagtgcgttggaatggtgaaggggttggaggagccatttctggtggaagtgttcctcaagggattaaaggaagagattagcactaaggtaaggcttcatgaaccaaagaacttgatggaagctatggttaaggctcgaagagtagaggataagaacaaagttttaggaaaattacccttgagtaatagccaggggtataatctgtagaaacccagttattcgggtcagaaatttgttagggattggcaacctacaaatagtaaggtagctgatcctactaattagttaagaaac

SEQ ID NO: 58871 - DNA, 388 bp, Glycine max
  unsure (1)..(388): unsure at all n locations
ctcaagcttacagcagaatgtagtaatgacccactaacctagaattaagatatcttaatgtcattaacctacggaattaataaaaacttaatggctgagtgtaactgaaattgtggcaaccaaaagtcacccccaacagccaacaagtcagccaccagttggtctcccaaaaggctgatgcctatgttgccaattgtgcccttattacaacttgaactaaacctaactaaagcccttttagatgattaacccaaaacatatntttggtcagccaactctacaaggattgggccattatttagacaaactagacactctaaaagtgaaacacagtggtgtcacttagtcctccttcattagggccatgatacaactcacaaccttggac

SEQ ID NO: 58872 - DNA, 414 bp, Glycine max
  unsure (1)..(414): unsure at all n locations
gcttcagctntgtccacaaggcttcatgttttctcgtccaaaatcgctaattgaacctcggatccctgtctgatacaatactagaaggaattccatgcaaccttactacttccttgatgtacaactccacgagtttctccattctatacttcatattcaccggaataaaatgagcagatttggtgagtcgatctactatgacccacacagcatcatgcccactgctagtcttgggtagactagatacaaaatccatagatatgctctcccatttccattccggaatttccaatggcttcaattctcctgatggtcgctggtgctcaaccttagccctttgacatgtcaaacatcttgctacatattcagctacatctttcttcatgccatgccaccaaaaacttctcttcaaat

SEQ ID NO: 58873 - DNA, 405 bp, Glycine max
  unsure (1)..(405): unsure at all n locations
ctaagcntttggagaaagacatgggaccactcatttatttaaaaaggatttcgtatctattcaaggtctaagagaccatacaagtttcctaacgatttctaattatgtgggccattaagtctatcatatgctgacaatagccgagaagcccgtgaatctcttcgggggcggagtaagtgtctgccatcgctttggccttggctaacaatcggggaagttcttgactccctgtccaggtaagagcaaaccgatccatccacatggttgcctctgggtgtaaagagtcgatcaccctgtctctagctctttttccgcgtatacttgagcatactcgtccgcaatcctatgctcatgggccgcagctagacctaactcttcttggtacttggcgatgatagctagcat

SEQ ID NO: 58874 - DNA, 446 bp, Glycine max
  unsure (1)..(446): unsure at all n locations
attgctggtaatcaattaccatccatgtgtaatccattacacattataaattntgaattcaaatttctagtgactgttataaacattttcagctgctggtaatcgattaccggagagcanatctcaatttgaaatgatagaattctttggtcacaacctttgttttttcaatntggaaacttcttccaaaagattctagaaatcaacttgatcatatatcttgactttcttggattcttgtcttgaataaaacttagaagcacttgatcctttagcatcatcaagacatcaaaacatcttgcttctacataggagtcatttgacttaatccatcagctgaaaaatccttcaattatttctcgtccttggaaaattctttttgcaagaaatcaatgcgtctttcattctttctcactacganggtgtgaaaacaagacaacaattgg

SEQ ID NO: 58875 - DNA, 324 bp, Glycine max
  unsure (1)..(324): unsure at all n locations
tcttccatatcgaagagctcatacttacgtatcagaaggctcagcttgttacgtnttacctcaaaggacccttcatagataatggctaaggtgtcccacatctgtttcacacttctgaagttttgaacattggaatactcttcttgagatagagtgcacaacaaagcatttctcgcatgagaattgagaagaaaattcgacgtatgttcatctatccatctgtccctaagggtctcatttctccgagcatctataggaatgtgattgcctatttctacaacgtcccacatgtcaatgtgagtggatgaaagaatgcaatcatta

SEQ ID NO: 58876 - DNA, 318 bp, Glycine max
  unsure (1)..(318): unsure at all n locations
agcttgttcagggtttctataanggtctcaatttgcttggctaagtgcttgttntgagctactaatgcatcttgagatgtgagctcaagaagactcttctttgtacgttttgaagctcattcgtgaaagatggcatgatcactgattgccctantttcccttaactccatagcttcatcaaaggactttaaattaatttttctgccagcggatgcatcaagaaactccttggaatggggccgcacgccatcaatgaatatattatctgaacacgctcactgcacccgtgagtaggagtcttttggagtanaacatgga

SEQ ID NO: 58877 - DNA, 464 bp, Glycine max
  unsure (1)..(464): unsure at all n locations
ggagcacganattgaaggaataaaagagggagagaagtggaactntgaagtatgtctcataagactctcattcatcaaagttacaacaagtgttacacatgcttctatttatagactaggtagcttccttgagaagctttcttgagaaaacttccttgagaagcttctttgagaaaacttccttgagaagctagagcttatctacacacacccctctcataactaagctcacctccttgagaagcttccttaagaagattcctaaagaagctagagcttagctacacatacctctctaatagctaagctcacctccttgagatgagaagctagagcttagctacacacnccctataatagctaagctcacccccatgacaacaaacatgaaaataatataaaagtccttattacanagactactcaaatggccccgaaatacanggctaanaccctatactact

SEQ ID NO: 58878 - DNA, 442 bp, Glycine max
agcttccacaacctgtgcaacttgaactccatatgtcacttttggctggtgctacgaaagtagccagggtctaggtttattgatgaatttaaaacaaaaagtctttcatccttccacgacagttgtcacaaaatcatcttaaaaaatatcattttaagacgatttttgcaaaacaatcttaaaaaaataccattttaagacgattctgtaaaatcgtctttgttgataaaccttatatttacaaaattgtcaccaccttatatattaagataattttgcgagaatcatctgtgaaggtgtatcataaaaaaaatgttcttttagtagtgtaaatgcaacaatttcttattgatttaataacaaactatacttatgcacaacaacagttatcactcagagaggaagaatattgaataatcttgacatgaataattaagataat

SEQ ID NO: 58879 - DNA, 276 bp, Glycine max
  unsure (1)..(276): unsure at all n locations
cgctgtcngtggagcacatatgcaccaccatgtgctggtctttgtttatctgccatccaatatttcttgggcgcttgnagagtggaaccacatgccgtctctcttctatccaccactacttacaatcctcttgcctagtcatctctggtcagatcaaacatcccttgcccttaattcggttgtgcgaatatctcacaattgccaatgattaacattaattcggattataacttattgctcaacaaggttttactctagttgacacttgacggattt

SEQ ID NO: 58880 - DNA, 202 bp, Glycine max
  unsure (1)..(202): unsure at all n locations
agcttcttgcgttttagctctntgggctcatattatccttttaacaaatccctcttattactagctattttgaattctttagttcctgaatgtacaaccttcaaattgttgctcattcccctctttgagaatgaggaggatcttcatattacttcatgcagctgatgtttatcgctagtttcatcatccaccacccttttct

SEQ ID NO: 58881 - DNA, 512 bp, Glycine max
  unsure (1)..(512): unsure at all n locations
cactaagctcgnncgacatcgntcgcgtgtatgatatccactcgacattgtntttattggangatatcttcaatcctataacacaacgnggcggacaaaaatgggcagttaacttgaatggccattattgtcaatgcggaaggtattctacgcttcactatccatgttcacacattattgcagctagtggttacgtgagcatgaactactaccaatatatagatgttgtttacaccaatgagccacatcttaatagcatacttcgcacagtggtggcctcttgggaaaaaagcggcaattcctccttctgatgaggcatggacactaatccctgacccaactacaatttgagcgaaaggtcgcgcaaaatcaacatcgataatgaatgagatggatgtgtcgaacatctgacaccgacaaaatgtataaatatggactgatggacaattgcgtcatgtcaatgaatctgacggggagaatcattaattgatatgatgtacatgataactgat

SEQ ID NO: 58882 - DNA, 373 bp, Glycine max
  unsure (1)..(373): unsure at all n locations
agcttgttcatatcanatcactcctacatcttatctctagcatgcattntctttntttacccactcctcacgtttggttttttagggaaaaacaccataactaaacgcgccgcaagggatccctatcgcaccagatccaaatctagaacgatgggtgatcaagaggagacgcaggaacagatganagccgacatgtcggctctgaaagaacaaatggcctccatgatggaggccatgttaggtatgaagcagctcatggaaaagagtgcggccactgccgccgctgtcagttcggctgccgaagcagacccgactctcttggcaactacgcaccatcctccctcaaacatagtaggacggggaagggacacac

SEQ ID NO: 58883 - DNA, 494 bp, Glycine max
  unsure (1)..(494): unsure at all n locations
tcaagaagaaatcacatgtttgtcatctatcaaaatgttgagaatgtgaatgtatgtatacatgattntgatgatgtcaaagaagaatctaacacggctgcttcaaatgataagcattggcttcaagaataattcaagattgcttctaaagattgattgagaatacaaaacaaagccttgcttttatagactcttcatgtctggtcaagagaaccatgttgaagacgtataacttttaaaaaacttaaaaccaatttgaaaaagtcaaaaatcatttgaagagttacatcttttgatttattcagaaacaaccactggtaatcgattaccaaatcagtgtaatcgattacacaaagcttttagtgaaaggatgtgactctttcacattgaatttgatntcaacgttanaggcactggaatcgataccaaacattgaatcgatacaattttttgaataattgaacgtgtaatcattgaaactttcaatcatttgt

SEQ ID NO: 58884 - DNA, 352 bp, Glycine max
agcttgttccataacaaaatgtttgcttacatttaatggaagtgagtaaggaggttctggaaataagaaccacatcatgacttcgcccattgaggtaaaagcatcaagctaatgacgttaaagaaacgctctctggcaagcatactaattttaagttatgttatatgcggttttcttatgcattacatcatggggaacttgcttcatattcattacattggagtatatcaactttgttttgaatgatagatataatggtttcattctcttaacgaagggactgatcaataacttacaattctttttgaaaaatattctttcgctagcacaagtctctcgctaacgcatcttt

SEQ ID NO: 58885 - DNA, 177 bp, Glycine max
tcgtcctttgtcacaggaagaccgaaggtccatatcaccttcttaattgtacacatggggcactgcgcccctcaatgcgcaagtaagaagagataattctccgggctctcgcgtgccgaaaatgcattcataacatgcatcgcataagcatctcttcataacatcataatggacata

SEQ ID NO: 58886 - DNA, 116 bp, Glycine max
gctagaccaattccctatgaaggctggtatttttctgtgaattcatgtctgagcccatctgaaatgaatagaaaaagctttattggtggagaaccctttttttttttaatttaatt

SEQ ID NO: 58887 - DNA, 312 bp, Glycine max
  unsure (1)..(312): unsure at all n locations
tgcatccgtacttggaaggatctgattactgccttccttatgttatatcagtacaattccgatatggctcccgatcgcactcagctgcagaacatggttaagaaggaaagtgagacctttanagagtacgctcagcggtggagagacctggcagcacaagtggcccctcccatggtcgaaagggagatgattaccatgatggtagacaccttgccagtgttttactatgagaagtngtaggctacatgccttctagttttgcggacttggtattcgtcggggagaagtatccgaagtaggttgaagagaggg

SEQ ID NO: 58888 - DNA, 449 bp, Glycine max
  unsure (1)..(449): unsure at all n locations
agctntataagtgcgggtctgggagacaaatgttaagtggtcgcgatatacgaagatgatgttccgagtacattagattcggtacgaccatgccnctcctgatnnntccagctgnngaaattgcaaagtggaggaacgcccccgcatttacgcaacgagcataatgtaaacctttacggttntaaaagctctatagntgggcctaggctttagagtttttccttttgttaaggctntgtgtctttggttgttgattttataatacaaggatctttcttcatctgttcctacgtctctacccattctcattcatttgcatgtttacttctttttctgaaacggcagatccgatgacgagtcccccgaaggtactaatacctgggacccgcctatcgacttcgagcaagaaatgaatcanacggaagatgaaggaaacgaggatgtgggac

SEQ ID NO: 58889 - DNA, 360 bp, Glycine max
  unsure (1)..(360): unsure at all n locations
acggacaccaacatgctagctatcatctccatgtaccaagaagagttaggtctagccacggcccacgagcatagaatcgcggacgagtatgctcaagtatacgcggaanaagaggctagaggaagggtgatcgactctttgcaccaagaggcaaccatgtggatggatcggtttgctcttaccttgaacgggagtcaagaacttccccgcttgtttaccaatgccaacgcgatggcagacacctactccgcccccgaagagaatcatgggcttctcggctatggtcagcatatgatagacttaatggcccacataattagagatcgctaggaaactcgtatggtctctcagaccttgact

SEQ ID NO: 58890 - DNA, 445 bp, Glycine max
  unsure (1)..(445): unsure at all n locations
agcttgatgtgagaaagcgtggaagagncagttttcctacttttatttgttgaccacagagtggtacctggagatatgtcgcggngtcaggagaccttgtggacgtcaggtggggtgctattgcccaaaaccaagcttggctaatcgagacccaacccagacatagtcagtcagtgagaacctgtgacgtacctaaacaggcgagctcctggcagtcaaccaataaaagaacaaagtccacgaagcaaggaggcttgtgtggcggatggccaactatgtatcttgggtggtatcgggaaattagcctctggtaatcaattaccattcatgggtaatcgattacagggcttaaaaatggagacaggatgttaaatggcctctggtaatcgattaccaaaggtgtgtaatcgattacacagggtgatagggctctggtaatcgatta

SEQ ID NO: 58891 - DNA, 480 bp, Glycine max
  unsure (1)..(480): unsure at all n locations
ctaagcttctgcgtagccgctctggggctcagaaatctanaaacanattttctttattatctagctatttgaattctntagttcctgaatgtacaaccttcaaataggtgctcattcccctctttcttttctgcaaaaaagaanatcaatatcaaagaaaacatggatgaagtcctaaggatgccatgtacatgtgtatttctgaagatatagtatttatattccatcaagcatacattgactggtgattacatgtaatagactntntataacatggttgccccaaatcacaattaanaagcacaactaccaatctttcagaagtccttggttaatttgtcttgtctccttatgtggtggcgttttctctaataatagtatactttngccttccaaaaagacttatgactgatcctctttcattaatcctatttgatatattggataaagacatggttctcatctgcttcactctcctct

SEQ ID NO: 58892 - DNA, 401 bp, Glycine max
  unsure (1)..(401): unsure at all n locations
agctntacagcagaatttagtaatgacccactttacctagaattaaaatatcttaatgccattaacctagggaattaaaaaaaacttaatggctgagtgtaactgaaattgtggcaaccaaaagtcacccccaacagccaacaagtcagccaccatttggtctcccaaaaggctgatgcctatgttgccaattgcgcccttattacaacttgaactaaacctaactaaagcccttttagttgattaacccaaaacatatttttggtcagccaactctacaaggattgggccattatttagacaaactaaacactctaaaatngagacaaggtggtgtcatttagtcctccttcatttgggccatgatacaactcacaaccttggacttttcttcttgaaac

SEQ ID NO: 58893 - DNA, 498 bp, Glycine max
  unsure (1)..(498): unsure at all n locations
ctaagcttggtcttcttataaatgagaagttatggactcatcacgttatctattaatcttgtggtggatccaagngctccgatcatccatttgcatactcatgttttggtggcatactcaccgttgtttatttctttaggaaattcatcataactaagaaaacaccaaggcacccctataacactcgatccagaanaatggataatgaagagggcgtgtatgaacagatgaaggccaatctattcgtcccttaaagatcaaatggcttccatctcggaggtcatgttaaaactccagataaccatagaggacaaagccacggcaaccgcctccagtgcggttagggaagcggagccggtgctgcaacccgctttaaatcccggccgagaaagaaacacggncgtatttggtcgaagtatagtccgcaagcttatcttatggcttgcctncggacttcactctccgtgccacttcgaaagatttaaggcaagcccctac

SEQ ID NO: 58894 - DNA, 353 bp, Glycine max
  unsure (1)..(353): unsure at all n locations
acctgaggcatgcaagctggttgttgctgccccacagagccnctcttaacttgttccggccgtgctcttctctacgagccctcttggtctcttgttccaaggccttggcagtagctatatttgtatctcttagttcggcattctcctttcggattttaagagctgctgatttgaacctttctttgactgtttgggcttgctcgagttctgccctaagggcctgcacctcttcgtcttcctccagtgcctcaacttcctcccttttagcggttcanaaaacacaggagccaatccaaaccttgcatgtgggctntcaaccaccttcggtagccaccgataggcccattgttact

SEQ ID NO: 58895 - DNA, 412 bp, Glycine max
ctaagcttgacgcacatgcatgcatggaaatgtgcatgtcattattttttcctatttggattgattttattggattcttttttgcttcttctttttttgtggaaaacacagattgaccatctctttgtgaaagacatgataactcataagacctcatcctatcttttacaaatctcttcggggactcccttagaatgtatgttttgtttgattacttgaaaaatttggaagtgatgaccaatggagcccatttgacatttaatcaatcaactaaaatattgatcctagggttttcccctatcctttcatcttaaacttcaattattcttcacaacaagaaatatataatgctttgggaccgatcgcatgtagcatggaaggatggcaatggatggttacactctggtatatg

SEQ ID NO: 58896 - DNA, 430 bp, Glycine max
  unsure (1)..(430): unsure at all n locations
agcttagtacctgattattattgtgagaatctgccgaatccttaanacatctccaatgacctgcagttatgcatgaagcaatcgaagtgtaagttagtaatcaggagagaatatctatttgaattcataagtcacgtgaggacctgagtccagagttacatcatagaagtagatatgaactactgtgcaacaacattgctaaatctctgatagcatgcatgcaggtgttacttaaggtctcacctcaacaggtatatcatctgccacatctgcttctaaggataatattatctgctatgatgctgcagctgtctggagtacatgctatactacctctcttggccggaatctggtagcttccaatttcataactcctatagagaacaaggagagtttgtggtgcgggaagaaatttaaatgatcagcacct

SEQ ID NO: 58897 - DNA, 418 bp, Glycine max
  unsure (1)..(418): unsure at all n locations
agcttcctctctattcttcttatctaagacattctcttgttggtgaagcttctcattccatgatttattttctagttgatgattcctcctctcacctcttttcctttattttccactgcaactccatggctgaaaatcaccattgaaggatcttattgaagctcanagatccaaactccagaggaacttctcaagcaagcttccatcaatctacacaatttacactaagctactacacacaaataaaggtttgggtggtctcttggagactcccaatccacccctaagaatgtctaaacataagaattgcaataaaaaaaattcagcactcaattgttttattacaagagaattacaaagcaattaacgtcttcaaatttgtcttcagtgcttgtttgttttcttaagtggttaactc

SEQ ID NO: 58898 - DNA, 354 bp, Glycine max
  unsure (1)..(354): unsure at all n locations
cactcaagcttcctcgggtgatctactacgcttncagaactgtggatgctgctctttgctaatacactaccacagagaaggagctactagtgatagctcttgctctcgaagaatgttgttcatattagcatggtactcgtgctattagggatactaaccatgcagctctgaaatacctgttgaagaacgctgaatcaaagcctatattgatcaggaggatgctatggctccaacatgtagatttagagatacgtaatctgagcagtgcacagaacctcgaggatgaccacctgagtaagattgcgcgtgcgactgaagactcacccattcaagatgattttccagatgaccatt

SEQ ID NO: 58899 - DNA, 414 bp, Glycine max
  unsure (1)..(414): unsure at all n locations
atcctctgagtcacctgcggctgcagctgnagaggattcttaatggaggaaattattgagggagagaaagaaagaagggggagcatgaaattgaaggaagaaaaagggagagaagttgaactttgagttgtgtctcacaagactttcattcatcaaagttacaacaagtgttacacatgcttctatttatagactaggtagcttccttgagaagcttttttgagaaaacttccttgagaagcttctttgagaaaacttccttgagaagctagatcttagctacacacacccctctcataactaaactcacctccttgagaagctttcttaagaagattcctaaagaagctagagcttagctacacatacctctctaatagctaagctcacctncttgatatgagaagctagagc

SEQ ID NO: 58900 - DNA, 421 bp, Glycine max
  unsure (1)..(421): unsure at all n locations
ctactattatgtttttattgttattaagaaacaagtgatgatattntgcaaggttagacattagttcttttcttaaaanaatatttgaagattaatgtagccaacatccgcggatgtggataattgcagttctggatgatatattgcgggcttatgctttgggcaccagctgtattgatggtacactcaacactttaagtgaagtggtgaaaatgtctttcatttataattttaagaagcactccctctccctctctcttcctcatgtgcactanttgagttccttcctcctttgtgttgtctctgtgatttggagcttccatacctcgttngcttgtgtcgtgccgtcactccgtgcctcgtcgaggtcgtcattccatcgtcttaagtggtctgggttcctccctctttatttctacat

SEQ ID NO: 58901 - DNA, 334 bp, Glycine max
gagtcacctgcggcatgcgagcttgactctctttatcgagaagtctactttcttataagttctaaagcaagggcatattcatgatactttctttgtcgaacgtacatgcttgctcggacttaagaagagaaacacaaactccatcacaatcatgcatcctttggcataatcaaatagtagcagcccattgttgcaaatagagaactgagtaccactggatcatcatcatgatcaagtacaactgttttgtttgctccaaaccatgcttactacctatccaccaacaaagcatgggcctatatacggacatcataatcactttaaacaatggact

SEQ ID NO: 58902 - DNA, 63 bp, Glycine max
actatacctctctacttagttcagtgcatcctcacgggaaattgctttagggactcctgaaac

SEQ ID NO: 58903 - DNA, 421 bp, Glycine max
agcttgtccttctctgcaaacatgatagcactggcatgttctgcagcattgcctacaattggaagcaagatgacagaaataaaagccactgacatattcaatgactcagatgctccctgcaagagaccagaaacacaatatgtctatgaatgaacttatgacgcagtgtttatggacaagaacaagaataggaatattagaagctctagttgtacaataatagaaattaatgatcaagaaattctgaaaatgatatagctatacctgtatggcgtctacaaggtatccagacaatatagatacccatgctgtcaagatagcaagccagattattgcctcccattgagttaattcaagatcttcctccacatcagaattttcaccattctcttctcccttacattatgaagtgtggaaattt

SEQ ID NO: 58904 - DNA, 400 bp, Glycine max
tattattattgactcttggacacatgtaggtgctactactttgacttatctaataactgtcctcaaattttaaaataaatatataaataccgtgcatgctttccatctgtgacttgagaagacacaccacatacgtgccatgttgtatattcataagaaataaagtgataggttctgagacagaatacgtttatgcaatcaacctgcccctccttaatcacgagtaggcattaacatcttacgttcccttgtatcatctttggagtaacatgacgaaaaataaagcaccttcacatatatgctagtacaggtgaacaaagagtgcacaagatactttaaccaaaatattcctcatagcacttcagatgaatctgataatctctaataaaaatgaacaata

SEQ ID NO: 58905 - DNA, 364 bp, Glycine max
  unsure (1)..(364): unsure at all n locations
agcttgtaaggtagtcatacctcacaaaatatatgtatgtgtgtttaggtagcaagataccttggatatgcatgtatataacanacatacctcacanaatatatatatgtatgtttaggtagcaagataccttggatatgcatgtatatagcanaaatatctcacaaaacatatatatgtatgtttaggtagcaagataccttggatatgcatgtatatagcanaaatatctcacaacatatatatatgtatgtttaggtagcaagataccttgcacacacatgtatatagcaaaacacctcacaaaaatatacatatgtttaggtagcaaatacccttgtggaaagagaaagagatataaaag

SEQ ID NO: 58906 - DNA, 442 bp, Glycine max
  unsure (1)..(442): unsure at all n locations
tccttgataaagcgcctataaaaccctgcatgaccaagaaaagaacaaacctctcgcacgcaagaggggtaaggcaattgtgaaataacagctataccttgttctaccatgaagtgacattnttcanaattcagcacaaggttagtttcaatacatctactaagaactctatctagactatccaaacatgtatcanaagaggattcataaacagtaaaatcatccataaacacctgtatgcaactctctaaaaaatcattgaaaatgctaagcatacaccgctggaaggtaccanngggcgtgcattggccanagggcatcctnctatagacaaaagtgccanagggacangtgaatgtggtcttttcttgatcctcangagcaatatgaatttgtaaataaccagaaaaaccatcangaaaatagtaatgagacttaccta

SEQ ID NO: 58907 - DNA, 428 bp, Glycine max
  unsure (1)..(428): unsure at all n locations
tttcttcatcatgtggctgatgatgnttacaatttaatgatcctttgctatcctgcaatgagacacacacagatacacaaacacacacacatagagacaaacacacgcacacacaaacacacacacaaacacacacacacacacacacacataatgatacacacacacacacagagagtcacacacactcataatgagatagacaaacacacaaacacactgagccacatacacacacatacacatacacactcacacacatagacagacagacacacacacacatataaagagacatacaaacacacacacatagataaagagaccaacacaaacacacacacacacacacagagtgctcatacataagagatagacaacacacaacaatacacactcgctgagtccagacctcacatacataaccg

SEQ ID NO: 58908 - DNA, 495 bp, Glycine max
  unsure (1)..(495): unsure at all n locations
actaagcttaactcaacttcatgctgaaagtatagttgtctgatataataaacttgttcttttctcttataagatnttacattataacttataaggccatatgtgtttcaatcatacaaactcaaaatgggcaagtaaaatcaccaataaaaacattaccatcccatgagccaagtgaaagaatagtgacactagaatggatctcattgagatgctcttactaattaatttggagaaacagctatacagttagttacaaatgtcatctcctcaattgttaggtacatttccctctataggtntccccttattcatcctaacatagaccttcttaactatatataggtctcctatcacacaacaaaaataggttatgtaaaaatgaattacatagtccttaatcagaatctttaatgggagtatagagaataatggcagaacagaanacccatggcatgacatncttacgcatacaactatatatggatcactctt

SEQ ID NO: 58909 - DNA, 178 bp, Glycine max
  unsure (1)..(178): unsure at all n locations
cccgaatgttacctaatgattcaccatagtgcaagtcagcatatggctcctctccagtcaagagttcccacatcacaataccaaatgaaaacacatcaacctaanatgacaaataataaaacaaaaagcctcaaacttacatagtgacaaaatatcaaggtaccattaacacattaac

SEQ ID NO: 58910 - DNA, 403 bp, Glycine max
  unsure (1)..(403): unsure at all n locations
ctaagcttaaagtgttacatactgaatacatatagtctaggtgagacanattctctgtggatacgatactcggtcttactggtttatatactacttgtgtgaatcggtacacttgtcgatcgaccaacaggtaccctagcccagaattggacgttgatcattagcaactaacgttgactgacacgtgtcaacgtctgagaggaacgtaaacgattcacgagttttaacccaataacatnttttaccccnaccctaaatggtaatatcgaaattggaaccgcgaaccgtaaaggaaatcttgtgtgcgtgaggtgtcgctgnntgatggtcatggtggtgttcatgtgccagaagtgaccatgttgaatgtccatgaacattaaattgccttagggcgccccct

SEQ ID NO: 58911 - DNA, 314 bp, Glycine max
  unsure (1)..(314): unsure at all n locations
aacaacagcagctgctccttcctccaaatgctgctggcccaagcaaaccatacattcctncaccaatccaacaacagcaacaaccccagaaacagccaatagttgaggcccctccacaaccttccctcgaagaactngtgaggcaaatgactatgcagaacatgcagtttcagcaagagaccagagcctncattcagagcttaaccaatcagatgggacaattggctacccaatngaatcaacaacagtcccagaattctgacaagctgccttctcaagctgtccaaaatcccaaaaatgtagtgccatttcat

SEQ ID NO: 58912 - DNA, 285 bp, Glycine max
  unsure (1)..(285): unsure at all n locations
gagagtaaaaactntggtcacttagaacatttcgagaanaactcttttgaagaacaaanatgtgctatgtttgttctttgaaaaatcttttcaatacttccctcgtgaagtcttattgagttcttctcttgaatcttgacatcaaacttctcttgattctttaatctttttgaattcctctcatgaaacttgaaatttatcttgatcttgaacttgttgactgaatcttgaaatcactcttcggtttttgtcatcatcacaattacttgaatcaacttgattcat

SEQ ID NO: 58913 - DNA, 467 bp, Glycine max
  unsure (1)..(467): unsure at all n locations
gcttctggtgggacatcttgacttgctntcttatctgacattcaccacaaattctgccttcttctattttcagattgggaatgcctctaacagcacctttgtcaatgattntcttcatgcctcttaagtgcagatgtccaaatctttgatgccatattctgacttcatcttctttggaggatagacatgtggaggagtaactggtttcttgaggtgtccataggtagcagntgtcctttgatctgctgcccttcattagaacttcactcttctcatttgtcaccaaacattctgactntgtgaagtttacattgaatccttcatcacacagctgactgatgctgatcaagtntgcagtcagtcccttcaccagcagtactttgtccagactaggaagtccatcatggactagctttcccattccaatgatctttcctttagagccatctccaaatgtcacatagcta

SEQ ID NO: 58914 - DNA, 482 bp, Glycine max
  unsure (1)..(482): unsure at all n locations
tctngagatgccttcggtaatntcgctagaggctttggtaaatctataatctcattggagacatcaaccttgaagtagtcaattaatcttgaggcaagcacaacataaggaaatttataatccaccaggtgatgacatttcaacataatgtctacaatcagtagtacccagttcatcttgatacctgatttgagaacataaactatntgtagatcatcatctcgtaccttgagcatgatactngacctaggtgtgagaatgtaggtgaagaggtatactaacattntgtcctctgcagtcagctcgccaactcctaagcgattcctcatagtgatagccgggtcaagaagcattcccctataggtctgtatcttggtgtacccaacaggcatttcatcgaagttgcggactccacccatgtcccagctgactatttgctttcatagaatagcatcaatgatcatatctaatccattaacagt

SEQ ID NO: 58915 - DNA, 472 bp, Glycine max
  unsure (1)..(472): unsure at all n locations
agcttgccgagtgccagaaaacaatagcatctttggggaatcagttgttatccctggctacactagaagatttcctcattgacactgcaagcattccagcaagtccatcactcattggtcaagctggtggngagttgtggaagtttcattcaaatggcactttntcgcctaaaagagattccatttcttcaaggttggctgatggtagctcttgtccatccttaaacaaaaatgaggaaacctcgtcgctttcatcgtcttcatcaacatcatcgccggccttgccaaatcatgtcagttctgagaggagtagaaatggctttgcaaagtttttctctagaaccaagagcgggatccggctagaaatttagtgatgatatagtgaattagccttagcaaaagtcattcttttctctagctgtataacananngatcatgtcattcaaagaaaagatttgacaacagtcaatt

SEQ ID NO: 58916 - DNA, 280 bp, Glycine max
  unsure (1)..(280): unsure at all n locations
taagtattggtgacaattacttaacctgtttttntntttaaggggacaattgaacagttacttataaaaatgacatgcaaactgaaaaaggagacacacattgagtaaaaggataaaacacaaatttcttttcaaaaaaggataaaacacaacataatgtggctatataatatagcttttgcaggatgttgtaaaaaatgtctatgncgtntatgcaatctattttctttgtcaataaataatggcagtgcatttgtaaaatacactatctaataaatat

SEQ ID NO: 58917 - DNA, 165 bp, Glycine max
  unsure (1)..(165): unsure at all n locations
ttaacatgtagtattgcattcttttgattgtggctagattttctttntaaagagagcaagatgcatgcgttcgcgtggtttctcttgctttatccaggacatatatttagattaatacgtttatggacagatgtcagatatcatttttagcctatatgtcttata

SEQ ID NO: 58918 - DNA, 470 bp, Glycine max
  unsure (1)..(470): unsure at all n locations
tctcactgggactctcacgacctgggatagtgtttncttctctaacctcaccagactcaacctcaatcacaacaattatgatgggtcaataccatcagcaattgacaatgtgacattctattcttaaaaagacttctctatacaaaaaataatcaataaagtcttacaaaatgatcacacttttattatcagataagtaaagacaaatagctatattagcaatatcgatctgaagaagacaaacaatatgtgatttattctaagaaataacatagagtttgttgttataaactattataaataactaataggatatgactattctaataggcgtatgtcacacatgtctcctctttctctcaatattgattgcctctcccacatccaaaactctctcattatcctgcataccaccaaacttgcttcagagaaacaacgatctcgaactcatccaccagtagatcgtcatg

SEQ ID NO: 58919 - DNA, 376 bp, Glycine max
  unsure (1)..(376): unsure at all n locations
agctagaacatgtttgcacgaaagcctatctttgtcctgcgaatatcctgccaaaagaagtggagctgaagaaagagtatattatagaagagagagaaaagcgtgtaataagatgggcgatgtgatacacaaagatcagatagatacatacgtgctatagaatagtgttgcacacatcatgtaactccactggaaatgataatgtcaaactgagaaagataaccgtgcagaagtataacatgaagaggaatgattcacanactaacttgtactctaaacatttcatcgccattcattatttctctctgacactctgactctattactagggtgatcagatcacaagtgagagaatggattctaatccataagatca

SEQ ID NO: 58920 - DNA, 216 bp, Glycine max
  unsure (1)..(216): unsure at all n locations
gcgcaaaactggtggaagaacatgaagtgttcacgaatactttaacaagagagtttatttttatggcaatcgttcatcttgatctgtatctntttgaggtgatatgcggcagccaattcgttcttcaaaaaacctctacactggacttcacatcttctcaattctgttaaaatggtgaanatgttatgccatcttttgtcgtcggtaactcttgtn

SEQ ID NO: 58921 - DNA, 277 bp, Glycine max
ttcactcattacaaaacctcatgctgccctatacataaaaacaggccccaagtccctagcttacttgaccatgctcatgtggaattggggcagtttacttggcacggggctggcgcacgtattggagtgtatagctagataaggtgggctgagtggcatgctcgtctattcttaaacgaaaatgaggactcgcattccgttcaatcgctcaaatcaacaataacatcggcttgtcaagattgttacttcagataggagaccaatggatgcgcttaga

SEQ ID NO: 58922 - DNA, 247 bp, Glycine max
  unsure (1)..(247): unsure at all n locations
cacatgagactcagctagggagcctctggntaatcgataccagcctgtgtaatttatntttcagatgaaagggtcactggtaatcgattaccaggcatgtgtaatcgattacacagtgtattattgcatatttcatgtcctgaggctgtgtaattcaagcttagcctctggtaatcgattaccaacgttgtgttatcgattaccagagatgacaagccttaagatactccttttaacgtcatgtagt

SEQ ID NO: 58923 - DNA, 183 bp, Glycine max
aacattggactagagacaccaagcttatcgttggagttacacaaagataacctagctttaatttgtgagagagtttacgctcaaacttacataatacggtaatatcagaaattatcctaccgagtgctattggacctttcaggtcaccctttatctcctacaacgttgcactccagatattcg

SEQ ID NO: 58924 - DNA, 344 bp, Glycine max
atggcgactacttactagattatcatgggtgctactttccctacttcaacacatcttgtgtgatttaactatctgatgtgaacttggaagaagccatctcttcaaacagaatattctcacatcacttctaatacaaataactgaaaccatgattgaagaacagcacaacacagcccttacttgctagaccggctaactcgtttattccacacctacagagatcatagatgtcaccataccacacatcgaagcaatgcgcctggcacactatataacaataggatctgagtgtccactgcacttgattcttttacagaaatgatgctctcttatgaactcttatc

SEQ ID NO: 58925 - DNA, 436 bp, Glycine max
  unsure (1)..(436): unsure at all n locations
agctttattgcttcatgatgatgaatcaagttttgattcaaggtgtttgatgataacaaagatgatgacaaaaagcccaagagaatgattntaagattgagtcaagaacaattcaagaatcaagagaaagattcaagaatcaagtttcaagtttcaagaatcaagaataatcaagatcaagattcaagactcaagattcaagaatcaagaanagactcaatcaagataagtactaaattttttttcaaaacaatgagtagcacatgaagttttcacanaatcttttaccaaagagtttttactctctggtaatcgattaccagtttactgtaatcgctgtaatcgattaccagtgggcaagtttgttttcaaaaagctttcaactgaatttacaacgttccaatcaatttcagaatggtgtaatcgattacaatat

SEQ ID NO: 58926 - DNA, 321 bp, Glycine max
aatgtatgtatacctgatcttgatgattgccaagaagactcaaacaacgctgcttcatatgataagcatttgcttcaacaaacaaagccttgtttccagaatcactaatgacccaaacttgccttaacacacagcgctctcaagatatgcaaagctctggtaatcgattaccacaagacacgggttgagatatatctgctgaaaaagagtatgaattcgaattttaacatgtaatcgataccagccacgaaactcctgatattaaattcaaagtcatgactcttacactataactgtgaatcgattactccacattgaatc

SEQ ID NO: 58927 - DNA, 294 bp, Glycine max
  unsure (1)..(294): unsure at all n locations
agcttgtgctcgttntatttaaattcctatgttcatgagcaactaggtgtgtcctactatgaaaagtgatcaaataacaagcatagattcaaaaggtactaggttgcctcctagtagcgcttctttaacgtctttagctggacgcgctatgacttgtcagtcactgacctagtactttgcttacctttggctntggacttggtagcctgctggtcggccatgtgtcgtangcaacgctctaacctttttgcggatgagctgaggtgaactctagaggtggtggcggtgtgtcta

SEQ ID NO: 58928 - DNA, 397 bp, Glycine max
  unsure (1)..(397): unsure at all n locations
ctttttctacacagaagtacgtaagttttattttctcattgcacctatatatacgtaagagcatgggcaaaccccttgtcgacctanaagaaaactaaaaaagtaaaaaaaacataaaatttcttcttctttctttctaaaaaanatgttttcttttttcctaaataaacaaaaatatagcaaacataattcatgttctcaagggaagttaataattaaaaagtcactctattttctcnccacaacttgattnaaaggtttcatgacgggcgtgtgtagtgctaacactntttctgtgcgtaaacgactcccgaatccttttttcctcaaatcgtagactattccttatctnttgtgtttttccgacgttntctttaaataaacgatggtggtgact

SEQ ID NO: 58929 - DNA, 284 bp, Glycine max
  unsure (1)..(284): unsure at all n locations
agcttattatctctgcaaggaatgaagctgtgttaaaccgagtaaggtttcttctgataggtatgttgttntactggcagctacgtgtgaggtctaaattacttattatattgtgtacaaataatgatatagacacatgccatgctctattaatatgtggtttgcataccaccaggtaagcatgcacctgatgacgtcaagatcttaccattggatttatcatctggagaggattctcttaggatagctgatgagaaagcagaatctcttttatcggattctgg

SEQ ID NO: 58930 - DNA, 283 bp, Glycine max
  unsure (1)..(283): unsure at all n locations
gcttagctgaattcacatcaaatcgaagttatcttagctcaacctttttcgctttgctgaccaaatcagcctcagatacaagggttgggttctaagcgctcaagactcgcagcttagcgcatgaacagagatgcgcttagcgcaaggcttatgcttagcggaaggactatnttttcaaaaagattttctaagttttaaacttagtcctttcccaagaaattggaacccttatgttaaacattcaaagattggctgatatactcctatgtacaacttacatagc

SEQ ID NO: 58931 - DNA, 381 bp, Glycine max
  unsure (1)..(381): unsure at all n locations
tcaacctttcgaagctatataagttgagtctattccttttagagggatctgaggacgaagcttagtttaagttactctaaacctacgagggctgtctaaattaagcctagtccaacaagaggaatctgaggacgaagcttggattgattcagtctaactcgggatcgacggttagtaatttacgctacatcatgtaacacaggagcattgattgatagaaacaatctttatatacatcagctggtttgtagaaaaactcaatacctttacctatggctatcaatcttacttgcagttttactggttttagcctatacttacgttaattatgttctanataatcaattatcaagtgttctttcaacaatgctatatatatga

SEQ ID NO: 58932 - DNA, 329 bp, Glycine max
tgggtatttgacgaattacggtttatgtgtactcaacttttttgttttagtgttacttgaccaattagggtttagggttatttgacatattacggtcacttgactaattacggtttaaggttatttgacaaattagggttacttgactaattatgatttatgcgtgtataactaattagggttatgaatacttgacttattagggtttagttttacttgaccaattatggtttacggttattttacaacatttggtttatggctacatgactaaatagggtttagcgatatttgatagataagggtttaggtttacttgactagttggg

SEQ ID NO: 58933 - DNA, 361 bp, Glycine max
  unsure (1)..(361): unsure at all n locations
ctaagctcgcatacccgaggccatattatgattatatagatgatgcatatattctgattgtgaggngggtcctgcctgatccttaagtctcattcaagtccttggtgccgccgttggtaattaatgtatattaacgagtcactcaagtattgatggtgaagggaacaagtgtcggaacaccgcgcagatgcctttcactgctaatgaagcttaaaatactactacggtttatatttttgaggggaaggtgctaaattggtatacacttacgattactctgttctttatagtcagaagcaagattacattttaacgataacggctgttatgtggatcctacattttntactggtcaatgata

SEQ ID NO: 58934 - DNA, 319 bp, Glycine max
  unsure (1)..(319): unsure at all n locations
agctttcttcccgattgtcctatatatatggttataggngaagggaaaaaatgttcagcccttctggtatttctaggtcactggaaattaacgaaaaaattgtttccgtgaagaaaatccaagccgaggcgcttccgtaacattatcgtaacgtttccgtgggtgatttcgcgaagattttcaaccgctcttcgacgttctttggtcgttcttcggtcttcaaccggtaagttcccgaaatcgaacttttcaattcattttatgtacccttagcggccctcatttagttcgagtacttttatttcgtttatttactttc

SEQ ID NO: 58935 - DNA, 340 bp, Glycine max
  unsure (1)..(340): unsure at all n locations
ctgcaacannttgaaacctagctggaaccaacatatattcaattatgggatctggagaaggcatagcttgagcatgtgactggattacataatntgttacttgcagagatcaaaataataacaacatgaatattagtaaatcatatcataattaacatttaattaaacataatgtattacacacttctcgagatctatgaaggtgttgtttccataaaagaggagcaacttgtagcttcatggttaaagctntggactaacgtcaagaagttaaagagggatatatgagagaatgagagaaagcgagtttatgtgtgtatatgatggcattacatgcatt

SEQ ID NO: 58936 - DNA, 309 bp, Glycine max
ccatatccccttggtctaaaagactctcagcctttgatccagccaaacaacctttaacacgtacaacctgacgtcgtactggatctttcttaacaagggcctacaattattgtgaccaaatcaagacattggtaacatcataactagttctttcatgtttcaagaagtgaaagacggtaagggaatccactatgtatacaacaaataaacaagaggcaatataacatatcctctactcctctcgcttgaaatatttcttgagggattaatggacaacttatcaccagtaccaatccataatgtcacttt

SEQ ID NO: 58937 - DNA, 269 bp, Glycine max
caataagtatcttaacattttcagacaccaaattcgatattatatattaagggcaggtccaattcgagaaacttcagcacaatcttgaattaatattctccccattcatgcttatcccctaggctctaactaataatacgcttactaacatatgcataaatgttgaacacttaaaatgcctaaaataacatgacttatgtctataatatccatggcttggagtcttgatctctatcaacgaaaagagaatagcactacagcaagcacac

SEQ ID NO: 58938 - DNA, 460 bp, Glycine max
  unsure (1)..(460): unsure at all n locations
agcttgtctnttctatataacaaggttccacttgtgcccttccacttgagatccctatagtgcttcttatgcatcctcagatcagagagcaccgagaattacttttggttgcacctcagacccataagcctcttattcatgtccacaaaagctacaaacactcttgagcgatccattgaaaccaatttgactgaaaattgcgcccatgattggatctatttatctattgtattcgggacaaccacatcaagtttatctatcatatgaatcatcacatatcanagcttacaattgtaacgtagaaaaaaatgattatacattgacattntctattnttttatagttatccaatatataatgtaatatggacttactctntgttgcaatagcgtttttcttatacaatggaaattcctagtagtgaatgtccttattgaaggcctatctctgaacaatccta

SEQ ID NO: 58939 - DNA, 481 bp, Glycine max
  unsure (1)..(481): unsure at all n locations
tgcagctgagttngtagctatctcatgcatttctctaatgactatagcatcattgctggcgctaaactgctgggagttggaagccatcttctcaattaaacttttggcttcagcaggagtcatgtctccaagggctccaccactggcagcatctatcatacttctctccatattactaagtccttcataaaaatattggagaagcatctgctccgaaatctgatggtgagggcaactggcatatagtatttttaatctcccccagaattcatacaggctctctccactgagttgtctaatacctgagatatccttcctgatggttgtggtcctggaagcagggaaaatgtattctaacaatactctcttaaggtcatcccagctcgtgatggaccttggagcaaggtaatacagccagtccttcgccactccctctanagaatgangaagagccttcagaaatatgtgatcctcttggaca

SEQ ID NO: 58940 - DNA, 443 bp, Glycine max
  unsure (1)..(443): unsure at all n locations
agctntaccacatttatttgtataaccgacttatattctaccatgttaaatcacctttttgtaatagtgtatatatattatcattcatatgatcaccgcatgtcaattaattgtcaaccgttttttgtatatatgtnttgtaagtatatataatcctcccataataatacgagtaacacgtttcaaacaagaggtaaaagtngtatgacctacattataggtacggtgacaaacatttcttcctaaaataatgccccanttggtcccttctttatgtgtgtgtattgtatttagtttgatgcgtcanaagttaccacagctcaattcnatgtttgttggcagtgacaaagactacccctctctctcatcgcaaagttacacgttatagttgagaggattagttctgtacaatatatggtcgtcaccatacccactcatatcct

SEQ ID NO: 58941 - DNA, 482 bp, Glycine max
  unsure (1)..(482): unsure at all n locations
cttagagggctagantagtatcggccaagtgagaggtatatgggtgttgaagatcaatatgtacattcttggacatgatccctttgattcttctacctcgtggcttcatagtgcatacttttctgatttgaagttagaatatgtcttgtggtagttacagaattcacttagtaatcttgcatacgcgtatcagattcagttttaacccgcccgagtctacaatacagtcgcaatgtggattgcgtttntcatgaatnttatttatggataaaaattgctaatcttagacgcaaatggtactaaagattggataaataagatcaataacatatataagaggttgctgattaaattatgtaatagagcacacacaagcaccaaatgcctcatgacatataagttgctcgcagtaagatcagaacagcatgatatgagcgagatataataaaactctgcgtttatatgaaaggaagttacgcttg

SEQ ID NO: 58942 - DNA, 367 bp, Glycine max
  unsure (1)..(367): unsure at all n locations
caagcttgatttcctttgttccgganaccttttttttcttatgtgcacccaaacccaatctccgggttcgaagacaaccttctttctccctttgttggcttgtttagcatagcttttatttttcctcttaatttgatctttgactctctcatgaagcttcttcacatagtccgcctttgcttgaccttctttatgcttaanaacagatacattaggcataggcaaaagatcaagaggagttagtgggttaaaaccatcaacagcttcaaaaggagaacaattagtggtgctatgaacagctctattgtaagcatattcaacatggggtaaacaagcttcccaagtttttaagttcttcctcaaaact

SEQ ID NO: 58943 - DNA, 337 bp, Glycine max
  unsure (1)..(337): unsure at all n locations
cagcctctgaggtacttctctctctctctctcaatagctgaggaanattagttccatgaagaaaatccaagccgaggcgcttccgtaacgtttccgtgagtaattacgcgaagattctcgaccggtcttcaagattcatcgatcgttcttcgatttcttcggtcttcaacgggtgagtacctcanacccaagctcttcaattcattctatgtactcgtggtggtccacattctggttcatgtatttgtattctcggtttcatttactgtttatacccacttttgacgtgcttaagccatttatataagtcatttctcgcttaatctagaaataaaat

SEQ ID NO: 58944 - DNA, 351 bp, Glycine max
  unsure (1)..(351): unsure at all n locations
agctntgaagagttgaagacactttccactttctaatattntaaaattggtggtccttcttctctaagctctttctttgtaaattcgtaagttgtaaagatcttgaaacaccttgtaaatcctgagagaaaaagattgagtgatgaacttgtatatccgtctctaagatgattaagctagtctatgtgcaaacaaacctcaacaaatgtgctggtatattaagagttgaacgtggcttgttgaagaaagaatacttatgttgtaaagctntggtataagttgtgttgtaagaataagaagtggcaagaaaaaatacttgttattntngtgaaagttagttaaacttgatgg

SEQ ID NO: 58945 - DNA, 268 bp, Glycine max
  unsure (1)..(268): unsure at all n locations
cttcatgttcttcgtgttctgtgtgttcttcatgacattcatagcactattgcannaatgtcgagttgatccaatacaaaaattgtttgagagtgntggatattctagcanatataaaaattntatggtcctaaaagagaacaacatgaaaggacacagtgcaaaaggaaaaaatattttgcggtcaaaatgaaaatatcataaaatctgaggaaccaagtgtaaaaaagttctagaacacaattatagtcaaaatgtaatagccctc

SEQ ID NO: 58946 - DNA, 328 bp, Glycine max
agcttgtaggattatggcgtacttatcacatttgttactacgaggcggatgggcgatggtgcacaacaagttttccacatccacaatgcgcgcataaacccaccatcccctgtagcccacctccaactgagctcacgtactcccacggagcccatatcctcggttctctgaacaccgggtccccatcaatcctcccaagcttccccaacatcaaagtaatacaacattcgaacagcacagactatcacagtcaagaaaacagagcagaggcagaatactgtggcaaaacaccaaccaaaatcacagcttttctcacttaaagacccca

SEQ ID NO: 58947 - DNA, 420 bp, Glycine max
cgccacccagctcgcgcaagcgagccattttgctttctccagaatctaccgccttctggaggaagaatctggaaggcccaagtgggcctggttgctatatgcacccacttttctttactaaatacaccccttttctactattttggcgattctatttctgtaacgttacgaaactttacgaatctcgtatcgatacttattttctttccgcagggatatgcgaccttacggatcatggaattactctattttatctttggaaaaagctacggaaactcacggattgcgtaacaatacttccttctgattaccgtcacgttacagaatttcacggattgcgtaacaacgctttcttttgatatccggcacgtctcgggacttcacatattgtgctacaaagggtgctacgtactttgaagc

SEQ ID NO: 58948 - DNA, 373 bp, Glycine max
  unsure (1)..(373): unsure at all n locations
ggatanntaatgggagcattttttttttttttaaggaaagatggacgaccactttagtgctggttttgcctaacccgagagaaccatttgaggtgtattgtgatgcatcaaagatgggtttaggtggagtgttgatgcagaatggccaagtggtggcctatgcttctagacaacttaagactcatgagaggaattatcccacccatgatctagagttggctggctgtagttttgcccttaagatttggaggcattatctgtttggctctaagttcgaggtgtttagtgatcataagagccttaaatatttgtttagtcagaaggagctgaacatgagacanaggagatgtgttagagttcttaaggattatga

SEQ ID NO: 58949 - DNA, 465 bp, Glycine max
  unsure (1)..(465): unsure at all n locations
ttgatcgtccatcgntgttccaattggatacaactgggagaaaaagaaacaagagaatctaatcctaattgattattngttttcaaaatgtggagaggcaatgagaacccttttggccaaactataagaaggggacaattatttttgtaatttaccatatgaagataaattacaaattaatactcacaaagggttgtagggtgtcatgccacttctgaagacaaagttgtaaattaattcatgactacttttngtttgtttctttttttactgaaaacataaaaacataaacaattttcctttttttntattaccacaaagtcgtaaatattntaatttttaaatagttattagaagtcgtaaactgatttatgatttcaaggtcataatattttttcaaaattaattattgacaaatttagaaatagtttagtttttaatttctagttcaatggttttaatatc

SEQ ID NO: 58950 - DNA, 436 bp, Glycine max
  unsure (1)..(436): unsure at all n locations
agctntaagccaattcatacgacaataactttttacttttatgtctgantgagtcccgtaatatatcgagacgctcaaagttgaatgtttaatctttaagccaattcatacgacaataactttttactcggatgtctgattgagtcccgtaatataacgaaacgctcgaaattgaatgtttaagctttgagccaattctaacgataataactttttactcggatgtccgattgagtctcgtaatatatcgacacgctcgaaattgaatggtgaagctctgagcctattcaaacaacaataactttttactcggatgtccgattgagtgacgtaatatatcgggaccgctcgaaatgaatgttgaacctctgagccaactcaaacgacaataactttntactcggatgtctgattgagtcccgtaatatatcgagac

SEQ ID NO: 58951 - DNA, 336 bp, Glycine max
gtaaacattcaactttgagcgtctcgatatattacgggactctattatacatccgagtaaaaagttattggcgtttgaattggctcacacgttcaaaattcaatttctagcgctctcgatatattctaggactcaatcagacatccgagtaaaaagttattgtcgctagaattggctgagaggttcaacactcaatttcgagcgtcccgatatattacggcactgaattggacatccgagtgaaaagttattgtcgtttgaatttgctccgagcttcaacattcaatttcgagcgtctcgatatattacgggactcaatcagacatccgagtaaaa

SEQ ID NO: 58952 - DNA, 428 bp, Glycine max
  unsure (1)..(428): unsure at all n locations
agcttttaatgaacggaatatctaagnctaatcttatattgcttgtaccgcacgcaaatatttcatgttatcatatatggtaatatttgatccatatatattgatttttaactacttaatttgcagtctgtacaccttactttagcttatgcatcaacgttttcccgtgaatgtataagaatcacaacaaatgagacaagggccactttaaagtccaaatagtccaagtaagagcttttggctaacaaaaagattttaaatttttttatagtactaatnnaccnaaanaagatgattgcaaaattatatctacaaataaattttaattaaaatatataaataacatcttatcttttatgtatatcgtaaataacaatgtaattataataagacaataataactttaatcaagttatttataactaaat

SEQ ID NO: 58953 - DNA, 225 bp, Glycine max
cctgtgcatcgatatcatctaatatgaattcaattcaggacgtataacatatactgcgggatcagactaagagaatccactttgatgattaataaatcttggcaacctttgctttcattggaactcttctaaattgccacaactgagatatatcttgattctggaactggagttgtttaaaccttgactttggtataaaataaacatttgtttcatagagcttga

SEQ ID NO: 58954 - DNA, 425 bp, Glycine max
  unsure (1)..(425): unsure at all n locations
aattaaaatgttcaataactgctggtaatctactatcatatatgtgtaatcgattacacagtgcaaattntgaattcaaattttaatagctgttgtaaatcagttttggccattggtaatcgattacatcatctggtaattgattaccagagagtaaatttgttgaaaaagactttttaacttagaattcttggccaaaccttttgctacttcaattggaattcccttcctatttaatataccctttctaagactctaaaaactgtcttgatcatccatcttgaatatctttaatttctttgtcttgaataaagctttgagacgcatgtgatcctttggcatcatcaaaacatcagcttgatcctttgtctacagctcaaactcatgagtggtaagttgaggtcaaagtggattgggttttttgt

SEQ ID NO: 58955 - DNA, 475 bp, Glycine max
  unsure (1)..(475): unsure at all n locations
gcatgcaagcttctcaaggaagttntctcaagatagcttctcattgaagctacctagtctataaatagaagcatgtgtaacacttgttgtaactntgatgaatgagagtcttgtgagacatacttcaaagttccacttctatccctcttttattccttcaatttcgtgctcccccctctctctttctctccctctttcttttcctccattgaagcatccttccaagcttcttatccaaggctcatcttggtggtgaagctccttcttccatggcttattccctagtggatggcacctcctctcacctcttctcatttgtcttccgctgcatctccatggtggaaaatcaccattaaaggacctcattgaagctcanagatccagcctncatagaagccccacaagcaagcttccatcacaagataccttggacacgcatgtatatggcanaatagctcacaaaatatacgtatgt

SEQ ID NO: 58956 - DNA, 432 bp, Glycine max
  unsure (1)..(432): unsure at all n locations
ggattatggngtacccatcacatgtggtactaggtggcggtcgggcgatggtgcacaacaagttttccacatccacaatgcgcgcataaacccaccatcccctgttgcccacctccatctaagctcacgtactcccatgtagcccatatcctcatttctctcaacaccgggtccccatcaatcctctcaagcttccacaacatccaagcaaaacaacattcaaactgcacaagctatcacagccaagcaaaacagagcataggcagaaaactttgccaaaacaccaaccaaatcacagcttttctcacttaaagaccccagtaacaattccttcgttctggttcattaaccgttggatcgactcgaaaatattactggaagtctctaatacttaagcctacattttgaccgttgggatctactagcaagcat

SEQ ID NO: 58957 - DNA, 215 bp, Glycine max
  unsure (1)..(215): unsure at all n locations
catccttgctttccagtattcatagttggttccatcaagaattggtggtctgttcactggtcctccttctttctccatgttcatcagaatttatctccctaggtctcactcagtgatttcgagtgcctgctctgataccaattgaaattctgatatggnggacagatgtcgtaccggatgtcacgacatcacgcttcagaacatgccagatatat

SEQ ID NO: 58958 - DNA, 431 bp, Glycine max
  unsure (1)..(431): unsure at all n locations
tctagccaaatggacttaccttgaattaatttctttgatttcctctttgagcctatgnttgcctttctttgttttgaagctcattacaagccttaagtgaaaaaccatgatctcaccttaaccttaaggaattttggagctttggaattgttttgagaataagtgtggggagggttttgttggataacatgttttgttggctatgcttcgcgatgtatttttgggccatagtgataaacattgtatatgggttaaatgttggacatgctgctgaatgatatgctagttctcaaatgctacttcaaaaaaaaaattcaagttgaatcaatcagaaaaagaaaaagaaaagcaataaagttgagtgaataagttctttaataattataaaaaacaagaatgatgagactcttggttctactctttatgtttaa

SEQ ID NO: 58959 - DNA, 425 bp, Glycine max
  unsure (1)..(425): unsure at all n locations
agctggactatgagtggaagttgggtcttatggattggtccttntgttgttactaatgtttttccttatggtacagttgagatcaaaagcgactctacaaacaagagcttcaaggtcaatggacaccgacttaagccattcctcacaaacccttctttagtggacgtagtggtggaagagacttccttactccaccctactcttcctctaccatgacttagggagtttttcttttcctatctccttctttacttttattacatttgtccgattctatttgatggtttaattacttttaatcttttaattgtgctacattgaggacaatgtgttgtttaagtaggggggagtgttctttggttntggttntgttagttgtgttaaattagtttaattntgttagttttgttgggttctagtttaat

SEQ ID NO: 58960 - DNA, 424 bp, Glycine max
gtacaaatagaatcatcttgatatgactgttttggaagttctcttactaggctatgcttttgaagctttgagattaacctccagctagcatggtcaaacttcttattccatacccagtaatgctctttgactaaaagtaagcatgacaccttttgattggatagatcaccaagtttaatcttatagtgatttccttgtctcttagtagacaagagtaaagagttgtccttgttttggatgatacacatatccttgttaaagttaaaggtgacattgtatccactatcatacaattgacttatgctcaacaaattatgcttcaatcctttaacaagtaaaacattattgatagaaggataataaggaatacaaaccttacctacacctattattagacctttctgattccctctgaaagtgacca

SEQ ID NO: 58961 - DNA, 284 bp, Glycine max
  unsure (1)..(284): unsure at all n locations
ctcaccaaanggnggtccttctgcttcttggaagggaccacacgatatggtacttccgcaccttcattcacagcttnttctctcttcttctctctaacttgtacacttctactcctctttacattcttattattatcatctttttcaaactttttattttctttttctttttctacttctatttctttctcttggtcatttactttctttttcttgaccattattctgttttctttttcctgattgcatccacacttcacaatgtcgttcttataataccacct

SEQ ID NO: 58962 - DNA, 128 bp, Glycine max
tcaccccaataccatcttcatcttcctcgttcctcctatttggcatcatcccgacgcacaacggatatgcttactcactccctcgcttcatctcattaaggtggaattggtcggggagagagtttttg

SEQ ID NO: 58963 - DNA, 311 bp, Glycine max
gagactatataactatgtatctctctcactctaacaaatggaaatactaatgtcgtgaataataatgaatgaaggctcctacattaccttattaatactactacacctcgacaacgactggaggagattacttgtatccctgggtgaagattaattctctagaacgctccacacattctaggagtctctacactgggatacttccttccatatgcgttcatactctaccataaagcaccacacatctccacaatattccagaggttcgcacattcttccacgagcttctagcgagttctacgctactctag

SEQ ID NO: 58964 - DNA, 429 bp, Glycine max
gcttttaagcacagaaactctagtgagtgtgttggagagaattactaaacgacaaagaatttgatggcctatgttgctggagaaaattccaattttctcaaactcaagaagaagaaagctgagggaaaaggaaaacaatcatgtttcagtccaaaacaagagaggacgcaaatgagagttgagattcgctcgagtgttgttcaccaaaaagaaattactgtaatctattgcatagaatgaaattcagaaattactaaatcaaatggaagttgtaaggtgacatgtaccaaatcaataaaataaaacggctgataggtgaaacccaattctggttggagaacagtaacaagtactttatatactgcgtataatttaaatctgattgaacgtttattaaggttgggacagaattatttcacaggcagacat

SEQ ID NO: 58965 - DNA, 438 bp, Glycine max
  unsure (1)..(438): unsure at all n locations
agcttcttagtctcagatgatgcagctgagtttgtatctatctcatgcactcctctaatgactatagcatcatttctggcgctaaactgctgggagttggaagccatcttctcaattaaatttctggctttagcaggagtcatgtctccaagggctccaccactggcagcatctatcatacttctctccatattactgagtccttcataaaaatattggagaagaagctgctccgaaatctgatggtgagggcaactggcacatagttnttaaatcgctcccagtactcatacaggctctctccactgagttgtctaatacctgagatatctttcctgatggctgtggtcctggaagcagggaaattnttttctaagaatactctcttaaggtcatcccagctcgtgatggaccttggagcaaggtaatacagctagt

SEQ ID NO: 58966 - DNA, 437 bp, Glycine max
  unsure (1)..(437): unsure at all n locations
tgaacttctttgctttcctcagggacttcaacttctttcccacttatgccttttagctntgggagccaagttatcccttgcgtcctagacttcaaccacttgtgatagtcgctgatgacgccatttctactaccctaagctccttatctttcctttcccttgtattccaagatttacaaattctctgaagtatctttgcattggcttcattgaaacctcgtgcaacaaaaggcgcgatgatctcctccgatggtgcacttctcatagggtaacctgggtatcttatggccagcatgggattataattaatacaatcccttgctctaatcaaggggacatttgggaatccttcacataagcataacactcctgcccctccttcttttcatcgggggaaccagctaatggacgcttgttagtcgatgaatatgactaac

SEQ ID NO: 58967 - DNA, 431 bp, Glycine max
  unsure (1)..(431): unsure at all n locations
agcttcctcaattnttatggattgatgctcttatgactatcttcgnatatattaaaccgagttccaaccaaggctgtctcaaagacacattttgagttattcaagggttggataccaagtttgcgacatatacgcgtttggggatgcccgtctgaagtaagaatttataatccacaagagaagaaactagaccctaagactattactggntatttcattggatatgctgaaatgtctaaagggtataggttctattgtccatcccacaacactaggattgtgaaatcaaggaatgcaaagtttcttgaanatgacttgatcagtgggagtgatcaatttcaaaacatttcttctgaaagggatcactatgaagctgaaccttctgggacangtaataggtngtagtcattctcacccctcaagtaaaatgg

SEQ ID NO: 58968 - DNA, 403 bp, Glycine max
tgaatactaagctatacacgataagtgtgagggggcaaacttaaaaatgagtttacatatcttcttggtctaaatgagagatatatatctgccatgagaggtgatattgctcgagtcttgtctggctatttatgataggatgccttctagcaggggcaggctaaatatgtcctataccttgcgaaagtttgatggctagtgtgatacatattgttatggagactattatatgccgtaacaaagtgggctcaaaaactgttattttatctatctatctcacaacgttctcctttattctaaatggtggagaaatgcaagtggaccgccgccaccaccacactagagagggcgtgttcctcctgtgtggaaagaaatatgtatatctatttgaaacaatatgatc

SEQ ID NO: 58969 - DNA, 472 bp, Glycine max
  unsure (1)..(472): unsure at all n locations
agcttatattcctagcagtgccccttaatccttatgatctgtangaangnnccccttatgtaaagctcacccatgcacattgtagcacagcatgaatctcagtgcacttaaactntattagcttgcattaaatcttagctgcagctggcaacattttcactgggaacaagtactgggattatactcttctagctttgctgtgatattttcttttggattccataacaaaaactacttatattttcactcatgtgttatttggtcttagagtaactgatgctatccctcatttttttgacccatcatatttgtgataccgataacctctacctccattatttgaaacagataccttagaaaagtgttcctacacaaactaaaatgttgccaacaaattgctttcaaatnntgtgcttagtagagatatctcanagctctatatacgcaaaaccatacggattattgtatgcta

SEQ ID NO: 58970 - DNA, 412 bp, Glycine max
tgtcgaataaccatttaattaacctatctatgcatgcattttctatatccattatcacaaagactacctaccagcaaatcattgaaattcactcccagcaccacaagcttgcttgtcattaacaaaataaccgaatattataaatcttatgttcaggatctcttattcattcaacctgctatgataacataaggaagctgtgacattatggcattggactgcaacgacactacatcaggatgctataaccacataacaaacactagagagatcctacagttaagcgcaatttttgattaaagatctagtgatgttatttagaactagcaagtctagtaagagtcaatactcaataaaccactactaaccttacatgcgagcaatcatgaatcaccactcatcagattttata

SEQ ID NO: 58971 - DNA, 431 bp, Glycine max
tatgcgcacacttctttacgaacgttcacttgcacaagatattcttattactaagaaaaatgcacccatatacaatcaatgcaccttcgttacctatattattcacatgtacttccaaggtgtatttgttacctacatcacacacatttcctttgctaaattcacatacatgcatactctaagcactttggctatcaaaaattgcatacgtgcacatcttggtatttctcatacctatacatacacaaacttcatgatgaatcttgactatctacacaataaggtgctacatttcatgcttttttcaagtgtttttactacctaaagccgcatgcaaattgaagtatattttcttttgctcactaaaattgtattcaaattaaaaggtatttgtgtaatgtattctctttacataacatgcaacatattta

SEQ ID NO: 58972 - DNA, 227 bp, Glycine max
cattatgatctctattctccatttgattcaacctctcatggagcgcatcatctcgttggttcattaacctctccaaatgttgcatcaaagcttgcatttggaattgcgaaagccccactccatcattaggattagtacctgacatctcaaacaaacaaatcaaacgtaacaagacaattatagttgctggttgaatacctcacccactcaagtgtatcacacaatta

SEQ ID NO: 58973 - DNA, 300 bp, Glycine max
cagttgtacgtgtatttgaaggagtagagagggatgcagtgctatgagaggaaagcaaagtaggcattccaagggtcattgacgagcgtgatgggaaggaggcagtgaatggcaaagataagggttggggacgcacgaaaggtgtgtttagaggagatgaatttgttttttaaaaaggtggaaagagggcatctgatgttgttgaaggggtctgtgtggatgtaaatgttgaggaggttgggaggggtggaagagaagaatttgtcccataagggggagaattatatatcagtgtgggtg

SEQ ID NO: 58974 - DNA, 431 bp, Glycine max
  unsure (1)..(431): unsure at all n locations
gaactataaaactaagctgtccaaaccggtgaaatgttagggtccataatttttaattaagtcctgcagagatagataacactatacagcatgaagctctcataataaaatacctcttttgttatggcagatactttactatcaagcaaacaagataaataaaattagaaagatacccacgaaagatgaagaaacacttgagaattttcgttctagtaactaatttgttagaagatttgcactgctagatcctcccataaccaatctttcctgaaaaagcattaatgatttaccattcttatttcaaaaatattaaggttaacttttatggactataataatggatcatgttattcgaaagaaaatntataccatcatcaagaaggagaatgatactttaataatgatacttctaattgtaccatcaaaag

SEQ ID NO: 58975 - DNA, 358 bp, Glycine max
agcttggttgtttattacttgcatgtacttatgatctgatgcaagtggggatggagtcacgaccgactgatcgttgccccttctctgcgctaaacaaacagagaacgtcgctgcaagacagccccgtatcctttgtattcgcagttttcttttactatttggttgtcttaagaagaaaataataataaataataagtcgacgcctaaattctaacttaagtaagttcaagttaggcaagacgctaacccatgagaaaggaggggacatggttaatgttcccctcaaaaaaaaaaaatgcaggttagctcgcctgggcaagctgagctcgcccgggcgagccacccctgcaccaaaata

SEQ ID NO: 58976 - DNA, 391 bp, Glycine max
  unsure (1)..(391): unsure at all n locations
tctatagaaggttcggtcctaatttctctacaattgcgtttcctctcaatgagctggngaagaagaatgtggcatttacctggggtgaaaaacaagagcaagcctttgctttgctcatagaaaagcttactaaggcacttgttctagctcttcctgacttttctaaaacttttgagctagaatgagatgcctctggagagggagttggagctgtattgttacaaagtgggcaccctattgcttattttagtgaaaaacttcatagtgccaccctcaactaccccacctatgataaagagctttatgccttaataagagccctccaaacttgggaacattacctctgttacaaggaatttgtcattcatagtgatcatcaatcacttaagta

SEQ ID NO: 58977 - DNA, 313 bp, Glycine max
tgggggcaaagaaattttcttcccatcaaaccctggatgcaactatgatcgtatacccatatcagctacatcttgacgggtattcaagccatcctttgtcttgccttgaatgttaaggaacgtcccaatgacactatcacagacatttttctccacatgcataacatcaatacaatgtctaacgtcaagatcacaccagtacggaagatcaaagaaaatggacctcttcttccatatgcaactttgacttttatccttcttttgggtcttcccaaatacagtattcatgtgttcaacccgctgatatacctac

SEQ ID NO: 58978 - DNA, 393 bp, Glycine max
  unsure (1)..(393): unsure at all n locations
cgcttgcttctacagtgttgttctattgaatagctactcctatttttgaaactcgaggttaagctaaggaccttttttggtttctggtgcaaggattggggaactcgtggtgacctgaggtacatttcactgccagtctcaccagcattgtcaccgttgggttcgaggtaagattcatgtcttcattgtaactttgtgctttcgtgtacatggtctttgttcttatagattgttagttagtttgttaatttgttactactactagggtttggaatgcagctagtttggcttcgaaagctgtgtcaaaatattgccttattttgttgagttgttgcttggaagcatctactntcttccttcattggtgttgtgtgctcctttctttaatgctct

SEQ ID NO: 58979 - DNA, 383 bp, Glycine max
  unsure (1)..(383): unsure at all n locations
atgtgggtctgaaaaaaaaggcaaatttgatcatcctactangacgactgagaaaactggggccaataaagagggtgaggataaaggagaaacccatgttgtgactgccattcctgtacgaccaagtttcccaccaacccaacaatatctttactcagccaataacaaaccttctccttacccaccacccaggtatccacaaaggccatccctaaatctaccacaaagtttgtctaccgcactttcaatgacgaacaccacctttagcacaaaccaaaaacaccaaccaagaagtgaattttgcagcgagaaagcctgtagaattcaccccaattccagtgtcctatgctgacttgctctcatatctacttgataattcaatg

SEQ ID NO: 58980 - DNA, 412 bp, Glycine max
tcggaagaaagtgatgaggtacaagccctaaatgcagatcttggaagagcccgagtagtcgaagagaagttcaagtccatagccatcaaagtctgaaaagagtatgatgaactaagggacgtcaatatggccaccgctgaagccttggaacgagaaaccaagaaggcccgaaaggaagaacacgtgccagcaaagttttgaggggctttatagggcagcaatagtaagctcaagctccgaagaggtgaaaggaatcatcacgggtcaaaggcatgatcttgaaggacgagctaaaggcttaccttatgtcgaaaagaaatttgtcccaacagttaagcgagactgaagggaatatgtgggccgtcatcgatgagtgcaaagagaagttaaatctagcggcgactcacgagca

SEQ ID NO: 58981 - DNA, 325 bp, Glycine max
gaacatcattgatcttgacaatgtaatgttgcataagctcttatagccctggctttatcctgaatcagctgtgaacatcattgatcttgacaatgtaatgttgcaatttgtgtacatgctttgtccaaggctatatgctatcctttcctacatcatcttgaaagttgttcccaatgtactcaatcaaagtaattgtatatctggaatatgaatacttttatctgcattaaccctcttgcacaaagcaccgcatgcttacgatgtgatgacacagctaatcaaaacaaactaagcgctcatcctttaagtttgggtgaatctttac

SEQ ID NO: 58982 - DNA, 398 bp, Glycine max
  unsure (1)..(398): unsure at all n locations
tagtgcagggtttaanaaatccctttatgctctgctctgggatggcgcaaatcatatagtctcaaatcccaaacttccacaagataacatgcctttcaaccgttgctgctattacctctttttgttatgcattaattggaagcgggctttctctggcaagagttgtatcacgtatgagcttcacctatatctttccaaaagctgtccatcattcattccagaaaatatatgctacatttttttatcagcaaatgttagtttgttagaatgttaattttgttagcagagggattgaacatgtaacctttcttctttttccttctcctttaaccatccagcccactatatatctgttacaattttatactagatatttcctaagtcacttcattagctta

SEQ ID NO: 58983 - DNA, 351 bp, Glycine max
  unsure (1)..(351): unsure at all n locations
ccgctctngcgacttatcgatgaagagacggctntatttattctatttttggttggttatacaacatccctcccccataccttcgcatagcgaagagcctctgggcaatggggtacgaagtagaagtagatactatctgaacttggcaaagctagctaattatttgaatagtggttaccacttccagaactccttgtatgtttgttttagtaaaaataacttcaaaaatgacaatcaaaggtagcatatttttctttgctgcccatagtggttcgatctaactcaaacaagatcgtctccgggggaggatacttgccgcctaaaccaaaaaagttaacatatttttttaat

SEQ ID NO: 58984 - DNA, 328 bp, Glycine max
  unsure (1)..(328): unsure at all n locations
agctnntatctttagatctttaagtgcagattttcatgantatgatagatctcatccagcgcaagttgttgcagcccagatacgcacactgctatataaacatgaaggctgcacgagttttctaccaagtccgggattgaagagttattttgtgagttttgggacttgagtgttttgtgagccaccttgatgttaccctaacatcaagtgttggacctgagtgtgtagagttgatctctaatgttcagagagcaatctctggtgtgtctttgatttaattgtaaacaccggagagtgattgagagggagtgagaggggttctcatatc

SEQ ID NO: 58985 - DNA, 423 bp, Glycine max
agtggtcttcggcatcacattcaaacttgatccattgtctataagtacctttgcgacaacatggtccatacatctcactgacacatgtagagccttgttgtgtcctctcccctcaacgggaatctctttttccgcgaacgcgatataattgttggtggttatatgattaacgatgccttcgaaaccctccactgagatatcatgtgctacatgggcatcgttaaggacctttatcaacagcgcacgatgaggctcggagtttatgagcagttcaagcaaagagatccttgctggagttttattcagttgctcgactaccttaaactcgctttgttggatgaggcggaggaactcatgggcctcttccaaagtcactatgttttcttgaagaccctctttcttttaacccctcttactaccgga

SEQ ID NO: 58986 - DNA, 399 bp, Glycine max
  unsure (1)..(399): unsure at all n locations
agtcacctgcggcatgcaagcttaagtgtatccttattatgccattgttatactgttttatcggtatgaacgttccaagctaaggttttattggagatattccttattgcttaggtttgcatatcatatcccaaaaattaataaatttatcattaaataatataaaaatattaaagtacaaagaaatagacataatatntatatatcatctctatatattatcattnttccattntttacagctatctttcaatatttttaatactcattaatatattgagaaatgttttaaaaagtaaaatattattatatttgggttaaattcttatttcaagaatattacattggttgtgtgaaaatggatcactggacaaatcaatattacaaaagaaatgttca

SEQ ID NO: 58987 - DNA, 444 bp, Glycine max
  unsure (1)..(444): unsure at all n locations
ntagaatgaagaacaatcttgcaagtgatgcagaagcattctgactatccagtttcattgccctcagaatcagtggcaactgcttttccttttcccttaaccatggaggcatcaatgtccatatcggttgatgctggggtgccaggaagaacatttgaggcaatgtcacccttcaagggaggaacaaaagtgcatacagattcaagaagaagttctattgcattaataaaactttgggtaggttttctgtgacctttggcactcttggtatttgaatcttgaattttgccatggccattgccagtaggtgccgtgttagtattttccaaaacaaccttcccatcaatgttctgtactttatctttctccaatgttttatccttatccttttctttatccttaagcttgtctttatccctatctttcagcaagacaatgtatggg

SEQ ID NO: 58988 - DNA, 314 bp, Glycine max
cataaagtttttaagtttaaacctcattacagccattatattaattaaaaaaagatttggatatcgggtgtatttatgtattgctgcagtgtaatttgcattgtatgtaagacctttagtgggaagctctgtccatgcttataaaagttaatagacggcaaatatgtccacgagaccaatggttggtctgaaatatggatttttcagcttctacatttgcttcttctttattatcttaaaaacattcctgctaatattcatcatctggttgttgccttagagtagcatgactatttatagaatgcacacatttt

SEQ ID NO: 58989 - DNA, 422 bp, Glycine max
cagcttacaggactcacacattgataggtaaggatccttcttgcatgagataacgacgaacgggtcaacaaatacatgtaattcatactttttacttctggatgaacccgaatgaaaataacttatattttcttatttacattacaatctagtcctccattggttacactaatttcttcttagactactgaatttttgcaatctgtctcccttccttatttttttagcaatatcagcaacaaaatctactataacagagtaactaataattgcttatttatcaaaagctctcccacaaagatgacaaaaacaagcttgccattccaattaatggaagaaaagacccataataatggacctataactccaaaatggtttgcagacaccacaaaatgtgagctgttcttattatcatcttgatt

SEQ ID NO: 58990 - DNA, 424 bp, Glycine max
  unsure (1)..(424): unsure at all n locations
gggaacaagaatctaaaccttgttcttagtgaactgactcaattcttcctccattgttgngacccaagaatcttcactcaatgcttcattaatgtttttaggctcaatggatgagagaagatccatcattcctctttttttattcaaggatgctcttgttttgactccagaagatgtttctccaatgattagatttggaggatgtgaatagacaaacctcatatctctaggcatgttagcttctattttttgtccaaagctttgtctttctgaactctccctttttgagctatcttgtaaagatcttcttaattnttctttgggccatctangctacgtgtagtgttctgagtatgcctgatgatccttattcttttctagttcttctaaatctgcaatccttctcttctcaagtgtactatca

SEQ ID NO: 58991 - DNA, 446 bp, Glycine max
ctcagctttaggccttggatcttcttcatcaatggagacctttgcttcctgaatatctatggaagcagaatggagaaggaagaaagatgattggagacgccacttcaaggagaagatgagtcaaaaagaagctcaccaccataggaagccatggataagagcttgaaggtaggagaagatgagtggagggagagggagataaattttatgcctcaaaagaggtttgaaatttgaagtttaattctcaaatgatcaaagttgaaaaaatgcacacacgtgtcctctatttatagcctaagtgtcacacaaaattggaggaaaatttgaatttttattcaaatttcacttgaatttgaaattgaatttgtggagccaaaatttcactaattatgattagggaattttagctatgggtcaccccactaatccaggatcaagtctaagat

SEQ ID NO: 58992 - DNA, 355 bp, Glycine max
  unsure (1)..(355): unsure at all n locations
agcttgtagaatggctagacatgattcatgttatttcttggntnggntcaaggataanagggatgccccacattatttccatgacacaaatgcaaaaaatgatgagttggaaactttatgcaaaactggtcatgcatgcacctatgcggacactcaaatgtcaaatttttatggtcatgtgatgctagggctcaagattcatttcctctattttaatcaacccaatgtttccaaaatatgttcttttatcaatttgtgcattcatccgagtccatttcgggcgtctgggaaaatcttcacagcattcacccttcaggtgtatacacattnttttcaaaaactagttatgatcagt

SEQ ID NO: 58993 - DNA, 405 bp, Glycine max
  unsure (1)..(405): unsure at all n locations
tgtacgacacacattctaagatgatcatggataaccgccttataatgtgtgttgctcataaaaattacgatgggtttttattaaaacaccttcgctatctcaattgatatccagaatcttggtcttcaaccttgttttaaacccttcactcactcactcactcatgtctatcacttccctcaccatggctgagtcctacctcctctcttttccctcctcacattccatagcgactccctcatccagtccaacgctgactctgacctcctcgtcgccttcaagactggcgccgagctcctctacgagatccgcctccttagtgccttccagtgcatcaccgtcgcacgctttctcgtcgagaatcggtgtgacgggaaggctacgcangagcttgcacgtgcaatg

SEQ ID NO: 58994 - DNA, 347 bp, Glycine max
  unsure (1)..(347): unsure at all n locations
agctntgaatgcaaagtttattgattctgattttgtaccatccacctaattgtatagtgtgctttntggcacctcttgcctcatggcattaaaatcttcttctaggccaggggcatttcttgtgctccttgttcatgatgcttgatccatggaacagaagtattcagagcccaatataagtctacttttggaaaaatgagtgggtttaaactgaaggtttttcctgaatttgttggcatgctgtttgaaataaagatatctgtaaagcaatagtatggatttgtaaattcatgtggaaaaaggatttgatcatgttttggcagccctcatgtcttgtcaagcttctc

SEQ ID NO: 58995 - DNA, 430 bp, Glycine max
tgaggaatcctatggaacttctagagaagcttctatcactgccagactacacatgtgagtccgcttagaggtaagggatgagtttatcacaattagggttagaatgaacatgtgcagagattcttataggatcaaattggggtttattttgggatgtttattgtattagaattcttcatttatgattataataacgagattgctttatttgatggattaattgatgccctaatgcgaattggttgataaattgagtgctcatggtgtgaaattatttgaggggtcccatgttgtgagaagcatttttgtataatttgtttgtgttttggacaagatttactatattagctggatatattgttatattgggatcatgaaagtgtgattaaaattatgtgtaagtgataaatcgaatatgtgatgaattatg

SEQ ID NO: 58996 - DNA, 429 bp, Glycine max
tgcccgcgcgcttgagcactaccgaagaccccttcattgtatacctaagctcggcctatactcatacgcattagctatacgacgactacaccatagtatcaatcctacaggcaaaaccgtaaccttagcaaagggtgaccgattgcttgcccacacactctctgctgctgatggacaagctcacatgtactttccatgcgagcttacagcttcccccactgcttgcctgggccatggcaccgggagatgagaactctacttacacagaggtgcacaggctcctaccttattgccagcactcgattatctgatggccctcatgcctaagagctactatggccatcgcatcggcgatctgattctgactcgataaaccctgtttgctccccaataaaatgaggttgatttaatcctgtgtgtttaaaactc

SEQ ID NO: 58997 - DNA, 462 bp, Glycine max
  unsure (1)..(462): unsure at all n locations
agcttgtctgcctgattgggcccattctggtttatacttttgagcttgaaactcatggagctcatccccttgctcatctttctccccacttacacgcctccgattttcaagcgctctcccagtgcgctcactttattcatcaaattctcactcatcttcttcttcttccgacgcacacacaaacaacgcgtaaggactccgnaaagactttcctctctgcctttctctctctgtttacaaagatattttttctataacttatttaatacgcattgcattcactcttatctttttaaaagcacactatttactaccatttaaaaaagactatattcaacattttgtctctaacaaagttacgattttgcttctacaaaaatatgatcttcttatttgatatattgttttcttaaataacactcttttggaaaataatcttttcttcgtaataattgctattat

SEQ ID NO: 58998 - DNA, 426 bp, Glycine max
tgagtataattcattgtttgtgttatgagcctacatcattttattgttttattgaagtttctgtcacgatcaagtgatagttgatatctccatatgtgcgtacactgtgattatgttttcgtttctagaattcatttggagtatctactgttgattctagatgagtgatccttcttgatttaaaattattgtctcctaatcaatcgagtgttcatcttattattggctgctcatcttccaatcatgtctagttaaactgcttgataatctttcttgttgttacttctaatacgaataaagagagacttcgcctttgacaatcatgttaagatgttttgagaggaaatacttgagtagacatgatcattgttacctatagacgaaagtcaaacttagtaagacgtgtacctgtgttcctcgaggata

SEQ ID NO: 58999 - DNA, 311 bp, Glycine max
acctctctcaattacaagatcgattcgattcttgaccgccttgcagccatcataggtaccctgccttcaccgtgttctccaactcaccattctccctctgcgggtcatagtcctcgcatgaaactcaatgtgccttggttggatggccacgaccctcttggctggataattaaaatatcccaattcttcgattatcaggggatcccagagcatgagcacttaatcattgcctccttttacatggatggccctgcattatcttggtaccagtggatgtcccgaaatggtttttccctctcctggccaacaat

SEQ ID NO: 59000 - DNA, 104 bp, Glycine max
aactaagaaactcacgctacgaatcttgtacttgtggtctagccaatattataaatagttataaaggtcccatgagtgctatgaggagatggggaggggggcct

SEQ ID NO: 59001 - DNA, 311 bp, Glycine max
  unsure (1)..(311): unsure at all n locations
tatcaagcctagacaattgagcatacaagctacaggaaatagatggcanaccaattccaggaacttggaatgctacccatctaaagttctactttagttgacttactacaagaccgggtgttgtactctttttcctactcaagacttttgtcccaaaagaaaaaaaatcaaggtttgggcttgaaaggttttaatgacgcacatctggggtaacgaagggaattcgtactcaattgattatattgaataaagnttatctcccttcattctttaattttcttatgtcaacttaaccaaggcttactaaacct

SEQ ID NO: 59002 - DNA, 331 bp, Glycine max
  unsure (1)..(331): unsure at all n locations
taaaactcaagctgttacattaccgatggacattcattgccctaganaaattaaacggtgaacgaagngtgcaacataacattcaatatgggaccctttatcttctttaacattggaaaaaaaaaaacaaatacttcaaggcatttaaggcaactcaattaccaatataatttaaaaaatgagtcatttctttttctttttcagtataacctaagngacactatatactttatatacttccttanttaatatgtnagatataaaattgttaaattattccatccagtcttatatggctgacttttgcatgtggtctagcttaatatatact

SEQ ID NO: 59003 - DNA, 299 bp, Glycine max
  unsure (1)..(299): unsure at all n locations
agctttccaaatatgggagtttacaaaatttatatgtgtcatccaaagcaaaggtgtccacagtgatggcttcagccacatgtatacaatcatcaaattcctatacaacaggtcaacccatacaaaaacaaaagagtaaacctaacagtcagtcctagatacacccaccctcaaaaagtatataaaactagtccatggaactgtccactatgatgaagagcctccactggtcgccatctctctcgggccactatcctncgtagagtctgcctcagatgccgacatgacttcctcgggag

SEQ ID NO: 59004 - DNA, 421 bp, Glycine max
ctcagcttccagaataagatcagattcagactcagattattattcagagaagattaattaagataagtataaaaaagttttttcaaaaactgagtagcacatggatttttctcaaaaccattttaccaaagagtttttactctctagtaatcgattactagattattgtaatcgattaccagtagtaaaatggatttgaaaaagtttacaacgttccaattgatttcaaaatgttgtaatcgattacaatgttttggtaatcgattaccagtgtgcttgaatgttgaaattcaaattcaaatgtgaagagtcacatcctttcacaaaaaagctttatgtaatcgattacactgatttggtaatcgattaccagtgatagtttctgaacaaatcaaaagatgtaactcttcaaatagttttt

SEQ ID NO: 59005 - DNA, 471 bp, Glycine max
  unsure (1)..(471): unsure at all n locations
agcttatattatataataacaaanaatgaaatttatatcattatttaccttcatcatctgaaaccatntcattcattacattagcacattcagcaacaactttatagcttgtagaacctataaaaatacattactagtattagttcttgaataaacacaaatatcaatttaacaacatatatgaataaaactttacccgtattttcagcactccacaacaaacttctagcgcacattaaagcctctaaagtagtccattgaagtctactacgatgtgggcttaatacttgaccaccagtgctaaatgcagattctgaagctacggtagatactggaatagctaatatatccttagcaattgcttgaagtggtggatacttgacaccattaaacttccaccacatcanaatatcaaagtcaacagctcttggaaaacatcttcttctaatagtagctaactctgattaacat

SEQ ID NO: 59006 - DNA, 474 bp, Glycine max
  unsure (1)..(474): unsure at all n locations
agctngcatgagtatcgggaatgagaatgcatattttttagttctctntcacaaaataagtagctttacaaaccttgaaacaatattntcttaattaaaaagtaagaaattagaatgtaaaaacaattgactgtgtgtatatttctctgcatttgtgttgactctatagtctcacgaagacaggcaattttcgcctttctaatcttattcgttatcaagattaagatattagtcctcatcaaaaaaagattaagatattagcttaattaatcctttttccgactntacatgacattgaaaatgttccattcctagaaagaagccactggcaaattgacattcttcgtttggcccatgtttgaaaattttctcataaagcaaaaacatgtgatcgatttgatgccctcaattgaattnttagaaccactattgctttgttgcactttgtagttctagtcaatttcaataatcaat

SEQ ID NO: 59007 - DNA, 432 bp, Glycine max
  unsure (1)..(432): unsure at all n locations
tggacaatcctcaccttataagccggtgtcataggggttgatttangttcctatgcttaaattcttagagcttatttgaaataacttgtgtaaaggtttgggactttgggtcttgaaatatttgtgtaatatgccagagtagacaagacataagagaagttaaggttttatctgacaaggttttcctgtccattatttatgtagaatacatatgatgctcaaaattatcaccaaaaatgtattgccaaggtttggcctatggtgctatactgttacgagtatttagatgttagtataagcccacagtagatgtctttcaggaggcatcaatagtgcattaattttgatctgtctgaagatgaaccgctatattaataactcaatattcattcttgattcctttactcattattggacacttcattatatgct

SEQ ID NO: 59008 - DNA, 311 bp, Glycine max
  unsure (1)..(311): unsure at all n locations
actcgntataactcagctgtaatagtttccacctaatccaatgcaaccgctagctactgaatatgaacatctcgcacatttcccctaaaaaacatataccctctgtatgaactcgctcttattctaatttaatatttatgtcatgaagatagataaatagctctacaaagaatattttatttcttatatggtggacttacattggataaggtgttgtggttatggattcatgtctcttatagctaggatgatcaatatttgtatctgtaggctttggtttgtatctgcacagaaggaggctctcttttatc

SEQ ID NO: 59009 - DNA, 432 bp, Glycine max
  unsure (1)..(432): unsure at all n locations
taacagcttatgctaatatccaaagagttatttaatcctgaatggcttttattcccagcaagcaattataaattagctctgcatggaaaatcagtgttttacggaaataaaaacatggggatggatgcagccagaaaacatgcaagggaggggcaactaaaaataatcaaattttaacatacataattatattaataaattaataaaccatatcattacataattcttacataaaaaattaaagagatatatgtgnttgtgtgtgtgtgcacaaagaagttttcagggagggggaacaggcccacccttgtgcccattgactcgttgattcttctttatgaatacatacaatgctactcacacatacaaaaaataatggttntcactctatgatcatttttctctatatataaatgncacatgtatatgtat

SEQ ID NO: 59010 - DNA, 196 bp, Glycine max
  unsure (1)..(196): unsure at all n locations
agcttagggatggaatacttacttngtggtgatgatactttatcgcaaaacggaatcaaaaaatgcgaaaaaggatgaccctatggctgcaaatttgtcaatcccgtgggtatggcttttgaaagggggggaaaagaagtttttgaatgtaaaaacgccccccctttcgtcatttttataatttggtgcaggggtg

SEQ ID NO: 59011 - DNA, 373 bp, Glycine max
  unsure (1)..(373): unsure at all n locations
gacctatgaaactcagctataattatcgatacgctcaaaataacatcgaanactctcgttatatcaaatagncataactattcacacggatgtccgattcgggcgcataatatgtcgagaggatcgaaattgaacaacggaagctcttgagaaattcaactggtctaacctttcacacggatggtcgaatcaggcgcaatacatatcgagaccctctaaaattaacaaccgaagctcttgagaaattcaaatggtcataacatttcactcgaatgtcccatttcggcgcatcacatatagagacactcgaaaatgaacaacggaaactctcgtgaaattcaaatggtcataacttttcacactgaagtcccat

SEQ ID NO: 59012 - DNA, 337 bp, Glycine max
agcttgccatctataaaagcaatagataacatttatgttaattaatagatgtacaacataaaccgaaattgtaaaatgctcatatcatacaaatataccaaggataaagattgataccatgttttgttgaccctaaagtttcaacattttcccataaattttgaggaatcaaagaaatatcttcagctggtgagtacaagcaggcataagcaataagtgctaatgaaagttgcaagataggaccatcttgcgatggttgcgcattacacatacagcaaatgctatcagctgccacaagaaaagattgcaaatgatggcgctcagcaaatggaatgta

SEQ ID NO: 59013 - DNA, 349 bp, Glycine max
caagtcaacacactggcgcatgtcacatgacatttattaaattgctggctgataacaagtgactggtagagaggaaatgtgagaagccgcgaacacattaggtacaccacacctggatctcacatatcttattattttatcactccacaacataattatatctctcattatctcatatacatcctcacattcaaatacattatcaagatagctaccggagctgacggactgctacacccttcatcgccctaacccacatgacacaactacgaaatctcatgcgtgaatgaccgattacccagtcgcagaccactcacctgtgatctatctccatatataatactaaacc

SEQ ID NO: 59014 - DNA, 396 bp, Glycine max
tctggaatcatatcctccacaacgaccgcggtttctatttgctcacacatcataagtctttggaactaccagcatcctctattatcatccctccaaaaggctcttgaagttctacggccacaaagtcatgcattaggttagcagtaggccggcttggcgtattaataaattggctgcagtggtgactcacgtgatctctttatcctagcacattgatcattgccggaagtaatgaatatattctttacaggaaaactttctgttgggggactgtcatggcatgaaccatgagaaataggatttgtgctatcctcacttgagccattgctagttctagtccttaatgggtcgctcccaacctcttgagtgtacccacctttatcattaattactttc

SEQ ID NO: 59015 - DNA, 465 bp, Glycine max
  unsure (1)..(465): unsure at all n locations
agcttccattgctctntgcctagcttgtctttttattgttttagnttcttccgggaagcattgtttctacaacaaatggcctcaatctttgaatcaagtggaacaagttcttcctccaaatttctaccttgcatacaagaataaaagcactacagaaacaaattagcaaagttcatgcatttattgtaaaaatagaattttaaccaaagaataaagaattgatgcttaaaaggaagatttacaaactaacgagcacgaggaacaaagtcctcagcaacaacgccaaaaacttgttaactctctggtaagtgtaccaattcgtacaagtagtaataaatagtaagaccgagtgttgagtccacaaggactttgtttgggctcaaagtttgtgtatggccaaatttaagcanaggaatgaagaaaacttatatattgtaaggaaaagtgcagaaatataaagtcatg

SEQ ID NO: 59016 - DNA, 430 bp, Glycine max
ggtgcattcaataccctgatgaggatgtcccatatgttcttataactagactgatacacttgttgtccaagtttcatggttttgcaggtgaagaccctcataagcatctaaaagaattccatattgtctgctccaccatgaaacctccagacgtccaagaaggtcacatctttctgaaagcctttcctcattctttatagggagtggcaaaggactggctatattaccttgctctaaggtccatcacgagctgggatgacctcaaaagagtattcttagaataaattttccctgcctccaggaccacgaccatcagaaaggatatttcaggcattacgcaacttagtggagagagcttatatgaatactgggagagatttaaaaaactatgcgccagttgccctcaccaccagatttctgagcagcttct

SEQ ID NO: 59017 - DNA, 306 bp, Glycine max
  unsure (1)..(306): unsure at all n locations
ctgaagaaaacaaaagatgtaactcttcaaatgggtgttgactttttcagatagggtttaagttttttctaaaagtcataactcttctaaatggttctcttgaccagacatgaagaatctataaaagcacggctttgttttgcatttttaatgaatcttgctaacaatccaatcaattcattacaatccttcacaagccttgaatctctttgaatatcttcttcttctttgtgccaaaagctctccaaagttttctggttttttaaaccttgaaaactngtgctattcattcttntcatctcttct

SEQ ID NO: 59018 - DNA, 429 bp, Glycine max
cttgttatgggcgtccaaatgttgaccttcttctgacacttatcctttggaggttctacttcctgagaggggtccatccttgatttataaaatatattgagttggatgttgtttcaattgttttttctctcttttgacttcataacatttttccaagcatcttcaggtgatttttgttgatggatgtaacacccttaaatataacctttcaaaaaacccattagttttacttgaaataaaagattaacttagctcttattaatgttgacttgaatgttagaaaagatagcggaaatttcatcaaaacaaaaactttctaagtccatttcaaagaaagtcatttgatttttaaattgtgcagtgtaaaacatagtaaccatttggagcgttaaaacttgaattgacgagtaaacaagaatgaaaataaat

SEQ ID NO: 59019 - DNA, 326 bp, Glycine max
cttccatggcttattccctaatggatgacacttcctctcacctcttgtcctttgtctttcgctgcatctccatggtgggaaatcaccattgaaggacctcattgaagctcaaagatccatccttcataaaagctccacaagcaagcttacatcatatggtatagcaaaacaaagaaattgaactcttaaggatatggtgagaagaatgattagtcattcttctttgccagagtcactttggggagaagccttaaagaccgcattttacatccttaatagtgtgctaggtaaagcagctaacaaacacccttatgaactttggactg

SEQ ID NO: 59020 - DNA, 434 bp, Glycine max
tcatgatgatggatcaagttgattcaagtagttttgatgttgactaagatgaagacaaaaagcccacagaatgatttcaagattgagtcaacaagttcaagatcaagattaatttcaagtttcatgagaagaaatcaagaagattcaagaatcaagaaaagtttgatttcaagattcaagagaagatgaattcaagattcaagagaagaaatcaagaagacttcacaagggaagtattgaaaagatttttcaaaaaacaaacatagcacaattttggttttcaaaagagtttttctcaaaattttctaagttaccagagtttttactctctggtaatcgattaccagtttcctgtaatcgattactagtggcaaagtttgatttcaaaagcttttaactgaattcgcaatgttccaattgttttttaaatggtg

SEQ ID NO: 59021 - DNA, 428 bp, Glycine max
  unsure (1)..(428): unsure at all n locations
tctctttgatgaaatgtctatcaatctccacatgctttgttcaatcatgttggacaggattgtgaacaattgctatggccgacatattgtcacagtacaaactcatagtttcatttggtttaaaacccaaatctgatagtacatttttaacccacaaaagttcacatacatcgagtgtcatgcctatgaattctgcttcagcactagatcttgttactacggtctgttttttattcctccaagttacaagatttcctcctacaaaagtaaagtatccagaggtagatcttctatcatcttttgaacctgcctaatctgcatccgtgtacccttctaccttcaagtttccatgatttgagaacaaaattcctttntcaggagtggacttcaaatatctcanaattctctcgactgcatccatatgaagc

SEQ ID NO: 59022 - DNA, 447 bp, Glycine max
  unsure (1)..(447): unsure at all n locations
agctntgaattatgnncaacttaacctttatttattcatattncattctttaatatcttgaacatatatggaatatccatttcattaatttttctaactaaaattaataaaatgtaataagtgtcaaacaaatgttccaatgtcaaatgtctaactcagttgattgaatatgatacactgttttcgattctaacatataagaaaaaatacttgatccaatatttaaaaaaaatactcctatagctcacactcttttagataggggtgactaaggatacaatctaaactaatgacttgatgaatccaaatcaaatcanaggaaaaaaaaattaaggttgatttagtttactaatttaatctagattttaaaattctcatgacattggtttaaatatcggatttcaacatgtagaatccaaatcaatctcaactcatactgtattagtc

SEQ ID NO: 59023 - DNA, 371 bp, Glycine max
  unsure (1)..(371): unsure at all n locations
tcgacgccatctcactagcttccgcaccgttatgaccatctaaaactgccacaatcccgaccgcaacctccttgatcccgttcggacctgttccagcgtcgaacgcaataaattacaacgaatgcttcagacgaaacttctagaacacaaaccagggggagagagagtttggtaccggggaagggaatgcgaacatcgaggacgcagagagcgcgatcctcttgcgagtttctgcggccttggagcatggcggtttggcaacgcgcggtggtttggggaggggaatcgtaatcggagagcttccagcgggggcattntggggattggaacaccgccggagcaccgcccgtcttgtagacagtcaggcacgt

SEQ ID NO: 59024 - DNA, 424 bp, Glycine max
  unsure (1)..(424): unsure at all n locations
agctngngaggattgatggngacccggngtttatagatacgatgatatgggctacgtgggagtacgtgagctcagttggaggtgggcaacaggggatggtgggtttatgcgcgcattgtggatgtggaaaaacttgttgtgcaccatcgcccgaccgccacctagtaccaaggctgtgtaatcgattaccagagatggaaagccttaaaataccccttttacttgcatgtagtggttatgagacaaatcgtgtgcagcgcagttagattcttgtgaaagagtctacccctttctcttctttcttgtagatcgtgatggcggcgcagctaattcgtgatcgagtagagatggagtgcctagagggagcttgggagaccctcgaaggcaacacgaggtgccgatttcggggcaccattcgattcac

SEQ ID NO: 59025 - DNA, 438 bp, Glycine max
tgcctgcccgatgtagcagtaatgatggcctgagttatgttggggaatggttacgaacccagaataggtttaggcaaagacaacggcggcataactagcctgataaatgccaaaggaaatcgtgggaagtacaggttaggctataaacccactcaggcagatataaagagaagcatcgcgggaacgaagagcggtagtcaaagcacgcggttgagacaagaaggtgaaggaagcccaccctgccacataagtaggagctttataagcgcgggtctgggggacgaaggtcaagtggtcgcgatatacgaagatgatgttccgagtacattggatgtggtatgaccatgccctcctgatttccagctgggaaattggcgagtggaggaacgccccgacatttacgcaacgaacataatgtaaacctttacggttttaaaa

SEQ ID NO: 59026 - DNA, 431 bp, Glycine max
  unsure (1)..(431): unsure at all n locations
agcttcattgcctaacaagccaacttacaactgttagttccatgagactcaacataacgatgcacaggtcaaagttgagtatgtgaaaagattgtatgaccaagtaaaggtgcaaattgcaaagaagaatgaaagttatactaagcaagccaaatagaagcatcaccggatgacgccgatcgaacatttcctaatcgattgaatagaaaaaacaacagctgacatcggtcgtgaaatagccccgactgatatccttctgtcgacattgcacaatttcttttacaaacgctagccgataatgttttttatggtagaggaagttttttgttttggtgttgcataaaaaatntacaatgtaggtcggctgggttntttcgtgcgtgctcaaccgacgttttgtttcggccgaaactggcatgttcccatatatt

SEQ ID NO: 59027 - DNA, 357 bp, Glycine max
aatgacccactaacctagaatttttatttcttaatgccattaaccttgggaattaaaacaaaaacttaatggctggaggtaactaaaattgtggcaaccaaaagtcacccccaacagccaacaagtcagccaccatttggtctcccaaaaggctgatgcctatgttgccaattgggcccttattacaacttgaactaaacctactaaaaagcccttttagttgattaacccaaaacatatttttggtcagccaactttacaaggattgggccattatttatacaaactaaacactctataattgagacaaagtggtgtcatttagtccttctccatttgggccatgatacaactcac

SEQ ID NO: 59028 - DNA, 344 bp, Glycine max
tttctttttaaataatcctaattattctgggaccttaccttaaaatttacaaacttaacaatgcttatgtatcctattgggacatcttatttttctaacacttcaatagtctaaaatcactatccaatcacacaagaaagcactagccttgtctaccacacatgagaatttgatgttacaccaccgagcaagcgactcattaagtgtacgtttatttataatatacttcatgatgctcggttactcaccaaggtgtgacactacttttattcatgcctttatacttccctatcatctgaagattacatctttaagatactaagccaatgatactatgcctcact

SEQ ID NO: 59029 - DNA, 435 bp, Glycine max
  unsure (1)..(435): unsure at all n locations
tgttagtcgaaaattnttaatacttaattcaccccctctcttaagttattgaggccacttgtccaacaaatgacaactttcctttatgctgacacgagcaacagaaggtccaacctcagccttaggaaccagcacgagtccttatgattgtatctgcgactactcaaggtcattangagccatggatgaagaggtgtgggaaccccttaaagccagtccaaagtagtttttgatcataacaccggctccagctgcacgaacacgaccaaggagctctggttgcccaatggtagtagccattacatcccgacgtccatggacaacaaagcatctgatgcaatcctccctaggaagggaccagttaccagagccatgagcaagaggctccaagaggattgggctagagctgttgaagaaggcccgagggttctcatg

SEQ ID NO: 59030 - DNA, 357 bp, Glycine max
ctagataagataagatctagattaaataatatctagatgagatcaaatctaaataatatctagataagataaagtctatataagataaaatttggtagaataaaatagtttgccctcttcaagtcccagcccaattctagattcaagcccaatgcttcattaattcctgaaattagattaaaaacatcaaattagcttaatgagcccaaataataaaactgcctaattaatttgacaattaagactaatcaacaattaaaatggtgtaaaaaagattaagaaataggagaaaataatggcgcatcaccagcattgagagaaattgtgagaaatccgagagaagaagaagacagaaga

SEQ ID NO: 59031 - DNA, 418 bp, Glycine max
gaggatcccaaatatcatagaggccaatttgtagattttgtctttgagattatgaagaccaaggtgaagtttagtgcgccacacaaatagtatgacatatgatgttgcccaaaatgattcaaccattgatagagatgtatgtgtctataataactcacctaatttcgatgtaacttacatgaggatggatgtaaatattgacccctctattttgaataatatataatttggacttgggtcttattgcccaagcaatttatcaaaaaaaaaaaaaaaacttataactttttagttttattcccttttggcccttgaacatatattaaattttattcttattctattctatttaaagcaaattttcctttaatttatgtaattcaaattttatagccacttcaataaataactttatcaa

SEQ ID NO: 59032 - DNA, 310 bp, Glycine max
agaacattgcatgcaaatgtcattatacctaaagtgaggtggactcaatatcctacaataattaaacatagggtacctttgattcctgaagaagctaagaggaagaatgcaatagatactaagatggttgcttatttatcaatggactcaaccaaagataccaaagcaaaaagagagggatgaacaaagaacaagaaaggaaaaaaggatgaagaagaaaattggccctcatccatcaccaagtcttctaagacttcactatgaattggttgtgttgcagcatccatctcattccttctaacatcatcaa

SEQ ID NO: 59033 - DNA, 108 bp, Glycine max
  unsure (1)..(108): unsure at all n locations
aggaggcgaaaagaaagcgagacgcaagaaaggcgcacacagcggagaagaaagaaaggganacaaagcaagccaaagagaagcaccaacggacgacgccgagcgaac

SEQ ID NO: 59034 - DNA, 415 bp, Glycine max
agtaatgacccactaaccgagaatttttatattttaatgccattaaccctgggaattaaaaaacaaacttaatggctgagtgtaactaaaattgtggcaaccaaaagtcacccccaacagccaacaagtcaaccaccatttggtctcccaaaaggctgatgcctacgttgccaattgggcccttattacaacttgaactaaacctactaaaaagcccttttagttgattaacccaaaacatatttttggtcagccaacgttacgaggactgggccattatttagacaaactaaacactctaaaattgagacaaagtggtgtcatttagtccttctccatttgggccatgatacaactcacaaccttgcacttttctccttgaaacttgtgcttgattcaaataatatggacaaca

SEQ ID NO: 59035 - DNA, 407 bp, Glycine max
agcttctgttttcaattacgagcgtctccatatattattggcctcaatccgacatcggagtaaaaagttattgtcgttagaatttgctcagagcttctgttctgaattttgagagtctcgatatactacggaacacaatcggacatctcagtaaaaagttattgtcgcttgaatttgctcagagcttctgttcttaattacgagagtctcgatatattacgggattcattcggacatccaagtaaaaagttattgccgtttgaatttgctcaaagcattcgttgtcaattacgagcgtctagatatattacgggattcattcggacatccgagtaaaaagttatcgtctttttattttgctcagagcttctgtttcaatctcgagcatcttgatatattacaggact

SEQ ID NO: 59036 - DNA, 408 bp, Glycine max
ttatagcaattcagatggtcataacgtctcactcggatttcggattcaagcgcataatatatcgagacgctcgaaattgaataatggaagctattgagcaattccaatggtcataacttttaactcggaagtccgattgaggcacataatatattgagacgctcgaaattgaacaacggaagctctcgagaaattcaaatggtcataacttttaactcggaggtcggattgagacgcataatatatctagacgctcgaaattgaacaatggaagctcttgagcaattccaaaggccataacttttaactcggaggtacgattcaggcgcataatatctctatacgttcgaaattgaacaacggaagctctcgagcaactctaatgtgcataacttttcactcggaggt

SEQ ID NO: 59037 - DNA, 257 bp, Glycine max
gggagaatgtgaatgtatgtatacatgattttgatgatgtcaaaagaagaatcaaacaaggctcattttgcttcaagaataatacaagaatgtttcaacaaaccaagccttgattcaagatttcttcaagatcaagccttgccacaaaatgaatagattttcagtcatccaaggcacatgtaatcgattaccaatacatgtaatcgattaccaaggcacatgaaagtgtgtaatcaattacacatcatatgtaatcg

SEQ ID NO: 59038 - DNA, 227 bp, Glycine max
ccgcttgtgctttactatggagtgcgagtcctcatttatcatattcatcatgtggaaaggatagagatcagagttcttttgctgcagaaaggggctccgctaaggagatcccctttctccctatcttttttgagatggttatggataagctttgccaccttattctctaagttgcggatgaagggcacttgattatgatgagaatgggaaggcgggggggggctctt

SEQ ID NO: 59039 - DNA, 383 bp, Glycine max
tcatcaaccgaagcaactgaaatagacaatgaaggaatgacggaagtaaagccaaccatgataaaatttgccactggtcaaagagctgacattgaccaacccgttagaccaccaaacattggggacaaccaaatcaatttcccatttggggtccacaatagcctcaaccactaccaaatcgtgggagcaagcactgaggtcatctcataggatttctacaattatgcgtatcgataaggctttttggtatcaatgatgaatatattaaactattactcttttccttctctttgggaggaagtgtggtcgattggctcaactcgcactcacatcatccactaaccacatgggaggaagtcaaagaacaattcctcaatcacttc

SEQ ID NO: 59040 - DNA, 430 bp, Glycine max
  unsure (1)..(430): unsure at all n locations
tattgcannaaaaatgcttgacccttaaactcagcccctattcccttatttataggagaaaggggaggtggttgtcgcctagagacttcttaagaagattcctgagcgcacccccaattgataagttcacccctccagggttgcatactaattaagtttcctaagcgcacccccaattgattagttcacccctatccagggttgcttaccgattaagtttcttgagcacatcccctaattgattagttcacccccaccttctagagtgttctagatgaactttcttgagcgtaccccccgtgtttgacaagttcacccccattttgttttttttttttgctgttttcttttcgaaacgtcccagaactttatggattccacgacaatggatattaaacattttgaagtggtcaaatgaaggtccatagac

SEQ ID NO: 59041 - DNA, 446 bp, Glycine max
  unsure (1)..(446): unsure at all n locations
agctnttacgatggcgctactcttcttcttttattgtgagagaagcccacactatgctacaaacactatcaaagaagatcaaatagagatacatgatataaatggaagaagtgaaatagatagattaaatggagaattctatagacaatatgtactggacggttacattttgtttgtttattgttcatagtgtagtttccttcacctttctggcctttacattgttgtctagtttagtttgtctgtgatagcctgattgtaaataatattgtttttaacttcttggctgtcaggatttccaatccttggagttgagtggcagaagatggaaaatcctgatttacgaatgtcaatgggcatgggaccagatcaaaaaggtgtgcgtatcagaagaattgaacccactgctccagaatctcatgttctgaagccatctgatgtaattc

SEQ ID NO: 59042 - DNA, 423 bp, Glycine max
cgctttgcggattggtcttcgccagtgaaaggatctaagtgtgatctgaaaagaagcaaatttaatcatcctgcttagacgaatgagaaaactggggcaaattaaaagggtgaggatgagggagaaacccatgctgtgactgccattcctatacggacaagtttcccaccaaacccaacaatgtcattactcagtcaataacaaaccacctccttacccaccacccagttattcacaaaggccatcccttaatcaaccacaaagcctgtctaccgcacttccaatgacgaagactacctttagcacaaacctaaaaaaacaccaaccaagaaatgaattttgcagcgaaaagcctgtatgattcaccccaaattccggtgtcatatgctaactggcttccatatctacttgataacgcaatgg

SEQ ID NO: 59043 - DNA, 410 bp, Glycine max
agcttcttccaacaacatatttaatgttatttattgttagacatgtcaaatattttgtcctgttattagtcttctgggtgaaagatgaacccattttttttttaagtagttgcaagaagttggtctcaatcaactattgaaattaggtgtattattttcccatgatttggccctttcaaaaaacagaaaaactacaagcaattttgggttcaaaaagcccaaccaggaacctcctatcctttgaaataccataaaagtcctatcttgcagccatgtcagcacacactatccagaagaaaagaaacgagtggttctgctgcaactccaaccgtgggaagagcatctccacattcatttccaaattatcaaacactaatgaaattaataccagccaaaaatttagaaacaga

SEQ ID NO: 59044 - DNA, 391 bp, Glycine max
  unsure (1)..(391): unsure at all n locations
tatcgataacctcttatatgacttattgngttttcgttttattaaatctttcatctaagcactcaaaattcatcatcaggtttcaatccactgctatcaatttcttctgtataattctttataagaaaatgaacatttattttgccgtagaatttttttgctgttaatagaactgttcaggttcaggaaataagtttctgatttgagttggcctttgttttgtgagatttgtatcaaataaatgctgattatcctaaaaaaattgtgcagaggacttttgttttatgtcgcttgatgaagaaacctgngaaaacaactgaaggtggaactgatgcactgatctgtgatgaaggggggcccagtagaagcatggtttctgactatgaaaatc

SEQ ID NO: 59045 - DNA, 457 bp, Glycine max
  unsure (1)..(457): unsure at all n locations
agcttctacatgaagcaaccagctcgcctgtgtttcttgttacttatgcttaagccaccagctcgcctaagagagctgggcggcaagctcctcccctattttggctataaaagggcatggaaggctgaaagaaggggttcaacaccctgggcaagcatatttcacttaaggcgcttttgtaacgtttccgtgacaaattctttgaacgttcttcaccgttcttcatcgttcttcgttcttcttccgcttagtgcttgcttttaaggatttgaatttgatttatggacccttaggggtcccctatatttgtttgtgcatcttcatctccttcttcgatcatcagtgatctttttcttttgttaaagtgagttntgaccgatggttcataacgtaatctcgcttaatcaaccgtttaataaaattcaaccgatcagttgtgctgaatctctcttaatca

SEQ ID NO: 59046 - DNA, 391 bp, Glycine max
  unsure (1)..(391): unsure at all n locations
tggcattgatagagtacaaatattatgaaaccgacggattggcagatgcttcaactaaaactaaaactttggagtatctgattagagctgatgctagtaaagtgaacaactttaggattctggaggaggagggcatgcatatgtcgaccaacacgaggatgaaagcttcaaatttgcttatgcaactgatctcatgtggctcaatattagtgaaaaaccatagttttggccttattccttcctataagcccatgttttatagttcaaaatgtcctttcttttgtgttgggggagtttgattgcttattgattgagcatttgtagtttaatatttttctattctttctatctcaattgacatctctttgactgttattttntcaccttaact

SEQ ID NO: 59047 - DNA, 404 bp, Glycine max
agcttgcaaagtaatgatcaacatttattattttatatttttaagatataatgcatgttgttttgttgagaaagctatgcatgaaggttgttttgggagagtttaagaatgcattgtgctaccattgatgcttcgattcatgcaaaaatggttcgatcaaattttctttgaggctacttgatgtgatgatagagaaaggaattagaccaaattttatcttacactttccacactgtatcactcctcccccaactctctcactaacttcaatggtaccgccgacttagatatgttttcctttcctcattacgccttctatctctcttggcttcccttggatgtttgtctctttcccactcccaagtcccatgcagaattggcccaatggtatgagtctgggtcat

SEQ ID NO: 59048 - DNA, 432 bp, Glycine max
  unsure (1)..(432): unsure at all n locations
ntctatctttctttccacctttttcttttgtgtttcagtgtagcatatgattctatttatttctgagttaataaagttctcagaggcgaacgaggggtgccatgaaacgcagaagtgtgtgtacttggacgcaaaagccagaagaattaaagtggggcatcaccaaataaccaaatacaaacaatgtttggtgctctttcacgaaaatgaacattccaaatataatatatagagagataaaaggattgagaacaactttttggtgggttagtgatcaaataacaataaatatacaaataaaccattttctcattcatttttttatatctattgaaatttaactcagttaattaaataattattctaaacttttgatatttgaatatgatttttataaactaatttttaatctttatcatatcccatgtatct

SEQ ID NO: 59049 - DNA, 435 bp, Glycine max
  unsure (1)..(435): unsure at all n locations
tcattaagaggcttcctccagaagcttcattaagaggcttctagcacactccagacaacttatcaaagatcccaacagtcagatcatggacaagtgtcttgtgaagttgcagaccaaatttcgagaagctccaacggttaacgaaggctgggcagcgtttttaccgaggtatcttcatgtagctntctctagaagcttcattaagatgcttcctccagaagcttcctcgtggcttctttgagaagctagatccttatctatccacactcctctattaactaaattaacttccttaaaaataattacagatgaaaataacgcaacaaataatcaaacatcaaacataattactatatatatatatatatatatcagggtgttacatgacctgttttggtcacttgtcttcaagatcataaacatttgcataaaact

SEQ ID NO: 59050 - DNA, 241 bp, Glycine max
aaggtatggacttctccaaagcggacctctccactattttgatacacataaaatctctgcccggagaaaaaaaaaatatctcctttgtctgacacccaacgggttcgcatctttttgtccgatatttacaccaaatctggctcgaaaaaatatcagccttttttggccacgactgacacacacatagggcccaataagactttttgaaaataagtcgtgtcttaccgaacccactattggt

SEQ ID NO: 59051 - DNA, 440 bp, Glycine max
  unsure (1)..(440): unsure at all n locations
agcttgtgcgcctgtcacttctccacactccaacttcttctagtgactcatgatttangttaaagagtatagaccttagttgtgattgcctaattgcttctattgtaaactcttcttgcttatcctaattctttctatgattagggggcctatgaaggtaaggtcccctaatatttttggtcaagaatttgcacaatgatgaataacatatcccccccccccccccccacacacacacacaaaaaaaaaaaaaaagagaaaaagaaacgaaaacaccctcatgcaagcaaacataccagataggatgacttctccatgctttttcatgtttgttatcacagnaaatgactttgtaacaagtattacttttcttaacatcagactattactaattccaaatctcttcattaatcggattagtactgcttggaacactccgt

SEQ ID NO: 59052 - DNA, 374 bp, Glycine max
  unsure (1)..(374): unsure at all n locations
cttgacgcttgagaaatactgactaatatgttgagcaacattgaccaatgctaatgccactttctccattacttgatactgagtttctggatcttgtaatattcagcacacgaagtatattggtcttagctcattattttcctctcggaggaggactgcacttatggcttctgcagagaccgagaagaatactatgagtctcttactagtgcttggtttcaaaagcactagaggggttgcaagcgtgactgtcaactgctgaaacatttcttcacactcatcgttccattgaagttgtatctttctaagaagaacatgactggnttggttatctcgatgatccttggtaagaatctggataatgatgttattct

SEQ ID NO: 59053 - DNA, 446 bp, Glycine max
aactcagcttgcaaagaactgagggaaaatcaagaacaagctggtactcacatttttcgcgtgtatgatatccagaccacaaggtttgaagtataggagagcttcaaccctataaagcaacggggcggacaaaagtggacagtaaacttgaatggtcgtcattgtcaatgcggaaggtattctgcgcttcactatccatgtttacacattattgcagcttgtggttacgtgagcatgaactactaccaatatatagatgttgtttatacaaacgagcacatcttaaaagcttactccgcacaatggtggcctcttgggaatgaagcagctattcctccttctgatgacgcatggacacttatccctgacccaactacaattcgtgcgagaggtcggccaaaatcaacaaggataagaaatgagatggattgagtcgaaccatctga

SEQ ID NO: 59054 - DNA, 420 bp, Glycine max
  unsure (1)..(420): unsure at all n locations
agctntacagcagatnttagnaatgttccattacttatnnaataaaaaacttaatgccattaacctagggaattaaaacaaacttaatggctgagtgtaactgaaattgtggcaaccaaaagtcacccccaacagccaacaagtcagccaccatttggtctcccaaaaggctgatgcctangttgccaattgggcccttattacaacttgaactanagcccttttagttgattaacccaaaacatatttttggtcagccaactttacaaggattgggccattatttagacaaactaaacactctaaaattgaaataaagtggtgtcatttagtcctcctccatttgtgccatgatacaactcacaaccttggactnttctccttgaaacttgngcttgtattcaaatagtatggacagca

SEQ ID NO: 59055 - DNA, 439 bp, Glycine max
ggagctgtacagcagattttagtaatgacccactaacctataatttatttaacttaatgccattaacctagggaattaaaaaaaaacataatggctgagtgtaactgaaattgtggcaaccaaaagtcacccccaacagccaacaagtcagccaccatttggtctcccaaaaggctgatgcctaggttgccaattgggcccttattacaactcgaactaaagcccttttagttgattaacccaaaacatatttttggtcagccaactttacaaggattgggccattatttagacaaactaaacactctaaaattgaaacaaagtggtgtcatttagtcctcctccatttgggccatgatacaactcacaaccttggacttttctccttgaaacttgggcttgtattcaaatagtatggacagcacttgttgaagagctt

SEQ ID NO: 59056 - DNA, 442 bp, Glycine max
  unsure (1)..(442): unsure at all n locations
agcttcaagaaacattttcactgttgttgtttatcttaacttcactagttagctctgctacacataatggctngtctagtgcaattactgctgctagtaaaagtcctaatgtagtttctaattctgtaatttcatcccctagcaatgttagcttgtggcatgctaggctgggtcaccctaatagcccatgtcatgaagctagtcaatcattgtaacatttcctcatctaataaaaatttccagacttttgctcctcatgctatatgggaaattctcacagatttccttctcactcttttatttttgtatactctcctttggagcttttttttatagacttgtgggggccttctcatttaatttcctatgctggtttcaaatactatgtcatttattgatgttttttccagatacacttgtgtatttcctaataaaaactaaa

SEQ ID NO: 59057 - DNA, 430 bp, Glycine max
tctcccctattttcctataaatagggggagaggtgaatgtattaaatgttcaacccttctggtatttcgagatcactaaaaattagtgaaaaaaaaattgtttccatgaagaaaatccaagccgaggcgcttccgtaacgtttccataacgtttccgtgggtaatttcgcgaagattttcaaccgttcttcgtcgttcttcggtcttcaaccggtaagttcccgaaatcgaacttttcagtttattctatgtaccctttggtggccttatttgttttcacgtgtttttattttcatttcatttactttccgtacccccttttgacgtgctttagtcatttacttaagtcattttctcgcctaatcaaaaaataagataaattttcaccgatcatttgaattgtaatatccgctaatttctattaaaatga

SEQ ID NO: 59058 - DNA, 291 bp, Glycine max
  unsure (1)..(291): unsure at all n locations
cgacctgcggcatgcaagctntatctttggatgaaaaaatattttatttcttttgtcattacnnngcncacagaaatgtatatgattgccaagatgcaccgctactgcatcaaacaataactttgggcaagacccttgtcctaatgtgttgaagcggttatcagatgaagctgtttgctctccacccaatcggatgggctgaatgattaatgaaggaagccacccttttacttgtagcatgaagtgacttaacaagacaaacgacaggaccataagtagataggtaaagtt

SEQ ID NO: 59059 - DNA, 416 bp, Glycine max
ccgcctcatcatggttcgaggtggtacgccgcctctttattttcatgatgcttctgagaaccgcgatcaacgatctcataccccaccaagttcgcaccttcatagtcacaaagataaaggctttgttctcagatcgccaaaatattaaccaggtctcactccagatcaacgagatttgggatggccaaatcaaccagctcttccaagccgcccaagagtatctccctgctcaaatatcccactcttacaagtccctcaaagttggaaagctcccaaagcacaagaacattgcggtggcagtggatggaacacaagaggtcgtggatcttttccaaggcatcaagctcagctggaagctcgttgagaaaagccccaaaagcgattctgatcaccgcgatcatcatcctaagtctagc

SEQ ID NO: 59060 - DNA, 444 bp, Glycine max
  unsure (1)..(444): unsure at all n locations
agcttatgcgcatatttccttacttacgttctcttgcacaagacattctattaactaagaaaaatgcacccatatacaatcaaggcagcttcgttacctagattatttatatgtacttccaaggtgtatttgttacttacatcacacacacctncttggctaaatttacatacatgcatactcaaagcattntggggtaccaaaaattgcacatgtgcacatcttggtatttctaatacctatacatacacaaacttcatgatgaatcttgactatctacacaataaggtgctacattccatgctcttttcaaatttttgctacctaaagccgcatgcaaattcaagtatattttcctttgctgactagaatngtattcaaaataaagggtatacattnttttgtaatgtattttctttacataacatgcaaacatattatgta

SEQ ID NO: 59061 - DNA, 355 bp, Glycine max
  unsure (1)..(355): unsure at all n locations
tccattgtaatataaatctagaataacaaaatgaaagcatttcatatctaattntgagttctcttttctttgaattcttgatcacaaacattaatgaagattcatccgaagggtatgagtatagttgacaacatgaattactttctcaatttagtgtccatattaaaacttcttttcctactcagttacgaaaattttcagtagtaactatataatgtaccaaaaagctactttctggattgtttggatttatacggtcatcaattgatcaagttgtaatttagaagattaacagaagaagtttcacaagcattaaccaatgagacataagagtggatgatgagtgcacacgatc

SEQ ID NO: 59062 - DNA, 385 bp, Glycine max
  unsure (1)..(385): unsure at all n locations
agcttgtatgcagaagggtcttcatgtattctattatagactgattnnttatgttttgaccatcatgctatacaatcttttagttctaatatctgatgactctcgtgtcctttcatccagataattaggggcaactctgaagctcataatatggtatgtttcctgccattagcagttcagaaccagaagatggctgagatacataattgtataattgataaactcatcattgtcttanattttcttatatcattttggtgtgagaaatgaggcatacagngtaaagtccataccctgcattctgtgtgtgttccatgatgtaatcgatcatatattccctcttacccagcggtaaggtcaagttcttgttacatgaacttatgta

SEQ ID NO: 59063 - DNA, 383 bp, Glycine max
tgacctttccgcacaactgaacttaatttcaaaaagtattattcccccgctcaataaaatcaggtcacaaagtttcaaaaagattgatgatagttctgatttcttgctggatattgaaagtgatattgatgagccagctcagattgaacaagaacatgaaaaatccaattaccatgccagaaagtctggttcatggatgaattacgggctcaaggaatttcgcttagttctttgcagaaaaatcagtgcagatgagagcaaattgaatttagaagccaaggtaaataaaaacctctgctttatctactaaagtgaattcagcaatctattcccattttcatctagatttttactttttgacagatcaagatcagtatggaata

SEQ ID NO: 59064 - DNA, 385 bp, Glycine max
  unsure (1)..(385): unsure at all n locations
ccggaccttaagcaccgcggctgcagcttaattgagcacttttatgttctttcttctgggaactatatcacaattaacttcatccttatatgtcccaatagagaaaggtactttcacttgttggttaactatcatttccccttgctcattgagccattggaagattataatgtttttggtggggaatgatagtgaggttcaacttggaaactacttttgtgctataacaattccaacaagatccactatccacaatgagagaacaagttttattntaaaatttgcatcttgtatgaaagatgttctctctttgggattgagatagatcacaagattgacctncaagacgccttccaaccattangaggtcacattctttggtggg

SEQ ID NO: 59065 - DNA, 461 bp, Glycine max
agcttatgatggttacaaaaggtaagataccacatcatataagtagtatataagaaaaataaaggtattagagtatagatatttcaagataaagaaaatgacttcaaccactcacatattaatgaaagtttccataaacaagatgatgtatcataatataagcaataagacagaaattgaaagggctacataaaaactgatatctccctaacttatcaaaatttaaattccccccttttgacatcaacaaaaaggaatagacaatggaaagatgatggtgattacttattggagtattgatttgtattgaggtaggtgataattacaagttagaagcacaatatttttattacaaaaaatactataatatatattagtggtgttaaagaaaagaaaaacaaaaggtaaagctgtagcttcaaaacaaaaatcttgacacgtggtaatgatacataatacac

SEQ ID NO: 59066 - DNA, 441 bp, Glycine max
tgtctcagcgtttatgcgagacggagaccaacatgctagctatcatcgccaagtaccaagaagagttaggtctagccacggcccacgagcataggattgcggacgaatatgcccaagtatacgcggaaaaagaggctagaggaagggtgatcgactctttacaccaagaggcaaccatgtggatggatcggtttgctcttaccttgaacgggagtcaagaacttccccgattgttagccaaggccaaggcgatggcagacacctactccgcccccgaagagattcatgggcttctcggctattgtcagcatatgatagacttagtggcccacataattagaaatcgttaggaaacttgtatggtctctcagaccttgactagatacgacttcctttttgaaataaaatgagttggtcccatgtttctatctccaaaagctt

SEQ ID NO: 59067 - DNA, 485 bp, Glycine max
  unsure (1)..(485): unsure at all n locations
atccttaagtcacctgcggcatgcaagcttgaacaatcccaacccaacctgggcatattcagtcattgagaacttgtgacgtacctaaacaggcgagctcctagcagtcaaccaataaaagaacaaagtccacgaagcaaggaggcttgtgtggcggctggccagctatgtatcttgggtggtatatgaaatttagcctctggtaatcgattaccattcgtgggtaatcgattacagggcttaaaaatggagacaggatgttaaaatggcctctggtaatcgattaccaatggtgtgtaatcgattacacagggtgacagggcactggtaatcgattaccagttgggtgtaatcgattacacagggtgacagggcactagtaattgattaccatgtatgtgtaatcgattacacangtgtaattttagtttccaatgtgcacatgctttgtattagtgttggggcactggtaatcgattacatac

SEQ ID NO: 59068 - DNA, 436 bp, Glycine max
  unsure (1)..(436): unsure at all n locations
ntagcaaagagacaaatattccaactgtttagagcagcatatgcttttttgagtgacaaacaatgcgtctaccagggaaggagagtctgctgatgggatcccccataaccataaatgagattttggatgttagcatttcgtttctaaatgaccatttagaggaaacactgggttcgacaaaaatagaagaaatccactcaaagtgtatcaatctcgcacaggtaagtgtttcatcctaattccgaaccatagatatgtcatgacttgactttgcaaattatttcctatcaaatcaaaaattacatgcgtgatcatggatcaataggacttcccttgggaatgggttcttttggtgggtttttttttcggcttttgtgtgtttttggcttttgatttttctggcttcttctttctctggtttttttatttagtgcgg

SEQ ID NO: 59069 - DNA, 447 bp, Glycine max
  unsure (1)..(447): unsure at all n locations
agcttatcgaggagggcatgaatgagnnaatgtatgactctatttcgtgcggggnatccaanttggaatctccaagtggctcatgttgatcctgtgggttggagtacccttgcaaaattgggtaaccttgacgggccattggcagtctcgtctcaatgaaagcgtagtaatggaatcatgtgggtttgttactacatgtccttttgagcttcttttgtaaatgttnttttggtacaacatgcacatgggaaaagagaaagcaacatcacattgcatatgtgcatttttgtgaattgtctaacttgtgtggtttattaagtggatgtcatgtgtggcttatgttgtacttatgttatatacgaatgaatctatccatagntatcataatgtatatatatctagatgttaaactatcgtggtgacttgtaatgtgataggacttatctc

SEQ ID NO: 59070 - DNA, 437 bp, Glycine max
  unsure (1)..(437): unsure at all n locations
cttganaagacatgactcttcataaatataactgtataatcgattactagaaacctgtaattgattaccagtgagaaaatttcagaaaaactttttgaaaagacacatctcttcaaactactttgaaaaggcacaatgggcctctatatatatgtgtctgacttcgaaaagaaagagagattattcagagaacttaattgtcaaattctctctaaacaactattggccaaactcttgcaaatctattgagaattcttctaggaacttcaatttgtatcatctactctaaaagagagaaatctttttgtacatctcataaactcagttgtaatcaagagattgtttgtctcttggcttgtgagaatcttgaacacaagggtgagggatcccaaggtgtgttcaaagactgtaaaggatttatagacatagtggaaaat

SEQ ID NO: 59071 - DNA, 394 bp, Glycine max
ctgcagctttaaataaggtcaagcggacatgttgatttttttgtgtatggaagcctaaccctagctaaaaagcattatttaattcacaatgaaaagttaaatctcaagctcaacatttcattaaaagaatgtgggcttttatcactagttacaattagttgatacaaaaagctaaaattcaattcaaacattttaaatgaggctcaagtcaaatgaaagcttgatctgaatggacattttgcaagctaaacccaaattgaggcatatttgaatcacgtgaaaatatgtccaaatttaattagtactcaaattttaaaactcaagccttaccttgtatcaagcgggtatacgctgagttggttggaggcttgatattaatcacacgttattataa

SEQ ID NO: 59072 - DNA, 449 bp, Glycine max
agaaactcaagcctttcacacaaaagttagtcgtaaatgacaactaacattcttcagttgttgcagctccagtttcaattgcatatgcaatcacagggactcatactgcctcttgagcctgaggttggtcctttagttgctcgtgtcagcacaaaggagagttgtgttgatcccttagggaacgatccaaacacaggtgactcagagaaatacgggttgtacgtcgaagaaaattatccccggctgttgccctagaaagactttatgagggatcaacaaccgttcacaacatctctttgtgccatgatcaagtcaaggttggtgttgagaaagttagagatgcagatgctcccattcttgtacccactgaagaggttcaattaatgaggcagacacttaacacctttgttgcttgaccgacacatcttgtcaagcgtgtatcataaaaa

SEQ ID NO: 59073 - DNA, 404 bp, Glycine max
  unsure (1)..(404): unsure at all n locations
gctgcagcttaactccttcactgccaagactcttatttttgattagtanccgngnggaaccttcacccgacgaagacactgacaaaaacttatcttctccttcttggacaaagtatggcaggctgggggcaagtaaattttcttcccatcagaccttggatgcaactgtgctcttatacccatatcagctagatcttgacggggattcaagccatgcttcatctcgccttgaaggatatgagcgtcccaatcacactgtcacaaacaattttctccacatgcataacatcaatactgtgtctaacgtcgcgatcacaccagtncggaagatcaaagaaaatggacctcttcttccatatgcaactctgactcttatacttgctttaggtcataccaaatacagt

SEQ ID NO: 59074 - DNA, 418 bp, Glycine max
aatactaagcttctccagaagcctcacgaggaagcttctcaaggaagcttcctatctctgtctcggtaaaatcaccctcatgcattcgttaacctggggatcttattgaaatttggtctggaggttcatatagcatatttccacgctctaaccgttgcgatctgcgatatgtcttttggtgtgtgagaaaagcttcttttcccgatagcagaaacacttgagtgtttcaagtcttatttttcgtgtatccttggaaagcaaccattcctttctccttctttgttccaaaacccttccccaatgtcccaagcttattctccaccacccacaaccactggtggctgccacaaaccgccgttgaaaccccacactgagaggaacccttcaattggagcgaaatcgttcaagcttgtctcgc

SEQ ID NO: 59075 - DNA, 420 bp, Glycine max
  unsure (1)..(420): unsure at all n locations
agcttgcacgtgtattgactggatattgatgattctttattcttaggtcnttatctttctgtcaggggagtttcactaggtcccatgtcaaccctctaacatggcaactaaaaaatatgagttacgtaaggataggtcattcaagtcttttttctaattgaatccagctagtatcactttcgtacagtatccttcttatcacggtaatgcgaagtgatgaataaattaagaggtttttgttttcttacaagggtgattaaattgaataagtttataataaaaaaaatattattattttaattttgttttgtgagttgtacttcatatatgcaacttaacttttatcataaaaaatagagacaatgtagttattaaatacagtttatgttttttttaaataataatagggctaaataatta

SEQ ID NO: 59076 - DNA, 432 bp, Glycine max
tgaagaaagagtcatagatgctttataaaatttataatttattgttcgcaattgcagcaggtattattgaactcatcacctcacgaacgaattctattaattattttaatacggctaattctttggacataaaacataataacttgcatttgaaggatcaaatcagtataaagtaaaataaaggaggtaaataacgagaaattgtttatctttgaaggacataatgagaaaatgttaagaaaataatcaaatactactgcccagttagatactttgacttggtgcccaacagcaattagagtgcatcgacaatttctattctgacttagtgtgcatgtgcaacagcaattatagctttcaacggtcaaggttctcactgccacattaactattgttgcccaagtggcacttatatatctacaatagtattac

SEQ ID NO: 59077 - DNA, 452 bp, Glycine max
  unsure (1)..(452): unsure at all n locations
agcttcaagaataatggcctcagtttattcttatgttataaggaaattcaatcaatagtcctccaatctttaatggagagggttaccactactggaaaacccgaatgcaaatttttattgaggcaatagacttaaacaattgggaagccatagaaatagggccttatatacccaccacagtagaaagaactacaatagatggaagcacaacaagtggaagcacaacaatagaaaaacctaaagatagatggtctgaagaggatagaagacgagtacaatataatttaaaagccaaaaacataattacatctgccctgggaatggatgaatatttcagggtttcaaattgtaagagtgctaaggaaatgtgggacactctacaagtaacacatgaaggcacaacagatgttaaaagatctangataaacacattaactcttgaatatgaacta

SEQ ID NO: 59078 - DNA, 433 bp, Glycine max
  unsure (1)..(433): unsure at all n locations
tatccttatggcttgccgtcggacctcacccnccatgcttttccggaagatttaagccaagcccctactttcgaggggcaacttgtagatgcaattggctttgatgttttgatgatgatcatgatgaggtgttgcaattgatgcaaatgggcttttgaagattaaaattcaagacaatacttcaagattacaagtcacaacatcaagatgatcactagaatattaggaagggaattcctaattgaattagcaaaggtttggccaagtgatttaaaataaaaagtgtttctcaaaggttttactctctggtaatcgattaccagaggatgtaatcgattaccagtggccaaatacgttntataacagctataaaaatttgaattcgaaattttaaaagctgtaatcgattacacaattttggtaatcgattacc

SEQ ID NO: 59079 - DNA, 174 bp, Glycine max
ataccttagcctaagatgcgttcacgagcgacctcctaggacacagatctgttcagagaaagcccgcgggctatgtacccggcatcaccaaaaactggttatctgctgccaagagggctactagctgaaggatgatcttatcccttcgcctctaattctggtgaaagcaattat

SEQ ID NO: 59080 - DNA, 423 bp, Glycine max
tcaacctagaggagacgaaccattccaagtgttggagattataacgacaatgcctacaagattgacttgcctagtgagtataatgtaagtgccactttcaatgtgtctgatctatctctttttgatgcagatggaggagccttggatttgaggacaaatccttttcaaggagggagtgatgaggacataaccaagggcaaggaccatgaagcacttgaaggtcccatgaccagaggcagacttaaacaagcccaacacatcatagagacaaggctggtcatttgtatagctgtcattgatgatgattgaaggcccaagtggagaaagatgaaggcccagaggcagaggcactaccaagactactaattgttgctgaaggcccaaactaacttgaaggcccaagttaaataagtttttagttat

SEQ ID NO: 59081 - DNA, 385 bp, Glycine max
taagcgactgagctgcagctgggctgggttactttgatttattttgttgacccaaagaagagaagctgaacacagacattatctaaaaatatgtggattaacgggtctacctgaaaagttgcatcaacttggactacactaattcagcatataaaaaatgattattccaccactatgtgatgtcaagcgtttcaaaacctgtcaaggtcatgaattctaccttttcttaacatgagcatgattactactaatttaaacattggagctttatgtactgctgactaatcactacactaaagagtatactatatgtacaaaccccctctttctatctagatagacattttccctattggatctacctcatatcatgcctgacattctt

SEQ ID NO: 59082 - DNA, 429 bp, Glycine max
  unsure (1)..(429): unsure at all n locations
tgtactcaatgaggttgtggatttatctaaaaaaaannaatagtattctttcattnttaaactagctagatatttcgaaaaagctattgtgactcacgtaattgtgggttctttgaattatatgttgggtacgtagtttgggcttttgtcaaaagtaggttatgaaatctcggtcttctcagtaagatccttttattctttcttacccaagttctcgttaagattcaaattacttctttgataatactattggggatctttctgaagtcttggaaatgtataacacctcttacggtatttgttagtgactgttgttggataaattaccaaattaactggatgtgtaaaatatctgaactgaatcaaactgtttcaaaatcaaaatgagcataatcagataaaccaaccgttttgagaaaaattgaacca

SEQ ID NO: 59083 - DNA, 439 bp, Glycine max
  unsure (1)..(439): unsure at all n locations
agcttctaaaattattccttttatttcatattcatgnnnaaataacttatttgatttctttattatataaaaattaagaattaatattcatgattgtaggaactaataaataaataaggattaaattatgattgagttaaattggagtaatttttacagataacttctattggatgaaaatagtgattataaagggattaatatccacttactaaattcatactaaaaaaattgttctctttaaaaaaaaatacaccaaagacttaataaaaatcttattataacaaagatatattttactctctaataattatgtgttatggactaataaataaataataattaaaaactaaattatgattgagttaaactggtgtaactcttatagataattattatttgatggaagtagtaattataaaggtgttaatattcaccc

SEQ ID NO: 59084 - DNA, 335 bp, Glycine max
cacttttattatccatgttcttgcacctataatttgacccaccggatctatcatacaattgaagccatttactgaactgctgatatgttttatagagaccttctctattattccatataacaacaaccaatgcgttttgccctgggtctctatcttcaaattagcgctaaatacataatgcattgagcttccgatcatatatatcaacctaacatgtggaagcaaagcgcaaaccaaacaaaataaaaactcgtgggatcaatcttcatgaagcctaattatttaaattttttaaaaactcataccaacatagcttatgaaagacatttgtattt

SEQ ID NO: 59085 - DNA, 308 bp, Glycine max
  unsure (1)..(308): unsure at all n locations
agctngntaagatacgacttagatgtttatgtctgcacacaaacngcaacacaaacttctgtaggccatgagtacacgagactacgcattccacttcaatncatttgcatnctcgtctcatatcacaggtgtgggacgaccactccatatcttcatgtgctcgattgactgtagacactctacagacacttcacttggacacaccttctcataaaaagacactaggcttggactgacgcgccttcctctacctaagagggggtatatgaaccatcgtagaacagcctgctatacgaaaatggttatat

SEQ ID NO: 59086 - DNA, 421 bp, Glycine max
tgacactataaaactcagcttgaacccgacggtgccgataatacgagtcttcatttgcattataatgggcccactccacctggactctctctctggacgactatttcatggaatcattaagtacatactgaagggggaggatacatatccccatgacagagataaaaggcatcctgattggatacatcatcccattctcgagggttagtgactttgctacatatagcattataaattaagacgttcgtgtaattggaaccctgactctctcaacaatatacggcgaacaacaacactacaatatatgctgctttatcaacatacattatgtggctcactcaggatcttccttactatacatagtgacactcacatgtgaggctttgctcgaacaatctttgatatgagacgggcattaaca

SEQ ID NO: 59087 - DNA, 403 bp, Glycine max
  unsure (1)..(403): unsure at all n locations
agcttggagagattctttgtatcagttaactttttaactntanaagntggntccaattggcttcctagttgtcagcttaccaatttggatgtgagatcatggcagttaggtcccagctttccatcgtggattcagtcacaaaacaaacttacatatttagacatgtctaacacagggattattgattctattccaacacagatgtgggaagcactttctcaggttttgcattttaacctctctcataatcatatccatggcgagcttgtgactacattaaaaaatccaatatctaaccatattgttgatctaagcacaaatcacttacgtggtaaattgccctatctttcacatgctgtgtatgggctagacctttcaaccaattcattcttctgatccatgc

SEQ ID NO: 59088 - DNA, 415 bp, Glycine max
tagcatttgccaattgccatgaagttatctctttctttttttctctcatcaaggtggagtggtatcatagcattgaactaagtcgatcgctctaatggtagtttgcgccttcatggttgggatgatgttgcaggttccggtttgttgttgagggaaaagatgatcaaccacgtctcgtgtgtgcataagagagtgtctatgccctctccacaacctttgtttcaacaattgacgttagtcgaaacttgatggtgagaatcaaaagagtaaaaaaaaaatgtgtttaattcataatatatattcgaccattgacaaattttttcttcaaagaaaatctttaatatttaaaaaattttattttaaatctccatcgttaaataatgacgtaccttcaatatctatttgaaacttgtct

SEQ ID NO: 59089 - DNA, 465 bp, Glycine max
cgcttgtagagtagtgttatagtcacatctatctctttttctattttatacaaattcgctgcttttttctttaatgctccattatctctgaatccttgtaaggatgacaacaatacttgtttacatgtgcatgtatgaaattacaaattcttggtcttaatacaaaattccttagggaatatatatgctggagatatttgtcattctcattcatccaagaacttgttattgcttacagattgaaatgaacgtagcatggcaacagggaaatctgataaaattctgccaagagaaaggaattcatgtgagtgcatggtcccctttgggagctaatggtgcttcatggtgttctcttgctgtgatagatagtccagtcctaacagacatcgcaattgctacaggcaagagtgtggcacaagagaattgctctttgagattctatgctcttggtttcttctaaccaat

SEQ ID NO: 59090 - DNA, 85 bp, Glycine max
  unsure (1)..(85): unsure at all n locations
accatagaaactcagcttanacagagagaatttgggggagaacgagggagtgcgggtgaggtgtctcactttgcgagggggggac

SEQ ID NO: 59091 - DNA, 475 bp, Glycine max
  unsure (1)..(475): unsure at all n locations
agcttgaatagcagatccagtgcactcagcatatattattttcaaccacaatgttccctaaaaattttgtgggattgagtaactaaaaagtaatgacaaaattgattagtttattaattaatggatgcctttttttatcggataatgaatatgtacttgttgcatgcattactctaagtaagttggcataggaaaaaataaataaaaaagaagcacaatcattactctaagtaataattatgtccacttcaagatggagttggatggaattatggaaaacaaagtaagaacagatcaagagaaaataaagtgatggatataatattgtaatgaacagattaaaaagagaaaataatgctgataatatgaaagtgtaaatagaagtatcatggttctaaggatattaaggcccttcntcaccccactaagcatcaacaaaaccacttctttctttatccaagaatgcccatatata

SEQ ID NO: 59092 - DNA, 454 bp, Glycine max
  unsure (1)..(454): unsure at all n locations
agcttgtagaagccgatgtgnattcatgtttactttacctttgaagacattaataagggggagaagtctacatccaaggaagacaatggtgagactgtttttcaaccagttcaaccgcctattcagaatctaaatattgatgttggtgtggaagcaatgctttccaagattattttgatgatgccaaagactcaagtctagaatcaagagtcaagcaagttccaagaatcaaagagtcgttcaatcaaagcaagtttcaagaatcaaagagtcattcaattaagattcaagattcaagtaaagaatcaagagaagactcaattaagataagtattaaaagagtttcttacaatattgaatagcacaatgttgttcaaaagaattttttcaaagaaaaatattttaccaagagttttactctcttgatatcgattaccagtagccaacattcttt

SEQ ID NO: 59093 - DNA, 440 bp, Glycine max
tggtcaatcctcacctcacaggccggttttatggagttgagtaaagccttaagcccaaaaaacttcctgttacttatattcaataatatatcttcctctctaattaactaactgttccaactagtcaactcagactaaccagtaaacacttctttacttggggatctgccaacaattttttgtttataaaatctcttcaagagacatggaaacaatgatatgtaagcatactactcatatgaagttctaatgaaatggtgtctatgacacaaaaagcacaaagtccagtatgaacacatggtttaggagagggcaaagaagagaaaaaaaatacaaaaagaataaattacctcgttaccctagcaaacataaacgtcccactacatctccatgcagggcctacaaaacataacctatatattaaaagtatggaaacatgt

SEQ ID NO: 59094 - DNA, 301 bp, Glycine max
  unsure (1)..(301): unsure at all n locations
agcttatttctttntgttattgatcctattttatttatttgtctgnntaactaaccctgtagatattaatttcacaatggaagtaaatgccattagaaatctagttgtctaattttttataattagccaatggacaattgtactatgatactctaattgataaattcataacccttgccgatggcaacgcgggggtggagccagaaagctcgggcttgcgattacactggaggaggacaaaggggggttcgggttttggaggggaagaggggagaatggcgcggacgactaatgcggagtt

SEQ ID NO: 59095 - DNA, 437 bp, Glycine max
cttggtctcgtgtcaactatgtatatttacgctgttattttattattataatattaagaaattaaattaaatgtttgcattttcaagaaacgtaataccgaggcgtcactttgatcgatgcattttgaagggtttgcttcaccaactgaagggtttcagcgatacacttctattctcatcctctccgtattgcactttgacacaaaacttatgcatgcatttggctgaagtttttttgctgggttcgacagttatttgcttattttggctgaaaaacgagatatgggttattttatccaatcccattctgaattcaaatgtgtaactgtttgagttcaaatgtgtgactgtttgagttcaaaagttgattctaataaatgcgccgctacaggtattgttgaacatccaatccaattttgaattcacatgtgtgactg

SEQ ID NO: 59096 - DNA, 235 bp, Glycine max
agctcgagatgaggaagtgttgtattgtgttacttcctcgctttattgacgaccacagagtggtacctggagatatgtcgcggcggtcaagacaccttgaggacgtcatgtggggtgcgtagtgtccaaaaccaaactagaccaatcccgatccgacccgggcatatacgtgcagcgagaacctgtgatgtacctaaacaggcgagctcctggcagtcatcagattaaaggaaaa

SEQ ID NO: 59097 - DNA, 404 bp, Glycine max
  unsure (1)..(404): unsure at all n locations
aactcagcttattattctttgccaagcgtgtctcactatcagattctcatagtattggagatgaagagcaatctgttatcttttgcaaaagctatcctcttttcattgcttctgacacctctaatatgtctaagagcagaatgaaacattcaaatgctaacaagttaggggagcatatctcttcaatagattttggatcttcttcagggagaaacctctttgaattttttctatacatacgagnnattctattcatacaataattcataggtaatagtctacgggcacttctgaatagccaaagttcacagctttatattagtatattagcaaataattcttcccttcttgatcctttgatctccactatgaatgaaaattgaaaaaaagtgattagacctgag

SEQ ID NO: 59098 - DNA, 451 bp, Glycine max
  unsure (1)..(451): unsure at all n locations
agctttaagtaagggggctctntcatgtggctatggtaatagaaaatggaatcctaaaatgtcaccttatatatctgcaaagtgtaagggtattcatattacaaatcttattagaactgctcgggaaaacatggttgttgtggggagctcaaccatgtattttgcatatttttctccatttagtgctgaaaatagaatttcatgttgaattggatgaacaaaacacttgtttttcttttcaattatgttcttgagtattggctttgttgagcatgcatgtttctgttttttcattttctttttagactcttgaagcttanggaagtctctgtaaacaagagagactctgcccaaaattccctaatacttttgacaaagttgtggtgtgaaatttgaagctacaccctgagagggaatggctatctttcgattttattgtgaacatgttcta

SEQ ID NO: 59099 - DNA, 433 bp, Glycine max
  unsure (1)..(433): unsure at all n locations
gttgatatctacactctaacatataattcatgattgtccttatatgcttctggnttcttgcttttgaagttagacaatctttagatttaagaaaccttcaccgcagaccaatgcttcacatctttctccatatatacttcttgaataagttctgtctctttgaaaacactccaagcgaaccattaataggatataagtctaaaagacttagaatttacttcttaaaagtttgttgtcattaaaacatctatttcaaaaaaagattctatttcaacaccctcaccgttgtgcttcgaggcaataatggaagatcaactccgcaaccaccctctcactataattggtagaacgggtctcatttgataaaataatatttaaaatattaatttatttaactcaaaaactcatgagctatgttacaaaacaagagtac

SEQ ID NO: 59100 - DNA, 427 bp, Glycine max
  unsure (1)..(427): unsure at all n locations
agcttccacaacatccaagcaattcaacatcttaacatcatgcactatcaaaaacaagaaaacagggcagaggcagaanactctgcccaaaacacaaaccaataccacagctttccttactcaaataccccagtaacattctcttcgttctaattcgttcaccgttggatcgactctaaaattttactggaggtccctagtacataagtctacattttgaccgttgggatctgctataaaacgtccagaaccaaatatgtacacccctttccacaaccagccatacacaacattttctgcacaaacacaattttctgctgacaaaatttgaagctttttgctgacaaattggcagatttcgaaatccccttacatcatcaaatttgccaaattggatctacagtctaaatatgtataatatatctaa

SEQ ID NO: 59101 - DNA, 374 bp, Glycine max
  unsure (1)..(374): unsure at all n locations
tagggggagaagtgaagtgtttaatggttcagccccttaagcacttctctctctttcgaatttgcttggaaaaattggttccgtgaaaaaaatccaaaccgaggcgctttcgaaacgtttccgtaaccgttctgggaggaatttcgcgaaggtttcgaccgttcttcgacgntcttcattcgttcttcatcngtcttcgatcttcaacgggtaagtacctcgaaccaagcttttcgattcattctatgtacccgcggtggtccacattgtgtttcgtgtatttttattctcngttcatttactttttataccccctttggacgtgcctaagccattttatttaagtcatttctcgtttaacctaaaaataaaat

SEQ ID NO: 59102 - DNA, 402 bp, Glycine max
  unsure (1)..(402): unsure at all n locations
gaacctattgtcgccaagcgcaattctttacggccataactgaggtcgataaagctaagtgccactcatggcagctaagtgagattcattgcggcaatatgaacgctaagcaagaacctctcagctaagcacatgctcctttgtacttaagatgcatcattttagctaagctggctagagccagacttagcgagtgttgcagcttttctaatctgcagacctcactaagcgaacttactcacatgctaagtcgattttctgttaaaaaaaaaatgttntcgaatttgaaacatctgctaagcgcacgttcgctaagcgagcctagtttataaaccaaacgtctctctttgctccttaacgcaacggtccgcttaacgaaagtaccgaaactgcttaagtgag

SEQ ID NO: 59103 - DNA, 433 bp, Glycine max
tgggctgctaatgggccctaccatgggcgtggagtccatatatacagacgctcctcttctccatctcaaccaaagattcaaagaaataaagctaataaaaaaaacagaaagtgataaccgataaagtaaacaaagacaaacagaatgccccaattagatatggttttatcctatgatatgatcctttttattgaggcatacgccaccgccccatgccaggtttatgggtcctaaacgtatttgaataatcttttaaatcaaaaggaaccgtctgggatatataataaggtcatgtattgcagcccgttattcttgcttgagtagttttcaaattgcttttgaataatcagcgtgtgtgtggcgagcatgataagagtccaatgtgattttgtcagacaaatagaaggaaaaagaggaggagggaggagtccaa

SEQ ID NO: 59104 - DNA, 453 bp, Glycine max
  unsure (1)..(453): unsure at all n locations
agcttgcccgaaagaaaattaaagcatatatgtctttnngttatcaaacgaatatggataggtctagttcaaaatgtgtaaataataataagggttaaataggtttttattcctttaaaaatgagtattntttttaatcctcaaaggtttttttttagtctttaaaatctacaaaatgttttttacagctaaaatctgatttttctatcttatattttaaaatacatttctagctgctaaaaattgtcataattaagttaggaaaaataatcaagaactcattaactgttttaaagaatgcttttttttttttattgatttgattctagcaatttcaaattgtcagaaaattgtaccttataatttgaaatggaaaaatgtaatttagcagtaaaaaatgtcaaaagtgatgaatctcttatttcttataaaaaatgtcagaagtgatgaatc

SEQ ID NO: 59105 - DNA, 369 bp, Glycine max
tgaaaaccacgtaaagcacaatcaactgcctcttcaaatttaaaccccacattacaattcttattgagactcttatatggttagccaagtggacaaaatgacccaataatttgataagaaccttcggacaatgccacctcactgattaagaacttactaagaagagcaacaaactaaggtagagctcataccttgttaactggcagcatagaaagctttgagctttgagcacccacgactgttccaagagcagtgtagggttttcttcaacccacagttccaacagcagtgtagggttttcttcgacttttcttcgataggaggttttgtgggttccagcgagcggtttccgacagtattgaaatgaat

SEQ ID NO: 59106 - DNA, 427 bp, Glycine max
  unsure (1)..(427): unsure at all n locations
tgaagctgcaagcttctncgaagggcatgggtatttccagttttctgattatatctaaaaatctcaccaaatggtggtccttctgcttcttggaactaccacaggatatggtactttcgcaccttcattcacagctttttctctcttcttctctctagcttgatcacttctactcctcttttcattcttattattttcatctttttcaaatattttattttctttttctttttctacttctttgtctttttcttggtcatttactttctttttcttgaccattatttgtttttctttttcctgattgctgtcacctttcacataaacattattattattaaaacccttacattgagcatacttcttcttgggcacgacactatcctcaaactccacactcataaacctcttactacttgacatcaca

SEQ ID NO: 59107 - DNA, 418 bp, Glycine max
  unsure (1)..(418): unsure at all n locations
agcttcttatccaaggctcatctnnggggngaagctccttcttccatggcttattccctagtggatggcgcctcctctcaccttttctcctttgtcttccgctgcatctccatggtggaaaatcactattaaaggacctcattgaagctcacagatccagcctccataaaagctccacaagtaagcttccatcatagacaccatgcatgagcttcaagcaaacctaggggtagacaagaagtcctcatcggataggttgaaaacctaaaaaggtggcctangcaaaagttatggaaatagaaaaggaaaaataatcaagggcgtgttatcaaaggttntgtcccanaatcaaaactgtaaaagtctctagtcaagaattgaaatgacacatggtcgtgtttcttcattcccaaacact

SEQ ID NO: 59108 - DNA, 229 bp, Glycine max
  unsure (1)..(229): unsure at all n locations
tgcatgatgcccttaacactgaatttgtgagattccatatgcaggaaagtattaatggtacaaaaagcattgcacgcattttgaaagtctncttgcgaaacccatcaaacactanaaccccctcgtcccacaactttctcaggtcttcaatcaacagacttagataaacatcaatgtcatttcctggttgtctttngcccgatatcatcatatacaacatcatgtattt

SEQ ID NO: 59109 - DNA, 456 bp, Glycine max
  unsure (1)..(456): unsure at all n locations
aagcaccgcagctgcagctctatcaagcaatctgggggatctctttttctgtctanccccagggatggggcctccctctcctcttcttctttgccttccgctgcatcttcatggtggtaaaatcaccatttgaagacctcattgaagctcaaagatccatcctccatagaagccccacaagcaagcttccatcaagtggtaatcagagcataagagcttcaagtaggtgctccttaaacctncattaatggtttgctttaccttctctatcattggtgggttcttcattttctccatgtatctcctcacatgtcttgtgctaaatggtgctaacatgattctttagagnttccaccgattaaacttgctatagaggctagaatttattttctatgcgtcacnattcttgttcttggtcttgaaccatgaattgtgttgagtttaagttcctttgag

SEQ ID NO: 59110 - DNA, 377 bp, Glycine max
  unsure (1)..(377): unsure at all n locations
atatgttgaacaaccaccaggttntgaaatattggataagccaaatcatgtttataaattgaaaaaggctttatatggcttgaaacaagcccctagggcttggtacgagcgtttaagtaagttccttttagaaaaggacttttctagaggaaaagtggatactactctttttataaagagaaaatcacatgatattntattagttcaaatttatgttgatgacattatttttggatccactaacgaattgttgtgcaaggaattctcccatgacatgcaaagtgagtttgaaatgtcaatgatgggtgaacttaacttctttcttggattganattaaacaaactaaggatggtatctttgtcaatcaatcccagta

SEQ ID NO: 59111 - DNA, 219 bp, Glycine max
tccaagaagagatcaagatttcaagaatcaagataagtatgaaaaggttttctcaaaaattgagtagcacgttgaaattcaaattcaaaagtgaagagtcacatcctttcacataaaagctttgtgtaatcgattacattgatttggtaatcgattaccagtgattggttctgaataaatcaaaagatgtaactcttcaaatggttttttgactttttc

SEQ ID NO: 59112 - DNA, 474 bp, Glycine max
  unsure (1)..(474): unsure at all n locations
cctgaggatgcagctgaagctatacatcatggnagntatttattgtttatgttaggngngangagcangcccttgaagactctntctgcacacgtgttatggcgactcgtggtgacaccataacaaaatcacttgatccaaatgctgcaactctcagtagagatgcattggctaatatagtttattcaacgctntttgactggtaatttctgtgatgtttatgacaatataaataagtttatatatcttagacaagctcactttaatatgcatgagcttcggcaattcaaataatgcaagcatctgttgatccaggattgtggacaagactaacaactctattgcgcaagatccaaattcaaataacttgattgtngttctagatatttatggatttgagagattcaagacaaacaggtgctttgcctataccctgtctttttccagngcttatatgatgtgagaatattaact

SEQ ID NO: 59113 - DNA, 459 bp, Glycine max
  unsure (1)..(459): unsure at all n locations
atcccagagtcacctgcggcatgcaagctngtttaatttggttctttttttggagcttaccattgtctcanagtgcagcagaattttcaatttttccaagcctgtcttcaccttatgtgacctacattcatttcattntcattcccccctagtgaagtcaaactcctcaaggatgaaaaaaatgctactagaactgaagtgcaaggaaagagttgtgtagtgtgtgcctaaatccttttctctgtcagtcacttacttgccctcagtagacactagccagtaggagcactctgctagccaaaagcanaatcaacaaaagagaaaagagaanaaaaaaaagatttactactttatgtttgttgttgggacagcatttattattnggtgttcagtttgaatgcagcgagcaattcatctaattatttatttattntctgtcacaagacatgaaatgattaa

SEQ ID NO: 59114 - DNA, 404 bp, Glycine max
  unsure (1)..(404): unsure at all n locations
agctaagaagtaagaatnttatgcaactaggtaataataatcaannntaatatggtttatcattcaaattataattattaaatccaataaaatacccaatcaataataactttaattcaaattttgctcaaaaaagtttatcatacctggctctcacataaacccaatagttttcctaagaggttgaagccaaaaatcttcaagatacaacacaagactatntaatctttataaagctatagcagttccagaatcaaagtccagcctttctatatgatacatgtgcagcacaatgcccacaagagaattgccaaagaagaagccatagaagctattgcataatacccacanagcctagaaaatcttgacttattgaatgccacaagtgcattggtggcacccga

SEQ ID NO: 59115 - DNA, 203 bp, Glycine max
  unsure (1)..(203): unsure at all n locations
tatacaacaaggcagcttcgtacctagataattacacgtactttccaagaggattttgtacttacatcacacacctgcatggttaaattcacatacatgcatactcaaagcatnttgggggtaccaaaactgcacatgtgcacatcttgggcattctaatacctatacatacaccaacttcatgatgaatcttgactatctac

SEQ ID NO: 59116 - DNA, 318 bp, Glycine max
  unsure (1)..(318): unsure at all n locations
cgataccatatgngngnaancgattacacagtgcaaatttgaatcaaatttattactgtggaatcagtttgggccatgggaaatgattacatcctctggtaatcgattaccaaagagtaaatttcttgaaaaagacttttttaacttatnattctggcccaaaccatntgctacttcaaattggaattcccttcatattaaatatactcttcctaagactctagaggctatcttgatcatccatcttgaatatctnntgattctttgtcttgaataaagctttgagaaacatgtaaccctttggcatcatcaaaaaca

SEQ ID NO: 59117 - DNA, 418 bp, Glycine max
  unsure (1)..(418): unsure at all n locations
gatcttaagcaccgcagctgcagctgatatattgncgtatttaagtactatttaatcaataaatagntaagacgcatttatcaataaattacctattgaatcataaaagtaactatttaaaaaaaaaactatgtaaaaagtataacaggttaatgggagaaaattgaagacaacgtcattagggatggaaccacgaaattgtattaggggggcgaatttttgccattaatgataatctaaaatttcatttaataaataaatatatatatatatatatatatatatatcataattattataaaaataaaaaaatcataattaattatggattcctttcttctttaaagggtggttatcaattttatatgtttgtggcgaaatttttgaagtctgtgacatatgaataagaaattaaaag

SEQ ID NO: 59118 - DNA, 191 bp, Glycine max
  unsure (1)..(191): unsure at all n locations
ctagtctataaatagaaacatgtgtaacacttgntgtaactctgatgaatgagagtcttgtgagacacttcaaagttccacttctctccctcttttattccttcacattcgtgctcccccctctctctttctctccctatttcttttcctccattgaagcatcccttcaagcttcttattcaaggctcatc

SEQ ID NO: 59119 - DNA, 362 bp, Glycine max
  unsure (1)..(362): unsure at all n locations
atgagattngaatgaaggttttatagatacatttntnttaaacattgagtcttggttagcttaagccttttaaaaccatgagactatatatatagatataggaagacaaaacaaanaccaacaatgaatgaaaacgtgatactagtgatatcttgctcaacaatatacgtcaaagactaaaatgaaataatggaatcaataattattattctaaacaatntaaatacattaattaacttcctgatattaataagagcgtgtgtatatatatatatatatgtgtgtgtgagtgtgcgtgtgtgtgtgtgcccnccncaaccttccattaaataacaaaaaatgcttttgaactctatcaaaaa

SEQ ID NO: 59120 - DNA, 415 bp, Glycine max
  unsure (1)..(415): unsure at all n locations
agccttgacaatgtacataaactaattcatatttattttcctgtcaaagnnctaatagcatgaactanaaagataataacattagctcgtgtacttgtcaatatcaattccctcttaatntgggtcttctatcttgtacttgtcattctgggtactcttccaaggctaccattgatccaagtaagctccttcttcatcttattagtagtggtagcagttacatgcatgcatgagagaagcacttttctactacattattttanaaagctccaaagaaggacatttacacattattgattaagcttgggttacaactttaaaaccaaaaaagaaaactaattttgcagaanaagagctnggttggtataaaatccttctggttgtaactatgatgccatgatacttacatactagt

SEQ ID NO: 59121 - DNA, 437 bp, Glycine max
aactagctcttgagaaacttcttggaagcagagcttatttctctattccctctcataactaagctcacctccttgagaagcttccataagaagattcctaaagaagctagagcttagctacacacacctctctaatagctaagttcacctccttgagatgagaagctagagcttagctacataccctctataatagctaaactcacccatatggccaaaaacatgaaaatacaaaaaaaggtcctactacaaagactactcaaaatgctctgaaatacaaggctaaaaccctatactactagaatggccaaaatacaaggcccaaacgaaggaaaaacctattctaatatttacaaagataagcgggctcatacatagcccatgggctcgaaatctaccctaaggctcatgagaaccctagggccttcccttggatc

SEQ ID NO: 59122 - DNA, 479 bp, Glycine max
  unsure (1)..(479): unsure at all n locations
acctgcggcatgcaagctagtagaattatggggtacccancacatgttgtactaggtttgngttcgtgcganggngcacaacaagtnttccacattcacaatgcgcgcataaacccaccatcctctgttgcccacctccaactgagctcacgtactcccacgtagcccatatcctcggttctctcaacaccgggtccccatcaatcctcccaagcttccacaacatccaagcaaaacaacattcacacagcacaagctatcacagnccagcaaaacaaagcaaaggcagaaaactcttgcaaaacaccaaccaaaaatcacagcttttcccactcaaagaccccagtaacaattccttcgattcaatttggtaaccgctggatcgactccaaaattcttctggaagtctatagtgcataaacctacatttngaccgctgggatctactagcaaacatccagaactcatttacattactc

SEQ ID NO: 59123 - DNA, 311 bp, Glycine max
acacggatgttcgattatggcgaatcacatatcgagacgctaaaaatggaacagcggaagctctcgagaaattcaaaggtcataacctctaacactgagttccgattcacgatcataatatataccgacgctcgaaattacacattggagggtctcgagaaaataaattggtaaatactttcacaccgatgtccgattcgggcgtataatatgtcgacacgctccaaattgaacaacagaagctctcgagatattccaatgcgcataacttctcacacggatctccaattcaggtgcatcgcatatcgaga

SEQ ID NO: 59124 - DNA, 413 bp, Glycine max
  unsure (1)..(413): unsure at all n locations
actcacaacacgtgcacaccaagagaaggggaatggacaccccaaacgaccaaaaaaaccattaaaagggacaactgtctaattttcaagcatgggcaccaccagaattttcctatacttctcttttataatataggatatagattgtgatactcgacaaatttttatttttgaaataattaattgacatttgggaaaanatgttaatggatgatgtgagttatgactaatggagggtcatgtcattaagttcatatcatttaaaaattggtgacttgacagtctagtcattgtcattgcaggtatccttattataaataaaaatttgtcaataacacaatagaaaataaaaataattggtatgtacaaanaccataatactcctattttataagtaccctaaaagaaaaaac

SEQ ID NO: 59125 - DNA, 197 bp, Glycine max
  unsure (1)..(197): unsure at all n locations
ctatatatatgtgacttgagacacgaatttgctaaaaagttttcagaacaaaaagggcttatcctcttaaaaagcaaaatcgttttatcctcttaccaattccttggccaaacacttgtgattcaataaggaattatttgagtgctcanattgttcaatctatctctttcaagagagatttcttcttctcttcttct

SEQ ID NO: 59126 - DNA, 463 bp, Glycine max
  unsure (1)..(463): unsure at all n locations
ccgagatgcagctgccaacattgactacagtttttgaaatatttatctccgctggaaacctacctaaagcgaaatggccttagtagcttgatatcagagcagcaaacaaattcagcttcaaatgtgcaagcacagacaaccaatgatagtgagggaaaacacaatgaggattgtggaaccgctntggttattcatgagagggaaagcagtcctgaagagaacagtgtgcaagacagagagcaaaacaattcactctcatgaaatcttgccagttatattataattcttttttccttttttttaactcaaaaatcatgttacaagaatccttgcatatattataaaattataggaggctcatttgcatgtctatataaacctttcttggtattggctgctggcgcttatggaagagaaaggttcccccaaaactcattatcctatatacgccagagcgtgtgtt

SEQ ID NO: 59127 - DNA, 217 bp, Glycine max
tcatgaaactcagctccaaactcgaacgcggaggacacatgaacagccctcagcaagaacattcatgtggctccagaataggatgagaatggaggattggcttgagggtcctctcttaggcaatcatgaaacacagcttcacactcaaaagtggaggacacatgaacagccctaagcataacattcatgtggctccggaaaggatgagaatggagga

SEQ ID NO: 59128 - DNA, 480 bp, Glycine max
  unsure (1)..(480): unsure at all n locations
ctctgaagcgagctgaggcatgcaagcttccttaagaagaaccttttatgctattgcttatctacacatacctctataatagctaagctcacctccttgagatgagaagctagagcttaactacacaccccctataatagctaagctcacccccatgactaaaaacatgaaaataacaaaaaaaagttcttattacaaagacaactcaaaatgccccgaaatacaagactaanaccctatactactagaatggccaaaataaaaggcctagacgaaggaataacctattctaatatttacaaagataagcgggctcatacttagcccatgggctcgaaatctaccctaaggctcatgagaaacctagggcctttncttggatctctagcccaatctacttggagttttctagccaatgcccttgcttataggaatgcatcatacttacccgttgaagactgaagaaaacgaaaaacgacc

SEQ ID NO: 59129 - DNA, 319 bp, Glycine max
  unsure (1)..(319): unsure at all n locations
cgactttttttctagttacttgctgattctgacagaaaaaataacatanaaatcttagctatagtagttatcattgactaagctcttaaggtagtcatgttagaaagcaagttcatcatttttctttgaaatttacgtacggcacctatgtggtctaaatgcccatttcttttaaaggttcatcaacaaatctaacataacaggtatggtgcaagccatgactatganaatcatttgaaaaaattaattatgcatacattaaagggacgcagtgaacgacagggtacacagaaaattatagaactcatagccttaactg

SEQ ID NO: 59130 - DNA, 80 bp, Glycine max
acgccttacaccatcccttatggcaccaataattgcttaaaaattactcccgcctgcactatccagactgttgaatattt

SEQ ID NO: 59131 - DNA, 278 bp, Glycine max
  unsure (1)..(278): unsure at all n locations
atttctacataanagtgaaacatacaatcttaaatgctcatactntgaaatagtggtaaacaacaattattgatgtggatctatatgtatgtgatttcagggtcattggagctattctcataataatgggactttactcagntctgtggggcaagcacacggagaacaaagagaaagaggcagagataactattgaggtattgaagtgttcgttaaaaaatgggatgacgttggagactatggttaaagatgtcaaaacaaacaatgacattgacatg

SEQ ID NO: 59132 - DNA, 283 bp, Glycine max
  unsure (1)..(283): unsure at all n locations
gatgttatctatgatgaanatggaagctggaattggaattcaacctctagtgaaagtcagtccaggatactgttagaagaagacacacctttaactgcaccaactgttaacaaagttcctggcataagaagatcatcaaggagaaggcaactgccattacctctgagggactatgagttgtttcaagactcataagtcaacttagagggagaattggctcattttgcactcatagtagatggttgacctattgatattgacacagtagtgacttatgagatgc

SEQ ID NO: 59133 - DNA, 323 bp, Glycine max
  unsure (1)..(323): unsure at all n locations
agcttgaaggatcatctaaatgtgtataattattagcttaataaaaacaatggttagaggatcttcccaatgacatttnttattttgcttctatgattgggtgttggcagatccttttgaagactccctntggattggaggacaagattacagatagctaatggcgttgtggctgcactgataaaatctgctttttaaagcatgtccaaaccagaagtgtctaatatattgagcttgaaactgcgctctttttattctattttctgcgacaataaatttgaataacctgaaattctaatggtcggttgagtttttcatagttg

SEQ ID NO: 59134 - DNA, 412 bp, Glycine max
  unsure (1)..(412): unsure at all n locations
agctngacttataccaaacatgacaagtttattatgttttcatcanatttcttcacaaataactatcatgaggcataaacctagtaaaactacccttcataactcccaaaacccaatacccaggaaaattcatgtgataagaagtctacccaaacctgaaatgtgaagtcccacaatggagaggtgctcttcatgactccgaaaatggcttcctttcgcgaattggagcaaaaatggtgtgcaaagggtggagctttgatggagcttcaatggtgaggaagaagaaaggaatagcaacgtgagaaagagagggagaaaagcttctgaaattttgggctgagtgaggagagagaacgtggcttttggtttaaaaggcttttcttttcttttttcttttttttttttaaaaaaa

SEQ ID NO: 59135 - DNA, 310 bp, Glycine max
cgaatgccgacgcaaattcggatggccataactttcgactcgggtgtccgatatatttttatgacatgttgagaccgtcgctggtgaaaaatgaagcccatcgtaaatacaaatggccataacctttcatccggatctctgcataatgccagaaacctattgagacacccaggaactaacaaggaagactcgagaaaattctgacacgcgaaagttttgatttggatgtccgattgagcccaataatatatcattgagctcgaaagtggaaatcgaatgccgacacaaattcggatggccataactttcg

SEQ ID NO: 59136 - DNA, 351 bp, Glycine max
agcttcttatccaaggcaattcttggtttgatgctccttcttccttggcttattccctagtagatggtgcctctcctctcctcttctcctttgccttccgctgcatctccatggtgtaaaatcaccattgaaggacctcattgaagcttaaagatccagcctccatagaagccccacaagcaagcttccatcaaaaggtcttttgtgaaccctaacaacactgcgagcagcaactatgtcggaccttgaaccccacaccagtgtcatagcacaacgatgcccaccacgcgtcgtcaatgtggaggcgcgtgagcgatgtgacgagggcctccatgacgaggctcgcatggg

SEQ ID NO: 59137 - DNA, 371 bp, Glycine max
  unsure (1)..(371): unsure at all n locations
accacaatttggatacaaatgcgatccacaattggttaaatacttctcattcgatgacaatggccctggtgcatttgatggttcccgagcatcttgtgaaagcccgattttgaccatcaatgtggaactaatcatgaaacatangaacaattgagaaatgttgctgaatgtagcccatagttgatgatgatcaaaggtcttattgttggtaatgactaataagctttgatggctttgaaatggttggtatgaagctatatttatagttcaaaagtagaattaacgtctaaatgtgaaccgcccggtcttaattgagtttaatgaagaaataaagacgtaagttaattaattaattgtctacaactaaaaac

SEQ ID NO: 59138 - DNA, 327 bp, Glycine max
  unsure (1)..(327): unsure at all n locations
cagcacgacttctttcgccttgttgcttgcctagcatagctcgcaatttctttcaatttgaaccttcacttgctcatgcaacttcttcacatactcagctntagcctgtgcatccctatgcctaaacatagcaatgttaggcatacgcaacacatcaagaggagtcaaaggattaaatccatacactatctcaaatggtgaacaattagttgtgctatggacangcccgatataagcaaactcaacatgaggcanacaggcttcccaagatttaagatttttctttaaacagtcctaagcagtgtgcctaaagtcctattgactacc

SEQ ID NO: 59139 - DNA, 329 bp, Glycine max
acaaatcgcgcataaacccaccatcccctgttgcccacctcccaactgagctcatgtactcctacgtagcccatatactcggttctctcaacaccgggtccccatcaatcctctcaagcttccccaacatccaagtgcaacaacattcagacagcacaaactatcacagccaagaaaacagagcaaaggcagaaaactctgcctaaacaccaaccaaaatcacaccttttctcacttaaagaccccagtaacaatatcttcgttccaattcgttaaccggtggatcgactccaaaattttactggaagtctctagtacataagcctaca

SEQ ID NO: 59140 - DNA, 339 bp, Glycine max
tgattatcctactacgacgactgagaaaacttgggcaaataaagagggtgaggataagggagaaacccatgttgtgactgccattcctgtacgaccaagtgttccaccaacccaacaatatctttactcagccaataacaaaccttcttcttacccaccacccaggtttccacaaaggccatccctaaatctaccacaaagtttgtctaccgcacttcctatgacgaacaccacctttagcacaaaccaaaacaccaccaagaagtgaattttgagcgagaaagcttgagaattaccccaatccagtgcctatgtgacttgtctcatattacttgaaat

SEQ ID NO: 59141 - DNA, 434 bp, Glycine max
  unsure (1)..(434): unsure at all n locations
agcttctacagatgtggcacagtggaacctctttggttgctatcccgaccgnngggcctgggccttgttcttcctttctgagatgttttccttatgtcagcctgcgtaggtttatagcctaacccaaacttctcgtggtttcctctaacacttactagcccgaccctaaccgccgtgttcttgcccaaacccattccgggctcatagctgtgccctaacatcacccaggccaccatcattgctgcgccagacaggcggngctgtctagggagggaatctacggaagcgatgcttactacctcaaaagattagaaagctgtttccaacgaactctccgcggctttcccatacggcatagaggaagagcaacttaccaggacatcttnctcacctgatactatgaccaaatgttctttcattacaaacttcagctt

SEQ ID NO: 59142 - DNA, 229 bp, Glycine max
  unsure (1)..(229): unsure at all n locations
catctcacagcacatcttttggtggtctggattcaatcaagctatatatatgtgactgagaccgaattgcagagttttagaacaaaggcttatcctttaaaagtaaatcgtttatctcttacaatgcttgccaaaacactggtgattcaataagggaatatttgagtggctcaaattttcaatcgatctctttcaagagagnattcttcttttcttcttcttcattctg

SEQ ID NO: 59143 - DNA, 438 bp, Glycine max
  unsure (1)..(438): unsure at all n locations
gatccttaagtcacccgcggcatgcaagcttaacattcaatttcgagcgtctcgatatttgacnggactcaatcagacatccgagtaaaaagttattggtcgttgcattggctcacagcttcaccattcaatttcgagcatctcgatatatgacgggactcaatcagacatccgaataaaaaattattgtcgtttgaattggctcagagcttcaacattcaatttcgagggtctcgatatattgcgggactcaatcagacatccgagtaaaaagttattgtcgtttgaattggctcagagcttcaacattcaatttcgagcgtctcgatatatgacgggactcaatcagacatccgagtaaaacgttattgtcgtttgaattggctcagagcttcaacattcaacttcgagggtttcgatgtattgcgggactcaatc

SEQ ID NO: 59144 - DNA, 384 bp, Glycine max
  unsure (1)..(384): unsure at all n locations
catatatcgagacgctcgaaattgaatgttgaagctctgagccattcaacgacataacttttactcggatgtctggatgagtcccgtaatatatcgagaccctccaaattgaatgtgaagctctgagccaattcaaacgacaataacggtttactcggatgtctgattgagttccgcaatatatcgagaaccctcgaaatgaatgttgaagctccgagccaattcaaacgaacaataactnttactcggatgtctgattgagtcccgtaatatatcgagacgctcgaaattgaatggtgaacctctgagcctaatcaaacgacaataactatttactcggatgtctgattgagtcccgtcatatatcgagaacctcgaaattga

SEQ ID NO: 59145 - DNA, 385 bp, Glycine max
  unsure (1)..(385): unsure at all n locations
cctcagagtcacctgaggcatgcaagcttagaacaataaactcggccttctcttatttntctttgngctnggcgaccacgatcaacaaagtactttcggcacctactatatgttgacttgaccaacactattattggaatgttgcgacaatctttcaacaccttattcacacattcntgataggtggttgtcatgtgaccatatcgtcgtccagatgtatcgtaagccatgctctatttntcctttgaaatgcgatcaatccatcttgctatggctggactcaattgatgaaatttttcttaagtttgatcanacacatgcttgcaaggagtgtacgttgcattcaatttgttatcatcaaaagttgtacgtagacatgaaactc

SEQ ID NO: 59146 - DNA, 348 bp, Glycine max
tacctggagatatgtctctggggtcaagagaccttgcggacgtcagggtggggtgcttattgcccaaaaacaagcttgaccaatcccgacccaacccgggcatagtcagtcagtgagaacctgtgatgtacctaaacaggcgagctcctggcagtcaacagataaaaggaacaaagaccacacagcaaggaggcttgtgtggtggctggccagctgtgaatcttgtgtggattatggcctctggtaatcgactaccaagggtgggtaatcgattacaaggcttaaaaatgaagacaggaggctaagatggtctctggtaatcgattaccatggggtgtaatcgattac

SEQ ID NO: 59147 - DNA, 269 bp, Glycine max
tattttcgttagaatttgctacgatcttcgattttaaatatcgagcgtctcgatatattacgggactcaatcggacttccgagtgaaatgttattgtcgttcaaatttgctacgagcttcggttttaaattttagcgtctggatatattacgggactcaatcgacttccgagtgaaatgtattggctgtcgaactggctatgagcttcaattttaaatttctagcgtctagatatattacgggactcaatcggacttcgagtgaaatgt

SEQ ID NO: 59148 - DNA, 410 bp, Glycine max
  unsure (1)..(410): unsure at all n locations
agcttaagagagaaattttaaaacttctatcttataaatatatgcaanaatgcagnttctgcaacaaattacgttgcgttgcaacttgcacgtaccacgtagctttcgtgcttagcttttcccagaaaatgaatttgacatttcaaaggggtctgtatcttttatacagtatatgttaatgccatccatagaaaatggcacgatcagtcgatcatacatttaatttacatgtagaatattttaaatgttaatttgttttaattggaccttaaattataaatactggcctaataagtccttcacttaatctaagattaaatntatggttaaaatcatcttgtcatttgattcagttaaatcttagctgcttataacacatancgaacttcaatttacgatacatgcttaat

SEQ ID NO: 59149 - DNA, 398 bp, Glycine max
  unsure (1)..(398): unsure at all n locations
tcattaataaacacatcaaacttcacaggtgtgtttctctcaaactcaatcccttcaatcaccaaaacctcttcctcctcttccttctccttcctgctcctcgacttggttggccttttaaccattgtgctcacaactgaatccaacactagtgggaacttcacattccttgaagtctcagcagcacgtgctgcaccaaccaccaaaatttgtgctagtgcaaccttatgaaccctagaccttcgcggtgtgggcctagagtttaaccatggaatgtctacatcttggtaaacatacactagttntctctcgtcaagacaaatcttacccttactcgcacaaagttcttattctcatcgtagaagagaaacccagatttaaccaatccgagtcagtaa

SEQ ID NO: 59150 - DNA, 321 bp, Glycine max
  unsure (1)..(321): unsure at all n locations
agcttcttgagaaaaatggccaaaatctctctanattctgatttcaggcttaaataggtggctntgttcgtgctcgtgcgcttagcacaattctgaaccgcttagcgcgcattagtgaatttcggcttagcgtgggcttctcttgctcaacggatggactaaagcggtgtgcctagtgggatggcccttcgctcagcaaacatgcacaactcatccttctttcagattcttcctcgcgcttagccgaggagtgttgcactcaacggatggctcgctataccgacaggttggcttatcgagagggtgaaaatcaacactata

SEQ ID NO: 59151 - DNA, 383 bp, Glycine max
  unsure (1)..(383): unsure at all n locations
tcttatccaaggctcatcttgggtggggaagctccttcttctatggcttattccctagnggatggcgcctcctctcacctcttctcctttggcttccgctgcatctncatggtggaaaatcaccattaaaggacctcattgtagctcaaagatccagcctccatagaagccccacaagcaagcttccatcagaagcgatccacatgaagcactatcgcatgaattaagttcacgtcaaggaggcaacggtcataggtgagtgacaaaattaagggaatagtagaggtatttgagataatttgattccaaagaagttggtcaattctcattataaaaaccacccactagcattcggagatgacacacgactcatattatcacta

SEQ ID NO: 59152 - DNA, 217 bp, Glycine max
  unsure (1)..(217): unsure at all n locations
agcttcaatggagcttacatcatnngccttggttgtattagttntacttttatcagaagttcacacatgtgcgcagaaggaagctggttaggaaccaaattggaattatatatgtgcagctgtggtgatgccaattttcaagtgtacaggtctctaatttttgtgtgggcttggtgctgataaaaagtaaaagtgaagggtgattatatgaaggctt

SEQ ID NO: 59153 - DNA, 219 bp, Glycine max
  unsure (1)..(219): unsure at all n locations
aaatggtgggaagttggaacccatctcctcaataaaattaatggcttcaccaggggtcatgtttccagggcctcaccacttgtagcatctatcatacttttcattgtacttgagccttcataaaaatattgggangagaagctgctcanaaatctggtggtgagggcgactggcacatagtatctagacctctcccagatttatataactctctccctg

SEQ ID NO: 59154 - DNA, 300 bp, Glycine max
  unsure (1)..(300): unsure at all n locations
gccaaataacttgaccatccgaccacccggcatatcgtcggagactggatgactaacagcagctctgcagtcacagataaagggacaaagaccacanaagcaggaggcttgtgtggtggctggccaactgtgaatcttgtgtgatatatgggttatggcctctcgtaatcgattactaagggtgggtaatcgattacaaggcttaaaaatgaagacaagaggctaagatggtctctggtaatcgattaccaagggggtgtaatcgattaccaggcttgaaaacgaggtcangaagctatg

SEQ ID NO: 59155 - DNA, 369 bp, Glycine max
  unsure (1)..(369): unsure at all n locations
aatgggccataaacctaccatcccttgtggcccacctccaactgagctcacgtactcccatgtagccccaaatnctcgtttctctcaacataggggtccccatcaatccttccaagcttnctcacatccaagtaattcaacattcaaacaacacaaactatcacagccaagaaaacagggcaaaggcagaaaactctgcccaaaacaccaaccaaaatcacagcttttctcacttaaagaccacagtaacaattccttctttctagttcgttaaccggtggatcgactcaaaaatttcactggaagtctctagtacataaacctacanttttgaccgtgggatctactagtaaacacccagaactcatt

SEQ ID NO: 59156 - DNA, 436 bp, Glycine max
  unsure (1)..(436): unsure at all n locations
cttcctatggggngagtttgttcttgtctcatctncnccntgaaggggcatctccaaccatctttcttccttctccatttcgttgccattgatattcaagaagcaaaggactccatttatgaagaagatccaaggcctacaagctccacatggagctacatcatgtggtatcaagagcatcttcgtctaggcgatgttcttttgttgtctggtcaattcactntaattccttgttcttcatcttattctccatgtatattctccattgtattggggtttggttctatttagagtagattcaaaaaaataaactgattaaatcttaaatttacactcggtccggcatttctatggntcaaattntatagatctactcttgaatcatggttttttttgttggatgtacgttctatcatttnttggtaataatcttctt

SEQ ID NO: 59157 - DNA, 410 bp, Glycine max
acataacccgagccaccatcaaagtatcaccagataagcgtggctgcaccggacgagattccacataagcactgctcacaattttcagtgcttggaatgatgttttcaacgactcctctacagcctcaacataaagcgtaaaagacggacaacttaccagtatgtcttcctctcctgatactataaccagctgtccttcaaccacaaactttaatttctggtgcagcattgacgggaccaccccaaccgagtgcatccaaggccagcctaacaaggaactgaaggcagagcttatgcccattatttggaaggttatctaacacatgtgaggcccaacttgaattgggagatctatctcttcccttacatcccgacggctaccattcgaagcccgcaccaccatggagctc

SEQ ID NO: 59158 - DNA, 301 bp, Glycine max
  unsure (1)..(301): unsure at all n locations
gctaacccaggtactgaatgggcacgggtttattctagaatagatttattctctgatgatgagncgacggatgatgaaaatgaagctgttgtgagccaaggttacggggatatggatgtggatgatgttctcaggacaaatgaagacctggttgtgaagagtggctcaaaattggtgccaggacatcttgaatactcgagacttgtgaatgcaaatattctggaccctgctaatggtcccataaattcagtccagttccatccgaatgcgcacctgattcttgcagctggattggacccga

SEQ ID NO: 59159 - DNA, 459 bp, Glycine max
  unsure (1)..(459): unsure at all n locations
gcacctgcggctgcagctattctctagggactttatttacatgtnttcattnnnnctttcagaacatacagattgttcacattcatggtagcaacacgcctagagggtaacttcacatcagcatgcaaatattgtaataaatctttaaaccttctatgttcaataaaagagaatggaagatcatgctcaataatcatcatacatataccacactntgatctattttcatatttcttaatctcccagcatgatcgagaataatatttccaacatcactattagaacgtgtcttcaaatatacatcacatttccccatacaacgttgtaaggttgaagtcccattcttattgtcaccacccacataatctttcaaacaatatttgcatgtactcatcacttttccatcactatgcataacagggttctcaaaaanaatccacatatgtgatgaataatttc

SEQ ID NO: 59160 - DNA, 276 bp, Glycine max
  unsure (1)..(276): unsure at all n locations
atcgatctttcaatcttctctcaacatcattcaacatctttcaactctttttacagaatnttctgattctctttctcttcatctttctaaaaatttttgttcaaaactctctcttccaagaaaaagtctntggtcaaaaacttgggatattcatatttttaattctcttctccctttgccaaaagaacgaagaactaaccacctgaattgtttgcgtctctcttctcccttacaaaagattcaaaggactaaccgtcggatggctcttttgattct

SEQ ID NO: 59161 - DNA, 400 bp, Glycine max
  unsure (1)..(400): unsure at all n locations
agctnacaaaccctanttgatgaacacacacttaataacaaggagggaattcagaggaaagaagctcttataaaccctaatttgaggaagaaaaagcaagtgaccagaagaagctttataaacacacactntagtgccatgttggatagtctacgtggcactaaaatcaccaacaatgcacctcactaacgacgttactttcgaatttaacggcaagaactattttgcaacacttatgcaaagatagggactattttttacatttcaataggatatggactaatttgcaaaatggctacaaagacagggaccaaaatgcctattcactctttacatttatgggctcaataaaagtgatctaatttggtgagccctatggactatcattagaaattaatat

SEQ ID NO: 59162 - DNA, 361 bp, Glycine max
  unsure (1)..(361): unsure at all n locations
gaagaagaagaagttanagagattcaggcttgttaggatnngatgaatatgtttttcaagattcttgaaatgcaaaacaaagcctcgcttttatagactctgcatgtatgggcaagaagaccattcagaagagttataactctttagaaaaacttaaaaaccaatttgaaaaagtcaaaaaccttttgaagagttacatcttttgatttattcagaaacaaacactggtaatcgattaccaaattagtgtaatcgattacacaaggcttttaagtgaaaggatgtgactcttcacatttgaatttgaatntcaacgttcaagggcattggtaagcgattaccaaaacattgtaatcgatta

SEQ ID NO: 59163 - DNA, 249 bp, Glycine max
  unsure (1)..(249): unsure at all n locations
tctaattatgtgggccattaaatctattatatgctgacataaccgagaacccatgaaatctcttcggggcggaataggtgtctgccattcgcttggcctggctaacaagcggggaaagtcttgactccccgtcaaggtaagagcaaatcgatccatccacatggttgcctcttggtgaaagagaccaacaccctttctctagcctctnttttcgcgtatacttgagcatactcgtccgcgatcctatgc

SEQ ID NO: 59164 - DNA, 340 bp, Glycine max
  unsure (1)..(340): unsure at all n locations
agcttattaagtgttgatgattataacacanatanatctatatgaattgttaaaataaattaggaattaatagttcaaataataaaattaaattaaaggaaattaatatattaagattcaacgataaatacttttaatgcatttttagtttaattatttattaactatttttaattgaaaaaaatatagtttgatttaatatatacatgttttgtgccatgtaaatattaatattctgtgatgtgtatatttttcataaggtgtcataacatgttgcataggaattataacattgtgattgagattggatgtatgtgataaattgagtatgtgttgaatt

SEQ ID NO: 59165 - DNA, 98 bp, Glycine max
  unsure (1)..(98): unsure at all n locations
actaagctcaaacattttagaaatcctcaattaaaccttatttttttgattataatganaaaaaagaagaaaatngatatgaatgatcatttttcatg

SEQ ID NO: 59166 - DNA, 374 bp, Glycine max
  unsure (1)..(374): unsure at all n locations
agctntaaattaatcctccatcattatgacattatgtangactttgaattatgaatgtgctgtctttattacatataagagagtgctaagcatgtttactattgctgaatatagtcgaaatgcaatgtgaatgtttaagaaattatgctattgcattgttagtgcaaacaacaatgttatagcgtccatcccatgaattgctctccacccaattgacacaattaaaaagatcaacaattcctccataacatgcattcccagctatgaagagcatcactaggatcaatcatatttgtcttcaatgtcgttacaacatcacctatcataaaaagtatattatattcaagtacaattacaaacattcttaaacatat

SEQ ID NO: 59167 - DNA, 418 bp, Glycine max
  unsure (1)..(418): unsure at all n locations
tacccgctaacctagtggatggagggttgggctacatgcatgaaaaattangttaaatcttcattgttctcattgtaataaaaaaagaaaataaaaatgtgtttttttgtcaaaactgaggtggaataaagatgaatttttttcatgtttattcttgtcatcctgttagaagagtaaatagtatatgaaacaatagttattaactaattataactattaagtttgttaactttaataataattatattataagaaagtgtaaaaataatttctaattggctgatagtataacatttttttacactaacattatatacctattaaactctttntaaaaattacaaatgattntttaaaaaaaagtataattttataattaantatgatattctaatttgatatgttatttaaagatata

SEQ ID NO: 59168 - DNA, 420 bp, Glycine max
  unsure (1)..(420): unsure at all n locations
gcatgcaagcttgaganatcttatacaactgctatagatgtctctatcactgttggaatacacacgtgagctcacttagaggtaagggatgagtttatcgcaattggggttcgaatgaatatgtgtaggggtccttagaggatcaaatttggatttattttgggatgtttatcgtattggaattcttcatgtatgattatgtgaaattgtttgaggggttttactccctatgtcgtgagaagcatttttgtataatttgcttgtgttttggataagaatagcatgataaatagttatattgagatcatgaaattgtgattgaaattgtgtataagtgataaattgaatatgtgatgaactgtaggataaccatgtcgcttgagatatgatattgtaattgaaattgtgtataactgaaaa

SEQ ID NO: 59169 - DNA, 359 bp, Glycine max
  unsure (1)..(359): unsure at all n locations
tcgattcattctatgtacccgcggnnggccacattgtgtttcgtgtattnntatncncggtntacttactctttatacccccttttgacgtgcttaagccattttatttaagtcatttctcgcttaacctaaaaataaaatataattccaccgatcgtttgaattgcattatccattaacttcggttaaaatgaattccgaccgttcgggcgtgccgtaaccacgttggaaatcataaaaagaggtaaaataataatataataatcaaaaaaatatcttttggtaaaataaagcggaaaatcaatcggacgttnttctctttgggatttctcattcttaatcgaattgactaataacta

SEQ ID NO: 59170 - DNA, 462 bp, Glycine max
gcttctccctcttctccctcttttcctggtatctgagaatctcttattattagtgagaaaaattgtttccgtgaagaatatccaagccgaagcgcttccgtaacgcttccgagacgtttccatgggtgatttcgcgaagattttccgccgttcttcgtcgttcttcagtctccaaccgataagttcccaaaatcgaacttttcaattcattctatgtacccttagtggtcctcattggtttcgcgtgcttttatttttatttcatttgctttccgtacccccttttgacgtgctttagtcatttatttaagtcattttcacgcctaatcaaaaataaaataaatttccaccgatcattcgtattggaacatcttttaatttatgttaaaatgaaatccgaccgttcggtcatgccgtaaccacgtttaaaaccaaaaagagggcaaataataatataataat

SEQ ID NO: 59171 - DNA, 312 bp, Glycine max
  unsure (1)..(312): unsure at all n locations
caaaggttggaacttgtgttggtttttatgatggaataagcctaaacactcgagtttgagtgaaacaatgattgtgaggtttttggtttatgagccttccttgatttcgttcatgcttactagcttatttcagctgtgactctaatacttgtgctcctatctttgaaaagcttcatgcttgtgagaagtaattgatttaagcattccatgatattcagttcatatggttgatgtccttgatgaatcacacaccattntcttttgataggccactgtctttgtcacttgaggacaaagtgaactgtctttctt

SEQ ID NO: 59172 - DNA, 448 bp, Glycine max
  unsure (1)..(448): unsure at all n locations
tgcagcttacaggatgatgggacccggtgtgttataaacattatatgttctacgtgggagtacgtgagctcagatggaggtgggcaacaggggatggtgggtttatgcgcgcattgtggatgtggaaaactcgttgtgcaccatcgcccgaccgccacctagtatcacatgtgatgggtaccccataatcctacaagcttgagatgaggaagtgttgaagggtgaaacttcctacttttattgttgaccacagagtggtacctggagatatgtcgnggtggtcaagagaccttgtggacgtcaggtggngtgctattgcctaaaaccaatcttgaccaatcccgacccaacccgagcattagttggtcagtgagaacctgtgatgtacctaagcaggctagctcctgcaagtcaacagcatataaggactatgacctctttctatggg

SEQ ID NO: 59173 - DNA, 415 bp, Glycine max
  unsure (1)..(415): unsure at all n locations
cctctaacccagcaaattacttgctcagccccatgacccttaattctgactgcaatgaatagcgctgggcgacatatggtctcacttagccaagttgaagccatcgctcagtgatcaatctattgcttagtggaaatcaactcganattgattttggcttaactaaaccttggctggcttagcgaaaataatcaacctcaggtgccagggtggtgcgctaagcgcttgaacttgtggcttatcgcatgagtgattatgcgcttagcgagaagcaggtgcttagcgaaaggactaattttcaaaaagaatttctatagtataacttagtccttctccaagaaattagaacccttaattcacatacaaagataggtttatatgctccatgtnaagaaatataagcaagttcctaatg

SEQ ID NO: 59174 - DNA, 477 bp, Glycine max
  unsure (1)..(477): unsure at all n locations
ctgcagctttgcatcatgaagtgggattagccactatttatagtgnattttgttgatgaggnngcattgaactaagcattcatattagcctttaccnctactgaattgnttctgcctaagggaacgcttgtttcttaaggaatataaatttattgataatagacaacaataaagacatcaggaacaccttacttgttgaagtgatgagaaaacaagaaatgaagataaaataattacctagcgttgactccagtaacaccaaggagcataaaaattaacaactgtaattggaaacctgcaaaaaggttatccaacatgggttaatgatacaaaaatattgtgcagtctgagacagacaagaaaaaaaactattcaacttctcaataactgaaactcataanaacaacatatgaatgaattacatgattaacccacttactgatgagcatatttatcataattttgtgttttgagtac

SEQ ID NO: 59175 - DNA, 349 bp, Glycine max
  unsure (1)..(349): unsure at all n locations
cccctcacagctaatctaatttacgggcctattgaacaagaaaaagagtgatagcaaaagccaaaacaaatgaagtttacttcatagacatcacaacaagtctaacagcananatcattacacgatctanatatataattacggaagcaacacgattcattccanaacactgagattcaatcacattctgctctgtagtttctccaaatacacatccaaagaataaaaaaactccactttttacatacaaatcaacaagccccacaagctatgcacagattaaaanaaaacaaaaatccttcattatttttcacttccactcatcaaaacaatcactacaaaatcgaat

SEQ ID NO: 59176 - DNA, 447 bp, Glycine max
  unsure (1)..(447): unsure at all n locations
catgcaagctggcacctcttcactctcctcangcacttttttctcttttttattcagacactncaactttnggagccaagttatcccttgcgttctagatttcaaccgtttgtgataaccgcctatgacaccattgctacttcccctaagttctttatcttttcttcccactttatttcatgccttacggatcctataaagtatcttcatattagcttcaatgaaacctcgcgcaatgaaaggcgcaatggtttcctccgatggtgcacctctcatagggtatccaaactgtcttatggccaacacgggattataattaatacaacccctcgtccctatcaaagggacattcggaaatccttcacatgagcataacactcatgccactctttctttccactgtgggaaccaactaatggatgctcccgtcatgcctgccaaaagttc

SEQ ID NO: 59177 - DNA, 430 bp, Glycine max
  unsure (1)..(430): unsure at all n locations
atcctcagagtcacctgcggctgcagctctatgcttggttgaatgcagtctgtctagtgcttctctctgcagataagataagtagagagtgcttgatgtataaagaagcatctgagcttgtgaaagaccccaactttgtgggctttcacatacccctttgggcatcagaaaccaaagattcatgagatgctacatttattttcattagtaacaacctacaagtaaacatgtgggagttggggatttgctagcacacccaatattagtattcctttgcaattccaattntcacaaagntgaagaaagtgcagcctaccacaggtagtgacaatagccatgaaatataaaaaaaaaatcattggtanaaatttgaaaagctaatatactaatgtgnttaatgtgcatggtcaagaaaattcatactatgtta

SEQ ID NO: 59178 - DNA, 405 bp, Glycine max
  unsure (1)..(405): unsure at all n locations
agctngaacgaatgtaagacacatcttcttatttctttgngattctcgactccatttcattgaagcgcatatccacttgtaattccaaagtgtcaaacctttcaccaacaaagggttgaagaccatcanacctgtccaaaatctttgaaaggagagatgaatcttctccatcatgtccttcttcaccaacatgtcaagcacccttcttcacccaagagccatcatgctctttttgataaccaaaggatgctatgactgaagcgcctataaggaaggatctcttgattggaacatagggttcaaaatcaagagggatgttgaagtgttgaaggaaaagggtaacaagatgaggataaggcaatggagcattcaatcgcaatgccttatgcatgcgatatctaacaa

SEQ ID NO: 59179 - DNA, 289 bp, Glycine max
  unsure (1)..(289): unsure at all n locations
agtatgacagtcaccgctttatgagcgctgtacaccaccagcgcttcgaggccatcaaaggatggtcgtttctccgggagcgacgcgtccaactcagggacgatgagtatactggattcangaggagatagggcgccggcagtggacatctctggntacccccatggtcaagttcgatccagaaatagtccttgagntttatgccaatgcttggccaacagaggagggcgtgcgtgacatgaggtcctgtgtaaggggtcagtggatcccgtttgatgccgatgctatc

SEQ ID NO: 59180 - DNA, 401 bp, Glycine max
  unsure (1)..(401): unsure at all n locations
ctcagagtcacctgcggcatgcaagcttcttgcgtagccactcttggtgctcagtattatttataaacaaatccctcttattactagctantttgaattctttagttcctgaatgtacaaccttcaaattgttgctcgttcccctctttgttttatgcaaaaaacaaatgttattattactcgaaccataaggaataacatctaaacaagttatgcataaaatgttactcttttattntttgatatttttttaattacaattttacttcaatatctatttttttcatctacttaggtcgctttttaatataaatatgaatttaaaggtgatatacttataatataaattacttggctagttaaaggtgatatacatatatattattgacataaaacttaaa

SEQ ID NO: 59181 - DNA, 372 bp, Glycine max
  unsure (1)..(372): unsure at all n locations
tgaaagaaggcagctgcacctaagnggattgtatttaatgttattgatatgcaccatgcgttattggtgtctaggtatgtcatgtaactatgtaatgcataggatattcaaattnttttcatatgtagagtcacgttcaaacccgatgttatgaatgtggatattacgtaatgcattggatgtggaacatcataaccagcgagatanagagtgactagtccatggtatgcataaacttgagtttctaacattgttgactgcaattggaactgaaatnntgtatttgcagtactaactcttaaaatataatactctgtagtggttgctgatgcgacatcngtggacatcgacaacatcacaacaattcaaaac

SEQ ID NO: 59182 - DNA, 255 bp, Glycine max
  unsure (1)..(255): unsure at all n locations
tgcaagctttgagcacanncaaacgatcaataaattttactttgtatgtctgatgagnccngaaatatatcgagacgctcgaaatggattactgaagatctgagcaaattcaaacgacaataaattttttactcggatgtctgattgagtcccgtcatatatcgaacacgctcaaattgaatgttgaagctctgagcatattcaaacgacaataactttttacttggatcgctgattgagtcccgtatatatcga

SEQ ID NO: 59183 - DNA, 410 bp, Glycine max
  unsure (1)..(410): unsure at all n locations
agctntatatagactttatagctncaatctgttgagaganancgctagccgttgtttaatagcnttgacagttgacacaaggctactactgtgcagagaaagggagtaggtaccataaacacttgttgcaacatatcttcatagaagtacaattttccgatgtcgncttgtgctcagagctgactttgtagcatacaaattgaaaataacattaaaagcataagacaaatggaattaagaattgtcgcaacatgcccttntgcgggcgagcgaggcgaggctcacgggtgcgctttccaaggaggaaagatgcgcggagtcgccaccaatgttaattgtggaaaacgtccgtaaaactgaaggacaccggcaaaaagaataatccaagttcgggagttgatttactgttg

SEQ ID NO: 59184 - DNA, 361 bp, Glycine max
  unsure (1)..(361): unsure at all n locations
caacacatatgcatgtggtggtcttggatgccttttgagacctcacctagactggaagctatgcatggngagctgctgctctagtgtatatgtacgataattntaatgatgcgtctaagagcaaggatagacaacttgctggatatatcacaatattacaggtaattgtaaatgaatntgatttatttttttgattttttttgattaatttgattttttttgttttgaaaatatgtgcagtgctcgatntatgaacattttccatctgttgttgaggctattactattgaagactatcataaaaggaaatcatatgcctaccactggacctcttgaaaggtactaccagtgtcaacatatc

SEQ ID NO: 59185 - DNA, 399 bp, Glycine max
  unsure (1)..(399): unsure at all n locations
agcttgactaggcgagttgantctattcttatttttactctagctattagncaattcggctaagaatgatatatcccaaagagaccatgtccggttgattttccgctttattttactaaaaggtatatttttggtattatattattattctatctctttttgatttccaacgtggttacggcactaccgaacggtcggaatttattttaaccaaagnttactgatcatacaattcacacgttcggcggaaatttattttatctttaagttaatccagaaattacttaagtaaaatggcttaagcacgtcaaaaggaggtatcaacagtacacgaaatgaggataaaaatacaccaaacacaatgtggacccccacgggtacctacaatgaattgaaagc

SEQ ID NO: 59186 - DNA, 244 bp, Glycine max
  unsure (1)..(244): unsure at all n locations
atacatcttttaattaattatttaaaatcttgcctaaatttgcatgtgacatgtgggagggtacacaaaattttaacttttggaagctttcgctatatttntgtgtggttttcaactctaattaattatatgtagtatacattatcttaataagaaaatgaattaaatatattttntatctttaataattaatattttttataacaaaaattattttaatccttataaaatactgtttaattta

SEQ ID NO: 59187 - DNA, 213 bp, Glycine max
aaaatatgaaccattattaggtagagatcgagtattcatagataaaaactacaactcttctgataaaaataacttatataagaactagctaaatgtaaattaataattttggcttttttatctaaattacaaatttggtcaaaaatgcatgcttcgatatatatgtgaactttaataccaaatgcacaacatcaaaattattcattatatatt

SEQ ID NO: 59188 - DNA, 431 bp, Glycine max
  unsure (1)..(431): unsure at all n locations
gcacctgggctgcagctgcctgaaactcgacgcaaattattattttttactgacgaggacttctaatatctagctatgatatcctgagctcttcagttctagatacataagtaaactctatttttatatgtaatggtttaaaaattacaatacactcttatcatctatttttctatttaattattggaaaatattatattatatcctctatctatcctgtgcccttaacaccagaggatgttcttatattnttttatataatcacccgtattttttatcttganttgttaattgggcaaaccacataaaatcatgactttgaggtgacaataaatcaagaagcaataacaattccatcaatcagcagataaattccctagtgcaatanatcattccctgtaaactatactgaaacacactaacaaatacca

SEQ ID NO: 59189 - DNA, 284 bp, Glycine max
  unsure (1)..(284): unsure at all n locations
gtcccgtgtcctctagcatgaggggtctcataatcatccacctattcatctgctcccccaacacaaagttcaagatcatcacaggatccaaacacaaatagcaaactgggaagtgagtatcacatttctaactactagagagaaacaacacaacatatagtagccaaatacaatttacttagcatatctcacattatttcatcactntgtcattcatcaatcacacttttcatccatcaatcacacctttcaatcatcaatcacaatacacaggaatcacacac

SEQ ID NO: 59190 - DNA, 448 bp, Glycine max
  unsure (1)..(448): unsure at all n locations
tgagcttatctgcatcagcgacgagctgcactggaaatactggagatatacaattcaaaagctaattattatacgcaacgaanaaaagaccaaacaaataacaatatcagataaccaacacactaatataatcttaaatgatacaacatgaatctaaacacatagctccggggtacagaatctttaatattcagatgtgcttgacaatcaactcaccacccaacgatcatggaatatagtagataactaatagccctacgtggcttggaagttaatactaaaataatagcattccatgacgctccatacggggaccaaaaaatagtcgtcgaagaaaacgcaacggcgcgattggacaaaaaatgaaatgggcgacgtcacgtttaacacaaccatctctatttattgcggtgaatgacgaatctctagacaaccatcatcggtggag

SEQ ID NO: 59191 - DNA, 239 bp, Glycine max
  unsure (1)..(239): unsure at all n locations
ccttcctttcatcatcaccccttgtgttctttcaaaccacaattccagaatatccacctctgcccagaattatctcatggccataactcccattttacgcactcanaataagtgattcttgagcctcaaattgaattcacaacgagacctttcacctcgttttggaatcacctccattggagcctcgtagcttcagttatcccatttctatatttctggccagccaccacttaacctac

SEQ ID NO: 59192 - DNA, 449 bp, Glycine max
  unsure (1)..(449): unsure at all n locations
taacaccacttatanttaaagagaannatatgaaattagtagcaccaaataattgaatatgagggtagnngttgagaaagctanatgnngagtaacaagaggggaggggtataatatatatttttaataccaataanataattaaatcacacnntgttagaataanacnncttttaancttggtgatggggtactatactacaaaagaanacacanggttatttatacaaaatgggcggaaaataaaaatcaaatcatacctccagccattgccatgaagagttttattggttttggttcttccaagctctctctctctttctctctctctctctctagaagggggatcagaatgaattcaaagatatgagctcagggaccaaatacatgtactatatataggcattctaccatcaataatgcatntagttgccattaccactcattat

SEQ ID NO: 59193 - DNA, 355 bp, Glycine max
  unsure (1)..(355): unsure at all n locations
ccatttaagacgttggaccttacaaatggttnttagggtgatgacaaaagcttggtttatgaattggatttagccttagtttcactttggttattagtcaattaattaagaaagaaaatcccaaagaaaaacatcccgatggatttttattattattttatttaaagatattttttattattatattattaatttgcctctttntggttttaaacgtggttacgacatgatagatcggtcggattttattctaacagaaattaaaagatgttacaacttaaatgagtcggtggaaattanntttatttttattaggcgagaaaatgacttaactaaatgactaaagcacgtcaaa

SEQ ID NO: 59194 - DNA, 288 bp, Glycine max
ttgggcaaatggtagctggcagacctgacctggcttggcctatttagaaaaacgtgctcgcatgcacttgtagcataggatatgtacaaatacctaaaccttagcgagaaatatcaataattacgtgcgaaagatttgttattaagttagtataagattgatcgtaattcttattaattatatcaaagcattgtaatgggaggtacaaaaacttcttggaaacttgatgattaataacaaagcctgtgatgataagaaaaacaaagcctgcaatgggggagaaaattc

SEQ ID NO: 59195 - DNA, 322 bp, Glycine max
  unsure (1)..(322): unsure at all n locations
ttttacatacaaataccccagtaacatttccttcgttccaattcgttaaccgttggctcgactctaaaatattactggaagtctctagtacataagtttacattctgaccgntgggatctactagcaaacatacagaactcattctgcactactcttttcacaactagccaatgcatagcatttttctgcacagagccaaaattctgctgtacctatctgacagcaaaattctgcatatgtgcagatttcgaaaatcacactttccctcatccaatcttgcccaaatcatatcctacatgtcccaaatcatgtatcaatcat

SEQ ID NO: 59196 - DNA, 222 bp, Glycine max
  unsure (1)..(222): unsure at all n locations
atgctgcaaatatttacaatagaccctctcaacctcagcagcaaaatcaaccacagtagaaacaatatgacctctncagcaacagatacaaccctggatggaggaatcaccctaacctcagaatgtccagccctcagcaacaacaacaacaacatgctccttccttccaaaatgttgctggcccaagcagaccatacanttctnncaccaatcaacaacagc

SEQ ID NO: 59197 - DNA, 391 bp, Glycine max
  unsure (1)..(391): unsure at all n locations
agctgcttctacctaagttcttacaaattctcattngataacaaagatgctaaaacattggccaccgtgaagaagaacctaaagcgttttgggtcagcaaaattatttgagtgttatgtcagaatggtaaattcaatcactaaggaaagaatcacaattatctaaacaagagatttagagccaatggatgagtcacgaaaagactttccactataataacttatagttaattaaacttctctaactaataattaacttaagttgtgtagtttatcttcaaaacattctaatcatacagaaactgaacccctattccaactcagtaggaatggtcacatgtctttcatgataaccatggcatactattacctttcaagaatttgcatttcgc

SEQ ID NO: 59198 - DNA, 379 bp, Glycine max
  unsure (1)..(379): unsure at all n locations
catatagccccataggcaatcatcaanagctntgcagnctcgatnccgtcctttgaagtagcatatagtctatatctagtatccctcttggatctccctaaatttgaaacttcaactttgtccactttggtttgtggaatgataagggtgaatgctactcttgtgtcaaatactcgtagcgttaaaaggactttcagagatgaggcattaaaaaatgtgtacctccatcactaatcaagaggttaagcagtccaaacctaacaaagatatttcattttaagaacctaatcatcgccttctcataaatgactggacaacagttgcttccatcactttgagaatacgccaccactcctagatatattatgggacacaaaat

SEQ ID NO: 59199 - DNA, 169 bp, Glycine max
ctgcaacatcatagccaatttcatcttacccgctagagttcggttggctgtgctagacatgatagagtgggaattaagctccagagtggtttgacctaccagagcttgttccgctgggcagagtggacacagtgagcttaaaccttaggggggtttgctcgctagattg

SEQ ID NO: 59200 - DNA, 254 bp, Glycine max
  unsure (1)..(254): unsure at all n locations
tgctaatttgtaacttacctatttggaagagacatcatggcagttaagtcccacctctccattgtggattcagtcacaaaaccaacttcaatatgttggactatctaacacggcgattttcggttctattcccacacagatgtgggaagcactttctcaggttaggtatttaaacctctctcgaatcatatccatggngagattgggactacattaaagaatccaatatctatccccgttattgatctaagctc

SEQ ID NO: 59201 - DNA, 452 bp, Glycine max
  unsure (1)..(452): unsure at all n locations
atgatgtaanctccttcttgtctttctctcataagnnggagnnggatcacagcattgaactatgttgatcgctccaatgggatgatggttttgattgctgcagataaagtgtgtcattgtgagtttctggtcccatgagttaaactataaggactaacaaaaatattgtcgtatctttaagggccaaaaggataattaaaccctttatttntttataatttttttttacaacgggttatatatatgtagcagtttattctaaacaatggactacgtgtgaaatctttgaattctatgtaagaaatgttatttcaaatttctcatcagtcttcatgtcaatgatgcatgctccatttgaattctatgtctaattaagctctcggtcttcccgttttgcaacttatttcgtagaaagaagccaaatttgaagatacaacattngatactataac

SEQ ID NO: 59202 - DNA, 390 bp, Glycine max
  unsure (1)..(390): unsure at all n locations
agcttgcgaaaggcttgttcctggatctgatttatcaannngcctaactctttcagactggcgattcctatgctcttaatcttgacttgatagaacctctttttcttcctttgcgtctaactcgatcccatgttttactaaagtggaataaaaaccaatgtgagtcaagactctgaaacctatcacaggtgaaatggatgaatgcatgaagaaatgcgtatggcacagatgcattttacggaaacgagagcccgggaaattatgtccttcttacatacaacattcgggcggcatagcgcctgatgcatgcatataagaaggtgacatggaccttccatcttctcgcgacaatgtgaggggatcaagacgcaacccgtgcgtgatgacatg

SEQ ID NO: 59203 - DNA, 383 bp, Glycine max
  unsure (1)..(383): unsure at all n locations
ctcagcttttatccaggcacatccttggtgggaatcttcttttattggcttataccctagcggagggggcttcccctcttctcttctcctttgccttccgctacatattcatgnggaaaataaccatgaagacctcattgagcttaaagatccagcttccatagaagctccacaagcaaacttccatcaagtggtattagagcacaagagcttcaagaggtgcttcttaaacctcccattaatatttgctttaccttctcttccaattgtggttcttcattattccatgattctcctcacatgtcttgtgctaaatgtttttacatgattctttagtgcttcaaccgaataaacttgctatagaaatagatatgaatttctat

SEQ ID NO: 59204 - DNA, 451 bp, Glycine max
  unsure (1)..(451): unsure at all n locations
agcttagccgaattcatatcgaantttgntttcttatcttatccttggccagcttagtggaccaaatcagcctcanatgcaagggttgngggctaagcgcttgagactctaggcttagcgcatgaccaaagatgcgcttagcacgaagttggcgcttcgcanaaggactgcttttcaataaatgttttataacgttattttcagtcccttcctcaacagattgaaacccatatatctaacattcaaagataggttgatatactcctatgtatagattatgtagcaagttcccaatgatctaatgcatgaaaacaacaattacagaaattaatactgggttacctcccaggatgcacttctttaatgtcattaacttgacgcctttacctcactgcgccatcttatgttgtggntcttactttcataacctcttgacctcctttcattacct

SEQ ID NO: 59205 - DNA, 332 bp, Glycine max
  unsure (1)..(332): unsure at all n locations
gcatcnattctggcgctaagctgctggntgttggaagccatcttctcaattaaatttctggcttcacaggagtcatgtcttcagggctccaccactggcagcatctatcatacattctctcatattactgagtccttcataaaaatattggagaagaagctgctncgaaatctgatggtgagggcaactggcacatagttnnttaaatctctcccagtattcatacaggctctctccacggagttgtctaatacctgagatatccttcctaatggctgtggtcctgaagcaaggaaaantttttctaagaatacttctctcacgtcatccca

SEQ ID NO: 59206 - DNA, 220 bp, Glycine max
  unsure (1)..(220): unsure at all n locations
ctaacctccaagtaaaatggaacctggggttagaatgaccaaggtatatttgttaagttccctctttttatctaacttgctgatatctttggnttatgttntataaaagacaaactgtcggtaatccattattttaatctgngttaacacaggttgatggggatggaaaatatgagagggtcaatgggactaatggtggtggtggtacttattgnngatt

SEQ ID NO: 59207 - DNA, 262 bp, Glycine max
aatttataaactctcttaaaatggtgttgggactcaccatgatttgatattttctcattaatgctgaaatagatttatgtgaattgataacaaaacactgtttcttttcatatgtcttgagattgcttgtgacatgcatgtctgttttcatttctttaatctgaactaggagcttgtaacaaaacttgccaaatcctaaatttgacaagtggtggaattgactaactgaagaggctatttcattatggacagttatgctaag

SEQ ID NO: 59208 - DNA, 377 bp, Glycine max
  unsure (1)..(377): unsure at all n locations
acatctttctccatatatacttcttgaataagttctgtctctttgaaaacactccaagcgaaccattaataagatataagtctaaaagacttagaatttacttcttaaaaagtttgtgtcattaatacatctatttcaaagaaagattctatttcaacaccctcaccgttgtgcttcgaggcaataatggaagatcaactccgcaaccaccctctcactatnattggtagaacggctctcatttgataaaataatatntaaaatattaatttatttaactcanaaactcatgaagctatgtacanaacacgagtacacacaaaagaaaatgttgcaaataagacagatatgattactntaaagttacacagatatag

SEQ ID NO: 59209 - DNA, 462 bp, Glycine max
  unsure (1)..(462): unsure at all n locations
aacctacacggcgatccaacgggtctagcacatataaatataaatcgtttgatttgatgttatcaacaactcagaataatttttttttggcaatcctcgtcttttcgaactagccaatggaatgtcattataggtacatgacccactttttattcgatngtatgttctttcaattgaaattgggttgagatctagagaaaaccaacaactaaactcacccatgtaatgtactccatttatttaatgtgtttaaattatcagttcttaatttgagatatagtattctatttaatgattttctaaaagtatattgtatttttcaattaaataaaaagctattaaattattcttgattcctaatcaatatctaatttttgtggttgctctttaataaactcttctttttcggtgagtccttaattaaacaaacaactataatttgtccttagaactacttatagc

SEQ ID NO: 59210 - DNA, 256 bp, Glycine max
  unsure (1)..(256): unsure at all n locations
attctgagagcaagaaagcttctgaagctttgcaagtggtaggggatgagaagaataacgctgctgaaaaggaggagggaatcccgaaattgaaggggattattgaggtggagaagagaaagaatgattctgagaggaaggaagacactgaagcatgcaagttacttggagaagagaagaataaggttgctgaanaggaaaaggaaattggtagattgaaggcgtgtatagaggagaagaagagaagggttgattc

SEQ ID NO: 59211 - DNA, 152 bp, Glycine max
ataaaaacacaagcgaagcagcatgcctttatgaggctcatgattgcatatttattgagcacttgcatgatttattgcaggcataaatgtgatggcagaagtggatgtccctggtcatgcaaaatcatggtaaagcacatgccttggccatt

SEQ ID NO: 59212 - DNA, 401 bp, Glycine max
  unsure (1)..(401): unsure at all n locations
tgcggctgcagctcataaagttatgtggttgaacatttttcaggcatgggacaagaagttaatgagnttatgagcaactcaggattcaacagatgtgacatggacccattgcttgccacgttaaagaaatatactaatagctatgttatccttggcgtgtatgttgatgacatgtannatacaggatctagtatggcaagaaattaacaagttgaagcagcaattggcagaaaactttgaaatgaaggatcttggtccagctaaacaaatccttggtatgagaattcttagaaacagatcagaaggaattttgaagctgtctcaagagaaatatatcacaagttgcttgacaggttttaccttgaagattctaagaccaggaacacccttttgggatctca

SEQ ID NO: 59213 - DNA, 358 bp, Glycine max
  unsure (1)..(358): unsure at all n locations
gtccttctgattctatttatgcatttctgacttgagatatgatatgaagtncanagatgggacctctngctagnntgtattaatgaatagcctaaacacttatgctngagtganacaatagctgtgagactgtgngntnaagctactttccttgatatttgtcttatgcctaacttcatctaatggtacaagttacattttactcttctctttgaataactgcgtgctttgtgaaagacaagtgatgaggggcatttgcttcattcttttatcatgcaatcaataaattgtgtgcatacaccttcatacatagtcattgcatggttttgtcacttgggggaccagtgagatgtcctta

SEQ ID NO: 59214 - DNA, 342 bp, Glycine max
  unsure (1)..(342): unsure at all n locations
agcttgatcaaaacaaatatataatcattctattccactcaattcatacatttgctcattcaagtcattcacaaacacttatttcatatcaaacaaaccactgaaacatgagtcaatcatttcactgttcaaacaagctttttgtacaagcaatcaacactaagacaacanaaatttaaaagactaaaatttaaatactaaaatttaaataactaaaacataaagcataaactaaataaactgatcaaaataaactattcaaagtacaagacaagaagataaagatcctgtcaatcctcctgcgggtgatcctctgcatgctcattaagatccaacaccgga

SEQ ID NO: 59215 - DNA, 412 bp, Glycine max
  unsure (1)..(412): unsure at all n locations
cttgagcatgcatgggttcgacgtaattctttgcttgtttttactagatcccttcccgccttgtagttctcactggtaggctaccggngaaactcggtggagccgctggtggtctttgtctctttggcccttagttggcgccctagtcaacctcttattctctttatccattgcacattccactttctgtaagtnccttactctgtgtctcgcgcttttcagcctgaattccattcccgtaattcttctatgatatgaaactacatacatcaattaagaaaatagtatagtaatcgaagataagatagagtcttgctagtggccatntcggggactcttgggtgagactggaaagcaagactgattacctttgtgcccctcacccgaggtcaccagttgtccattctgatcg

SEQ ID NO: 59216 - DNA, 381 bp, Glycine max
  unsure (1)..(381): unsure at all n locations
tgcaagcttgtacggaagaangaacttaaactgttgtacataattnttaaantgtaagngaagggcattttctctcattcacttaaaatgttgcgtgcacttatgttagtcgatggaaacgactaacttttgtgtctacaacttgtgtaaattgtatcaaactttcccaatctatggcttgtttgttgtattacaagcactttttgttaagcattgactatagatacttaatgcatctgttttgtatgcttaaaatcaaattctctcaatttcatgttaattaggcaatttggcaaagctcgaacagcatccactaagcgcaacacttctaagctaagcgcgatgaagactctggaagaagatgagttgtataggttcgct

SEQ ID NO: 59217 - DNA, 319 bp, Glycine max
  unsure (1)..(319): unsure at all n locations
agcttggaggatcaatatacacgatctatctttcttgtatttaagcacaataattttttattaaagatctttgaatgttgtaaaaaattatgactatgagtggaaagttttggtacatgtcaattcattagtctttgagttagaaatttaattgattccaccctttgcaaactcagcatttgttataaaatgtttaaaattcaaagagaaagcatttggttttattttttattanatttgcttcacaaccccttgcaaactcagcaagttgcaaccaaaatgcattcatgtgatatagtgcaatccaacaacaacaaca

SEQ ID NO: 59218 - DNA, 208 bp, Glycine max
tgacagtcattcggaataaaaagaatgagctaattcctacaaggattgtcactggttggagaatatgcatcgactaccacaagctctacgaagccacaaggaaagaccattttcctttgccattcatggaccacatgttggagaggcttgcgggacaagcttaatactgcttcttggatggatactctagataccatcaaattgcgat

SEQ ID NO: 59219 - DNA, 400 bp, Glycine max
  unsure (1)..(400): unsure at all n locations
agcttgaaggagcgattatcacgaccatatttttggtgaggacctaaggatatttctagaagagaatatcgaacgttctattgagcaacgaacctgagttggagcaccattntctataatgacaacttcataaccatctataatatttctttcatggagaaccatggaaagtttcttcatgcacaaaagtttgttctcacagaggaaggagcaacgcagatagatcctattctatgagactttacactaacttgctaaatttcctttgtaacaagaaccactgactttactaccataactaattataacgtataatacatacatgtatgtacatatatataagacatatatatatctatataatccatacccccatatatacttgtgtacgcgaacatag

SEQ ID NO: 59220 - DNA, 458 bp, Glycine max
  unsure (1)..(458): unsure at all n locations
acttaagcgacgaggcatgcagctccaattgctaaatattaggtaattaatacacagattatgttcaattttatcataacctcaagtattcacagctcataatacanaataatgtgaattaacatgtaggttaattaatatcagtagagagacaggtaatatggtgtgtaagaaacagaatggcgactgaggtgagacttaactgggaacatatgcttattggaaaagaaagtgagacgatgtaactttcacttcatatcgttggaatttccaggagcttactgcaaactttttaacaattgaaaagataaaaaataaacaaagcctatgaattaatatgaagaagagtataacatgcattttgaagcagatgagaagaattaaagctcaccttgatgaagaaatgtttgagcattccagaatgtctggattgagaaaaaaagcgtaatggaatctat

SEQ ID NO: 59221 - DNA, 300 bp, Glycine max
  unsure (1)..(300): unsure at all n locations
acaaggttgagaacctcgacctatccaaatttttgaaaagaagagagatttctttcccatggtccttcttatcaacattgtgagcaccccttttcacccagagccatcatgcttttttgataccaaggatgcatgactgagcgcctatagaaagatctctgattgaacataaggtcaaatcaagaggatgttaagtgttgaagaagaggtgactngtgtggtatggaatggacattaatcgcatgcttatcatgcgaatgactaagggcccacaattgcggcttatgaaagcccatacat

SEQ ID NO: 59222 - DNA, 443 bp, Glycine max
  unsure (1)..(443): unsure at all n locations
gcggatttggtcttcgccagtgaaaggatcgatgngggtccgtaaatatgcatattcgancatcctactaggacgactgagaaaactgtggcaaatgaagagggtgagaaagagggagaaacccatgctgtgactgccattcctatacggccaagtttcccaccaaacccaacaatgtcattactcaattaataacaaacctcctccttacccaccatccagttatccacaaaggccatccctaaataaaccacaaagcctgtctaccgcacttccaatgacgaagaccacctttagcacaaaccagaaaaacaccaacacaaaggaattttgcagctaaaagcctgtatggttcaccccaaattccgttggcatatgctcaacttgacccatatcactcaatattcatggtagcataacccaacaagatcctaacctcattt

SEQ ID NO: 59223 - DNA, 81 bp, Glycine max
tggggaaaggacattaccatcctggaatttggccacctctatttcccagaaataatggaccctggctaaaacctggcccaa

SEQ ID NO: 59224 - DNA, 461 bp, Glycine max
  unsure (1)..(461): unsure at all n locations
tgcagcttattaagaggtttcctctagaagctntattaagaggtttcctctatatgcttcattaagaggcttctagcacactccagatatcttctcagagatcccaatggtcagatcatggacacgtgtcttttgaagttgcagaccaaatttcgagtagatccaacggttaatgaagactaaatagcgtttttaccgaggcagctgcatgtagctntctctagaagcttcattaagaggcttnctccagaagcttccttgtggcttctttgagaagctagatccttatctatccacacccctctattaactaaattaacttccttataaataattacggatgaaaataacgcaacaaataattaaacatccaacataattactaataatatatagatatatatatcanggtgttacataccggctttngtaggtaaatgtcatataataataataaaact

SEQ ID NO: 59225 - DNA, 385 bp, Glycine max
  unsure (1)..(385): unsure at all n locations
caaagcactggctcttggagcattttctggtttcataactcatgagtatatgaaaatctgaacaccgtaatatcanattaaaatgctgaatactaaatccattaagtgataaaattgatacgagtaggttgtcttatgttatcaactcgctgcataattagttggttcaattaatattaatgtatgagagatgtagtaaatcatactatcttctacagataaggatatgaagctgatcttagatatttnctgggaatttgaatagcttatatgccaaggaaatgttaccgtttctgatagcaacctgcactatgaggaacatggagaacataacaacatagtggaccacaacaggtccagtaggaccatcagaaagcctacatgc

SEQ ID NO: 59226 - DNA, 369 bp, Glycine max
atgccttccctaattatcctatggaggcttcctggctccctcacagtatttttcaagctattgacaaagctagtcgggttacgatttggaacaaggttggagcatctctaagttggcactcagtgagctgaagtactgcctccaagcctctctgggtgacctggggcttaaggactcgagatcaattaatactttcacttctgggtaaataagggtggcatttgatgaactctcccataagtcatgggttaatgttatgaggcataaatatcttagggagcacaatgttttaaatggtcctatcactaatcgtgggtcctttggttagcagagcatccagaaggcaattgtgtcctttaagttgggttt

SEQ ID NO: 59227 - DNA, 330 bp, Glycine max
  unsure (1)..(330): unsure at all n locations
ttttatttgggtagtcgtcgaaccacatcatactctgagagaggtatgctctgatacccacaaacctactcacacataatgtctgggtgcttttaagaattgtggntggtcccataaattaatataagactttttggtatgttttgtccacacttactanaaaaacttctcagaaagtcacccattccataattactttaagctaaccatgtttgactatagagntcttaagtgatggaataccgacaaatatattcatctcgttagtataggtaatactaattatatttctagntactctcaattgtgccagttcatacttacaccatc

SEQ ID NO: 59228 - DNA, 320 bp, Glycine max
  unsure (1)..(320): unsure at all n locations
gtatggngagctgcagaagaacatanaccacagactcttgctacaagtgtagatatatgattcatggcangctgtgttactatgttgaccaatgcatcacagtttccttccagctttntatattcagtagatgaagatgaattcgtggccacctcatggaatcctctaagaacaatagcattatttcttgcactgaattgttgggagttggaagccatcttcccaatcaaattcctagcttcagcaggggtcatatcaccaagagcatcaccactggcagcatcaatcatactctctctcatggttctaagtccctcata

SEQ ID NO: 59229 - DNA, 366 bp, Glycine max
acaccttcatgaacatccattgaagtcacttctgagcatatctgatattcacgctcagcctcattgactttgaggggtgattgcactaccatcaagcacaagtttaccttcactagttgacatttgatctgtgcatggagaaactactatttcaagtccatttacttcaacctcacaacctttaccactccaagggcatttaatcaacaagtagccaatcgaaccttctttgaccattaaggatgatgtcttgccaaactgttaaacattagcagaggaaagcaataagctaataaaaaaattaaaacaattactctggatgaatttcagctgagaacaccttcccaatctataaacataatctta

SEQ ID NO: 59230 - DNA, 350 bp, Glycine max
cttttgcgggatgagcacccgcatatcaccctcagatagacgggtaaatagaggtgatgaaccaagtgattgaacaacaccttttgttcttttgttcatccacgacccacttattggcacaagttcttggcctttgcggagtggtcctgtaacaacttgttccattccaacacaagaaagacacaatatgaagccacctatggcaaaccccctccctctatacctcactatatcgtggggtcatccacgaatgaaggtgttgattccctgctcgccacaagagaggtcattcatgaattgttaagtgtcgcttctcacagcccatgagaaaatgaagaaacactcagata

SEQ ID NO: 59231 - DNA, 255 bp, Glycine max
  unsure (1)..(255): unsure at all n locations
catgctccctcttacacatngtctgtagctgcattctatctggagccatatcagaattgtactgatactgcctaatgaagtcaaccattaggtccttccaagaatggagctgggaaggttccgggttagtataccaggtgatggctaccctaataagactntctaggaagagatgcatcaaaaaaatttcattttttgagtatgcccccattttgcnntgtgtaggcgagtggagaaagaaagtacttgagttac

SEQ ID NO: 59232 - DNA, 195 bp, Glycine max
  unsure (1)..(195): unsure at all n locations
aatgatgtagcaactacctctcagatattaatctcagccagtgctttctctatgttaagatttacttnctcaagttcctttccagctgatgccactacttctcgtatgttagtgtgtgtctntatctctggttcttctgggcctctttgttgcntaactntgattcatatagcagtaattcagcttcaaatcatc

SEQ ID NO: 59233 - DNA, 372 bp, Glycine max
cgtcatatattgagatgctcgaaattgaacgttgaagctcttagccaattcaaacgataataactttttactcggatgtccgactcagagacgtaatatatcgggacgctcgaaatgaatgttgaaactctgagccaattcaaacgatgtctgattgaggtccgaaataaatcacgacgctcgacattgaatgttgaagctctgagcatattcaaaagacaaaagctctttactacgatgtttgattgagatccgtaatatatcgagccgctcgaaattgaatgttgagagcttgagccaaattaaacaacaataagcttttacctcgatgtctgattgagttctgtatatatcggacactcaaattgaatg

SEQ ID NO: 59234 - DNA, 382 bp, Glycine max
  unsure (1)..(382): unsure at all n locations
gcgtctagatatattacaggactcatttcttcatccgagtaaaacggtactgggcganaaatatgcttagctctccagctctaaatctcgagcgtctcgatatatgacgggactatatcagacatccgagtaaaagttattgtcattcgaatttgcttagagattcaacattcatcttcgatgcctcgtttattcgggaccaatatcattcagtaaaagtattggcgntcgaatnttctcagagcttcaacaatcaatttcgagcgtgtcgatatattacgggactcaatcatgcaatcgagtaaaaagatattgtcgtttgaattggctcagagcttcaacattcaatatcgagcgtctcgctatattacgggactatatc

SEQ ID NO: 59235 - DNA, 453 bp, Glycine max
  unsure (1)..(453): unsure at all n locations
agcttaccatcatctctacaactatgctggttttatatttatccactacaaccattttctagttagtactacattaaaaaccataaattatattgcaaaatatttcctcccaaatcttctctagacaacaacataaatttaaatataaaattcatcagcaagcttatggaggtgcttttagaaggaaataccccacctttgatccatctcagttcatcaatgacntaattattgttaattcaaaaactaataaagcggaagcaaaaggattagaaaaatgtgaaataatggacttttaatatctagcgagccatgagtactattcactgactcttgtggttggttacaaaaatcgacagaggagaataaacattaattacctcaatttgactctgaaggaatctgatatacccaatatgctctaataagacaaacactgngtcaatctgcaaa

SEQ ID NO: 59236 - DNA, 330 bp, Glycine max
  unsure (1)..(330): unsure at all n locations
accccanagcacaacatataaaccaacaataactacaacagcacctaccanactgaatatgaatcagcgaaatcccacccataaggctacttctcatatcctgaaaactcctatatatgttgcagcccccaaactcctacgtgcctcaagcattgggtcataaaacaactccttttggtcttcccaaggctgaacacaccacaggccacaactcaagtncatgccaaacacacacacacacacacacagagacacacagacacagagagagagagacacacacacacacacctacaataataaagcataagcacccccgaaccccacaat

SEQ ID NO: 59237 - DNA, 187 bp, Glycine max
  unsure (1)..(187): unsure at all n locations
agcttacanantgtattgtaaaatatgatgatttatatatatatatatatacatatatatatatatttttttttttttttcatacttgacatttgtctcatttattaatgaaattgttataatatgtaattaaacgattttattattggtgaaaatgatgattaaatttttttattagaatttttat

SEQ ID NO: 59238 - DNA, 246 bp, Glycine max
  unsure (1)..(246): unsure at all n locations
tccttatcttctagataatattggatctggcgctagcatgatcaaggtatatttgtttagtttcctctctttatctaacttgctgatatctttggtttattgtttataaagacaaactgtcggtaatccattattttaatctgggttaacacacgttgatggggatggaaaatatgagagggtcaatgggactaatgttggcggtggtacttattggngattgngaaggctgttaacaaagtgtga

SEQ ID NO: 59239 - DNA, 410 bp, Glycine max
  unsure (1)..(410): unsure at all n locations
agcttctatataagctttatccatntttatcaatttaacacaagnngagnnntcattcagaaaaatatagagtttcatctcttcttaatcttagcggagagctgattcttcctagaattctcgacgtgattctaagaacacccttggcttgtaatcaaagggactttcaccaacctttgtgtgtctgccctcgctaggaaagagtggattctttctttccatttcatcttcaccgcttgttcttttcaaacacacaattctcagacaatcccacctctgcccagaaattatctccgtggccataatctcaccgttttactgcactcacaattaagtgtattcttgagccctatattgaatttcaaaacgagacctttcacctcgttctggaatcacctcatttgggagcc

SEQ ID NO: 59240 - DNA, 416 bp, Glycine max
  unsure (1)..(416): unsure at all n locations
agctntngcaagctgttaatcattatcctatctccgatagccaatgggngagtcccgtccaggtagtcccanagaagactggcctcacagtgatcagaaatgagaaggaggagctgattcctactcgggtgcagaacagttggagagtctgcattgactataggaggctgaaccaggttaccaaaaaggaaccatttcccctgccattcatngaccagatgcttgaatgcctggcaggtaaatcccactactgtttccttgatggttnttctggttatatgcaaattactattgctcctgaggatcaggaaaagaccacattcacctgccccttcggcacttttgcttataggaggatgcctttcggcttgtgcaatgcccctggtaccttccagcggggcatgattagtattttc

SEQ ID NO: 59241 - DNA, 284 bp, Glycine max
gtccccacctacccctcttctttggctgttgcctactttacgttgtttttaagatgaatttaatgattctattatgttacccaagtctctcctagatctttcccttggctcgtcaaaaaacttagcatttataattccaatcgtgctaagataaccaaataatcctacatgtttaccaccaagcaagttcaaaaataaaaagtgagaatcactactgagcgcataaccaatacccggataaccagtctattttcttatactatgtacaccctaatttatcttta

SEQ ID NO: 59242 - DNA, 242 bp, Glycine max
  unsure (1)..(242): unsure at all n locations
tctaagtcacctgcggctgcaagcttaatggagcttacatcatgtgagatcatgttcatcttcttctaggngangntcttttgccttctctatctatttgttcgnnccnnatctttatatccttgggcttcatgttattctccatggacatcctccatatgtttgtggtttggcgtcgttagagtagactaaataacaaagaccgattaaatcttaaatctgcacttggtcttgcatttcta

SEQ ID NO: 59243 - DNA, 408 bp, Glycine max
  unsure (1)..(408): unsure at all n locations
gcttctcgngcatcctgcaagcaacattgaaagtagtttatattggacatactctaagcanaatgcatatacctctccataatacaacaccatgtatattagagcaagctttatgcgcatatttcctacatacgttctcttgcacaagacanttaaaccgaaaagtgcacccatatacaatcaagggcagcttcgttaccccagaatattatacacgtacttgccanggtgtatttgttacttacatcacacacatctncttggctgaattacatacatgcatactcanagcattttggggtaccaaaaaatgcacatgtgcacatctnggtatntctaatacctatatatacanacttcatgatgaatctngactatctacacaataaggggctacatttcatgctc

SEQ ID NO: 59244 - DNA, 411 bp, Glycine max
  unsure (1)..(411): unsure at all n locations
aagatnattgggatacacaactattccttaacccttagaatggatgataacaattaaaacagaaagaanaaaatgtagtatgcatagtgagaaatagatatgcatactatattgagagaatgcanngagttggtctatgaacaataagctacaatgctacaactgagaaaatattaacacaatcaccactaccacaacaaaaacaaagtcttatcccactaggcgaggttggctacatggaccgcacaacgccatttggtatggttaaataagaaaatatgaacaaaattaaaaaataattataggggtttcttcatacaaatgatttacttcccacccttcacttataaatatcaacttcaattaaaccaaaaagccctcacatgttcaaacatatacaatatacaagat

SEQ ID NO: 59245 - DNA, 104 bp, Glycine max
gagaacggagaggaggggggtgactgaccgaccggacgaagacgaggcgcgaggggggagagacgcccggccccaggaaggaggcaaaaccacgagaggagggg

SEQ ID NO: 59246 - DNA, 376 bp, Glycine max
  unsure (1)..(376): unsure at all n locations
tgatcatganggagctaacataaatattcatgcaggtggaccttctttcaataggtctaacttgcagcagccttctatctctcttccattttcacctacagctattccaaacaaaaagatggaagaagtggataaagagatcttggagaccttcatgaaagtagaggtgaacatacctctactagatgcccttaagaaaatcaaagatatgccaagtttctaaaggagttgtgcacccacaaaaggaagctcacaggcaatggaaggattancatgggcagaaatgtatcagcattgatagggtaaattgataccttgcattatggcgaacanacaaattgagaatgccatggtagatctaggagcaatcagtagt

SEQ ID NO: 59247 - DNA, 229 bp, Glycine max
  unsure (1)..(229): unsure at all n locations
atccttagagcacctgcagctgcagcttgctagcccaatccacaatttcaacttataaagatnntgcgctagcgcgganagatgcgcttagtgnacnnctctattgacaacagngacataatgagcaagctcgctaagcccaaattcaacattttgaaaaacggagagataattgcgcttagtgtgataaggcatgcttagcgcatagcataacacgaaaattctaagt

SEQ ID NO: 59248 - DNA, 390 bp, Glycine max
  unsure (1)..(390): unsure at all n locations
ctcttaattgactttgggcgtggcgaccacgatcaacaaagtactttctgcacctactatatgttgacttgaccaacgctgttattggaatgctgcgacaatctttcaacaccttattgacacattctgataggttggttgtcatgtgaccatatcgtcgtccagatgtatcgtangccatgcttccattttcctttgaaatgcgatcaatccatctcgctatggctggactcagttgacganattattctaagttttgatcaaacacatgcttgcaaggagtgtacgctgcatcaaaattggtatcatcaannagtgtacgtagacatcacactcacattatattaatggataaaatcaaccttaccccaattcttgaacatctctttt

SEQ ID NO: 59249 - DNA, 134 bp, Glycine max
  unsure (1)..(134): unsure at all n locations
aagcaccgcgctcagctctgtctggctagatatggatatattgaccctcatctcacaaggcctncntgaaaaagaaacaactaagtcattatagagctggctcgtacaagtctaattgaaacgaatgtgcggca

SEQ ID NO: 59250 - DNA, 365 bp, Glycine max
  unsure (1)..(365): unsure at all n locations
ttcctttacttgttttgaagctcactacaagccttaagtgaaaaaccatgatatcaccatatcctttaggaattntggagctttggaaatggttttggaataagtgtggngcgatattgtttcattgcacaacttggttggtggctatgcttcatgatgtattatgggccatacttgatgaacatcgtatattgggtaaatgctggacatgctgaatgaaatattgtntctcataggctatagagtaaaaaatacaatcgaaaaataaattcgatatagataagaaaagcattaagttgagtgattatatcttaaatgcacaagaatgtgaaactctcggtctactcttcatgataaaatttatc

SEQ ID NO: 59251 - DNA, 388 bp, Glycine max
  unsure (1)..(388): unsure at all n locations
actattggaaaacccgaatgcaaattttattgaggcaatagacttaagtattagggaagccatagatatagggccatatatacccgccacagtagaaagaattacaatagatggtagcacatcaagtgaaagcataacaatagaaaaacctanagatagatggtctgaagaggatagaagacgagtacaatacaatctaatagccaataacataataacatctgccctgggaatggatgaatatntcannggttcaaattgtaagagtgctaaggaaatgtgggacactctacaattaacactatgaaggaactacaatgtaaaagatctaggataaacacactaacccatgagtatgaactgtttagaatgaatgcaaatgaaagca

SEQ ID NO: 59252 - DNA, 103 bp, Glycine max
  unsure (1)..(103): unsure at all n locations
actccnagtcacctgcggcatgcacgctagaagctcatggaaagattgaagaagtattatataaagtttttgcttttacatgcccaactcatttgagtggcat

SEQ ID NO: 59253 - DNA, 345 bp, Glycine max
  unsure (1)..(345): unsure at all n locations
gcgcatattacagaatgtatttcggtggtgcagaaagttctagcgtcgctggcatgctaaccccaatgctacgggatttacaacttcaagttggacttagcataaggctaggctaagcgctagtggtntaaaaagcaaaggcagaggcacaataagcgtgccatacgaaattcacgttttaaaaagcataggcagaggcacttgtgttgttacctttgcacccaaacctctacaacctctcatttttagcattcttttaccctctgctacgtgtgtattgcttctctgcatcattcttgcttcatttcaaagacaatccaagtaaagtagcacatttctcttttt

SEQ ID NO: 59254 - DNA, 455 bp, Glycine max
  unsure (1)..(455): unsure at all n locations
tgctgccgattacattcctcttctaagcaatctctgaatctctaatcttatgattacaacggcaaccctcatctgggatacaaccgagccggcttacccttatggattgtcgccaactactcaccacccgtnctgcaagacgatgcgggcaatattgcttctcctgtccttgaaagagagcctcctcaacagcccgacgaggtccacgaagaccctcaagaatatgctcgaanggatgtcgagttctattccccgttcccgaagggccgacacccgcatgttgcctagcccacatcacnacacaaccaatagttttgtcatggaggactgccccggcactgaagaaagaggaactcgatctctgangaagatgaagcatggaagattgggacatcgtccaacatacgatcttgttatacccagtgtatccctgaattaagaccgcttcaaagata

SEQ ID NO: 59255 - DNA, 297 bp, Glycine max
  unsure (1)..(297): unsure at all n locations
tggcttcccttcattgatgatgaagatgtactccaaaccatggtaccttctagatgattggggctctttatttgatcttctgaacagcaactgcttttcttgctcaacaccttcatcatcaccatactttattgctagctcatcatcaaccctaatgtcattatcaagatctaccccttctatggcaattcttctagcangggtgactgtgtgtagatcaaccttaccaccttgttcactggtttctaatccatcagaaaccaacatagttngtcgctcatganacacctacgtctt

SEQ ID NO: 59256 - DNA, 172 bp, Glycine max
catgattcaagcaaagaatgaagaagatgaggaggtaactatggctcgatttctaatggttgactaatgatatccggaatgttgactgcggagttgtgaaaggatgattgcttacaagcatcagttagcacaatataaggaaggagggtagagagttaccaacttggtcttt

SEQ ID NO: 59257 - DNA, 130 bp, Glycine max
ggtggaaggaaggaaggaaagaggctgagtgaacctcaaacccgactaaagacgcagacagcagaacggaatagatcaagtttaaaaacagaagagacaggacccccctagggagggagaggaaaacaag

SEQ ID NO: 59258 - DNA, 193 bp, Glycine max
atcactgtggagatgacaagccaaagactatgcatacatacttgcttacttcatatacacctgaacatcaagtggaaacatgaccaaaactactggtagcttgacattaattggtgagatgtttaccagccacacaactagttctttatggctcttacttttgtcgatctcacacctgaacttgatgtcgtct

SEQ ID NO: 59259 - DNA, 207 bp, Glycine max
  unsure (1)..(207): unsure at all n locations
acctctaagtcacctgcaggcagcaagcttccatccagctcgtcaggcgagcagggttgtttccttataagcacagccttctggggaatcttctggaggccctcnccncctgattgttattggacacccatttttctaagtacacccacctgccttgttatggggagtgctttttttaagagtacggaaacttacgaatttcgaacg

SEQ ID NO: 59260 - DNA, 266 bp, Glycine max
  unsure (1)..(266): unsure at all n locations
aagatgaatcgagtcacatcactggttcgtctactgggcaaacatattaggaatggttatggtcttgttacttccagnttcaccttgacaaagatgtcatggaccatgttgaaaatctaaattgattcaaccccatatcctgcgtaaaaattcacaatacttcaactgtacatcattcgcatacantccatgctttcatttggtgcattgctcatngcattctttcctntgaaaataaattaaataaaataaaatgaacttaatca

SEQ ID NO: 59261 - DNA, 84 bp, Glycine max
gacccaagcaccgggctcagctacttgaaacttctaactagattgtcttgatactatttaataagaggtattttcagttatatt

SEQ ID NO: 59262 - DNA, 293 bp, Glycine max
  unsure (1)..(293): unsure at all n locations
ctcgatggtggaggatgcatgaatgacaagcaattcatggtgctccggattagattngaaggtagaggatagatgaacagcactaggcaatcaattcgtggggcttcagacttgatggtggaggatgcatgaatgacaagaaattcatggggctttggattatatttgagggtggatgatagacgaacagcgcttggcaatcaattcgtggggctccagactcgatggtggaggatgcatgaatgacacgcaattcatggcgctccggataagatatgttggcaggactgaat

SEQ ID NO: 59263 - DNA, 387 bp, Glycine max
  unsure (1)..(387): unsure at all n locations
agcacgacattgacggaataagagaggtatagaagtggaactttgaagtatgtctcacaagactctcattcatcaaagatacaacacgtgttacacatgcttctatatatagactatgtagcattcttgagaagcattcttgagaacacttgcttgagaagcttctctgagaaaacttccttgagaagctagagcttagctacacacacccctctcataactaagctcacctccttgagaaggcttcttaagaagattcgtaaagaagctagagcttagctacacatacctctctaatagctaagctcacctccttgagatgagaagctagagcttagctacacancccctataatagctaagctcacccccatgacaaaatacatg

SEQ ID NO: 59264 - DNA, 140 bp, Glycine max
  unsure (1)..(140): unsure at all n locations
aaggaagaaagaagggggggtagctaactgaacgacccacacgagagagnagcgcaaggaaagatcaagcaagcaggggggcaagaacccccggaagaagggaggaggaaggcgaggaagagcaagcaagaccaaagcaa

SEQ ID NO: 59265 - DNA, 481 bp, Glycine max
  unsure (1)..(481): unsure at all n locations
gctgangattatgggacccatacatgtggactaagtggcggtcgtgcgatggtgcacaacaagntntncacatncacaatgcgcgcattaacccaccatnccctggtgcccacctncaactgagctcacgtactcccacgtagcccatatnctcatttctctcaacaccgggtccccatcaatccttccaagcttncacaacatccaagcaaaacaacattcaaacagcacaagctatcacagccaagaaaaacagagcataggcagaaaactcttgcaaaacaccaaccaaatcacagcttttctcacttaaagaccccagtaacaatccttcgatccaattcgttaacccgtggatcgaactccaaaatttactgggagtctatagtacataagcctacattntgaccgttgggatctactagcanacacccagaactcattctgcactactctntccacagccaaccacacacaagca

SEQ ID NO: 59266 - DNA, 453 bp, Glycine max
  unsure (1)..(453): unsure at all n locations
tatcggggaaagaccaaacagatctcacagctccattcaccttcccatacaaatcaatattccacatacctgtcaagtttttttgaaccacaacatcatcatccataagtaagatcttatacaatttatggtacatctctggcatataaaatccaaggtgatacaacatggacagggacttggcattattcatgttcgcatcaatgtgtggcattatcagcttgattctccaagtaccgctgcttcattttggctgactcaagttgcctcaagatcgggacatatgatgaatttaagaatgtgaattcttccaccgatgtcacctctaanaatgcacccgcttcaatgggcctcatcttaaaccaaacccttatttgcacaacattcatactgtttgaacaacatggaagacatgctatcatggttcactgcattctcaccacagatctcaca

SEQ ID NO: 59267 - DNA, 188 bp, Glycine max
  unsure (1)..(188): unsure at all n locations
ggatccttaagcaccgcggctgcagctataaatactgaatgtattctgtcttctaagagagccttacacagcctacgtatccnnctactgtaatttatttgagcattctttatgggaagatgcgcagcgactggaatgtgttaacttttgagatgcttctactaatctagagggactttttactacct

SEQ ID NO: 59268 - DNA, 392 bp, Glycine max
  unsure (1)..(392): unsure at all n locations
tatgcttatgatacagatattntcggagaagcatctatggcaaatgtcaaaactgtgaaggtattctaggagtttgagctggttctggattgaaataattatgctaaaccaattggagttgtggtcatctgagaggggtctctgctgaactatttactggctctggtcaattcctttatgttatngtangaacttctgtattgttgacaaatccccaaagaangggtggtgtgggatcctgtaattaggaagattgaagataggctgaataggtggaataagagaaacatatccatggctggcagactcactcttattaaggctgtctaacagcactacctttgtttacttaacttttttcggggccctaaacagtcataataaggtatctt

SEQ ID NO: 59269 - DNA, 178 bp, Glycine max
  unsure (1)..(178): unsure at all n locations
agtcctctcacgaggtggagggtgngccatgttctccaatgcgcgacatcataatgcttagagtagaatgctcttcattatcttgctccatatcatgatgttcaaaatcaccaataacagaatgcacagattcaccagttatggaatgctcataatgatcaaaaggtataaaatgatg

SEQ ID NO: 59270 - DNA, 281 bp, Glycine max
gcaaatctgacatcatgctttataatgcacaaaataaaaactggtgcagtgaagagggtgagaatgatggagaaacccatgctgtgactgccattcctatacagccaagtttcccaccaacccaacaatgtcattactcagccaataacaaaccttctccttacccaacacccagttatccacaaagttcatccctaattcaccacagagcctgttatccgactttcaatgacgaacaccacctttagcacataccataacaccaaccaagatatgaattt

SEQ ID NO: 59271 - DNA, 127 bp, Glycine max
cgagagcacggaaggcacgaaaaaaagttagcagagaaaggaacaagaaccccagaaggaagaaaagaaagagggagggagggaagagaaggcgagaaaggagggagggaggaagagaaggaaggag

SEQ ID NO: 59272 - DNA, 208 bp, Glycine max
  unsure (1)..(208): unsure at all n locations
nagcttganatgaggaagtgtgtaaaggtgagacttcctctctttattggtgaccacagagtggtacctgnnacctgtcgcggtggtcaggagatcttgtggtcgtcaagtgtggtgctattgccctaaccaagcttgccaatcccgacccacccgggcatatgctgtcagtgataacctgtgatgtacctaatcaagcgatctcctg

SEQ ID NO: 59273 - DNA, 184 bp, Glycine max
  unsure (1)..(184): unsure at all n locations
ctactccgccccgaagagatcatgggctctcggtattgcagctatgataactaatgcccactaatagaatcgtaggaacttgatgtctctagacctgacagatcacttcttttgaaanaagagtgatcatgttactcaaaaaaaaaaaaaattggcaaaaaactccgttttttttactcatgat

SEQ ID NO: 59274 - DNA, 132 bp, Glycine max
  unsure (1)..(132): unsure at all n locations
agcttcaatgttaatgtcacatcagataatatcttattctatatctaattatggagatcatgatatggtattgacagtgacatctcccncccgagtatagttagattgggatggcactaagcacatgatctc

SEQ ID NO: 59275 - DNA, 453 bp, Glycine max
  unsure (1)..(453): unsure at all n locations
atcctcgctgtgaatgctgacaatgtgntatctaaccagctnncaaacattctcaatggtctctgcaatgactctgtcattctcatggngaaggaaattcttcttttaggtgcatgataaaaaggtatggagttccaagtgggaaatacaagttttataggtgtgcctagcagtggataaacaaccattgtatcttaatagcagctgctcgaggcatatgatangagaacaatcaaatttcttgtctctaaagctaaagaaggaggatttgtaacctttggtgacaacaacacagggagaattctcagatacctctctatgatgatgatgatgtaagaagtcctacagaatcctctcctacaagtgaaaaggtagtgaacaataaccctctctgaagaacacccactacaacaaaatagtcttcataaggagtggaaagcacttaatgacctt

SEQ ID NO: 59276 - DNA, 173 bp, Glycine max
  unsure (1)..(173): unsure at all n locations
ccagcttaaactagtgttatggaaaataatcaatataccaactatggnttggaatataatgttgttggaagaaaaccccnctcgcgttatgtgtggactggactcagcgaaaaagataagcactggtaagtctcaaggctaatgataactctgcagtcaaatcaacggtgatt

SEQ ID NO: 59277 - DNA, 440 bp, Glycine max
  unsure (1)..(440): unsure at all n locations
actcagcttgaagcgagctcganaaatgatatggtcatgagaactatttacacagtcactatggtcaggaaagagtgtgatgtgtngagagatgtcaacatgactacggtcaaagcattagagcagaatacccaaagcaggaaccagtttcgaggggttctatgggacagcagcaatgagctcaagcttagaagggccaagagggacgagtcaaggttggacagcttggtgttagaagataagttgaaggcttgtcatagggcaaagagaagtttgacggagcaactgagcagaacgaaagagaatatgttgacaattattgatcaatataaggagaaggtgaacctaactgctagtcatgggcacaggctggaggatgaacatgcgaaggtatcagatctgcatattgaaatggaagcatgagaaagggtgatagaatc

SEQ ID NO: 59278 - DNA, 459 bp, Glycine max
  unsure (1)..(459): unsure at all n locations
gctgctgagtacattctccccctttctctagcanantcttaattcttcttgacatcatcaaaatcttcatgatatacatctctaactattccatcaaacatctggtgctttgtatctagtgtatgctggaggttcagttnttttaccttaaataatattatattaatacctgttatagaaggcagatttttgttgaccaataaaatacgcttaagtaataatacttgaacttacacttgtcatgttaatatacataagtttgctgggatctattaattcacgttanattttgaaataccattgccttttttaatgcatgcttagaaatagagtatatggtctggtgcattgatttgcanaatctggactgttacaagaaaggtatggatggaacatgtaaacaaaaaggactgaatgacaaaggttcatttgagtaattgggtatgctgattattttag

SEQ ID NO: 59279 - DNA, 219 bp, Glycine max
  unsure (1)..(219): unsure at all n locations
agcttatgagttagaggatgaagttatgcttgtgttgtcttatgcattgcaataccctccaaggagtgaggttcaccaactcgccccccgatcatccgatggtttgaggtcaattggaatactatgaaagagaagcggatgcgtgaggcccaagaaacttacaagattngctagagggaattacctgtgtgggccaatgatagaagtcatgtgagttat

SEQ ID NO: 59280 - DNA, 434 bp, Glycine max
  unsure (1)..(434): unsure at all n locations
gatgacaacttctgaaatctataaacacacacactttttcctagtcgatcactctcatanattctncccctttggttttgaatntatgtttatcataaaaattaaattgattactcatgtgagttcttgatttatccccatttctctccccctttggcatcaacaaaaagccaaagtgcgtatcanacttnaagtatacaaatatagcttaaacattcataccacattcattgaaaaatatcaccaaaccatgagcaagaatatgaagaacaatctaaatagataactataaatcctatagtcaatacatacttaatgttgttaaactaccatgcaataggaaaactnatcgtcaatacctataatatgagattatttgataatactgcattatagtctaatctctttatgtataaagaatcttactagtggtt

SEQ ID NO: 59281 - DNA, 219 bp, Glycine max
agcttctgctaagggagcttctgaatctaaaggtatattatctaagcgcgtctatgggctcatcgaggaaattgagacaatgcaccctcggtctatcatttataattggcggagcaagctcgcattcatgctgattttctctgtccactcctgaagccatttcacggagacccaacctctccagggaccaatgaagccacccaattgcctagtcaatac

SEQ ID NO: 59282 - DNA, 265 bp, Glycine max
  unsure (1)..(265): unsure at all n locations
acccatttatagtgaccaccgtgggttaaaagcggtgggtctttctaattaacgagttgatgcatcataagatatttctctattaagaatgtcttggtgtctatgcttgagactaaagtactaaaccttgatccctcgtacgtttagacttaattanaccaagcttcattctcggatccctcttggtggactaggcttaatttaaatagcactataatcacatcattaattaaaactataaaacatgccatctatccctagcaat

SEQ ID NO: 59283 - DNA, 307 bp, Glycine max
  unsure (1)..(307): unsure at all n locations
gatgagaagctagagnctagcctacacccccctataatagctaagctcacccctatgaaaaaatacatgaaaatacaaaaaagtccctactacaaagactacacaaaatgcctcaaaatacaaggctaaaaccctatactactagaatgggccaaatacanggggccaacgaaagaaaacctnatctaatatttacaaagataagcgggctcatagttagcccatgggctcaaaatctaccctaaggctcatgagaaccctangacctttccttggatctctggcccaatctacttggagtcttcta

SEQ ID NO: 59284 - DNA, 122 bp, Glycine max
gaaaaacgagagagtaggaagcaggattatttttacacgagggagaagcgaggaagaaaccgcccccgagaattaagagggacaggaaggaagagagtcgcagaagaagaacagaagggaac

SEQ ID NO: 59285 - DNA, 65 bp, Glycine max
  unsure (1)..(65): unsure at all n locations
tcactaaactacaatacataccctgtatatgaaacgtntcgttcttcatatataatcttaataac

SEQ ID NO: 59286 - DNA, 55 bp, Glycine max
agctaggattctctattagtaggatatctttccttactaatatgagagccaaccc

SEQ ID NO: 59287 - DNA, 208 bp, Glycine max
cttgtgtgcggactcttaggcacttatgatagccggcgatgcttccattactgcttcccctaagctcttttgtctttcttcacgccgcatcccatgccttgcgaacttcttggagtaccctcgcggtggggtcactaacacctcgtgcgatgaaaggcgtgatgctttcgtctgatggcacttctctcatgggacattcttcgcatga

SEQ ID NO: 59288 - DNA, 216 bp, Glycine max
  unsure (1)..(216): unsure at all n locations
agcttntcagcaataggcgtctattgtgtatatatagcgtgaatatgaacaagggttatcaactatctgtgcacaacaacgatttctcgtgagagaaatgatgtataaaacccagtagagaacacgttggcattctagtaggtgcctgatgctaaaaagatattccctatcgtacaatgctcatgtgctcttatggtggctgctgagatactaaac

SEQ ID NO: 59289 - DNA, 213 bp, Glycine max
  unsure (1)..(213): unsure at all n locations
agcctnanancctacgngngaactttataaccttcatatattataaagcatcacatcttggttccatatacaaaccccnctcaaataataatactcaacttttggatactgaaataaaagacataacatagaaagctctgatctcaacgaatttgaatcataggacaatatcaacttaaaattgtaatacaatgcataaaacacttctaacac

SEQ ID NO: 59290 - DNA, 294 bp, Glycine max
tatcttcaagacaatttggaagctgaacattccaccacgggctgcggttttctcttggagacttatcaaagatagattatccactagatataaccttcttagaagaaatgtgcccattcatgaaaatgaatgccctctctgtgggtataccaagaggaggctggcacttgttttcaattgcaattgaccagaggactatggtgggaaccattatgtggaccagatggtggaccactttcagttttcagaactcactttgccattctggatggtttggacagggaaaatatactc

SEQ ID NO: 59291 - DNA, 64 bp, Glycine max
  unsure (1)..(64): unsure at all n locations
agcttattacacaccatatatgtgtcaccttgatgtgagagngngttaaagagcatattattca

SEQ ID NO: 59292 - DNA, 208 bp, Glycine max
agcttagcccgatctaatacaccattgttaaagttctatatagtaaaagaaacatcctcaatgtaatttgtccactactaatctacaacttactcagataccttgtactaatgcattaaataatccacataacttagatgcaatcactttgtgtgtttaagcatatagttctccagtcaaaattaaaattttactacaatatatccca

SEQ ID NO: 59293 - DNA, 363 bp, Glycine max
  unsure (1)..(363): unsure at all n locations
tcaaatgactggaagaacctgaatgttgcaagaggcggcaactacctttttccgtatactacgtaagtaagcaccatacaatntcatatgatcacacaccatgtgagccgttcctgataaagaaaaatggtacaaataattatgagaatatttccttttttgtgcttcataagcctagtcaaacataaaaacaattttattatgttcataaataactaaccactgttcttattaaagagtattaattattaaactttcttacaactaattagataacatattataagcctatttatgatttataataaaatatgggaaacaataccatcactggaatgttataatgaaaatggacatcttatt

SEQ ID NO: 59294 - DNA, 202 bp, Glycine max
tctcaatctgacatccactgaatgctagcttggcatctagaaatgacttgctttctttgctggctctctgaagcttcataaccattgttcccattaaattggaaagagcaacgcttcagctttaatctctcagatatgcttaccttggactttctgctaagagtcttgctttacgaacaaatttttgaactgcttgacttgc

SEQ ID NO: 59295 - DNA, 373 bp, Glycine max
  unsure (1)..(373): unsure at all n locations
ctatctacattcttatatgaaatntatcccacaataaataaatacataatcaatactctgatgtctggacctcttgtacacacaacattggttcttttaacgggaaacatggaagatgcagaggtcaaaattgatggtcaatctatatggtattccttgtgtattgtatgacacttctttaatagaaatatgaaaaagggaaaannnacttgtggacacctcgtagtaggcttctngagaaaatagttgattngctcctaaattaatcatatcttaacatgctagttnttaacaattcatganatgagaagaagttaaccttagaagatatcaacagtctaccagatttggaatatgttattcattcagcatg

SEQ ID NO: 59296 - DNA, 161 bp, Glycine max
  unsure (1)..(161): unsure at all n locations
agcttcaacatcagaccacttccagtgtgctggttctacttcacatggacttgatgtggcctatgcgagntgaataccccnatgaaagaggtatgcctattgtgttgtggatgagctctctagatttacctgggtcaactttatcagagaaaatcagaccc

SEQ ID NO: 59297 - DNA, 144 bp, Glycine max
catttcaaaaattgttatatcattgaatttttttaaagaaaattgaaacatctctttaaaagcatgcggtttagctaacacttatttcttcccactttttctcactgttattgccttttctttttttcccctttttgttttatt

SEQ ID NO: 59298 - DNA, 184 bp, Glycine max
  unsure (1)..(184): unsure at all n locations
agcttcttttggaccttgaacaagcatatcaacttctctntctgaaccatgctatgggctcgcgactggtccctttctcccttcgcaacttgagttnactattgctaccccatagagctactggaaatatgttccggtcatactctttcttgcaagccctctgggattttgatcaaaggctctt

SEQ ID NO: 59299 - DNA, 479 bp, Glycine max
  unsure (1)..(479): unsure at all n locations
agctcatcanatannaaaatatgtcgttgatcctggtgttcctctcaagtacctctccgaagaagatcgtgtagcagggacaatcaatccaaaatttacgaattgggatcgtcaagatgctctaatcattgtttggcttctttctacgctttctgattcaattctcagtcgtgttgtgacttgctgtcatttgttcctagtctggaatgccattcgctcccattatcatggtcttacacgtgagagaaccaaacaattacgctnggaactgtgaaccatcaagataggcgacaaatctcgcagtgagtatctgcaaagaattcaacaattgtgcgatactctaacagcaactagtgatgcaatctccaattgtgaacacacagacactattcttggtggtcttccttctgaatatgaagcactcatctttatagtcacaacatttcttactcgngatgntgatgtctctggtcttgata

SEQ ID NO: 59300 - DNA, 188 bp, Glycine max
  unsure (1)..(188): unsure at all n locations
agtcacctgcagcatgcaagctagcttatctagagatagactgtggtcatctctcatttaagnnggngggcaacatatttctttgcctatagaactcaatatttcgcagtttatgtttgatggctggcacacctccatgaaagcaagcatttctctttcctatgtcatgacttgcttatcacaaattc

SEQ ID NO: 59301 - DNA, 235 bp, Glycine max
  unsure (1)..(235): unsure at all n locations
acctcagagtcacctgcggcatgcaagcttctagacatacatatatacgttganactgttgtggagcattgngaataggaatacaatcaatcttacccgccgacccccgagttaacttctaagttactcatgagcataggcccacatctttgcgtattgataggtaacatcaccttccaccaactggcttgcttcttttaatgacctaaatagctcggagtcgataattagcact

SEQ ID NO: 59302 - DNA, 170 bp, Glycine max
atatcaactagttacacctagtggataagcgacatcatgacgtgtacaagtcatggtgtacatgatagcactgcactagcatatggtactctactcatgagttctctttcttcaagagattttggacaattcttcttactaagtgtaattccacacctacaggcaaatag

SEQ ID NO: 59303 - DNA, 216 bp, Glycine max
  unsure (1)..(216): unsure at all n locations
atctctgagcacctgcggatgaagcntttaagcgcgtgtctgtgagacanaggtcatgtgttctttattatctaagatgactgtccgagtactttggaatcggctcaccctgccctcctgatntacaagtgagaaatagcgaggggaataacgccccggttgtacgcaacgagcataatgtaaatccttacagtttgagaagctctataggtgggc

SEQ ID NO: 59304 - DNA, 288 bp, Glycine max
  unsure (1)..(288): unsure at all n locations
agagtatgatgaactaanggacgtcaatatggccacatctgaagctttggaacgagaaaccaagaaggcccgaaaggaagaacacgaccaaagcatagttntgaggggctttatagggcagcaatagtgagctcaagctccgaagaggtgataggaatcatcacgggtcataggcatgatcttgaaggacgagctaaagggttgcctatgttcgaaagaaattgtcccaacagtaacgagactgaaggaatatgtgggccatatcataagtgcaagagaactaaatct

SEQ ID NO: 59305 - DNA, 225 bp, Glycine max
  unsure (1)..(225): unsure at all n locations
agctntactctccactgcatctagtgaaggctcatttntattctccactgcaccttgagaaggtttaacttcaccctccattgctcattcgaaggtccaacttcactatgtactgcaccttgtgaatgttcaacttcactctctactgctccatttgaagggtcagcttctctctccactgatccatttgaaggtgtagctttgatttccactacaccaattaaa

SEQ ID NO: 59306 - DNA, 222 bp, Glycine max
  unsure (1)..(222): unsure at all n locations
agcttcacagcagaatntaggtatgacccactaactctataatttatattacttaatgccactaacctanggaatgaataaataactaacggctgagtgtgactgaaattgtggcatcnctaagtcacctccaacagccaataagatagccaccatttggtctcccaaaaagctgatgcctatgttgccaattaggcccttattacaacttgaactaaacct

SEQ ID NO: 59307 - DNA, 368 bp, Glycine max
  unsure (1)..(368): unsure at all n locations
acaatcatagagacttctcttgaattcttggctggngataagctatcaaccttatgaccattgcttggagaatgttaaaccatacaggacctttgcgtgacaactacctttttactgactcaacctcggcgttataaaatttttcatctcaggagaaacagcttgacatcagtgtcagttcaatctggttgcactatacaagcaaacctgatgatgatgcctaccatagaagaaaaattcgtgaaattattcttctttactaatccttgcaacaaccagcctgatctatccttcttttaaagacacgttctctgatatcactgcactacacagtttcttatgagtaacagttcagttgatctatcaaa

SEQ ID NO: 59308 - DNA, 404 bp, Glycine max
  unsure (1)..(404): unsure at all n locations
ttttattaaacctatatatagcattgccttaaagaaatttaatgcattttcactatgattactaataaagaaattaacactctagattaacaaaatctttataattaccgggggtgtctttttcatatgcacatatatttccgtacctatgaatctagcaattccttcaacgaacaatgaaatagacttacctgccgagtaataatagacagttatttaatgaactctgactgccatgtgatgagaatacctagacacccacctatcatgttaccaagtctatgtttctaattcaatganttgattatggattacngaacatctcatcanattattaactaactagaatattgatcacacgcnccccaatgaataantggctaccatatcgatatcatcattga

SEQ ID NO: 59309 - DNA, 170 bp, Glycine max
ctctgagacgcctgcagcatgcagcttcattgaagaagaactcatgttatgcttaagcctatcatactatctaactccctccaataccgacagactccttattataattaaggaagctcaatacattatatatatatatagatacagtatatatatatatatatatatat

SEQ ID NO: 59310 - DNA, 151 bp, Glycine max
  unsure (1)..(151): unsure at all n locations
agctntcataggtataatcatgtgcagccatttctctcagagtcctctcacgaggtggagggtgtgcgcncncncncaaggagcaaatacatatgcgttaaatgatgagtcttcgaaatattatgctgcaatatcactatgttcagaatca

SEQ ID NO: 59311 - DNA, 123 bp, Glycine max
tatcaaaaccccggggacccccgcccactaattgtaattagtttgggggtctcccgtgttattcttaggatgtctataataaaaaaccaggcacgctaacactgatccaaaatggatgtgaga

SEQ ID NO: 59312 - DNA, 122 bp, Glycine max
gagaaactagcagacaccatatattccaaaccatccacgaataagagagaagagccgccaactgaatttgagcccaccgagcgcgacttacgacccaatgcctcttcgcattgagagaatga

SEQ ID NO: 59313 - DNA, 216 bp, Glycine max
  unsure (1)..(216): unsure at all n locations
catgcaagcgacnaacnaggaatttcttatattatgtgcattgtgtcagagtggaacataatattaatctattaacatgatcatctaacttatatgttactcctattttaatgtcgacaaacaagagactttagtaattgtagaataatcgaattgtgagtgagtatatatttcatagttgtagcgtaatagagacttgtattgaaaatattatct

SEQ ID NO: 59314 - DNA, 411 bp, Glycine max
  unsure (1)..(411): unsure at all n locations
cttctacaganatggtcatcatggcatgctaaacatgttttgtatccagngtaggccaattatttttattttatagtgaagaagatttccttaataaaaaatgagtaatagatgaagagaataaatttatgagagaaacatacagatgacagaatggtgaggcagggttgatatgaacttgagtctgttgatagctatatccaaatatgacaatgagtgtgaagatgccaaatgaaattcttgctttctctataaacataaatcttgagttaaaggtctcaattcaataagatttgagttggtttgagaataacttatttggattgggagggtgatgaatatggctttggataaaaaccttgtaaatgggtactgcaatttatgttgaatatacataatgaaaaacagtgt

SEQ ID NO: 59315 - DNA, 72 bp, Glycine max
agcttaagctccttcaacagcacaatgctctattatttgaagagatccgtgaggaaccttcacccgaggaaa

SEQ ID NO: 59316 - DNA, 368 bp, Glycine max
  unsure (1)..(368): unsure at all n locations
tcgattaccagagacagaatacttatagggttttcaaaaagaacgttgagacttgaattctaaatactgtaatcgattaccatttaacctgtaatcgagttcccagtaacgaattatttaaaaatttgaaatgaaaagtcatgaccccttcatgtataactgtgtaatcgaataccagcgagggaattctataattgctctgaaaagtcacatctcttcanaagattttgaagaaccaccaagggcctatatatatgttgagtgtctacgaatatctctcaagttctcataaccttattgcttattctctcaaaacaacattggcacaactcgcnatcaataaggatcttttagatcttaacttgatc

SEQ ID NO: 59317 - DNA, 132 bp, Glycine max
agacaacaagagacttgagccatgctccacacttggagggatcacatgcagtcctcttgaacccttacacccactctgtcatcatgccgagactcacgaatgccaacaggaatagccctctctatgtattat

SEQ ID NO: 59318 - DNA, 116 bp, Glycine max
ctgcagcatgcaagcttatacaacagatgaagatgtggtattattacacacaaggtgaccagagatataaccccatattgttaatgaataaggagattatttcaaactgaaagagt

SEQ ID NO: 59319 - DNA, 221 bp, Glycine max
  unsure (1)..(221): unsure at all n locations
cacacttttaaatgatcacagggcatttcatgtcataattaaagggtacttgtgtggtangaatacaacacatcaaacatattattntcgacacaccttttattacaaaacaaaatcaacattgattgtacccattcttattttaaaagcacactttctattataaaaactatctaccaatgttatgaaatcggctggtcttgaccgatcaaagaatggat

SEQ ID NO: 59320 - DNA, 419 bp, Glycine max
tttgcatagcgatggatagtagtgtgtgggaagagtgatcacatatgtatgtttagtcgagaaaatttaggtgtaaatttggacaaagtattggatggtattattatgcttttaatgatctcaatcaactttttcttcttctaatttttcaaaatcataattttagcccatctaatttttaattataatatttaatccttctaattatataaatttattattttggtctccttataaatgacaaactaataattatgaatattaaaaatattagattaattataaattaaataaaaattattaattatttttttaataaaagctattaatcataataaagattactgctatatgataatgaaaataagattaataattctattaattttaataataattaatactcaatatcgaattat

SEQ ID NO: 59321 - DNA, 324 bp, Glycine max
  unsure (1)..(324): unsure at all n locations
agaaccggattggagttcggccctcganggctgcnaacttgatgctgaagtccaagccttgggagtagaagcgtgcggcttaggaacatccttgtgtagttgtaatatccacctgaaggacgctgccattatggacaccgtctgcttttcgatcttcttctcagacacacgtgtggtcccgagtcacgtcacgcctcttcaattggattctaccattgggcccgaccaatttggcccgtattattttttttctccggttatcacaggtcacaggacctctntgatagttgccttaacctcaacaggctntgtcattagcttcta

SEQ ID NO: 59322 - DNA, 152 bp, Glycine max
gaaaaaaagacttcttttaagacactgaccttcatataatgactgcaatatcgaaatagatactgaaacacgctatgttaataacttacttcatttcaaaacttcgttaccaggtgactaccctcaaaaacctgatatatcttagtgagttg

SEQ ID NO: 59323 - DNA, 417 bp, Glycine max
  unsure (1)..(417): unsure at all n locations
agctgggagttgtgcacatgatgtcccacgttatgtcaaaaataagatcgggctgcacaatgcacaaggcaagataaagtgtccaatgaagaattgaagctgcaggattcacgatgtctgatacaatgtncaggacatccctgccttgaanataccctggaattgctaaaagcattgaagctgcaggatccacgatgtcggatacaatgtccaggacatcctgcccgaaaatactggangtgctaaaagcatttgaagtgcaggatccacgatgtcggatacgatgtccaggacatctggcccgaaaatactggacatataaatctggtatatctttaacagattattgtgcagttagcaagagattagatgatctatctttatgaacgaattaaaagataattaaagttcgaatta

SEQ ID NO: 59324 - DNA, 305 bp, Glycine max
  unsure (1)..(305): unsure at all n locations
acacttgtgcttgagtgaaacagtgatcatgaggctttgngtgatgatctttccttgatatttgtcatattcactagcttatttcagttgtgtttcttaataatcatgttcatagttttgaaaatctgcatgccttctgagaagctgttgattaaacattgtatgcaacttatgtcatgtgattgaatcctttggaacaaacactttgtgaagaaccactatngttttatcacttgaggacatgtgaattgttctttctttgcttgangacaagcanaactgtaagtttggggagtttgtagtcg

SEQ ID NO: 59325 - DNA, 168 bp, Glycine max
accccaaaaaccagcggcacaagtgggccgagaccggcgacaaaaagggactgcatacatcacgaagccagagccaatcacctccactacacaagccacaactcccaagacacttaaggacaaaaacaaacgaaggaacagcaggattgaaagctgaaccaacgaccc

SEQ ID NO: 59326 - DNA, 175 bp, Glycine max
gatagaggagcacaatcaaattctcctaccagcgtagtgggagcatcttctctgagaatagcatttgcgtgcttcaacctagactatctaaaactcctcctgtaaagtgactttacttcgagagattgtatgttatattgcattgttaacccatactctagcatattctgaagat

SEQ ID NO: 59327 - DNA, 421 bp, Glycine max
  unsure (1)..(421): unsure at all n locations
actggtaatcgattaccaaaaacagtgtaatcgattacaattttttgaaattaattggaacgttgtaaatttagtttgaaaactttttcaaaacaattttgttactggtaatcgattacagcaatctggtaatcgattaacagagagtaaacactctttggtaaacatgttttgagaanaatcatgtgctactcaatttttgagaaaaccttctcatacttatcttgattaagccttctcttgattcttgaatcttgagtcttgaatcttgatcttgattcttgagatcttgaaccttgaatcttgattcttcactctaaactttcttcttgagtcttgaattcttcttgattcttatcttgaactcttgagntgtcttgatcacttgaggtgtctttgatgatcttgagcttttgcatca

SEQ ID NO: 59328 - DNA, 373 bp, Glycine max
  unsure (1)..(373): unsure at all n locations
cttcttcatgatatctntagtcagatatttttttttaaattagaactatacactgagaagttaattacactaaatctaaccaaataaaaactaactntttacagcaatatagagcatattgagaatgtcttttttatttaacaaaagaaaaaaaaattgcctaatactactacctctataaataccagtaacataggcctaagagctactacaaaatttgtttggtttttcatatgtaatgaacggtcatgattntttaagagaacctttcctgttgaaagtacaaaaagagaggatccaaatccatacatnaatttgatagttgatttatcatcgngagtgagtngctcactttataggatacaaacccctt

SEQ ID NO: 59329 - DNA, 464 bp, Glycine max
  unsure (1)..(464): unsure at all n locations
ctagctacacatacctctctaatatctaatctattcttcttgagatgagaagctagagcttagctacacatccnctataatagctaagctcacccccatgacaaanaacatgaaaatacaaaaaaaagtccttactacaaagactactcaaaatgccccgaaatacaaggctaaaaccctatactactagaatggccaaaatacaaggcccagacgaaggaaatacctattctaatatttacaaagataaacgggctcatacttagcccatgggctcaaaatctaccctaaggctcatgagaaccctagggccttccctcaacacctgtaaaaagaacaaaaacatatgtattagtggtctttggtatgttgaagtaagggaaggtctaaaaacccatttcctgtgcatcttcccatgaaagaacatggnttctcaccaactcaatgagtnggtctacaagtat

SEQ ID NO: 59330 - DNA, 340 bp, Glycine max
  unsure (1)..(340): unsure at all n locations
acattctacacagagaccatgagtactcattntcaagtcctcataatctttatgagcttggccactcttttagagccatacctacttctaaagtgatctgaagtcatgagtcttttactttttttttttttttgtagaacttcaattttaccttccaaaatatggaattccttcatcaaagtatctcgttctttgaaagctctctcattatctagacaaagctccttnttcaagttttcataagtatcaatgttttaagtagtttctgtcaaagaaccgatatcttttgaatgatggattcttttagcttagtatgacctctggagagtttcttaatctg

SEQ ID NO: 59331 - DNA, 286 bp, Glycine max
aaggcagaaggactatgaactcctctattattattaaaccaatccggccctgaaagaatagagaaattatattctttcaattaaccctatatgacccactatgccatcattataaaggtatacccttattcctctgcatgagggttaagttcaagaacaagatgagggcgccaaaaggatttcattcaactggatgaaccttatccgaaagtgagcatgatgtttcctgagaaatgcctctgcctaatatcaagatacaccagcacgagaaggctatagtataggt

SEQ ID NO: 59332 - DNA, 449 bp, Glycine max
  unsure (1)..(449): unsure at all n locations
ttttgggagtttcggggagattctctcanataaaaggatctactacttgtggatctatgttctggtgagcacaaggaaccaaaacacttcagcaataccagaacattcttcacctaccacaaaaacaaggatgccatcaagagcgagagatgagatgaatcaagctaatgcacacatgactgaatatttatgcgaatgttagagaaaacaaatgagcattttgagaacatagaagaaaatcacaatttgtgtaaagaaaaagagaacgaatgagttcgaatggaacaatcgaaggaaaatgagaatgaaggaaattcaatgataaatgacaagtgagacgataaagaaccttatnagtccaaatcacaaactcaatagaaaacataatgaaaggaatcttgctgataaccatcacaacaatgatggaagacaaataagtgaactccaat

SEQ ID NO: 59333 - DNA, 391 bp, Glycine max
  unsure (1)..(391): unsure at all n locations
ctcagctaaccatcatctacnataagactcatanaccagaagcttacttntataccaaaccacaagtatcaaacaccaatctgaatccaatctacagaaaataaggctggatattagatctagtggttacaaataaccgcttaagagactatattaaaactaaatctagaagtgagtggcgggaaatcaaacttgcaatgtaccgcatctctcagtgtggagcaatatcatgcgcaagcggatcntgatcaacgtcacacatagacgaaacctgnatcgtaggactatctgatgtgatttctgtgagagagtgaggacctatctgagagagtcgcttttagcatgacatcatctacgaccaagagccagccacacatgcagacctgctgac

SEQ ID NO: 59334 - DNA, 286 bp, Glycine max
gaccggaagggagacgttagaaaacaaaccgcccatcaaaccaaaaatcaggaacggacccgcccaatggcccaggcattccggttagtctaggacggccatgagctgccagacatgatcgcgccactcactcgacagcaaacctctggagagctgatcttaatctactatatgtgtgtcttaggaggcgagccattaccaggctcagagcacgccaccaaaacctacttgttttatttttttaaaagcagaactgtgacactactcctggcacccctgcaatgta

SEQ ID NO: 59335 - DNA, 289 bp, Glycine max
  unsure (1)..(289): unsure at all n locations
ataatgtacgttgggacatctatttggtcaatgattcaaaaaagaggggattgcccagatcatttccatgagacgcatatcatgataactagaaattcatgcaaaactaatcctagcaaatatccatgtggacactcaaatataagggcttgtggccacacacacactaaggcttatggctcaattccaaattcaggccaaaccaagtgttcaacgtttttatcaagtcatgcaaaatgtctgagtcccattttgcattcgggaaagtctttctntgttttcaccctct

SEQ ID NO: 59336 - DNA, 468 bp, Glycine max
  unsure (1)..(468): unsure at all n locations
accctgatgaggatgtcccatatgttcttaatttttttctgattcattgcttccaaagnttcatggccttgcangtgaagacccacacaaacatttgaaagaaattcacattgtctgctccaccatgaaacccccagatgtccaagaggatcacatatttctgaaggcttttcctcattcattagagggagtggcaaaggactggctgtattaccttgctccaaggtccatcacgagctgggatgaccttaagagagtattcttagaaaatnttttccctgcttccaggaccacaaccatcangaaggatatctcaggtattagacaactcagtggagagagcctgaatgagtactgngagagaattaagaaactatgtgccagttgcccccaccatcagatttcagaacagcttattctccaatatntttatgaaggaactcagtatatggagagaagtatgataga

SEQ ID NO: 59337 - DNA, 218 bp, Glycine max
  unsure (1)..(218): unsure at all n locations
agtcaagccttatgggcctagctcctattaatatgccctcacattgactntgnntgtgcttattcatttcttatcctcattntctttggaattaaacaagttnttcatacctggaaaataggtccattttatataactacctaacattaattttttttcaactaagtacttgaagaatttgtttcaattaatgagtattttccgtagtcttttctgta

SEQ ID NO: 59338 - DNA, 457 bp, Glycine max
  unsure (1)..(457): unsure at all n locations
agcttatgactcttgacaatnntctttaaactattcacttaattttttgtgactctcganaaaatcttcaaaaacaagtcatttgaagaattgtgactcttggaaatgtatttttcgaaatcagtcactggtaatcgattaccatcaaggtgtaatcgattacacatcaacaaatgtgactcttcattctgaattttgaaaattaaaacgtttagaggctctagtaatcgattacaagtgttgtgtaatcgatttcactagtttaaaatgatttaaaactattaaacacaagttgtaactcttgaaatttgaaatcttaacgttttaaaacactggtaatcgattactaccttctggtaatcaattactagagagtaaaactctttcgtaatgattntgtgaaaacttcttgtgctactcaatgggttggaaaactcttttagtacttatcttgatt

SEQ ID NO: 59339 - DNA, 355 bp, Glycine max
  unsure (1)..(355): unsure at all n locations
attactggannacccgaatgcaaatnttattgaggaatagacctaaatatttgngaagccatagaaatagggccttatatacccaccacagtagaaagaattacaatagatggcagttcatcaagtgaaagtataactatagaanaacctagagatagatggtctgaagaggatagataacgagtacaatacaatttaaaagccaaaaacataataacatctgccctgggaatggatgaatatttcangggttcaaaatgtaagagtgctaacgaaatgtgggacactcttcgataacacatgaaggaactacagatgttaaaagatctaggataaatgcactaactcatgagta

SEQ ID NO: 59340 - DNA, 402 bp, Glycine max
  unsure (1)..(402): unsure at all n locations
atgagggccttcaatggtgattntccaccatggagatgcagcggaagataaaggagaagagatgagaggaggcgccatccactacggaataagtcatggaagaaggagcttcaccacccaaagagtgccttggataagaagcttagagagaaagcttcaatggaggaaaagaanaagatagagagagagaaaggcgggcacgatattgaaggaggaaaagagggagagaagttgaactttgaagtgtgtcacacaagactctcattaatcaaagttacaataagtgctacacatgcttctatttataacctacgtagcttccttgagaaacttccttgatggaagcttccttgagaagcttccctgagaaagtagagctttgacactctaataactaagctc

SEQ ID NO: 59341 - DNA, 251 bp, Glycine max
  unsure (1)..(251): unsure at all n locations
agatcagactacttagaagatgtcanantaatcaattaacaataccatgggtggtaagagaacaaagagctttcagaagaaccaagaatagaagattccaaaggctgagttaataaaagtaaataacaatgataaatgtgtcataaattaaatttctctcacacttcatgccagaacatatgccagcctattcctagggggaaaccaacaaggaccacctcttatgaatgatgtatgcatttncctcactc

SEQ ID NO: 59342 - DNA, 214 bp, Glycine max
caacaacaacaggaaagaactcacttgcaactaattgtgactacgtgacatgctgaggggttgttcacatgccatagtagctagttcacctcgcaaaattcccataaagaatcactttgcaacaagctcattgtcgccacattctttattttttgcacaaagggaacgcaaactcattgcacacctctatagtataattgtattctccgagctt

SEQ ID NO: 59343 - DNA, 419 bp, Glycine max
  unsure (1)..(419): unsure at all n locations
tctagccgcggcccacgagcataggaatgcggacgaatatgcccaagtataagcggaaaaagaggctagaggaagggtgatcgactctttacaccaagaggcaaccatgtggatggatcggtttgctcttaccttgaacgggagtcaagaacttccccgatggttagccaaggccaaggcgatggcagacacctactccgcccccgaagagattcacgggcttctcggctattgtcagcatatgatagacttaatggcccacataattagaaatcgttaggaaacttgtatggtctctcaaaccttgactagatacgacttccttttttgaaataaaatgagtnggtcccatggttctactccaaaaagcttgtgcaaatcaaatcactcctacattttatctctagcatgcattggat

SEQ ID NO: 59344 - DNA, 251 bp, Glycine max
  unsure (1)..(251): unsure at all n locations
tttctctttntgataatatgattggacatgcttgtgagttcttcgttttccttctctctctttgataatttgattgatgtgtgagcaatgatggttaggaggggagaagaagtgtctgaattctgagctatggcatgcatgcacgggccccatggtgtccctaccaactgcagggactcatgtnggttacttccctcaaggtcataatgagcanngtttttgttanttgggtttactacctactctactct

SEQ ID NO: 59345 - DNA, 260 bp, Glycine max
  unsure (1)..(260): unsure at all n locations
gagatttggaggatacggngagccttggagagatggccagagatatganaggccctgagcatagagaaatctngaaattgagttttcataacccccttggataagtttcctgagagcgaaacagccccaataatctctgatatgatacgagcatgggagaaatggccattacggaaacttgcgttatttctactgatccaaagaaaccacactgtattaatgacagcagctagaanaacatcttctaactgagagctcgt

SEQ ID NO: 59346 - DNA, 72 bp, Glycine max
  unsure (1)..(72): unsure at all n locations
tcttaaantatttatatagaattatgtatctctatcttctacacaaaaaactgaagcacttttatgctttaa

SEQ ID NO: 59347 - DNA, 384 bp, Glycine max
aaacatctaaatccattcgggatttgggaaagcccttcattgttgtctttctcaatgttgcccaaaaattcttttgttgtgttatgattccaaaagtaagattcaaaaacactgtgtgttggttcttttcatagcattgtatgtccaagaaaaattttctatctaatttgcaaagagagttatatataatctacaattacactaacagaacagaatatatcatagcacacctaagtctaccataaacacaaacgcgcgttagttttcaaacaaaaattcaaaacagttaataatgtaatataatactaataattaatacatagtgataaatgaacataaagacaagtcacgaagttttatgatcatggatgaggagctcagtct

SEQ ID NO: 59348 - DNA, 244 bp, Glycine max
  unsure (1)..(244): unsure at all n locations
ccccctcccctatttatagaaaanagggaggtgcttgccgcccacagacttaatgaagaagatttctaagcgcacccgaattactaagttcaccctccttntcgtattttacggaaaagttacggaagccttacggaactgttttcgaatttgattntcatcttttttctcttccctttcaccaatgttaagtggaatatgcttacccaagggtttcggaaattntacggaagtattacggaag

SEQ ID NO: 59349 - DNA, 80 bp, Glycine max
  unsure (1)..(80): unsure at all n locations
cacaacatcatgttaattagacaaacttatgcacatacttctttacgaacgntcacttgcacaagacattcttataacta

SEQ ID NO: 59350 - DNA, 288 bp, Glycine max
  unsure (1)..(288): unsure at all n locations
tatgcatgtatgtaaacaaaaatacttcacacaatatatatatatatgtatggttagatatgcatgcatgtangaaaaatacttcacaaaatatatatatgtatgtttaggtagcaagatacctcggatatgcatgtatatagcaaaaatatctcacaaaacatatatatgtatgtttaggtagcaagatacattggacacgcatgtatatagcaaaataactcacaaaaatatacgtatgtttaggtagcaaattacctcatgaaaaanaagagcaaaaagagagtg

SEQ ID NO: 59351 - DNA, 317 bp, Glycine max
  unsure (1)..(317): unsure at all n locations
tcccactcattttatccttaggagacaaacatgcttttatttattttctttcgccgtcccgtcgtaaggtaggttgcgaaagatggcgactccattggggagttgttagagagttaagtcatttgatcgagtgtgcaattttatcgtgaacctttatntatntatnttccctttctctntaatccctgcgttgtgctcatgtntggtgaagtttcattcccgtatcattcgtttttcaatttagcttcaaactcgtttcctttattncgtggtntgctcatgtctggatataacctttactacatnggtacttcttg

SEQ ID NO: 59352 - DNA, 393 bp, Glycine max
  unsure (1)..(393): unsure at all n locations
tcgtagcttctttgagaagctttctcaagaggcttcttgttatatttttttaatangcttctntgagaagctagatccttatctatccacccctttattaactaaattaacttccttaaaaataattacggatgagaataacgcaacatataatcaaacatcgaacataattactaataatatatatatatatcagggtgttacaacgccgatcgaacatttcctattagacatcatccaaatattattcagggattgaatagaaattacaataatcgacatcgatcgttntaaagtcgcgacggatattttcctgcggacattgcgcaatttttttttacaaacgctggccgataatatntttttacggtagaggaatgctttttgctcggt

SEQ ID NO: 59353 - DNA, 289 bp, Glycine max
  unsure (1)..(289): unsure at all n locations
aaagtatattgaanagcanatcaaagctcatgtctggccaagaggaccatttagaagagttataacttttagaaaaacttaaaaacaatttgaagaagtcaaaaaccttttgaagagttacatcttttgatttattcagaaacaatcactggtgatcgattaccaaatcagtgtaatcgattacacaagggttttatgtgaaaggatgtgactcttcacatttgtgattgaatttcaacgttcaaaggcactgataatcgattaccaaaacattataatcgagtacatc

SEQ ID NO: 59354 - DNA, 430 bp, Glycine max
  unsure (1)..(430): unsure at all n locations
acctgcagctgcaactctagttcagagattatattttttttatctacctcatgcactcctctaacgactatggcatcaattctgtccctacactgccgggagatggacgccatcttctcagttagatatctggcttcaccacgagtcatgttttcaacggctccaccactggcagcatctatcatactttttgcatataccganccctcataaaaaattggaaaggaacttttctgaatctgagcgggcggcacctggcacatccattcttaatctctccctgctannnnncggcggcccgtgagggcctatacgcggagatatcttctcatggtgnccccctcgcaccaggaaatttttctttgaactctctgaggacatccgtctctatggacctggagcccggatacacccgcctttgccctcctta

SEQ ID NO: 59355 - DNA, 348 bp, Glycine max
  unsure (1)..(348): unsure at all n locations
cataaccctagccaaggttcatcaacctccatttctccgagaatacgactcgaacgcaacgtgtgcttgtcacggagaagccccggngcgttccattgagcatggtanggctctgaagcgtaaggtgcaaggtctaattgatgcgggcctggctgaaattgaggagaattgcgtgtaaatcctgacattgacaagagatgccacacatggngcaattntgaaagctgttgttaggtgtccctaatgactcatcagggtttccaagtttatgccattattgtaaaccacagctacaatgttaaatgaaatnggataaagtgatatctttgtccctcatcctctcacaaa

SEQ ID NO: 59356 - DNA, 280 bp, Glycine max
  unsure (1)..(280): unsure at all n locations
cgaaaaaaaacacattggcataaaatatgttggcgaggcctaaggataaatatatttgtattgtagatagtggataataatgccaataatagtgaaaactaggatattntgtgtaaattttataattgaattnttctatatgttgcatgactggaaagactanntatttaaatagagggagtgatattatatatataaagtatatttcttaaaaataatatgtattgatgaacaattctaaactaatgaaatatttttcaacaatattacagcctcatca

SEQ ID NO: 59357 - DNA, 500 bp, Glycine max
  unsure (1)..(500): unsure at all n locations
gcttagaanactatagaagataatgccactgtggtcttctccaatacagctagggaagcggaaccggtgctacagcccgcaataaactggggctgagacagaaagacgacggttttcggtcggagatatagtcctcaagcctacccttatggttggcctccggacatcactccccgtaccgctctggacgatttgagccaagcccctaccttcgaggggcaactccctccttatgccgactatcccctgcaagaagatgatgaaggagatgcccatctaggccctctacttcccctcaaagatccggccccccatgaattgccccaaccaaacatagtacgccatgtcctgtctccacccgcacccattaaagaatccattccctttgcaaaagataagggaaagattgattcacttgaagagaggctaagagcggtagaaggcctcggcaactacccattctcgngattagcggatctgtgtctggtacctgacatcgt

SEQ ID NO: 59358 - DNA, 69 bp, Glycine max
aattttccatggaagccaaaaaagaaaagaagggaaatttccccattcaagaattggagaaagttaaaa

SEQ ID NO: 59359 - DNA, 365 bp, Glycine max
  unsure (1)..(365): unsure at all n locations
ctactattatgggcattcatttttttctccgncattgaggtcccacttgagctgccaggcctctccacctttgggcgtattctattgaaggattcgtgcccnctttntgcacatgttttgaagtgcatcctatccgaagccaatatactgacactgtctaatgaaggcaaccattatgtccttccaagaatggactcaggaaagttccaagntagtgtaccaagtaacaactaccccagtaagactttcttggaaggaatgtatcaacaattcctcatcttttgcgtatgcccccatcnttcgataatacatcattagatggttcttggngcaagtagtccccttgtacttgtcaaagtccagca

SEQ ID NO: 59360 - DNA, 319 bp, Glycine max
  unsure (1)..(319): unsure at all n locations
cttcgacattcatcgttcgttcttcatcattcgtcgatcttcaaccggtaagtacccctaatcaagcttttgaattcattctatgtacccgtggtggtccccatttgtttcgtgtacttttaattctcgttcatttacttttcgtactcccntttgacgtgctttagtcatttatttaagtcatttctcgcctaatcaaaaaatataataaatttccaccgatcatttgatttgaatatccgtaatttcagtaaaatgaaatctgaccgttcggcatatcgaaccatgttgganatcaaaaagaggtacataataatat

SEQ ID NO: 59361 - DNA, 301 bp, Glycine max
  unsure (1)..(301): unsure at all n locations
gtaaaatcactcatgcacccaacatcttcatgatttgtgtacacannggactcattgngtangtttgttcttattntttgtttcaatacaaacttaggcgctcatatgggacaccttangttcataattttttgtaggaataatcaacatgaaaataaagtaaaaggtatgttttattccattactttccttanacttttaaataatgatcaanggcttcccatggaccctaagagataaaggtcattcctgagtggcctactccaccatgtataagggaaatttgggcttcatgactaac

SEQ ID NO: 59362 - DNA, 430 bp, Glycine max
  unsure (1)..(430): unsure at all n locations
gaaccttcacccgacgaagacactgacaaaaacttatcttctcctttntggacaaggtatggcaagctaggggcaagtaaattttcttcccattagaccttggatgcaactgtgatcgtatgcccatatcagctagatcttgacaggtattgaagccatccttcatcttgccttgaatgttaaggagagtcccaatcacactatcacanaacattttctccacatgcataacatcaatacaatgtctaacatcaagatcagatcagtacgaaagatcaaagaaaatggacctcttcttccatatgcaactcttacttttatccttcttttgggtctttccaaatacattattcaggtggtcaacccgctgatatacttgctcaccagtcaacggtatcggcacaatatcatgctctttgacttcattaaa

SEQ ID NO: 59363 - DNA, 345 bp, Glycine max
  unsure (1)..(345): unsure at all n locations
atgatatcaatcatctatctttcaatcttctctcanacatcattcaatatctntcaactctntctacanaattttctgattctttttctttccatctttctaaaaagttttgttcaaaactttctcttccaataaattttgttcaaaaactngtgctattcatctttttcattctcttctccctttgccaaaagaacaaaggactaatcgcctgagaaattttttggttcttccctttcccttaagcaaaagatttcaaaggactagccatctgagatatcttttgtttccccttacaaagattcaaaggactaaccgcctgagaattctttgtcccaacacatt

SEQ ID NO: 59364 - DNA, 378 bp, Glycine max
  unsure (1)..(378): unsure at all n locations
aacgatcacagaatcgatcacganaacatttcggaagtgcctcgacctcattttttcttcttatttctccttcttctcactaatttcactgaaaatctcttaatttaagatggtggacctttctcctcagccccatcatgcctatttattggaaatgaggggtggaggttgcacaacagcttgcccaggcaagctggttacttcatccttaagctttttggtggcctaagtgagccaggggcctgaaaatttcaccaaatgaacattntgccctcccttttgggcattttcttcattctcttctaaaacgttgatcaacttacagattgcacaacaactggtgttaagcagctcaattatgctggcaagaatccaaat

SEQ ID NO: 59365 - DNA, 484 bp, Glycine max
  unsure (1)..(484): unsure at all n locations
tttaaactcagctggactctgcattcttaaactagcacttatttgttgtttctnttaaagaatcttcagagacaagncacttgaagaatagtgacttttggcacatgtattcttttgaaatcagtcattggtatcattatcattaaggtgtaatcgattacacatcaacatatatgactcttttatttgaanttttgaaaaatannaacgtttagaaactctggtaatcgattacaagtattgtataatcgattactcaagtgtaaaatactttaaaattgtttaaacataagttataactcttgaacattgaaatcttaacgttttaaaacactagtaatcgattactaccttctggtaatcgattaccagagagtaaaactctttggtaatgattntgtgaaaacttcttgtgttactcaatcatttgaacaactttntttgtacctatcttgattgagtcttctcttgattcttgaatctt

SEQ ID NO: 59366 - DNA, 438 bp, Glycine max
  unsure (1)..(438): unsure at all n locations
atgtgaattangacgcatcaacaagaatcaagccaacgctattgtgcaagcaatcaatggggcaaaacacaccaaatgattatgatgatggatggctcaaattctcacaaaggtaaactcatcactttcaaattgagctttcaaaactatcatgacatgtagaggagaatcaaggatttcaagtcacaaaatgtcaaaaatttttattttcaaaacaattacccatttcttgaacatatcctataattcaaagaaaaatatgcaaagtcgtacatgcacacaaaattgacccaaaatattaaactaacaatccgacaacattaacaaattaacaaaaccaacaaaactagcagaaccaaagaacaccccgccctccatacttaaacaacaccatcgtctcaatggagcacaattaacaacaattaaatcatcaaatag

SEQ ID NO: 59367 - DNA, 331 bp, Glycine max
  unsure (1)..(331): unsure at all n locations
gagtacgtgagctcagatggaggtgggcaacaggggatggtgggtttatgcgcgctttgtggatgtgaaaaacttggtgtgcaccatcgcccgaccgccacctagtaccacatgtgatgggtaccccataatcctacaagcttgagatgaagaagtgttgaanggtgaaacttcctgcttttattggtgaccacagagtggtacctggagatatgtcgcggtggtcangagaccttngggacgtcaggtggggtgctattgcccaaaaccaagcttgaccaatcccgacccaacccgggcatagtcggtcagtgagaacctgtgatgtacc

SEQ ID NO: 59368 - DNA, 420 bp, Glycine max
  unsure (1)..(420): unsure at all n locations
agcttgctacactatgagngcttattgtattaattagctatagaacgggggtcannaaaacaataatacgcgctggtgtgcgatctggtttattagttgcatgggagcatntgcaattagcaaaaaaacacacaccacccaacattggttgacttcttgcttgcttaagataaacgaaataatggttgtgtgtttcgtgcaaactaacattntatggatgtgtctttgcaggcaatggctccaaaaaagcttctctctaagagggcaaggaatgatgtcatgggagaaggatccaatgcggctcctcaagcatacatagtaattgacgaacaccattttcgaagtgaggaacatcaacgctgccatgaagcgatcaagggttggtctttccttanagagagacgggcgcaacacagagag

SEQ ID NO: 59369 - DNA, 269 bp, Glycine max
  unsure (1)..(269): unsure at all n locations
gatgagccttggataaaaagcttggagagggtgcttcaatggaggaaaagaaagagggagagaaagagagagggaggagcacgaaactgaaggaaaaaaaagggagagaagttgaactttgagttgtgtctcacaagactctcattcatcanagttacaacaagtggtacacatgcttctatttatagactanngtagcttcttgagaagctttctaagaaaactccttgagacccttcttgagaaaacttcttgagaagctagagctt

SEQ ID NO: 59370 - DNA, 441 bp, Glycine max
  unsure (1)..(441): unsure at all n locations
atgcaacagtctgtttcacttttgcgtgtcaaggatccctcgctcaaaaggatgggagctctagatggctcgtttgcggtagatggtaagntttgctatctatatctttctgtcactaatcgcttgctattggtattttatgacccttatttctttggtgcatgacatatattgaactcttattaatcattagtcatttgcatattagagtagttggtttctagaacggattcctattcttgtaacaagcataatttcattatccttgtgctttacactagtgacatttagtcatttagtattaatctcagcttattcttgaaatgaccaaattatggttgaagggagagttgatgggagattctgaactcggataanagaagtttagattgaaattttctcttaaactgataatacaatagttagtgagaatttaattga

SEQ ID NO: 59371 - DNA, 394 bp, Glycine max
  unsure (1)..(394): unsure at all n locations
gatagaaatggangcctaacactttaccagcaacaatcacatacccaaagaaatatataaaattagaataataatatactcacaacacaacttcaattaaatgtaggcagaataatcatgatacaaccaaataattgtgaggaaaaattcttatcaaactgaagaaagaacacgaataaccttctgtcaagggaccaatacgtagaaaggacggtacaacatttgatcaaatgagaaaaattgattgaatataagccctacaacagattgccaacactaaattagtgaacacattatctcactaataaaacaaagaacgaaaatacatatagacttacccttnagctagacatcaagaaatntctcctaagntaatgaactatctttctaatat

SEQ ID NO: 59372 - DNA, 483 bp, Glycine max
  unsure (1)..(483): unsure at all n locations
agcttgtaacccatggaagcancttttatcnctcattctnntttgggngggccattcttggatggcttttattatctctggagccactcggaccccatttctaccaactacaaaatctaacaaaactatattatctacacaaaaggtacacttctctatatttgcattgagggtgtttttcctaacgactgaaagaacttgcctgagatgtcctacatgatcatctaggctcctactatacactaaaatatcatgaaaataaacaactacaaatctacctatgacatcccttaagacatgatgcataagcctcataaaagtgcctggtgcacttgtgagcccacaaggcatcactaaccattcatactaaccaaacttggtcttgaaagcggatttccactcatcacccttcttcatcctgaataggtgataaccacttttacgatcaattatgaaaagatttggcaccatgcaactcatcaa

SEQ ID NO: 59373 - DNA, 208 bp, Glycine max
  unsure (1)..(208): unsure at all n locations
cttcattcttagaatgaagtaagtagagatacatatatcgtgaataatcatctataagggtatgaagtatttcggacctattgcatncatgtctggacaacatatgtctgtatgtatgatttctaataaaatagaactcctctntgcaccatttttagacttngtagttngcttacccttaatgcaatctacacaagtctcaaaatca

SEQ ID NO: 59374 - DNA, 493 bp, Glycine max
  unsure (1)..(493): unsure at all n locations
agctntagcaactctttctttttgttagncatttcttcttatgctcttaatctctcctcatctaaatcaaccaactcatctgacatcattttccaataatggtcgattggaatgtccatnttgttttgtaccctggctgattgcaaatgtatttcgaccggaagtacagcatcatgcccataagtcaatcgaaatggggtagtattaattgattccttangagaatttctacatgcccatagaacttgatctaacgttntattccaatntcttggcttttgggcaatgtgttttttaatcaagttaattacaatcttattggctgcttcgacctgaccatatgcttgcgcgtaatatggtgttgagggtaataatcgaaagccagtttcttttgcaaattcttgcattnttcgtccagtaaaaactgaaccttgatcagtggtaattgttcacgagtaccatacctataaataatatgactttgatgaaacta

SEQ ID NO: 59375 - DNA, 438 bp, Glycine max
  unsure (1)..(438): unsure at all n locations
cataacactgngtgngtntataggattgtaattgtgttttggttatgtatatatggntatttcaattgtttggtttcgtttcatgtcacaatcanttgatgtgtgttattaatattttgtaggcttgacactaaaaacaggtgggagaggaaatctaacatgtagatatcaacatggaactgaagtgaggaatctgtgaaatttggtaaactgattatganaaagggtattattcgagccaaaacaccatggaagtgctcaagagtcaagagtcaagacattatgttgtagttgcacatgctaagagaagaatcagtattcatgttttgtggcttanaagatggcatgattntcattgatatcagtaacatttgccttggttgttatagcanataatggtggtaaatacgacggagctaatggtatattngatatatt

SEQ ID NO: 59376 - DNA, 258 bp, Glycine max
  unsure (1)..(258): unsure at all n locations
tactggtaagaagattcagtatagaagaaaatcaagagatggatgatccatataatgttagtcttttgtttaactatntaattgttttatgattcaatntattntatttaattnttctcatatattgtcataggaatatatcaattatgtgagccaaaatgttaatgtcaatggcaactctgaattagatctctatttggctgagacaccgcttgagccanagttttttttttccctaagttggacattntgagttat

SEQ ID NO: 59377 - DNA, 446 bp, Glycine max
  unsure (1)..(446): unsure at all n locations
tccgcgcttagcggnttcacacacacaaaanaatcattaagttatgggggctcaccgaactgggtcacttatctcaacacttgccgcaacagatttcacttagcccagagattcacggcttatcgtgcggctgttagcaaaaacttctgactaagttatctgggcttagcgaattagcctcgcttagccaccgatacttcatcaagaggatgaatatccatcctttcaaagtcagctcgctttgtgcaataaatgcgctcagcgagttcttcagaagaattcaactaacattgatgcactcgctcagcgtgataggtgcgctcaacatngtcagttgcgtttccagaaaaatatgctgaanacactgtgcattttcttcaacattggagcctttacagtcaaatcacacatgccaagnntataatacaatctacatcagacaacct

SEQ ID NO: 59378 - DNA, 186 bp, Glycine max
agattggcagagtaattggcttgttataatatgtgagaaatggtgagggtaaaatataaatataatgtttcgcaggtacttcttattactaccacgtgatgaaaaaatacacctggataattattacttacaaattcatcttaaatgaatgtatttattctataagactatcattttaaaaactta

SEQ ID NO: 59379 - DNA, 451 bp, Glycine max
  unsure (1)..(451): unsure at all n locations
caagctttagccatggcctcctatggaggngagtcttttcttactcatcttctccttgaagnggcgtctcctctctctcttacttctccattcctctgccattcatcttccaagaagcaaaggaatccattgatgaagaagatcctaggcctacaagctcaaatggagcttacatcatgtggtatcaagagcatattcatctagggaatgttcttttgcttcctctatctttntgttcggggaattctctttatttccttgtttttcatcttattctccattgtcttgtggcttggtgctgtttatagtaaattcaaaaaaaaaaaaaaaccgattaaatcttagatctacacttgttcttgcatttctagggttcaaaatttgtagatctactctcgaatcatgtttctgtgttgactttaggctctaacatttatcattcataatattc

SEQ ID NO: 59380 - DNA, 166 bp, Glycine max
  unsure (1)..(166): unsure at all n locations
gcatacctaactagttcacaggaacagagcaacccatgtatagatcttacaatgcatcgacaacgagatgtgtctacaccaacaaactgcattctatgaacctcatttgaatatgattaatgcataccttaaacanaccatatagtctctatatagttgacataaa

SEQ ID NO: 59381 - DNA, 397 bp, Glycine max
  unsure (1)..(397): unsure at all n locations
cggagtacgacagtcatcgctctatgagcgttgtacaccagcagcgtttcgaagccatcaagggatggtcgtttctccgagagcgacgcgtccagctcagggaggacgagtatactgatttccaggaggaaataaggcgcctgcggtgggcaccactggttactcccatggccaaatgtgatccagaaatagtccttgagttctacgccaatgcttngccaacagaggaaggcgtgcgtgacatgagatcctgcgctaggggtcagcggatcccggtcgatgctgacactatcatccagctcctgggatatccgatggtattggaagagggccangaatgcgagtatggccagacgaggaaccggtctgatgggtttatgacgacgcatcgctcact

SEQ ID NO: 59382 - DNA, 197 bp, Glycine max
  unsure (1)..(197): unsure at all n locations
ctcaagctntcctcttcganagatcattgggaaaggaaggatgttgcagaacttgnatggtgtntattaagcacanactgcacactgtattgcacaggngaaagttggcagcgggttggatgtcagttcagctgtgtatgtcagtcagcgctatgtgcgggtntcaccagaagtgatttcttccactaaggcccccc

SEQ ID NO: 59383 - DNA, 349 bp, Glycine max
atcaaagcattgatttgatagttgagtgttttttctttggctttagatagtagatactaaacaaaaaaatactaataccaagggggtctagctcagctggttgagcagggtgtgtaaatgttgtaaatctcctgataccatgttcaattcctatgtgattaaaaaaataccaatgagacgctttaagttatgaattatagcataagggaagtctactaatgccagtgtggttggtgtggtcttttagtttgttccgtgctaagataatttcttacaccttttttgttatatgagaaatgaacatgattccaatgagctattcgcaagtcatccagttacttgatgtcgt

SEQ ID NO: 59384 - DNA, 390 bp, Glycine max
  unsure (1)..(390): unsure at all n locations
gctcgtctcctgaacgcttgagaggttgatgtccaatggttaccctcnntatgtcctcaactngntngttaaatgctctggacgggtcggaccctgcctgacanattcacatacccggnntgtatcaaggcttgtggtgactngtctttgattgatgtgggcgttggaattcatgggcagacctttnaagttggctatgattccgacacattngttcaaaacactntgttggcaatgtatatgaatgccggngagaaggaagcagcacaactggttnttgacttgatgctggaacggactgtgatttcttggaataccatgattaacgggtacttttggaataactgtgtagaagatgcagtaaaggtttatggtagaatgatggatgtg

SEQ ID NO: 59385 - DNA, 229 bp, Glycine max
cgacaaaggggcacaaccgaaggcactaagccagcgcaagaaccgcctcacaccagggacaataatgagttgggtacgggccgacacaccaaaaagaggcgtaacaagaccaagaaaccacccgacaggggccctgaagaacggacccccccaagaccgacccaccgacccacaccggcaagcgcaaacacagaaggagaaggaggcaccctgcaccaaaaagaaggac

SEQ ID NO: 59386 - DNA, 444 bp, Glycine max
  unsure (1)..(444): unsure at all n locations
gactaattgtcttcacatttgattattgcttattatnaaananggngncatcagcgnagtggaatatgttgactggctctttgttttttcccacgaggaaactgctaaataagctcttatcaatgcttctctcattanaccgcgtaggccttctgaaacaatatngaatagtaaaggcgttaggtggtcgccttgtctaaggcctctttgtggaatgaatntatttgtggggctgccatttaccaatacagaaaccgaggctgagctaagacaaccctcaatccaacaaatccacttggggcagaagcctaatctcctcagcatatatgataggaaaccccacgagacggagttgtatgctctttcatagtctactntgaacaccaagcatggcttatgacgcctctntgcttcctccaccgcttcgatggctatcaatacact

SEQ ID NO: 59387 - DNA, 439 bp, Glycine max
  unsure (1)..(439): unsure at all n locations
ctcttgagaagttagagcttagctacacacccctataatatcttatgctcactcncatgacaaanaanacatgagaatacaaaaaaaatcctactacaaagactactcanaattccctgaaatacaaggctaaaaccctatactactacaatggccaaaaacaaggcccaaaagacgaaaacaacctattctactatttacaaagaagagtggacccaaccttggcccatgggctcaaaaatctaccctaaggttcatgagaaccctaaggttcatgagaaccctaaggtcttctttatcaactctagcccaatcctcttggagcctcttgctcatggctctggtaactggtcctttcctagggaggattgcatcatgtagcccttngatggcgaggacgtgtagtcctctgatggcgaggaaatgtagtcctataatg

SEQ ID NO: 59388 - DNA, 495 bp, Glycine max
  unsure (1)..(495): unsure at all n locations
ctcagctcgcgggaaccgctaagcctttcagattaaatttagttatgttatttaacaanaaatgatcctccaccanataactgtcttcgtccctagtttaatagttttcactcttgcacgagagtcgagagttttggccatatttaanaaaaatgtcttaataagtatttatgaaaaanaacaagataaaataagttaaattttttatgtataaataatttataaaatctctctcatttaatttatctaacatttaattntaaaaaatattttaatttatctttttattttcttcttttataagttttttttttttttgtaaattatctaaacaaaatctcaatataaatcaatttgggttgctgagcacacttaagttttttttttttaaaaaaaaaaagaattctggctttgccccattatgggcaataatgctgacacaagttcagaatgaaagttgaggggcattttttcatcacctcaaanaattctact

SEQ ID NO: 59389 - DNA, 278 bp, Glycine max
  unsure (1)..(278): unsure at all n locations
gctttcacacagntatcttattgagattgttgaatgaagatcttctgctgcaaagagaagaaatgtttagtacaaaccacgttttcaaaatatgaatttcgcgctggatgaaagtccactttggaacattgtatgagggggtatttttagctcaattttctcttattacgagacatatagaagattttacgggagtctacttaaatatattaatattacattcggcttatctntttaaaattattttaaagagctcttgataaacatttatcataaca

SEQ ID NO: 59390 - DNA, 190 bp, Glycine max
  unsure (1)..(190): unsure at all n locations
catctctactggaagtgttgtcatagatctgtgatgaacaacactatctgatatgggattgattgaccatattccataaatgtacaacacagcgcctanaatattaaacccatcctactctaaacaacacaaaaatagcatatttctagagactgtctaaagtgatgtgtctaaattgaatacaaaacac

SEQ ID NO: 59391 - DNA, 75 bp, Glycine max
cccatgcttgctaaagtgagacaaaagctggtgcaaatcacaactccgatatctcatgggtggaatggatgaatg

SEQ ID NO: 59392 - DNA, 243 bp, Glycine max
  unsure (1)..(243): unsure at all n locations
aaaactatcgnggaaggtagcgagtgacattgaccagtgcgagggctaccttttccatcacttggntacctcatccttggaatctgtagtacttggcttacnaaatatactggcctncgctcacatncttnctnctacaccaacaccgcacttatggccttgatcgaaaccgaataataaacaatcaaatttttggcagggtccaatttcgaaaaaaaagggaatgtcgctagtggtatcttc

SEQ ID NO: 59393 - DNA, 128 bp, Glycine max
gcctttccatcaatggcggtaccagctgagaccgcagatccctgcccttttgggcgtgttctttgaaagaaccatccccctttctgcaaagggttctgactctcctacataacggcaccctatctatt

SEQ ID NO: 59394 - DNA, 225 bp, Glycine max
  unsure (1)..(225): unsure at all n locations
gaggcaaaatggcataccagggtccggcatactttcttctatccacacacatgcacatatcattctaatcatactcactttcttcctcctcttacatacatcattaattgacatatctaacaagagtttaattgaggcatgtaggagacgtcacgatcatgagcanatctgagggtcaagacttgctgcgactagcaaggctgatttctcttaaatcattgacta

SEQ ID NO: 59395 - DNA, 186 bp, Glycine max
  unsure (1)..(186): unsure at all n locations
tcaaaatctaccctaangctcatgagaccctanngcctcctngatcttgcccatcactngagctttatccatgcctgcgggtagatgcataccganccatttcaaaacgggagagctgcgccagtgttctctaacacccactcaatgtcaaatgcaactcatgtataccctattaaatcaccactt

SEQ ID NO: 59396 - DNA, 325 bp, Glycine max
  unsure (1)..(325): unsure at all n locations
tcaagaatgtgagaaagcaaaataagaaagaaaattcccgatcaaagatcggaagaaaacacaagaaatatgcagaaagggtcttgtgccatacaatatctgaacaatacagaattgtcaccaccaaacaatgaaagaaaggaaaccacgacctgaagtgggcctctccctgtgaatgccaaccaaaatcctgtgcgtcagagactntntcacctcgcactacacaaaaatagaaatagaaaatgccaaaacactcagagccataatctcctccaaaaacactatgccgcaagaagaagtccaattgatccatgatcacgcatat

SEQ ID NO: 59397 - DNA, 277 bp, Glycine max
  unsure (1)..(277): unsure at all n locations
actcacatncatncagtccaccaccagtgtagaccaagaagcctacatatccaagtttccattgctnggatccacatggagacgaagctagagatcctaggtccaacaaaccanagtaaagaatgcttccanaagttntcagttactttcttcaaaataaatcaatagaaccactgccctgagagtgagatcatccaacactcatagatagaacctatccaaagacaacatgaggtagtgactccacctcaatggacaaagtagatcacattcatac

SEQ ID NO: 59398 - DNA, 313 bp, Glycine max
cgatgatagcccacccactatctcaaccactgaccaaggcggagctggtttggtctctggaagccgaaagcgcattccacatgctcaagaaggcagtcacgatggcgccggtgctcgctcttctggacttcactaaagcctttatggtagaaaccgatgcttccggcttggggataggcactgtgcaggatgggcattcgatctccttcttcagcaagcaattctgcccaaggttgctgaggtctttcacttatgtccgggaactagccgccatcaccgccgcggttaagatatggcggcattacctattggg

SEQ ID NO: 59399 - DNA, 59 bp, Glycine max
acccccccacgagaccgcaagaccacccccccaagacagaaggagcggagcaaaaaaac

SEQ ID NO: 59400 - DNA, 261 bp, Glycine max
  unsure (1)..(261): unsure at all n locations
ctccatgttcatcagaaattatctccctagatctcactctgtgatttcgagtgttggctctgataccaattgaaattctgataccaggggacagatgtcgtacaggatgtcacgacatcacgcttcagaacatgcagattatatgtgtccgtatgaacaaattannataagtaataacacaagagaatgggtacncagttcggtgcaacctcacctacatctgggggctccaagccagggaggaaatccactctcaatagt

SEQ ID NO: 59401 - DNA, 202 bp, Glycine max
ttttcatttggccactctggaaactacgatgatttggttgttgcattggtctcccacaccgaaatttcatttgcggtcatttcttcctttcttaatgaacttcacatccataactccgaactcgggaaatcgtcattatcttcagcattgatcagcgacgtattgtgacaatcgttactccacggcactgttgtatggtact

SEQ ID NO: 59402 - DNA, 301 bp, Glycine max
tataaaacaaatgctaacatattatattagatggtattacaaagcatgaatggtttcttaatattaaatgataagtaaaatttacgataatgttcacaaaataaaaaaatgaggtataatgagtaaacaagtaagttaagcttattttttaaacacccaacacaaatttagtgagctgttaacaaatgagcaaagtactattttttaacaaccaactcaattttggctagtcaatagccattacccttaagggtggacttctcttaatggaattcagaaagagagaagctccttgggaaaa

SEQ ID NO: 59403 - DNA, 371 bp, Glycine max
  unsure (1)..(371): unsure at all n locations
cgaacatttgcatccaataatggtaacttatcaacatttttggtccaatggaacgtactgatatttangtcaaaaaaaaattattgacatttttgtccaacaaaaaattactgatatttacgtttaanaatggcatcttactgacatntttgtccaatctaatcagcatgaccacgttgacaatcatttcagtgacaaattcgtccttctatgccacgtagaatattntattaacggtgacagacggaagttaacagcanaatatatttgtcatactttntaaactttcggngacctaaatttgtattttcatcttttagtgacgcattngtcagcggattacatattanagnngacaaaataatatttat

SEQ ID NO: 59404 - DNA, 494 bp, Glycine max
  unsure (1)..(494): unsure at all n locations
cgacacctagcactaagnnggaatgacttctntgctgtgctgnctattttacttagatngacatcttcatgaatgggaaacacagcatcaagagcttgccacctagcactaggttggatnaatntaataaggcaagaaacttttanggacatgatatggngattttttgaggagtttgccacgaaaatagcaacaggtaaggcttgtatataaaanaaacaaaaaaagtaaatgagaagagtacaaaaataaacctaggattccttaagcattatgccttgngctttgttgtgttagtgtcacacagccagtagatagcagtttgtctgaaagaaagcaatatagctaatttaagtagacatccaatgtatctcatgcttgcattgatcttagtgcactcttttttccaactgcattntatgtaaacttcaagtcatgttactttggcttgacattnttatttaattcgtcaggttattcccganatctatatt

SEQ ID NO: 59405 - DNA, 366 bp, Glycine max
  unsure (1)..(366): unsure at all n locations
atcatcaaacataactaanaactcagagaaagacatcattgaagtgttcgaatctccacaaacctccattaattcactaaccccttggctaggaagataaactgcccttaacaacttgatgtataaagtgacatcaaatttcctaatattagcaccatcttcgttcataggacgccacaaaagtgcatcaaaggcaacccttttgagtctatccggaggaccgccacaaataggagcaagaatagcaaaaaacattcccagatccagcctgcctgaaccattctcatccaaaacagaaagaatcctctcgtgtatggcttttaccaacccctcgaaaagtctcacgcttcaaaaaatgagtaatct

SEQ ID NO: 59406 - DNA, 340 bp, Glycine max
  unsure (1)..(340): unsure at all n locations
actacacattaaaatgagagcctttgcagttggactgttctttcttgcatggtatgttaaccaccttgtatcaacactttttctcacctttctctctaattatcatcatcaccttttatctatcatttggttgttagaagtgaggtttttctttttttttgtgaaagtatgcaaaagtcagcaaatcttagatatagtaaacattttgttagtcttatggngtggtagccgcgtagtagacctgtggttatcctttaaattgcatgttaagacaaaaaatttgcttcatattctccaaataatgctgtcagattgtgatcttgttcccactctttttttt

SEQ ID NO: 59407 - DNA, 385 bp, Glycine max
  unsure (1)..(385): unsure at all n locations
attacctttccaaatgtttgtcctcgcaggaaatgtctccgaataagctttccacatagagatctangaggcacgtcgcggctgaagggaccaatgtcacccccgagtttgatagccaccatttcaggagcgccgagcaccagcagcgcttcgaggccatcaaaggatggtcattccacagagagagacgcgtccagctcagggatgatgagtacacggattntcaggaagagatagctcgctgacattggaggtcgctggtgactcccatggctaagtttgaccctaagatagtcctggagttttatgctaatgcttggcccacagaagagggagtgcgagacatgtggtcatgggtgaggggtcagtggattccctttgacat

SEQ ID NO: 59408 - DNA, 259 bp, Glycine max
  unsure (1)..(259): unsure at all n locations
cattctcttccttgtacccggcacactccttcccaatgtgtgtagcggccaacttgaacttctccttggcaagtttcgcctttcctaactcgcttttgagagcttggacttcttcgtcctcttccggtgcctcanaactctcttcgctgatgacttttaacttggcgagccaatctaaacctcgtatatgaactntcagccattcatggtagccaccaatgatgccattacgaatgcctctaangttcttgatctttct

SEQ ID NO: 59409 - DNA, 322 bp, Glycine max
  unsure (1)..(322): unsure at all n locations
tatatgataaccatgggtggaagctattatccgttaaaagggcatgtgccgcatgcaagggtacactctcatttttcatgttgtaccagtgggacaacaaaagttntgtgagacaggtgtggtcgaaacattgattatagcattaaaagcccatgtgtgatgctctctattagaaaaaacctcaggccttgttatgtgttgtaataatcttttgatgtgtnggatggtgttcaggttctaatcctaggtaaactatattatgaatatcctatttttactctcggagctctacatacacactcatgggtgcactcactcacat

SEQ ID NO: 59410 - DNA, 421 bp, Glycine max
  unsure (1)..(421): unsure at all n locations
gatatcagacggaaaagtttggattntaagttgaagtggacgtgttgtcatgacataaatgctgtgtattaactatatctctagctgtagacatataaatgagaaggaaaatatatcaattttttaaggataaaatcatctacaagttttataaagncatcaaattgaaagtcatagagcgcatggttggatgaaaaatcaagaacaacaaatattgcacgcactcctactggaggactggaggcgagaaagagcttgagagagtcatttttcatcaatgaagattaaagggaataacaacaattcttgaagattatggcccatccctattctctcgaatgtgcatatgcttgtaataaatattccaccactaactaataactatatgtataataatatatagtatatataacataaattt

SEQ ID NO: 59411 - DNA, 510 bp, Glycine max
  unsure (1)..(510): unsure at all n locations
gcttacntttatagatggctagagaatgtaagatacctagtatntcttatctttattctctccaaaananaaaaaaanaagatacctctatagtataaatgaagggggggcatttaattagttcgaaagattgaggtatttcgggaaatgaaagattttttttaaagaaaccnataattccttatacacatggattactnttcgatttctttctttttatcacacaaatgaatttctttctcactttttcacacattcatttgtttagaagatgaaagtggaaaaaanttgacaataattacaaataaacagaaacggtcaaaataataataggtagacaaatatacctcatgccagattataacaaaatggcaattctttaagaaaatgaaataaaaggatttcgcttttgattnttctttntnttctttcacattttcatatgagtgacaattcaattcatttatccatttaatatctaatctaccctattataaatctaaccagcat

SEQ ID NO: 59412 - DNA, 426 bp, Glycine max
  unsure (1)..(426): unsure at all n locations
atcattttttttctncgtcattgaggtcccacttgagctgccaggcctctacatctttgggcgtattcttttgaaggattcgcgccccctttttgcacatgtgttggagttgcatcctatccgaagccaatatactgacactgcctaatgaaggcaaccattaggtccttccaagaatggactcangaagggtccaagttagtgtaccaagtaacagctaccccagtaagactttcttggaaggaatgtatcaacaattcctcatcttttgcgtatgcccccatcttccgataatacatctttagatggttcttggggcaagtagtcccctcgtacttgtcaaagtccagcaccttgaacttatgaggggtgatgatattgggtactaggaacaactcttctaggttagcacacgcataatcttca

SEQ ID NO: 59413 - DNA, 361 bp, Glycine max
  unsure (1)..(361): unsure at all n locations
atcatcacaaccaggaaaagcccattcatgattgtttcaccgatgcatatgacacattcaacccgagatgtgaaaagatcggtgcaagaaatgtctgttgtaccgcccgctctttatgtgttggtggtgtcccatgttttttgtcataaaagtagacttgtcttccctctacaaggtcatcgcatgtgcgccgaanaaggaaaagcaaactangaggaactctnttcaggtatggtaagagcgttcattagttggttcccctgatggaaagaaggaggcgctggagtgtngtgctcatgtgaaggattcccanacatccccttgatgggaataaggggttgtatttaatataataccatgc

SEQ ID NO: 59414 - DNA, 374 bp, Glycine max
  unsure (1)..(374): unsure at all n locations
aaacccaccatntctttgttgctctgctacaactgagctcacggactccacgtagcccataacctcggttctctcaacaccgagtccccatcaatcctccaagcgtcaccacatccaagcaaaacagcatacacacaggacaagctatcacagccaagccaaacagagtaaaggcagaaaactctgcccaaacaccacaccacaaatcacaggcttcttcccactcacagaccccaagaacaattcctgcgatccaattcgttacgcggtggatcgacctccaaatttactggaagtgtatgagcataaccctacatttgaccggtgggactactaagaaacataccgactcattctacattactctgtcccaa

SEQ ID NO: 59415 - DNA, 329 bp, Glycine max
  unsure (1)..(329): unsure at all n locations
catactatgtcaatctccaattaaacaatcagtatacaaattcctcanatngcgcaagacaagcttgaaatgctacaaanaatggccaaatgcccaaggagttctacaacatgcannacttttattaaatgataactgataggcttgtangtaggggccaaatattcctagaaatatacattntcaatnggcttctacatataatgcaactcatgtttttggtagttntggagcatnggtagtattggtatgaaattatgatattctatattanngtgtanatctaaattcgaattctcatattngnngtgtattatagggtaattcat

SEQ ID NO: 59416 - DNA, 286 bp, Glycine max
ctcattttgtttactctctataccccctgtcgacgcgcttaagccattttacttaagtcatttctcgcttaacttataaataaaataaattatcaccgaacatttgaattgcattatccgctaacttcggttaaaataaattacgaccgttcggtcatgccgtaaccacgttggaaatcaaaaagaggtaaaaaaatgatatatataatcaaaaaaacatcttttagtaaaataaagcggataatcaaccggacgttttctctctgggattgctcattcttaatcg

SEQ ID NO: 59417 - DNA, 211 bp, Glycine max
  unsure (1)..(211): unsure at all n locations
actcaatctaggcgtanagaaaacatcaaggtgcagctganaccanatgctggcctaaaaggggagtcctcaccaacatgctctcattntcatgccctcttgtatgaaatcaagagctgggttcctaggcctaanatcacattcgggcacatatttctagctctacaagntgtctgaacactaaaaaatggaagccatatatgcacaagtc

SEQ ID NO: 59418 - DNA, 405 bp, Glycine max
  unsure (1)..(405): unsure at all n locations
tgcttggacgaatgagaacaccgggcaanacnagatggtgatgtatgaaggaaaacccatgctgtgaatgtcattcctggaccgccaagtttcccaccaactcaacaatgtcattactcaggcaataacaaacgctttccttacctaccgnccatatatccacgaaggccatccctaaatcaaccacaaagtctgtctaccgcactttcaatgacgaataccacctttagcacacaccaaaaacaccaaccaagagatgaattttgcagcgagaaagcctgtagaattcaccccaattccagtgtcctatgctgacttgctcgcatatctacttgataattcaatggtagccataaccctagccanggtcatcaacctccatttctacgagaatacgactcgaac

SEQ ID NO: 59419 - DNA, 383 bp, Glycine max
  unsure (1)..(383): unsure at all n locations
tttaattttttaccagacaagctaaaattctagagtcaactttagactcatttacacccctatttttagggtttgtaaaatatcccatttaccaatttctctcgagtgaactccaatttcaaagctttttcaaatgaaattcaagctttgactgaaatcangcaccacaatttttnttttttaataaaaagtttagtttttagtgaaaggtgaagatnntttgtaacaattttcattaaaactcatgtgatatgtgtgtgattcggttctatacantaaataaatgtcattaatgagtaaggggaagataatgtaacgtttagtaaataattaagagaatatttgtaggttttaaaaatagaanaaaatatgtgtaatttttc

SEQ ID NO: 59420 - DNA, 494 bp, Glycine max
  unsure (1)..(494): unsure at all n locations
aactcgcaatgcgggctaagtggagttaagctttgaaaagaatgttannagttgaaacttggaggtggaggcctgaatgcacatggatcttaaaggtgggaaacttaaacttgaatatagaaagtttgaggagaataatggtcgcatggtttgtgcaaaaggtggttagtggtggccgtgaaggtaacaatggagcantgacaagataatgtggaagcttaaaggaatctttcattataaaaaatatatttcattattataaaaaaattggggtaacttattgtatatgttatttaaataaaaataccatatttntaaaattatttatttattaaaattaatatcaaatttcanatataaagaatatctctaatcttattaaatcaaagatattttaaagaaaatattactaaaaaaacataaataattaaaatttgcttatagtaataataatgatattcaagagcggagtaagtagggtaaaggagggtaag

SEQ ID NO: 59421 - DNA, 196 bp, Glycine max
acgctaattttttggagcttaatgcggtgaaccctgttgttccatctgatgatattgatgtttactcgcttgaactacttctttgctactacctattccagttgtattgtttcgagtgttgttccaatgatactatggttcacaatgtcccgactgagactacgattctaattgttcatcataaccacactctact

SEQ ID NO: 59422 - DNA, 342 bp, Glycine max
gctgtgtgaggaggtagcagtttattttttatcagccactagcatgaactggttggagctacgcaaagaaataaaaatagagaggcaaagagaataagaaatgtgtctagaacagatcacactaccatctaactgacagaattaagctgctggaaaatgatcgctagatgctgatgagtcgagtacctttgatttgacctgccataaggtagagtcatcatccttgtcttgtttagaaatggatttgatatggcacaataatgacccttctgactttgttatataagaagctgtggactatacagtgcatgaatatggcctatggtagagactaaaagccct

SEQ ID NO: 59423 - DNA, 338 bp, Glycine max
  unsure (1)..(338): unsure at all n locations
ctaagacacccctgcctttttttgtgatctttttcgtaagttatggaaacttacgaatttcgtaacgatacttgctttctttccgtaatgttacggaaccctcgcggatacataatcatcccctttttgacttatggaatgttacagaacctcactaattgtgcaacgatgcctccatttgatttccggtgtgtcacggaaccttacggattgtgcatcaatattatcttttggtttccagcatgtccccggaatttcacaaattgcctaatgatgggtgccaagcacctcacaaggaccaaacaaaagtcgcatgtcatcaagcanaggtccccgga

SEQ ID NO: 59424 - DNA, 457 bp, Glycine max
  unsure (1)..(457): unsure at all n locations
agcttaacaacctcactaggagtgagagcntttgtcactgatctcacctggggagagnctcactcccaaaagaataagaaatactaacattaggaacaagtgttagacaacaaatgattaaggaacaaaaaagaaagcttcacacaaaacccaaaggtcaagaaaaactaataaggaacaaaataactcanattaaaaatagatcagaaatagtcaaatagggaagcaataagaacaaaaaaggaagacgatctgaagaacaaagatcttacactgtagtcgttgctacttatgtgacgcgtcgatgataagattctttntgtgatgtggatgatgacaccgagcttttcccccaatgtggataagaaacaataagcctacaacaagaaacctattgttggtaggggtagggcaccaaataatgagaatgggtttgagtaanggagaaaatgacata

SEQ ID NO: 59425 - DNA, 81 bp, Glycine max
ttgatgaatatgcttcatgtgattgggatgaagaaaaagtggagaagaaccttcttatagtcgctcaactaccttcagaag

SEQ ID NO: 59426 - DNA, 423 bp, Glycine max
  unsure (1)..(423): unsure at all n locations
gctttttgtttatttnccgtgccactttatcgttcagctttcagttaaaggaggattcaactaattctttttaaaaatagtaatcttttcaaacaggttagaattttgtactccttatatcgatctattcctttagaggatgaaagtctcaataatagaaatcatttcttaatttttctaacttattcataatcaaggttgtaaagcagggtcttgctttgaaaatttgtaactttaggtaaaataattagaaaacttctatatagtaatcttaatttaaattaattgatttaatcacttaatattttttagccatattggtcacttttataagaatcaaattagaaattttctttgtttgtttttatcaccattacattggtgtagagtatttgaccaatttactaataattaatcttcgtc

SEQ ID NO: 59427 - DNA, 401 bp, Glycine max
  unsure (1)..(401): unsure at all n locations
gcgcctgaatcggacctccgaatgattagttatgaccatntgaatttctcgagagctacctttgttcaatttcgagcgtctcgatatattatgcgcctgaatcggacctccgagtgaaaagttatgaccatttgaatttctcgagagcttccgatgttaatttcgagcgtcttgatatactatgcgactgaatctaacctccgtgtgaaaagttatgaccattttaatttctcgagagcttccgttgttcaattttgagcgtctctaactgtgatgcgcctgaatcagacatccgagtgaaaagttatgaccatttgattttctcgagagcttccgctgttcaattttgagcgtctcgatatattatgcgcctgaatctgacatccgagttaaaagatatg

SEQ ID NO: 59428 - DNA, 322 bp, Glycine max
  unsure (1)..(322): unsure at all n locations
tatcgtctctacagtcttagatttggagccaatccaatccttgtgttcagactctcaaccacttatgatangccgcgatgatcccattacttgcttccctaagctctctgttctttcttcacgccgcatcccatgccttgcgaactccttggagtaccctcgcgttgtggtcactgaaaccccgtgcgatgaaaggcgtgatgctttcgtctaatggcgctcctctcatggagtagccaaactgtcttatggcgagaacgggattataattaatacaaccccttgntcccatcaagggaacatttggacatncttcgcatga

SEQ ID NO: 59429 - DNA, 452 bp, Glycine max
  unsure (1)..(452): unsure at all n locations
agctccactggatgtctcaactatcgctttatgtgaaaagcttcaaaatatttgaaagaagcctatattgatgaagtcaatgcttccctttgaagatctaatcttatcatattctaaagacatcaataaggccttacatagaagatttttcaaaggctacaatgagcatacaggatcagaatgaagtttcatcagagtctgcatcaaaatgatgaagaatttgactntaaacactgaagttcataattgttctctactatacctcanagacaatatcatgtctttcatatgctgccacacatacagaggacacattagaagactgatgttgatagcatctcactttccatatgctgccacacacagagatgacaagtggaaagctgagaatgtccttgagaagatatggtgtgcaacatcaaaatgaagacttaagagactntgtgaaatct

SEQ ID NO: 59430 - DNA, 296 bp, Glycine max
gggagaggcccttttttaatttaataaggcgaggaaagtgtttacacaatgatttgatcaaagaaaaacttccctaatccatagcagaaaactatgagaacgatacttaattaaaattatagaatttcctttggaagcatggaacaaaaggagacgattaaaaaaaaacttacgtgtaacgtgtaatattgaacgtgagatagaattttaggggtgagagacacaactttcccatggggtgaaaaaaccacacagttctttgtgtttggacggacaatatgaatggttggtttgta

SEQ ID NO: 59431 - DNA, 98 bp, Glycine max
agcgcaactcagcgcaacttaccgctgggccaggaagcttcccacgcgccatcacgcgccatcttcgtgcgcgccatacgccggcgcgtgaccaccac

SEQ ID NO: 59432 - DNA, 310 bp, Glycine max
  unsure (1)..(310): unsure at all n locations
atttaataacgcgtcatgagttatcacggatgttgattctacaagacattatattccaatcatattccgcatacacgcatttttcatttgataatatactaaggtttcatcctatttaagaacattttaataagaggtattatcattccttcttctttatggaggnctctatgggtattggatactcaattatcatcagctcatcatactagatttctgcctattaaaaagtgagaagtatggacttnnnnnnnccgttgctcgggagcgtgatataataatatatatgttattgtaatataatatcggg

SEQ ID NO: 59433 - DNA, 380 bp, Glycine max
  unsure (1)..(380): unsure at all n locations
ttatcttatcactcaacattaattatttttcctacatatttacttaattattctctttctaaatattaatgagaaacaattaagtggataggaagataagaaaataatttttaaatgataatacaaataagtgacaaaagttatgtgattaactaaattaactatttttcttagaagacattaatcagctgaaatgatcttataattaaggattgaagaagtataataaacaaataagtatattattttggtcataataataagaaacatggactatagatgtattacttgctaaaaaaatatccttaatntattgtgaaagatgttcatttattctctatacanatngattaacttgctagaaacgaggatcgaatggt

SEQ ID NO: 59434 - DNA, 428 bp, Glycine max
gcttattacaaagaatcagaactcagagtgttgttctggtaaataggctctctaattaatttgagtgcataatttctctggtcatttaaagggagggaatatatttgttcgcaccaaaagaaaacaaaaaactgacgaagaattgagtcttgcccggggcttcagatatgtcagtgcagagattgtactgtgttatgaagttggtgtcaatttgtttattaactcagctcatacaaatgattctatatatagataaatatctaattaatatgttatattttatcgcttgcaagtgcagcttattaactatctggtaatttatctaataatagttggtttggtcagatttgagaagttgagaatgtcaaaaagaaacttagtaaaagggtctgagtgtgatactactttaccgataatctattaatcta

SEQ ID NO: 59435 - DNA, 391 bp, Glycine max
  unsure (1)..(391): unsure at all n locations
acactatgaaactcaacttccatattttaataaatcgatctctttaattattatctaatgtcttaaagatattagttagaaagatcctatacttaattagtaaacatgaatggtattttggcattttggtgtggtgagctgtaaaaaatgacacaattagtcagtcgctttatccattgattagtaggtttgggttcaatcttacagtccacatatatatacatgaatggtatttggcattgggttcaatcttacagtccatatattntaagctaagcgttgtatttggattaaattttagttacaactgacaaaaattatactaatatactagagcaaaacacaacctangttccttttcaacaactntgatcttatcttcattcatata

SEQ ID NO: 59436 - DNA, 434 bp, Glycine max
  unsure (1)..(434): unsure at all n locations
agcttngatgatatggtcttcgccggcagaatgatcgaagtgggtctgaaaagggcaaatctgatcatcttgctttgataaatgcaaaaaaaaaaaaaaaaaaaaagctggggcaaataaagagggtgaggatgaaggagaaacccgtgctgtgactgccattcctatacagccaagtttcccaccaacccaacaatgtcattactcagccaataaccaaccttctccttacccaccgcccagttatccacaaaggccatccctaaaacaaccacaaagtctgtctaccgcactaccgatgacgaacattgcctttagcacaatccaaaaacaccaaccaagaaatgaattntgcagcgagaaagcctgtataattcacccaaattccggtgtcctatgctgacttgctcccatatctacttgataattcaatg

SEQ ID NO: 59437 - DNA, 53 bp, Glycine max
actatgatactcaagcttctcaagagcttccatcgagcagccttagaacttga

SEQ ID NO: 59438 - DNA, 381 bp, Glycine max
  unsure (1)..(381): unsure at all n locations
gtgatcaagttaagagagtggatttctgtcacgtagatcaccagttcttagttaacctatttgaagtgtgttgtgaactattgtataccactattatgcatcggtccaggtatgctttgtttttttatctttcangtcactgaacaaagtacaactttccatattattaaatggctagagatgacaaatttgctatggaatatatatttaaggcttaaatatctttttagtccttgcaatttaagcgttntttgcttttcatccttgcaaaatatttttttattattttattccttgcanattatgtttggtttgtttttcttccttaaactgatttagatagaaacttgaataagtgaaaaaagcactatctaaaccact

SEQ ID NO: 59439 - DNA, 344 bp, Glycine max
  unsure (1)..(344): unsure at all n locations
cattacggaactataatactaagcctttgagtagaacatgggaccactcatntatttcaaaagaaagtctatctagtcaggtctgagagacatacaagttcctaatgatttcaattatgtgggccattaagctatcatatgctgacaatagacgagaagcccatgaatcctcttcggggcggagtaggtgtctgccatcgccttggcctttgctaacaagcggagaagttcttgactcccattcaaggtaagagcaaaccgatccatccacatnggtgcctcttggtgtaaagagtcgatcacccttcctctagcctctntntccgcgtatacttgagcatact

SEQ ID NO: 59440 - DNA, 373 bp, Glycine max
  unsure (1)..(373): unsure at all n locations
atctgacattcaccacagattctgccttcttctattttcaagatgggaatgcctctaacagcacctttgtcaatgattntcttcatgcctcttaagtgcagatgtccaaatctttgatgccatattatgacttcatcttctttggagaatagacatgtggaggagtaactggnttcttgaggtgtccataggtagcaaatgtcctttgatctgctgcccttcattagaacttcactcttctcatttgtcaccaagcattctgactntgtgaagtttacattgaatccttcatcacacagctgactgatgctgatcaagtatgcagtcagtcccttcaccagcagtactttgtccagactatgaagtccatcat

SEQ ID NO: 59441 - DNA, 218 bp, Glycine max
  unsure (1)..(218): unsure at all n locations
tttggaacttatctcttctgccgatggaagagctactggagagacgtcttactggccctgggctaccaatgttagctctattgcgaagaaaaacttggctgaggcaatattgttcaatgtgactatatacaggccacacatgaaagcaagatatgtnttttgatctatggggattcgtggcatacaacagggaaacccatatccttcccattaattca

SEQ ID NO: 59442 - DNA, 284 bp, Glycine max
  unsure (1)..(284): unsure at all n locations
aagtagttntactcttaaatgcttccctctaaacaaaaatggcatcaacctcctccaatgaatgcagacatctgtgtaatttagagcgagcttgtgcgcatccttgttacgaacgtacacttgcgcgagacattcttatagctgagaaatgcaccgctattcaatcaaagcgccttcgaagcctagattatatcgtgttcttgcaaggggatatgttgctgcatagacgcgtctctttgctaattacgtcatgcctcttatgcactttggcttgaaaatagcgt

SEQ ID NO: 59443 - DNA, 364 bp, Glycine max
acgctcatgtgcatagaagtatgactgataatgttagtcagttgttatattgattatgaacgaatgcatcgcgacgatcccggtgagagcgcgatcggccatgttgagagaaaccactcatatttactactacacctcgcgtgaatctctggagaatggactgaatcatgaaaggaagacaagaaagccatgcatgactgtgatagccacctaaccgaaacgctgaccacgtgcttgaatgatttatcccttgcacttattttgagctgaatgagaaactgattgattgagccccgagcctatatagtgatatctccagctgccttgacttatgtcggaggagagcatcatacacaggaagcat

SEQ ID NO: 59444 - DNA, 424 bp, Glycine max
  unsure (1)..(424): unsure at all n locations
gctatcatatgcaatgacgattaacaagtctcagggccaatcactttctatggttggactttatttgccaaaaccagtctttagccatgggcaattatgcgttgcattatcaagggtcaattcaaggcaaggattaaaagttcttattcatgataaagacaaaaaaaaatatgacttctactactaatgtagtcttcaaagaggttntcaaaaatcttacaaggtaactctaaattttcaaacaacaaattgtactatctattggcaacaatttctaactgttatcttacttatatacattctaacatacagccaaagatgatatcatatattacaatgttaaattttacattgtcaggtatgtaatcttaatcaccgcattaatatcttccatttataatttcatttacttaacgttatatta

SEQ ID NO: 59445 - DNA, 244 bp, Glycine max
  unsure (1)..(244): unsure at all n locations
tctcatacgcctttatctcagctgagaagaatngcttgtaagtcgtgactataaattacttgttacctctgctataacatgattttcaggtcttgaatttctgtaaaggttcaaatgaaaggtttgcatttttcatcaaaggatctggaatgagttgaaatgctgattcaatcttttggtacgaaggatttttgcactttttatcaaacactactgatgggtatgaaggaaataactctcaaag

SEQ ID NO: 59446 - DNA, 464 bp, Glycine max
  unsure (1)..(464): unsure at all n locations
gcttctgtcggttgacccttttaactatgatgatgcaccggtggaagggataccgaggattcttgataaattcactggtgagaaaattccacgcaactcatagatacccactgagaagattgagtggataaggatgggtacaactgtggcaacgaatgcacttttaaagcgcaagggagaaaggattgcagtgtgtgtgactcgaggctttcgtgatttactccagatagggaaccaggctcgccccagcatatttgaccttactgtgttgaagccatcaaatctctatgaagaagttgtggaggttgaagagagagttcaacttgttcagtctgaggaagaagagaaaagcagggtggttcttcatctgtggttaagggaatttcangggagctcgtcacgattgtgaagcctcttaatgaagaagcactgaagccagtactggaaaacttattggacaaagg

SEQ ID NO: 59447 - DNA, 241 bp, Glycine max
  unsure (1)..(241): unsure at all n locations
tttctctattaatgtaaaatagaagagtgcgtctatatatattggccgatatatgaccctcatgcaatggatcaacctatttcttaaaaaaagttattatgatgaaagtagtaaaaatttaagggccggagatttaaatactcaacactagngggggacggggggttaaaagataccnattctaactcttttttcctgtcctcccttgtcannnnnccacccttatatatatctacctata

SEQ ID NO: 59448 - DNA, 427 bp, Glycine max
agcttgccacccagctcgcccaggcgagcatggttgctttcatcataagcaacatgcatctggaggaatcttctggagggcccaagtgggcctggttgctatttgcaccctcattattactaagtacaccccctgcctatttttggtgattctttcttcgtgcaggtacggaaacttacaaattgcgatacgatactggttttctttcctaatgaaacggaaccctgtggattacataatcattccctttctgacttatggaatattacggaacctcactaattgtgcaacgatgctatcatttgatatccggtgcgtcacggaaccttacggattgtgcatcaatattctcttttgttttccggcatgtcccggaatttcacaaatggcctaatgatgggtggcaaacacctcacaaggaccaaac

SEQ ID NO: 59449 - DNA, 363 bp, Glycine max
  unsure (1)..(363): unsure at all n locations
ttttaacaagctctacttaaaattacaacaaaagcactataagatagtgaatggttgtgaatgttgaaattgtgtttggaggtgggttctaacttggagacgtccctagttcatttgggaagaacaattgtggatggttatagaggataaaggaccgaaattgtagaacaaagatagctaggaatgggtatttggtacatggaagacttatgtggtcaaagaggtatactctcaagcaataacttgtgcataatctactaatgaaaataaaccattgaataaaaagtgggaatgcnnnannnatgtttgtaactatcattgtgaatcctttgctctttttagtctagntntattaaaattcta

SEQ ID NO: 59450 - DNA, 430 bp, Glycine max
agctgaaaggcgaatgctacttcaacatctgcctgcagttatataatattggtatatgtatttatttgtatgaacatacactcattaatgcataattaagaattagacctgggctgcagtgattccttttacttcgctataatctcccttctcaagcctttgattgtctatgttaacttctttgcctctgagactggttaactcttcaacaggccattgcaccaattgtctcccagtaaaatcgagccacacagttcgtggaatcgcctaattattttaccagacacatacatgcatattacaattcctttaatttgtataaggatacaaaaataaaacacttatagctgaatgccaaacaaaaaacatgaaagggagttagagattcagaatcgagcaaagattgagtaaatctagaattatctctctc

SEQ ID NO: 59451 - DNA, 293 bp, Glycine max
  unsure (1)..(293): unsure at all n locations
tggggcaaaacacaccaaatgattataatgatggatggctcanattctcacaaaggtaaaatcatcactttcaaattgagctttcaaaactatcatgacatgtagagaagaatcaaggatttcaagtcacaaaatgtcaagaaactttattttcanaacaattacccatttcttgaacatatcctataattcaaagaaaaacatgcanagtcgtacgtgcacacaaaattgacccanaatatttatctnnnccgcgacgaaactaacaacattaacaaattaacacaactaac

SEQ ID NO: 59452 - DNA, 412 bp, Glycine max
  unsure (1)..(412): unsure at all n locations
gctgggacactcttgcnaggtctatgcttgttctgataagtggaaaagagtcaagatgcatactttgaagcggcaattcgagctactacagatgaataagaaggaaggtatggccaaatacctaaatcgtgttcagaatctgtcaaatcagatgatggcttgtggtgaaatcttgaaggatcaagatcttgtagaaaggttttaagaaccttgagttcaagaattgattatgtggtcgttgcaataagagaatctaaggaatttgcagaaatgaaattggacgagcttcaatgctctcttgaagcacacaagcgaagaatcaaagaaagggaaacaaataggtcatctgaacaggccttacttgctcaaagtggaaaaagattaaaaaatggttcaaaaagtagtaaaggga

SEQ ID NO: 59453 - DNA, 321 bp, Glycine max
  unsure (1)..(321): unsure at all n locations
tcgattacaaagatttggtaatcaattaccagtgacaatgtttgaacaaaaatcaaaagatgtaactcttttcaggttttctaaaggttataactcttccaatggttttcttgaccagacttgaagagtctataaaagcaataccttgatttgcattttaactatacttacttacaacacttacaacctttacaaacaacttttccatatattcttttacaacctttgaatctctttgaacatcttcttgaacttcttcttcttcttccttttganaagctttctaaagttttctggttttccatactgatgtaagctcca

SEQ ID NO: 59454 - DNA, 436 bp, Glycine max
  unsure (1)..(436): unsure at all n locations
agctatcaacanatgtcttcacaaataatcatcacacagcagaaaactaacaaaactactccctcatatctcccaaaaccccatacccacgaaatttaagagagaaagaggtccacccaaacctggattttcgaagtcccactcgtagccacgcacttcacgaccccgaaaatgccctcctttcgcgatttggagcagaaatgagcaccaaaggttggagctttgttggggtttcaatggagaatggaggagaaggaaaaagcaacgtgaggaagagggagagcttctgaattttctgttttggctgagtgaggagagagaaaagctntttggtcttaaataaaaggttttcctctttttctattattttattcaagctctaccacatgtccctattggattggagcannaagggcccactttctctttttgactg

SEQ ID NO: 59455 - DNA, 290 bp, Glycine max
  unsure (1)..(290): unsure at all n locations
tgagaatggagaattgcactaagcaatcactacgcatagctccatatctcgaagtggangacacatgaacgaaaacacaattcatgggggctccgaaaaggggtngagaatggagaattacactaagcaatcactacgcatagcttccaactttgaggtggaggacacatgaacgataacgcaattcatggggctccgacaagaatgagaatggagaatngcactacgcaatcactacgcatagctccaaacgcgaaggtggaggacacatgaatgaaaacgcaattcat

SEQ ID NO: 59456 - DNA, 398 bp, Glycine max
  unsure (1)..(398): unsure at all n locations
ctacttcaagtcactntcccaaaaacatattaaactattaaaaaacttgtttaccgaanagacaaacgaattttttcatctattaaaaataatgaanaactatctaaaaattcttacctaacataaccttagtctctttctttttggactcttttatccttataaatatctaaatgtttaaaatttatccatataaattntggagtatgtttttcatcatcacaaaatataaatgtgtgatattttgattcaaaattatttaagaggtctaatcttacgtgtcaatgtcagatctttattatatatcaactaaaacttgaggtgttgcccaccatatgacatgtaagacaaatatcctaaatccggntttaangtaaaatattatacatttatatttt

SEQ ID NO: 59457 - DNA, 280 bp, Glycine max
  unsure (1)..(280): unsure at all n locations
ggtcttcatatagacttaattattctctacatttggtttatatatatntctaaaagacacatccctagatttcttatgcacatgcttacgaattataatattggcattacacaatattctatagtccatgttggtctggcacttgttggtgatgaaatgcttcttgtttcatcctctgctccttctcatagtatctactaatttttaggagagaaacagttcttgaaagagaactccaataattattgcttctgttgtgtatgccatcattgtttatcat

SEQ ID NO: 59458 - DNA, 269 bp, Glycine max
  unsure (1)..(269): unsure at all n locations
tttatcatcataacctctaaacataaaacagcgttgcctttttagtaagataactcagttgactaaatactgagcaagatcaggaggttacaagcacaacacaagtatagaagtctttttagagagagagagagatagagatgaagcagaaattgtgtttctgtgaagaatggattgcttccaacattatttcacatagcaacaaatgtnttatcaaaatattatcattgctacaagttagctatgagcatcactaacagcagcagagc

SEQ ID NO: 59459 - DNA, 268 bp, Glycine max
  unsure (1)..(268): unsure at all n locations
acactcaactcttangcgttatgtagaacgcattcctaacattgtggaactgacgaggaatcttctcctttgttccttggactgaacggtgatctttttccatctcctttgnctcttagaaatttattgaatctttttatgaagagactgaaaccatcatcttcttctatattgntatgttcattcaagccttctttgtcacttttctcaagaatagaagatgaggctttaagtgcaattcncttcttctttgtgtcattatcttcat

SEQ ID NO: 59460 - DNA, 455 bp, Glycine max
  unsure (1)..(455): unsure at all n locations
aacatattaattggattcttcctctatcactttcaggacctcaatcatcttcttagtagaatcaagtggtatctgatgtcaatctgtgattgagcatttttaatttagtagttttctattattcttagcttatttgacctctttctgactcttattttctcaccttaactcagttttggtcttacgaaaaataatggggctaataaaaattgtttcttattttcggattttgtgcttacttgatctatttgccttgtgtaggatttgtacaatactatagaactctgaatggagtatatgagtagtccctgaaaagctatggaaaagtgctacaattntgtcagaaataagcttaggccaattctaccattntgagggtcatttaaggcttggaagtaagagcctgtgcacatggattttgggctgcgaaactgggctttgcatcatgtaattaa

SEQ ID NO: 59461 - DNA, 411 bp, Glycine max
  unsure (1)..(411): unsure at all n locations
gtgagcttagttatgagagaggtgtgtgtagctaagctctagcttctcaatgaagtnttctcaaagaagcttctcaaggaagttttctcaagagagcttctcaaggaagctacctagtctataaatagaagcatgtgtaacacttgttgtaactttgatgaatgaaagtcttatgagacacancttaaagttctacttctccccctctcttattctttcaatttcgtgctcccccctctctctttctctccctctttcttttcctccattgaagcatccttccaagcttcttatccaaggctcatcttggtggtgaagctccttcttccatggcttattccctagtggatggcgcctcccttctcctcttctcctttgccttccggtgcatctccatggtgaaanatcacc

SEQ ID NO: 59462 - DNA, 346 bp, Glycine max
  unsure (1)..(346): unsure at all n locations
tactcagcttgagcacggctggacatgatatatgtcgcggttaggtttagtgtactgatacacatggaatgtgccacattatttccatgacacatatgcaacaatgatganttggaaattttatgcaaaactagtcctgcatgcacctatgtcgacattcaagtgtcaaacttttatggtcatgtgatgtcacggctcaagattcatttcctctatcttagtcaacccagtgactccaaaatatgttctcttatcaatacgtgcattcatccaaatctattgtgggtgttcaaaaaactttcacggcattgacccttcatgcgtacacattttttttcacaaactg

SEQ ID NO: 59463 - DNA, 405 bp, Glycine max
agcttcatcccacagacacgcttatgtaaaaataaaaacataaccagtggaggaaaaaaaaatcaatcccacctccattggacacagctcgtgcacacaactttgcattatttgtatccacagatgaatatctacggagctcaactgtaaaagaacagcagtggaccatgttgtttgattcttggaaattctcaactgcttctctgtttcagacagtaatcttaatgcatgacttagtttctgcatgtctgcttccgctatgattagagagaacaaccaagttcagacaacagaaattatgataaagcagacacctgtatgggctgcaaacacaaagaatggctaatgtgatcaaagctaacaaagatataataccatttaaaacacctacatgtatatctatta

SEQ ID NO: 59464 - DNA, 219 bp, Glycine max
gaaatgattccatcacagattaaatacttgcaatacacatttgatttcgatagtcaaaccatttccgtatttgcgccatctggaacgaataagcgcatttaaccaatgcaatggaatcaatgattttcactgttgtatggactagcatacgcgacaaacttaagttaaaactacttaccgatagccttctttaacatgtttaccaagctgttgcaacac

SEQ ID NO: 59465 - DNA, 353 bp, Glycine max
  unsure (1)..(353): unsure at all n locations
ctattcatctttttcattcccttctccctttgccaaaaagaattcgccatggactaacccgctgaatgacctttgtgtgactcttattccttcaccataagaacgaaggactaacccctagaattcttgtgggtctaccatataccgtgtcatagaatccgaaacggcgcagaatgagaatacttttgatgcttccgtttcccataaataaaagatttcaaaggactaatcgcctgagaatttttgtgtttccccattcacaaagtttcaaaggactaactgcctgggaactntgtcttaacacattggagggtacatcctgtgtggtacaagtagagggtacatctacttgt

SEQ ID NO: 59466 - DNA, 416 bp, Glycine max
  unsure (1)..(416): unsure at all n locations
agcttgaatcggacctcagtgtgaaaagttatgttcatttgaatntctcgagagcttctcgtgtttagtttcgagcctctcgacatattatgcgcccgaatcggacatccgtgtgaaaagttatgaccattataatttctctagagcttccgatgtttaatttcgagcgtatcaatataatataagcctgaatcggacctcagtgtgaaaagttatgaccattttaatttcacaagagcgtttggtgttcattttcgagcgtctctatatgtgatgcgccttaatcaaacatccgtgtgagaacttatgaccatttgaatttctcaagagcttccgttgttaattacgaccctctaacatattatgcgcccgaatggacatccgtgtaaaagttttgaccttttattttacgaagc

SEQ ID NO: 59467 - DNA, 342 bp, Glycine max
  unsure (1)..(342): unsure at all n locations
aatcaccattgaaagacctcattgaagctcaaagaaccagccttcgtagaagctccacaagcaagcttccatcaagtgggaatcagagcacaagagcttcaaggaggtgctccttaaacctccattaatttttttcttaccttctcttcattggtgttcttattttctcatgtatctcctacatgtcttgtctaatgtgtaacatgatctttnacttcaccgattaacttgcttagaagtagattgattttatggtcaattctggtctggtctgacctgatgtgtgagttaggtccttgagttgcttgtattttgtgtgaactaacataaatttcaaatata

SEQ ID NO: 59468 - DNA, 389 bp, Glycine max
  unsure (1)..(389): unsure at all n locations
atgttcgatggagtcccgtatcatatcaagacgcttgaaattgaaaacggaaactcatagcaaattcaaatgacaataaccttaatctcagaagtctgattgtgtccggtaatatatcgagacactagtaattgaaaatggaagctcgtagcaaacacaaacggcataactattaactcggatatccgattgagtcccgtaatgtatcgagacgctcaaaattgaaaagagaagatctgtgcatattcttacgacaataactttntactcagatgtccgattgagttccgtaatatatcgagatgctcgaagatgaaaacaagatctctgagcacaatttaatgacaataaagttttcctcggatatccgattgagtcctggtatatat

SEQ ID NO: 59469 - DNA, 381 bp, Glycine max
  unsure (1)..(381): unsure at all n locations
acactatgaaactcagctntaagatgtgctcatttgtgtaacaacatctacatatagtgatgtagttcatgctcatgtaaccacaagtagcaataatgtgtgaacatggatagtgaagtgcaaaatactttntgcattgacaataatggtcattcaagttaactgctcacttttgtccgccacgttgcgttataagattgaaggtctcctctacttcaaaccttgtcgagtagatatcatagacacggacgatgtgcgaacaagcttgttcttgattntttcgaagttctttaacaaccttagaacaatatacttgtccttcatttaattgtctttgggcttaccgaccacgataaagagtactttcgacacctactatat

SEQ ID NO: 59470 - DNA, 417 bp, Glycine max
  unsure (1)..(417): unsure at all n locations
gcttgatagccactacatctcctcttattgaaatgttcaacacctatttctttccttagctttcaaatctttcagtctttactgccttagtcatcacatctgttacttatgattcagtggaacaataaacaactttgataactcttttattcacttgttcccttagaaagtgaagaattgtctcaatatgcttgctctttccatgggagattgngttcttggccaagtcaatcacaaatttattatctacaaacaactttataggcttcttcaactcgatccttaattctatcagcaatgaatcaagccaaatagcttgacaagcaacaaatgagcctactatatattctgcttcacatgttgataatgcaactactggttgttacttataacaccatgatattggtgctcctaaga

SEQ ID NO: 59471 - DNA, 224 bp, Glycine max
  unsure (1)..(224): unsure at all n locations
aaatgtaatgatcatttatagaggagaattaattaacatcatataatggaatttattttatatttacttgctttcattcccattcaattacataacttnaatatagttttgacattatttaattaatggttngtttttgtgacagacacatgggtacacccaggtcccctttcccttctgattcggaacacattcccccttctaattgagcggcaagaaaagca

SEQ ID NO: 59472 - DNA, 389 bp, Glycine max
  unsure (1)..(389): unsure at all n locations
acaaatattccatctctgttntattcaccttccaacttttgcactgctcttaccatccttgatctttcttcaaataagctcacatcctcaacatttcaactgttgtcaaactttccttctcttgttatccttgacctttcctataataatatgacatcatcagtctttcaagggtggttcaacttcagttcanaacttcaaaatcttgatctgcaaaattgtagtcttacggatggaagttttcctatgtcatcttctttcattatgcgttcttcatcttctcttnttccttgatctctcctcaaatcttttgaaatcatcaactattatttactggctctttactccaccaccaatcttcataaccttttacttaataataacatgtt

SEQ ID NO: 59473 - DNA, 297 bp, Glycine max
  unsure (1)..(297): unsure at all n locations
tctggaatgactacttcatttcctaatgatggttggtaactacgaagntctctggatgggcttaaacaggcttccaggcttggtttgagaagtttcgtactacacttcttaatttctccttcacacaaagtccatatgattattctctcttcttccacaagtcctcctcgggtatagttctcatcttgggttatgtggatgatctaatcattatgggaactgataatgggttgattactaagcttcaagccgtgctacatgcaacattccgcatgatagatcttgccaactcacata

SEQ ID NO: 59474 - DNA, 192 bp, Glycine max
  unsure (1)..(192): unsure at all n locations
gaaagagacaaaaaatcatgtttagtgttcgacagtatctggaacaggatagcctctaaaagaggatacacgtggaaaaacaaaagagaacaaaaagatataaatttcattgcactaggataatgccttcttactcatagtccaagctntctatgtaggaaactttttctccaaccagagcaagagggttgg

SEQ ID NO: 59475 - DNA, 211 bp, Glycine max
tcagagcattgaactaagatgatcgttgcaatgggatgatgggtttgattgctgcagatcttgtgtccttgcgagtatacggtgcgatgaggtcacacttcatcgactaatagaaatattgtctagcattacggtataagctaagacaccttacttttgtactttcttgacacagggatgatatgtgcaattatccaacaatgactacggg

SEQ ID NO: 59476 - DNA, 358 bp, Glycine max
gcccgagtcattcatccctatgatatgttgttgaagtattggcgatcagaattttctttccttggattatagggatgaaccaaactcatgcttttacaagaaggatcatcaagtcaagatgaaatatggaagtaaccggtctgcgaaattgcggcaaaagatgaattgaatcacatcactgcttcgtttactgcccaacatatttaggattgttgatgtcctttgtacttccagttccaccttgacaaagatgtcatggaccatgttgaaaatctaaattgattctaccgcatatcctgcttaaaaattcacactactttgactgctcatcattcgcatgcatccatgcttttcattg

SEQ ID NO: 59477 - DNA, 402 bp, Glycine max
  unsure (1)..(402): unsure at all n locations
acctatatgagagacttctcttcaagctactttctctttgtgtatcaannatgatcagatggtcaccgatgaaaatagagttntaaacattgaagagaatttctaactctagaacctttcttcttatgcctacatgaggatgcatgatgcacgtgtgagatgatagagactaagatgcagcacacaatacaacaatcaatacaaacgccactcaagagagtggggatgtaaaaacaaaactcttcaagttttcttaacttcaggccaagttttatttgctcccttatctctaacaatctccctttttggctttannnnnncctcgaatttctttgagtgcattggaagtntagagagagactttttaacaactgatgtttgacatagagagatcattctata

SEQ ID NO: 59478 - DNA, 375 bp, Glycine max
acctcatggactactcctaggacaatattatcatttcttgcactgcacgttttgagtcggaagacatctactcaatcacgttcctaccctcggcaggggtcatatcactcgagagctccaccattggtagcaccaatcgtactactctacctgtagctaagttcatcgtgctaaatattgtagaaggagttgcccacaaatacgatggtgagggctgcatgcacataatttactggatctatcccagtactcatacaagctgtctgcactaagtcgactgaagcctgaaatgtcttttcagatggcaacggtcctagatgcgtggaacaatttcttcaaagcaccctcttaaggtcactccagctgaatatggac

SEQ ID NO: 59479 - DNA, 398 bp, Glycine max
  unsure (1)..(398): unsure at all n locations
gctgatactgacgtattctgctgttataccacttcttgcggattgtaacatgttaataaaatttactttgttggcagctaacaaataaaaacaaccatacttccgattactcgattgggaagccaaggacttcaattatagtagttaaaaaaatctcatcgtttaaatggactatcatcgatgattcttgcctgcattacataaattgaatttgcatgggtctcatcggaagcttaattatctacataaagtagacacgtctccccttttaatactcaacaaatcgtcctgtcnttgtttagtaaagcatgccactctctccttgagaaacgacttcctntattatgttaccccttgaattatgatatattatgtgaatgagtagtttaatatttata

SEQ ID NO: 59480 - DNA, 250 bp, Glycine max
cttcttcttccagaatctaccaagtgttcttgagcccttcttccatcaagcttaggtgagtgacctccattttcaactctaagcttgattttcacttcattttctttctatattctcgcttggaagtgcaaaaccttatttcgcactcttgaagggttaaaaactgaatctaaactccctcattcttcattctaaatttcatggagactaccagagataaagggagtctctccaactcttgaaccatatg

SEQ ID NO: 59481 - DNA, 417 bp, Glycine max
  unsure (1)..(417): unsure at all n locations
aattatgtaacaacaaaaatttaaaatctaatgtatgcaaatagtaataaccaacctgtgatggaacgattgaattgtgcttgacagcatcacgtcgaacattcaaagatttaaaataagtagatcttgcagcttgaaggtcttcattgtaatatttaagatctccacatttgttaagagaaacagaaagtgtatgggtaatctgtgggacaaaaaagtcaagaataaatagagaacaaacaaaanaacgtgatgttgcaattatgattcttcactccgtagtctaaaaaagccagggtccaatgaaataacctccaaatcatcttttggcaacttcgacagaaattgaacactttcttcataatatgcaactgcagaactcgcatcacccattgctcggctgcagaaaaatgatgt

SEQ ID NO: 59482 - DNA, 198 bp, Glycine max
  unsure (1)..(198): unsure at all n locations
cttaagcttgggcttatgttgttcaccatgtttctcatgtagctctccctatctctaacatattttcataaattntacatgccaccctatattttcacacctaacaaacctcattttaaaggccaatctttaacaaaaccacgccatgccaccatagcagcccatttattttcgtgacaatttaattcaaaaagaaaa

SEQ ID NO: 59483 - DNA, 412 bp, Glycine max
gcggatttggacttcgccggcagatatatcaaagcaggtctgaaaagaggcatatataatcatcccacttggacgaatgagaaaactggggcaaatgaagagggtgagaatgagggagaagctcatgctgtgactgccattcctatacagccaagtttcccaccaacccaacaatgtcattactcagccaataacaaaccttctccttacccaccgcccagttatccacaaaggccatccctaaatcaaccacaaagtctgtctaccgcacttccaatgacgaacatcacctttagcacaatccaaaaacaccaaccaagatatgaatttgcagtgagaaagcttgtagaattcactccaattccagtgtcttatgctgacttgctcccatgtctacttgataattcaatgg

SEQ ID NO: 59484 - DNA, 270 bp, Glycine max
  unsure (1)..(270): unsure at all n locations
tcaccaagaaaaaatttttgggaaagaaatgtagtggtgtgattccaaagatcctttcacccaagcataaagaccatgggagtgtaaccatttcttgttcaattggagaagtcactatgggaaagacacttattgatctgggagctagtattaacttaatgccactctccatgtgtagaaaggtgggagagttggagatcatgcccactaggatgactntgcaacttgttgaccgctccattaccagaccatatggagtaattgaagatg

SEQ ID NO: 59485 - DNA, 437 bp, Glycine max
  unsure (1)..(437): unsure at all n locations
agtcttgatggtgttgagtagaaatcacatgtttgtcatcatcaaaaagggggagaatgtgaatgtatgcatacatgatnttgatgatgtcaaaagaagaatcaaacaaggcttatttttcttcaagattaatgcaagattttttcaacaaacaaagccttgattcaagatttcttcaagatcaagccttgcctcacaatgaaaggtttcaagtcattcaaggcacatgtaatcgattaccaatacatgtaatcgatttccaatggtttgaaagtgtgtaatcgattacacatcgtatgtaatcgattaccagagactctgaacgttgggaattcatattttaaatgaagggtcacaactntttaagaagaacaactatgtaatcgattacactaattctgtaatcgatttccagagaggattttcaaggaatatct

SEQ ID NO: 59486 - DNA, 337 bp, Glycine max
  unsure (1)..(337): unsure at all n locations
actcagcttgaagagcccggtagtcaagagaagtcaagcctatccttcttagtttaagagagtatgatgaactaanggacgttaatatggccaccgatgaagccttggaatgagaaaccaagaaggcccgaaaggaagaacacgaccaaaacaagttttgaggggctttatatggcagcaatagtgagctcacactctgaagaggtgaaaggaatcatcatgggtcaaaggcatgatctggaaagacaagctaaaggcttgccttatgtcgaaaagaaatttgtcccaacagttaaagtgagactgaagggaatatgtgggccatcatcgatgagtg

SEQ ID NO: 59487 - DNA, 382 bp, Glycine max
  unsure (1)..(382): unsure at all n locations
acattattggaaccacataattaaaaccaacacttaacccgcagatccctcatggtagaataagtttcgatcctgcttcaatcaagttctaaggcaacagtacatttcccaatgcttaagtcacctaactgtgcacaacaatgggtgagcagaccaaaagcatacaaacattaagcattgaatgaagcattgaacacagaaaatataatcaattagatattaggtatttacataagctgttcattagaaatctccaactagggtgtttagccagccattataaagaaaccctaataataaatgagattaaaagcaaagaatgatagttccttacacaagaaggggattcctncttctcttctcagcatctcacactcactct

SEQ ID NO: 59488 - DNA, 373 bp, Glycine max
  unsure (1)..(373): unsure at all n locations
cttaactcagcttatttataatgttgctgttgaacttaactctctgttgcttgtaaatcaatactcaagtgctttcaacattcaggtagcaaagntggttataagccagagaaaaaacattcatttttttgtctttttggtttggtgtaggtatatactattaattttgtgaaatgtgtaggaagaaggtatacattattatagtgtgtttggatgaaacaattcagcaagagaattcatttttttagggaatttaaagtgctttatgatttcttttattgctaaattgcttcataataaaaatattntggttggatagaatattttaaagaaaattaaattctggtattggtgtgaatcatnttgattaact

SEQ ID NO: 59489 - DNA, 375 bp, Glycine max
attattaaacacacaaaatgaaaatactaagtacttattgcctatacttaacaaaaagtacttataacattaccaaatgactataaattgggagagtttgatgcaatttatacatgttttatacacaaaattagtcgttttcaccgactaacaatggtacctaaaaaacagataggtacagactcccactacttgactatgttggtgtgacactgtcgcaacctacccttcggcgggagggcgacgcgagactcgcaggatgcgtgttccactaaaggaatacgcgcggagtcgccaccaactgttatttgaggaaaacgtcagaaaaaccggagaagacgcgatctacgaacttttatgcgaaaggttctggag

SEQ ID NO: 59490 - DNA, 335 bp, Glycine max
  unsure (1)..(335): unsure at all n locations
tctccctctnttcccctataatagggagaggagggaagaacantaacgttcaacccttctggtatctgaagatcacttgaaattagtgaaaaaaatcattcccgtgaagaaaatccaagccgaggcgcttccgtaacacttccgaaacgtttccgtgaagattttccgccggctttcggtcattcttcgtcgntcttcggtcttcaatcgggaagttctcgatatcgaacttttcaattcattgtatgtacccttggtgggcctcacttgtttcgcgtacttttattttcatttcgtttactttccgtaccccctttggacgtgctntagtcatt

SEQ ID NO: 59491 - DNA, 438 bp, Glycine max
  unsure (1)..(438): unsure at all n locations
agactggcttatcgcgtgaagagatagcgcttatctgataaacaatctaaaaatttttcttagtcattntctgcttatctcttcactcatactttaaaaaccctttttgttcattaatacacaagctgaaataaatcacaatcatcaacaagatgtcctaactacatgcaagaaataaaaataaagatacagaagggaaagaaaagctgggttgcctcccagtaagcgcttctttaacgtcactagcttgacgcatcatcctattatccaggatccattaaagttcccacttcaagcaccttcttctcaagtcttctttcctccatcacatgaactttaaaatagacattccagtcaggtggctctntatcttcatgaaatagatcaaagctgattttttgatcttctattcccatttgcaacatcttctttcccata

SEQ ID NO: 59492 - DNA, 302 bp, Glycine max
  unsure (1)..(302): unsure at all n locations
tgtcgccatggagttttccgacgatgctcttgtgtggtggaacatanctacaaangagagagcaagaaataaagagccaatggttgatacatgggtagatatgaaaaggatcatgaggaagcggtatgtgccggctagttactcaagggatttgaaattcaagctcccaaaactaacccaaggcaacaagggggttgaggagtatttaaggaaatgaatgtgctcatgattccagcaaagaatgaagaagatgaagaggtaactatggctcgatttcttaatggtttgactaatgatatctg

SEQ ID NO: 59493 - DNA, 268 bp, Glycine max
  unsure (1)..(268): unsure at all n locations
gataacatagattatgatctcagaattaagaatgagttaagatgctattactgcatcaagaacacttcacggttcaagaggaaatttgatttcaagaatcaagaattaagattcattgctcacgctctcaagaatcnagatcaagattcaagactcaagaggctggaatcaagacaagaattaatcgtgataagtatgaaaagtttttcaaaactgagtaccatggattttctaaaccttttacccagagtttttctcttagtatcga

SEQ ID NO: 59494 - DNA, 150 bp, Glycine max
  unsure (1)..(150): unsure at all n locations
gacacttaaatctcagctgcactgaganaantctncctttttttttttttagaagaaaacaagacgtataggcccctaaccttgaaggaacccaaagcccaatgaaaccacccaacatttagggcttttggaccaatgactcactttaaa

SEQ ID NO: 59495 - DNA, 233 bp, Glycine max
tttcaaactggttcccctaattagaaaattatttcactttttactcaagttatgaattcccttaatgacaatcttcttaaatattaattcaaatgaaacaatttgaatatgaatataaagcaataataaataaaggagattaagggaagagaaaatgcatactcagttttatactgcttcggccacacccttgtgcctacgttcagtccccaagcaacccgcttgagaaatca

SEQ ID NO: 59496 - DNA, 392 bp, Glycine max
tcagcttacctatttggatgtgggatcatggcacataggtcccatctttccatcgtggcttcagccactaagaaaacttagatattgacgcatgtcttacacaaggattattgattctttcctacaccatgtgggatgcacaatctcaggttttgtgtttaaaccactctcataatcatattcatggtgagctcgtgactacattaaaaaatccaatatctatcccaactgttgatctaagcacaaatcacttatgtggtaaattaccctatctttcaaatgatgtgtatgggttagacctttcaaccaattcattctctgaatccatgcaagattttttatgtaacaatcaggacaagccaatgcaattagaaattctcaatcttgcatca

SEQ ID NO: 59497 - DNA, 273 bp, Glycine max
  unsure (1)..(273): unsure at all n locations
cagcttaagctgttatactactctcattagcttggaatcatggcttattgagctggtatcgaatcaagctatgaatggcttgcaaggtggctccaagccagaaatttaagtcaactagttcctcatatactttacaatatgaataaatatctcataaaaaaatgtgcactagaaaacctttacttttcaaacatgtgtgaggcacaaacgcacagcaaatactggccaacaatggtgcgcacaatcggagagcatgacatatantttttaatt

SEQ ID NO: 59498 - DNA, 449 bp, Glycine max
ctacatagtatttattctttattagtagactaattctaattatatgacttatataagtttattgtttgtgtctatcttgtaaaggatattttaaatctattatcatagatcagtcacatgttatattttaatttgaataagaagagacatcttattggacaaaaacttcaatttatttataaaaaataatttatatagaataataaaaaaaattattacgagacttaatgttgattaaaaaaaaattgaacttcttttagtcatgcgttcagtgttgttgcacctaatgacgacggttatgacggacccggttttgaataattcttttaaaaaaaagactgttatgatatatatattctatcaatgaaaagctgatgtaaacggaagacaacaactattaaaagtgtgctgtaaattaatctctacgtgatgtgtttcaaagcttcaca

SEQ ID NO: 59499 - DNA, 339 bp, Glycine max
  unsure (1)..(339): unsure at all n locations
tactcagcctcatgtgtctcnttgcttcattgggctaagaaaccaaatatcctcctacctaaatgtggatctcagataggtgaatctcaacccagtattttcttcacagattgggcaggacagcattataaagaatgcctgtccatggcagttgataatcttcctgttcttgatgggaagactccagtccaagtgtaccagagtttctgtgagagcttccagtcttcattctctccattcatgggctctacaatcacgganaaanatctgcatactaggaccacttatatatgctaattaatacatatccaccttcagattatatatatgatatatgac

SEQ ID NO: 59500 - DNA, 442 bp, Glycine max
  unsure (1)..(442): unsure at all n locations
gctgaatcgatacacatgtctcgtaatctatctaccagaggaaatttcataaagtattttcaaagagtcacatctattcaaatggtttttgaatggccatcaaaggtctatttatatgtgacttggaacacgaatttgcttagagtttttcataaaaaaaagtcttatcctctcaaaagaaaaattgtcttaaaaaatttcttggccaatgcacttgcaattcaataaggaattatttgagtgctcaattgttcaatctatctctttcaagagagaattcttcttctcatcttatttctaaaaagggattaagagactaagggtctcttgttgtaaagaaatctgaacacaaaggaagggttgtccttgtgtggttcaaaacttgtaaagggcttttgcaagatagtggaactctcaagcgggttgcttgnggactggatgt

SEQ ID NO: 59501 - DNA, 137 bp, Glycine max
tcaatgaatgtgcattccttaccatgacttctcctttgtgcccttttcttttgcttatggtcatggatatataaactctctgatgctattaatgtgtgttaaatgtatgcatgatgtaaatatttattcatgtgatg

SEQ ID NO: 59502 - DNA, 447 bp, Glycine max
  unsure (1)..(447): unsure at all n locations
agctngatttagaataatttctttgtttggtttcttggaacttttgtaataatttgtatgatatggattatatngntatgtttgggatgtgccatcattttcttctattttctaaaccctttttgcaccattttaattattgattggtcttaattgtcaattaattaggcagttntattatttgggcccattcaactaaattgattgttttaatctaatttcangaattaatgaagcattgggcttgaatctagcattgggcttgaatctagaattgggcttggacttgaagagggcagactaatttattctataaaattagatcttatcttatctagatattatttagatttgatctcatctagatattatttcatctagatcttatcttatcttatcttatctagatttgatttgattntacttatgggcttggaataaaacata

SEQ ID NO: 59503 - DNA, 214 bp, Glycine max
accacttcaagattaatggcctctttagattcttagtctttcaaaagcattctcaagagtaggttattccaagatcatgatgaagaccaagtctacgtgtgtctcatgacacaatctgatgagaataacatagaacatactgtaaggaaaaagtggtgcatctacagtcgatgttccaagcgtgtgacaggagatgtatccaaattcacaacca

SEQ ID NO: 59504 - DNA, 405 bp, Glycine max
  unsure (1)..(405): unsure at all n locations
atgatgaaaatgttgttggagtgtganaaattttcaaaattaatgaatagtcatgtagtttcatgaaattatgtgtctatatttatataaaaatatacatatgaataggtgtgactctttgaaaagattaaatctttacattataagacatgatatagtttagaaacataaccaatttacatgcagaaaaaacaatttatatagacttcaccaatccttttcattcgaatcgcttcctttctttccttatgcataaagaaaattaaggaaatcattattttgtaaactaccattgacgatatgcttcatgtgggtgtgcaaaccatttcaagagactgcattatatctaaaanagatatgccaatacaccttattgcatctaatttctatagcaattagtaggga

SEQ ID NO: 59505 - DNA, 350 bp, Glycine max
  unsure (1)..(350): unsure at all n locations
ctaagcttcagatccaagacctaatccanggagaaggccataaatgggatgcctantctcgtgctatacgattccggggtaacccattcctttatatcctgtgtgtgtgtaggaaaacttaagctctctgtgtcttctttaaataaagatctagtggtagagacccctactagtgggtctgcgttaacttcttatgtgtgtgtgaagagtcttgtggagatatctggtagaacattcttgatcgatttgatttggatgcctttgaggcacattgatgttattctttgcatggtctggttatgatttcaccatattgtgttgaactcgcttgattaaagtgtggtgtttta

SEQ ID NO: 59506 - DNA, 390 bp, Glycine max
tctttctttggtgtaacaatatctctaagggctactttgtctataacttacgaactaagatactcgtcttcagtcgagatgttgaagttgatgagtaagcttcttggaattgggatgaagaattagtagagaagaacgttcttatacccgctcaactacctcaataagaagctgaggaagaagacccaggtgaaccaccttcaccttcaccacaacaacaaaatcaagaactatcatcaccaaagtctactccgagacgaataagatctttggtggacatatatgaaacctataacttggccatacttgaacctggaagctgtgaagaagcgtcaaagcatgaagtatgggtcacggcaatgggagacgagatacagatgatcgagaaaa

SEQ ID NO: 59507 - DNA, 359 bp, Glycine max
  unsure (1)..(359): unsure at all n locations
tctatggaagctggatctttgagcttcttgatgtcctttaatggngattttccaccatggagatgcagcggaagacaaaggagaagaggtgagaggaggtgccatccactaatgaataagccatggaagaaggagcttcaccaccaaaatgagccttgggtaagaagcttggagaggatgcttcaatggaggaaaagaaagagggagagaaagagagaggggggagcactaaattgaaggaagacaaagggagagaagttgaactttgagttgtgtctgacaagactctcattcatcaaagttacaacaagtggtacacatgtnttttttatgactacgtagcttccttgagaagcttt

SEQ ID NO: 59508 - DNA, 433 bp, Glycine max
  unsure (1)..(433): unsure at all n locations
cttctagcttaggaaatcctnttcaagtgttgntagcactggaacaagaatagatagtgcaaggattcgagaagtgcattggaatggtaaaggggttagaggagccattttttggtggaagtgttcctcaaggggttaaaagaagagattggtactgaggtaaggcttcatgaaccaaagaacttgatggaagctatggttatggcctgaagagtagaggataagaacagagttttagggaagttacctttgagtaatagccaggggtataatatgcaaaaacctagttattcgggtcataaatttgtaaggggattggcaaccaacaaacagtaaggtagttgatcctactaatgctactaaaacaagatccagtgggtgacaaggtagaagaaccttccataatttgtcactcacgaaagtaaatgagaaa

SEQ ID NO: 59509 - DNA, 333 bp, Glycine max
  unsure (1)..(333): unsure at all n locations
tgtcccctatnttcatataaatagggggagaagtgaagggaataatatgttcagccctcctggtgtctttcttccgtaacgtttccgcgacagttggcgactccactggngaactatttttgagagttaggccatttaatcttgtgcaatgttttatcataacatcctcctttgttggnttccctttatttttcttatgttcttgtgtaaataactctctgatgctcttagtgtgttctaaaaggtatgcatgaggtaaacaaatttttctttgatgcacacaaacaccaacactatttgcacacacggtgatttgataaaaggccctatacc

SEQ ID NO: 59510 - DNA, 417 bp, Glycine max
agcttctcataaccattacatgcaagaaaaaatgggtattttaaggctttccatctcttgtaatcgattacacatccttggtaatcgattaccagaggctaaacttgaattacacagcctcaggacatgaaatatgcaataatacactgtgtaatcgattacacatgcctggtaatcgattaccagtgacccattcctctgtgtaatcgattacacaggctggtaatcgattaccagaggcttctatcatctcccaaatccctttttaagcctggtaatcgattacaccccttggtaatcgattaccagaggcttccttagcttcctgacctcattttcaagcctggtaatcgattacaccccgtggtaatcgattaccagagaccatcttagcctcctgtcttcaattttaagcct

SEQ ID NO: 59511 - DNA, 356 bp, Glycine max
  unsure (1)..(356): unsure at all n locations
cgccttaatggtctgttttacttctatcgattaaaatgaacctttcaaaagtttaaaatcaaccctacgtgcaactttcttaaaagaactatgtaggtctgagttcctcatcacatttgaggatacatangagcaagagccatgctcttgtcgaccccaaaagataaaaaagcattaaaagggaaaaataaataaatattgaagtcatgattntgcacatttgattaaaggctgccgtcccttgtgacagacgcgtggggtgctaataccttccccacacgtaaacaactcccgaacctctttttaaaagtcgtagaccccttttggttttctaactttttctcaataaacatggg

SEQ ID NO: 59512 - DNA, 427 bp, Glycine max
  unsure (1)..(427): unsure at all n locations
cgtttatgcgagacagagtatctcatgttagctatcatcgccaagttctaagaagagttaggtctagccaccgcccacgagcatataatcgcggatgagtatgcccaagtatacgcggaaaaagaggctagaggaagggtgatctactctttacaccaagaggcaaccatgtggatggatcggtttgctcttaccttgaacgggagtcaagaacttccccgattgttagccaaggccaaggcaatggcagacacctactccgcccccgaagagattcatgggcttctcggctattgtcagcatatgatagacttaatggcccacataattagaaatcgttaggaaacttgtatggtctctcagaccttgactagatatgacttcctttntgaaataaaatgagttggtcccatgtttctactccaaa

SEQ ID NO: 59513 - DNA, 364 bp, Glycine max
  unsure (1)..(364): unsure at all n locations
ctcagcttgctggattacatctcccctttctcaagcanattcttcttgatatatcaaaatcttcatgatttacattctccccctttttgatgatgacaaccacctgtaggttaggagcaacaacaaagaanatatctatttgcatatagttttactcccccttggttttacattgattgcttatatgagacaaatgaagatttcatatttttcatatataaaaagatggtctcataaacaatagataagttttcttactaatttatcttttatctttctctccccctttgtcaacatcnaaaaccaatcatgaatanagaggagaaagatgtaccacttgttgcaatgtttggatcaagtgata

SEQ ID NO: 59514 - DNA, 208 bp, Glycine max
  unsure (1)..(208): unsure at all n locations
ggacgaaatttctacaagggatgagagttgtaacaccctgagatattataagttatatatcgatcgttaattgtatttattgtgttatttgactatatgatagacttgaatgagttgaagtatgcctcgaactagtcatgtgtgaatntcttgatatggatgttgaattatgtggagttttgtgagctaagttgaaagatgatatttt

SEQ ID NO: 59515 - DNA, 303 bp, Glycine max
  unsure (1)..(303): unsure at all n locations
aagaaagatggagagaatatgagagggnggagcacgaaattgaatgaagaaaaaaggagagaagtngaactttgagttgtgtctcacaagactctcattcatcaaagttacagcaagtgttacacatgcttctatntatagactaggtagcttccttgagaagatttattgagaaaacttccttgagaagcttctttgagaaaacttccttgagaagctagagcttagctacacacacccctctcataactaagctcacttccttgagaagcttccttaagaagattcctaagaagctagagt

SEQ ID NO: 59516 - DNA, 406 bp, Glycine max
agctttgtgaactggtttttaaacacaaagtgtttttgatacccctggacgaacctcatcatccattgatatctgtttgagaaaaactttcaaaattttcgaaagactaagttttatccatcacactattcaaccccccccccccccttctagtgtgtttcaggtaattcaattggtatcaaagcttatcctttaggttgagctcttgacaatgagaggaaacaaaattcctgaaaatgatggaagaaggatttgttgtgaacaagtctcccatgttcaagggagccaactatgaatacgggaaggaaataatgattgccttctttgaatcttctcacattgatatgtgggatgttgaagaaaagggtaatcacattcctttatgttagacaagtggcctcagata

SEQ ID NO: 59517 - DNA, 280 bp, Glycine max
  unsure (1)..(280): unsure at all n locations
ttccctaatggatggcgcctcctctcacctctttttctttgtcttccgctgcatctccatggtggaaaatcaccattaaaggacctcattgaagctcaaagatccagcctccatagataccccacaagcatttttccatcacttgcacctcctcatccttactaagccattgaaagttgtatggcctacgatgtggtttactagctaaatatagctttgacactaatctatcactagccacattggtgcaactacctctatcaatgatcnacatgcacac

SEQ ID NO: 59518 - DNA, 279 bp, Glycine max
aatgaagttatctatcatccaatgaacatcccggatgacaccaatacattcctcttcatgaattaaaaaaatcagcttactatctgtcgtgaaatatccccgactgatatccttttgtcgacattgcacaattattttttaaaacaccagccgataatgtgttttatggtagaggaagatatgtgtttaggtgttgcataaaaaatttacaatgtaagtcggctgggttttttcgtgcgtgctcaaccgacgttttcgttatagacgataatggcatgt

SEQ ID NO: 59519 - DNA, 402 bp, Glycine max
  unsure (1)..(402): unsure at all n locations
tctgaccgaacaccgncagatttctatcccggtccatgtttatcgtgggctgaagcactggttctgcttccctaactgcattggagggcggtgtcgtggcattatcctctagagttttctggagttttagcatggcctccgtgatagaagccatttgatcttttaaggccgatagatcggccttcatctgctcttgcatgccctcttcattatccatttttctagatcgagtgttataggggtgccttgatgctttcttagttatggtgaactccctaaagaaacatacaatggtgagtatgccaccaaaacatgaatatgcaaatgactatcgagcacttggatccaccccaagggtntttagataacgtaatgaagtcataacttctcattttacaaaag

SEQ ID NO: 59520 - DNA, 452 bp, Glycine max
  unsure (1)..(452): unsure at all n locations
ctgatagcctctaagtaggtccaggatcagagccataagaagggcatatgttgtgactaaccgacccattagatagatgggaagatgaggtaaagctcaaagatgatgagggttcggctgaataagccatctgatcaacaacttgtgagagccaaagtgaacctanaacatatcttcttatatcaaaaacttcacacttcataactccctataagagtcccaaaaccatttaaactaccaacagatggaactaaacaaaaccttgaatttcccagcacagacagaaaacccaaagaaacctataaaacaaatgaaactatagacactgcgtatatgataaaacactgatctatagatgtcttatatacaaaatctcatgtcacagaactcacaagacatctgatccaacccctcacaagattccttatcataataaagaaaaagctaaagat

SEQ ID NO: 59521 - DNA, 303 bp, Glycine max
taattgcaccaacaccaacccttaagattgtgacatattttataggttggctcaccactaggcatacaccctactatcctcccttatcccatttgtcgtgaacacagactaaattaacaaaaataagttgttaaggtggaattcttattccctatggcttcattcatataaatcaaacggagaagacctcaattgtcactcttcgttttttccatggacaaaaagcagaagctctcccatcggttcacgctgtcattgcactttatttccattttccactctttggcaaggtttcaaaaaatg

SEQ ID NO: 59522 - DNA, 421 bp, Glycine max
  unsure (1)..(421): unsure at all n locations
ccttngctaattcaattaggaattcccttcctaatattctagggatcatcttgatgttgtgactcgtaatcttgaagtattgtcttgaattttaatcttgaaaagcccatttgcatcaattgcaacacatcatcatgatcatcatcaaaacatcaaagccaattgcatctacaatctccccctttgtgatgatgacaatacaatacctgaaatcaagattcaagcaagcaacaaacaattgtatatagataaaatgtgcatacgttttctccccctatatttcggaatacatgatcacttgatttctaagtttggtaagctttttcttaagcttttgctacaacctttntctccccctttggcaacatcaaaaagccaaagaactcggaaatcaacacagttataacaatggagtagcaag

SEQ ID NO: 59523 - DNA, 403 bp, Glycine max
  unsure (1)..(403): unsure at all n locations
ttagatactcagcttatagcgcggtctggagacaaggtcaagcgttcgcgatatgcgatgatgatattccgagtactctggatttggtacgaccatgccctcctgatttccagctgggaaattggcgagtggaggaacgccccggcatttacgcaacgagcataatgtaaacctttacggttttaaaagctctatagttgggcctacgctttagagattttccttttgttaaagctttgtgtctttttgttttgaatatataatacaaggagtcttctttatctgttcctggtctctacccattctcattcatttgcatgtttacttctttttctgatacggcagattcttctcnatcccccgacgtacttatacctgagacccgtctttgactttatcgaga

SEQ ID NO: 59524 - DNA, 449 bp, Glycine max
  unsure (1)..(449): unsure at all n locations
tgcagctcactgntagatgtcccttcacacgggtgtaacaagactaataaaagcctcacatgccttatatgttntgctatatattggggttcttgattattattgatcaaaccattaacaagaatcgtgtttgttactgagacataaggtagtggtaattgatattttgttgagagacagcaatgttaatccctcgtaccccaaatgatgtatgtttaatgggtgacgataagctatcaaacaatgatgaggagctgtatgttatcaaactcgttgtggcttaacttctctttcggaggccgagttaagagcttaaagaccaatatgcaactggattattcttctattcaagcaaactatccaagttctttcgcttgcttattntggcttaaaactacatcaaataaaccatttatcaagtgttccattgtgaganaacatgatagact

SEQ ID NO: 59525 - DNA, 244 bp, Glycine max
agtattctgaagtatcattccaagtttccttctgaggttggtgaaaagaatcctacttgctcgattctattactgaagtcaaactcattcacaacatcatgatattttacacttcttcacaactcccagccatttggagtatattgactcatacacattaaatgaacggttatattatggtgtggatatgtttgtcccaagctaaatgtgtcccatcttccaactttattcttattcttctcct

SEQ ID NO: 59526 - DNA, 296 bp, Glycine max
aaatgaatggtctgaacgagagaaaagaggcagcgatcaaatatgtgtaagattacacctcacagcatatatttatattaagggccataaatacgacactatgttggttgccttaacattatcgaataacatagaatctgtcctattcacattggtattataattacattatttctaatactccaccctgagctgaagcatataattatacgcaccaagcgtgctacatatataactgacttgagtacctctcaatgatttggtgaatacattcaccacatgatcatttgaaatgc

SEQ ID NO: 59527 - DNA, 435 bp, Glycine max
  unsure (1)..(435): unsure at all n locations
agctnntgacgcaacattggagaggttaatgaagcaacgagatgatgcgctccatgagaggttggatcaaatggagaatagagatcatatatgaaaaaaaaggaggagaagagggaatgatggtgttcctatacaaaaccgaattgatggtattaaagtcaacattcctccctttaaaggaaagaatgatccagaggcctactangagtgggagatgaaaatagagcatgttttctcatgctcttgtgtggtggaacaaactacaaaaggagagagcaagatataaagagccaatggttgacacatgggcagagatgaaaaggatcatgangaagcggtatgtgtcggctagttactcaagggacttgaaattcaagctccaaaaacctaacccaggcaacaaaggggttgaggagtatttcaaggaaatggatg

SEQ ID NO: 59528 - DNA, 333 bp, Glycine max
ctgtaccctaagggacccacacaacatctcgattagtctatctattattcgtctaacgctgtgatcatagcggagataatcacatatgtgactaactcaatcacagcggagagtatcatagaggtgatcaaatcactcatcatcttgtttatcaagagagagagagagagcattataatgaagaggtaagcatccatccattttacatcgataagaacatttggcgtctatcgtgggactaagcaaaatattctcctctgaccttatgagtttatggtagagatgaggagtttgatgattcaatcagtagcaatggaagaaagatcaatgatg

SEQ ID NO: 59529 - DNA, 372 bp, Glycine max
  unsure (1)..(372): unsure at all n locations
ngcttctgttataattacgagcgtctcgatatttatgggactgaatcgcacatccgagtcaaaagttaatttcgtttgaatttgcttaaagcttatgttttcaatttcgagcgtctcgatatactacgggacacaatcggacatccgagtcaaaagttatttgcgcttgaatttgctcagagcatctgttgttcattacgagcctttcgatatattgcgagactcaatcggagatccgtgtaaaaagctattgtcgtttgattttggtcagagcttcagttttcaattacgagcgtctcgatatactacgggaaccatccgaacttcgagaaaaaggtattggcgtatggaattgtctaatgcctctggttt

SEQ ID NO: 59530 - DNA, 302 bp, Glycine max
aaacttcttgcttttattgtctaccacacagtggtacccggagatatgtcgcgggggtcaagagacacttgggacttcacgtggtgtgctattgtccaaaaccaagcttgatcaatcccgacccaacccgggcatattctggcagcgagaacccgtgatgtacctaagcacgctagctcctggctgtttactgattaaatggactcataccactaagcaaagaggcttgtggaggctggcccactgtgaaactcgattgatatatgagatatggtctctggtattcatttccttggtgggta

SEQ ID NO: 59531 - DNA, 430 bp, Glycine max
gcttgatgtgttgaccattacaggatcgtttttatcttgctgggtatgggctcacttctctggttgagagcaaaagacccaagtactcaatctatgattgggaagatgaacacttggactttttaatgaaaattaaccctcctccagagcacgaaatgtctgctccagtgatgaagatgatccggcaaagttttattgtaaataagaatgtctgcaaaaaacacaatgatcaatttttggaggaaaggccaaatggttttattcattgctgcttggaggaggacgaaacattgcacagtgcatagggccttacgcgaaattcgtaatgcctgtgatgagtgcaaaatgttgttttactgatgctagtatcctacatcataatttggtgataaccttgaagcaagttgagcttcatgaaccattgagcccc

SEQ ID NO: 59532 - DNA, 418 bp, Glycine max
  unsure (1)..(418): unsure at all n locations
cagctcgaacccaattcctacagtgatgaatataattgcaattaanattcctggggagttatacatntgtgtattgataagaccgttcactatttcttgaagctcgatctctcccccggatgaaccatatagccaagagaaaccatgaaccagaatagaagagcttgccccacccatgagtaaatatatcgtagtagcctcattagaccgtacatctttcttggtatatccagatagtagataggaacataaactgaaacattctagagctacaaagatagttattaaatcgttagcgccgcataaaaacattcctcctagagtagctgttaatatgaataacaganactctgttatagccatntctgtacattcaatgtactctacggatagaggaatacatagagtngaacatagt

SEQ ID NO: 59533 - DNA, 168 bp, Glycine max
  unsure (1)..(168): unsure at all n locations
caaatcaactttctgagtgaagaccttaccatttgngagtctaaagcggacctcttcatgaggtccatagaagcatccacctccactagtgcgcgggcaaatgatatagagcctatagaggcagtcagctggtccgtacggatgggcagaacaactttggaaagaatc

SEQ ID NO: 59534 - DNA, 320 bp, Glycine max
gtaatatttattggtataattcgcctgttccattatgctcttgatgtctttagagggtacttgcttatagacatcatttgtcttgaatggaattgccatgacagtgttattgttattgtcttcgatatttggtaattgatatagtagtgcgggaagtaattccgattggattaactcaccattctttaactgcccaattgttatgacatttgttgttggatcacctatgatgtcttgtttcaagggtaatctatatcctttctgatggcatatgcatgaaaccaattcaagaacatgacattaattttgactcgttcgac

SEQ ID NO: 59535 - DNA, 391 bp, Glycine max
cctggcaagcgcaccgtatcgcgcaagtagtataaaatggtaagaaccgagtatcgaactctcggggaacttgtgttacttggtaaagctaaattcagtgaataagtgtctagtatgaaaagagatgtgttgactatgaacaggtatgtaaactaactattaaaaggaaaattacatgagtaaaggtgtgtaaagacaagtagacaacacgttggtcttcctattaggtgcctgatgttaaaaggatattctctacttaacaatgctcatgtgttctatggtgtctcctgaaatgctaaaccttgattcctcatgatagtctagcctaatcctgatcaagcatcgtcctcagattcctcttggtggactaaactcgaccagagccacatta

SEQ ID NO: 59536 - DNA, 293 bp, Glycine max
  unsure (1)..(293): unsure at all n locations
tctctttttctgaaacctgggtttcttcttcattggggtttttntttcaattttgcatatggatcatgtgatgagaaaaaatttgcaacaatatgaatggattcgttccatgaatcataagatttaggtctctgatgattaactctccattttttagaattaatattggagttctntttgtggtttctaaatatccattttttttccttagtgtttgattagagtgaaccaccaaaagagacgatgattgttacattggtccatgtttttgaatcaccgtgatcgacaaccct

SEQ ID NO: 59537 - DNA, 434 bp, Glycine max
cacgtgctcatgcaacaattgttagccgtggttatacgagacatcttgccaaacaaagtcttgttcacgataactcgcctgtgctttttcttccatgctatatgtagcaaagtcattgatccagtaatgtttgatgagttggaaaatgaggccgcaattatactgtgccagttggagatgtatcttccccctgctttctttgacatcatgattcacttgattgtgcatctggtcagagaaatcaaatgttgtggtcctgtttatctgtggtggatgtacccggttgagcgatacatgaagatcttaaaagggtatacaaagaatctatatcatccagaagcatctattgttgagaggtacattgcagaagaagaccattgaatttgttcagaatacttagagaaggctaaagctgttgggcttcctgagtctcg

SEQ ID NO: 59538 - DNA, 407 bp, Glycine max
  unsure (1)..(407): unsure at all n locations
ccctcttaatagatgatgtcatgccttgatgtttaactatgccccgtatgatataaaattccggtgactatagtgagagatataattttggtcatacgttgtgactaagtttgatcttcagacctctcctgagaaaaaatcgcaagcttgagtaaaaaaatttgcattctctgaggatcattatgggtttagagggccacaaaaagccaccaatgaaggaagaaatagatactttgattcgaagcataattttttattgtagattatcnttanaccttcgcacttttcctaccttttaaataatactattaaagtacatttttatatctatatttacgagatacgagctataatactatggctcaactattgcaagtatgtttaatccatttgtatatctatttatg

SEQ ID NO: 59539 - DNA, 380 bp, Glycine max
  unsure (1)..(380): unsure at all n locations
acttcttctggctacaaatcatcagtgggcctttcttctgtgtgcagcatcttgggatgttcccagccttaggangacagcatatcaggttctgctatccagtgatttgaggaatgcaccattcttgctttccactattccatagatgcttccaacaaaaaatgttggtctgttcactgatcctccttctttcttcatgttcatgagaaattatctccccacatctcactctgtgatttcaagtgtttgctctgataccaattgaaattctgataccaggggacagatgtcgtacatgatgtcacgacatcacgcttcagaacatgcagatngtttgtgtccgtatgatcagatttaaccagtataatacacaagagaat

SEQ ID NO: 59540 - DNA, 254 bp, Glycine max
tattctcaacagtcacatcttttatgtggttcttgaatggctatcaaaggcctatatatatgtgacttaagacacgaatttgctaagaagttttcaaaacaaaaaggtcttatcctcttaaaaagcaaatcgttttatcctcttacaaattcctttggccaattacttgtgattcaataaagaattatttgagtactcaaattgttcaatctatctctttcaagagagatttcttcttctcttcttcttcattc

SEQ ID NO: 59541 - DNA, 379 bp, Glycine max
ctgctcaaccgtttttgtgcaagaaatgatcatgttatctttctatactttgggagatatggccacaccatctatatacaattctttgatatctgtaaagttttgaaacattgctttattgcgcttctcaagtttcaacctgtgaggtgaggtatatgatgaatacaaatcaagagtgactcaccttctgaggtgtcgaatctcaggtggaatcttcccctataagccaacattatacaagttcatatacctcaaattctttatcttgtaaagctacgaatgcataactgaacataagttattgaattccaaattcatgctttctatatattgaaggctaaaaaagaccacttgactgaacgagttcttctgagataga

SEQ ID NO: 59542 - DNA, 428 bp, Glycine max
  unsure (1)..(428): unsure at all n locations
tgactagatgaagatgaatctgtggccacctcatggactcctctaaggacaataacatcatttcttgcactgaatngttgggagtcggaagccatcttctcaatcaaattcctagcctcaacaggggtcatatcaccaagagctccaccattggtaccatcaatcatactcctctccatgttgctaaatccctcatagaaatatttaagaaggagttgcccacaaatatgatggtaagggcagcttgcacataatttcttgaatctttcccagtactcatacaagctctctccactaagttgactgatgcctgaaatgtcttttcagatggcagtggtcctagatgcagggaagaatttctccaagaacaccctcttaacgtcatcccanctganaatggacctgtgagcaaggtagtagagccaatc

SEQ ID NO: 59543 - DNA, 301 bp, Glycine max
  unsure (1)..(301): unsure at all n locations
taaaaacggaagagagataaacccgagatgaacgaaatgaagacgatagcttataaacaagaaaggaatttaaagtctcggattcgaaaacttacctgtttgagaacgaagaacgaacgaagaacgaatgaagaacgacgaanaaccttcacggattcgctcacagaaacatctcggaaacgttacggaagcacctcggcttggattttcttcacggaaacaatttttttcaccccaaatagctgaaatgcatagctaggcggatctgggatccttaccctttcgcctatntatatgaaaa

SEQ ID NO: 59544 - DNA, 312 bp, Glycine max
  unsure (1)..(312): unsure at all n locations
gtttatttaatttaacacattacacattgccaattgttcaaccacatatagaaattcattcttgtcccttgataccaaacttttgaagtagttattataaatgtctataaacttacataanagttttgtgatcgaatgacaatggaaaaataggttaaattaattntctagttctctaatttgttttttagaattaatttgtttttggtgacgtcaccttcttttagtcctctaggtttctttttgtggttcaacttgattctatgattttttttaaatggaatcaatttggttcttgagtctatgttataa

SEQ ID NO: 59545 - DNA, 420 bp, Glycine max
  unsure (1)..(420): unsure at all n locations
ctctatagaagggtcgntcctaatttctctacaatggcatcacctctcaatgagctggtgaagaagaatgtgacatttacctggggtgaaaaacaagagcaagcctttgctttgctcaaagaaaagcttactaaggcacctattctagctcttcctgacttttctaaaacttttgagctagaatgtgatgcctttggagtgggagatggagctgtattgttacaaggtgggcaccctattgcttattttagtgaaaaaattcatagtgtcacccttaactaccccacctatgataaagatctttatgccttaataagagccctccaaactggggaacattaccttatttccaaggaatttatcattcatagtgatcatcaatcacttaagtacattagagggcaaagcaagttaaacaag

SEQ ID NO: 59546 - DNA, 249 bp, Glycine max
ttggtagatgagatgaaatcggaaagtatctgtaggatttttggagcgaaaataaagatgtttctatgttttgaaaggatttctggagcaaaaacacaaattaaaaagtggataaacattggtgagatgaaatccatacaaactatatatgtaattcgatcctaatcaatctcttagttcaatgcaaccaagattcaacttagatgatcaatcctaattccttaagtgagtaatccttgagttccaaat

SEQ ID NO: 59547 - DNA, 450 bp, Glycine max
ctcgaccggatcttaagtcactgggctgcagctgagaattgggacacgcttcttttaaggctatctcatctggttctcgcaacatcttttcaaacaagttgtctctggtttggaatttaactaagtacaatcaacaatcaacatcagagaaatctacatcagaatcaattaacatgtcattgccacaaccactatgttacctgcatagctttataataaagacattgtgcagctctcccttggccttgtctacctgataacatttaataaaagtcagccactagtatttgttgaatgcatgaaaattcaagtattctaaaccactaaaaaatcaatagcggagagtatataatgaaatattatgaatgttagtaaaaagaacatcaccaaccccaatttccctctatagaatagcttcctaccaaagaaaacctaatagatttgaactta

SEQ ID NO: 59548 - DNA, 338 bp, Glycine max
tcttacccaggcacattcttggtggtgaagcttcttcttccatggcttattccctagaggatggtgtctaccctctcctcttctactttgccttctgctgcatctccatggtggaaaatcaccattgaaggacctcattgaagcacaaagatccagcctccatagaagctccacaagcaagcttccatcaccttccaagctccatttccaaaagtggagtaatgcccctcatcatccaactgccctatagatattaaatttctctgtaacgcaggaatatgtctgacattatgcaatgtccatatggatgcactggaggtcttgatgtcaatatcact

SEQ ID NO: 59549 - DNA, 419 bp, Glycine max
  unsure (1)..(419): unsure at all n locations
agctngtaatctaccagtgacgtanactggtccacgtaaaaattacaaggcaaatcagtgatacgtatcttcccttccttttcccaatccctgtgaagtttggcttcaagccttttgaaaccaaccttccagcctagcacatgcaccaccaaggcattcttccacgatttactctattgtgtcatttcttcatctgataccccactctctgaacaagggtcagaggcggtctttgtctttgtcattaacaatcttggcgtttttcactgtctgtgatcatattctcctttgtgatttcggaattgtccaaactatgacctccacaccagtttaggctgccttcaccgaagggaaccaactacttctctttatagggtgaaagaatgtggtccacttccattcttgtctctctctaaaaa

SEQ ID NO: 59550 - DNA, 239 bp, Glycine max
  unsure (1)..(239): unsure at all n locations
cttatagcttgcctccggacttcactccccgtgccacccataataattaagccaagccccttctttcgaggggcagctcccaccttatgacgactataccgggcaanacnatgaggaagagaatacccatctcggnnccctgctccacctcaaagatccatcctcccatgaactaccccaaccaaacatagtccgccatatcccggcttcacccacacccgttaaagaatcagttccct

SEQ ID NO: 59551 - DNA, 366 bp, Glycine max
ggggttgaattaattatgaatgtgtcttgactaattaaaaattatccttcttaatggtactagatcaaattaggttttactactaagttattagaaagtaaagaacagaaacaataacttagacaaaagtaagagcagcaattaatagttcactacacatattaacgagtgtatggaagatgaagacaaatacaatatttatactggttcggccacaatgcgtgcctacatccagtccccaagcaaacaacagttcttgagatttctttcaaccttgtaaaatccttcacaaggaaaagatccacaagggatgtaccctccctttatctctttgaacaactaagtggatgtaccctacacttgaac

SEQ ID NO: 59552 - DNA, 307 bp, Glycine max
  unsure (1)..(307): unsure at all n locations
gatccactaagcgagcatctctgagacaccatttatcttctggcttgcttagcacagcgggccgctaagcgagagtgtcgaatactgcttaagtgagtgtaacggcaggtacactcacaatttccatatntcaccaacttcttctctgcattctctctctccaaaactttgcacattttgcatctgtgctttctttgtgcattatcaacttcccatcacaaagcattaacgatacaagttagttgcttacttccttttctctttttcttgtctgaactttaggatanaaaaccttgtatgtctgata

SEQ ID NO: 59553 - DNA, 262 bp, Glycine max
  unsure (1)..(262): unsure at all n locations
atctcacaattataataataggaaaatacctcatgtattataaataaagtcaaataataagtttttacataagtaacaatattatcctcaagatatgggcatctaaactaaatgaatactanaaatataatgaaagtgatcgcattcaacgtcttattttgaagtactaactaagctaaaattaatgtgactaagtaaactatatcttgaagtctcctcagactcaacaacttcttcttggtgttctgaaaacaacacttat

SEQ ID NO: 59554 - DNA, 423 bp, Glycine max
  unsure (1)..(423): unsure at all n locations
acactatgaatctcagcttcatttttgggtgtctcctttattttgttcctgagttctcgcacttgcaaaaacttaaatttttttattcttgagccttctacaattntgcggntggccattttggggtttataatnttggatccattggngtaaacttctttttttttggttttttaatttttcgcaacccaaaagcttaaattttttgggtgttctgcctttatatatttttctttaatactagctgagttatttcaatggaataatatnttatatttgttcaatccctttgagttagacacttncaagcttgagtttcanatatatgacatgctttattatcacatatattcatctctatttatatggtcagatgattgatatagtagtttggacttcttgttatgatctttttgggtacat

SEQ ID NO: 59555 - DNA, 378 bp, Glycine max
  unsure (1)..(378): unsure at all n locations
ttctcgtcccggatcttaagtcacgcngctgcatcttaacttggctattttgcccaatgtgaagagagctttcggtcggaaggcgtgctcgaatggactctaattcaggttggcggacttttttactttattttctggatgggtttgggaatggatgggattttgtagttctgctcagaagtattgtgagactcttgtgaagcttgttgaaattgccatgtttggatgagttaaacatacacattctgttttagggtttttatgatgatgcttgtgatgttcatgtactgaaattgcttatggaaaactgttagagatgaacggtataactaaccctnggatagaaagtgagaatgtggtgttatgagtggaaaaaga

SEQ ID NO: 59556 - DNA, 427 bp, Glycine max
  unsure (1)..(427): unsure at all n locations
gagaagattggctgttcagcattttgagttaagtcattcaatntactgctagcctcttcaacaactatcggatttggcttgggtttttctaacacagctagactcgaacagccagaattcttcatctgtttgatccagcatttcaaaaatctcaactttttagacttgttaccttccatgggataataaacctcaagcaaatttgtctcaaattgatcatacaccaacttacagaacaagttccacgtgaggtctcgaactgtattcaaatccaccatttttttcctttgatgaccctcaaccaccgcagtacttttcttaccttgagaatacaacaaatcctctttcttgttaaatgtgccatcagatccgcagatctcattgtccaccatcctgacatattgtcccacattatcttcaccaaaac

SEQ ID NO: 59557 - DNA, 296 bp, Glycine max
ctcttggcctcaatctagctggattacaagccttctgacctatagaagcttcagtgaagaactgagccaaatcttgaggagatattgcattgtgcttaaccttctcagagaaatttctccaatctataaaagcttgtaaactaatatagatctaagattgaaatgagatattgtagtgtcctaaattgaagccctctcacaaggagaaatctatctctatgcagtccaacactaaatccctgtgttttggaagtcaacaaatggttggcaatgttgtaccaatggtgtactagtct

SEQ ID NO: 59558 - DNA, 381 bp, Glycine max
  unsure (1)..(381): unsure at all n locations
gccggattgattttgctctgatactgatgccgaagcatatgttatctgtcggacagcgggtctgatgatatatgcttatcaacgacaacttctcgatcaaaaactctaactactgcgaaaaaaaagaacaatganctgccctttctgtcagtctatcagtccataaaaggctcatcctaaaagagggcacgtcacaaagaaagtcttaccaactctaccaagctagatgagcagtcacccagtagtctgtaaatattaaccagtgatcatcagacggttgtgagtcgtacacgtgtccgtgtcattctttctgatgatgacgatgatgatgacgaaggggagtgttcaagcagaaagaatcttcattgcccattataggac

SEQ ID NO: 59559 - DNA, 444 bp, Glycine max
  unsure (1)..(444): unsure at all n locations
gcattattctacttctatcaaattcccattgaagtttttttttgtgattaattgtgaactgagacattngaatgattgatccatctttccaactccgcctagtgaggagaaanaagttcttatttttgtgaataatattgaattgtgatgtggtaagtacatgtgatattatccaatccattgcacctggacctacatatttatcttgtttcacttgacaagaaatctctatcatgggaaaagctaggtttgcagaatggattgatttcaatccaatctattgaactttcaatacttttatttgttgaaggcatttttcgattattatagaaataatgacactgacattgagtaagtcattcatatttttaaacttgctatccaagttgacaagtggtaaatatgattatggtaagaaatctttgttattgcaatcttataata

SEQ ID NO: 59560 - DNA, 414 bp, Glycine max
  unsure (1)..(414): unsure at all n locations
tactaagctcatgtaataatatagaacctatatcctaatatcacatcctatcagagcngtgtttcctgtgtcctctagtatgaggttcttcatagtcatccacctattcatctgctcccccgaacacaaagttcaagatcatcacatgatccgaacacaaacagcaaaccgggagtgagttatcatatgcctaactactagagagaaacaagacaacatatagtatccaaatacaatttacttagcatatctcacattatttcatcacttttgtcattcaaattcacttttcaatcatcaatcacaatacacaagaatcacacactccgatcaagacataataacacatcaattgatataaacaattagcaagcgtatgcaacaattatgctaagattcaagtctatatgcaat

SEQ ID NO: 59561 - DNA, 402 bp, Glycine max
  unsure (1)..(402): unsure at all n locations
atttcaattacctcatacatatatacacacacatataccatccattctcaatcacccactttgatgacaatcacaagcccccatcaagatttcatcatcctcttcttccatgaaacaattcaatggctctaaaaaaccanaactgatttaaccttaatttcccaacctacacagttcactccctctctctctggctttctttctttctctatgttctctcaatggtgccgccaccagagaacatggcaacaccaaaagaccaagatgccacacaaggccgaaaaatcaccaccacaacaacaaggccagcgccggaacaaggcgtaaagtgcccgcgatgcgactcatccaacacatagttctgctactacaacaactacagcctcacccagcccaggcact

SEQ ID NO: 59562 - DNA, 174 bp, Glycine max
gacacacaaagccttgactcgagatttcttcatgatcaagccttgcctcacaatgaaatgcttcacgtcattcacggcgcatgttatcgattaccaatacatgttatcgattaccgatggtctgaaagcgtgtgatcgatttcacatcatatgtaatcgatgaccctatactct

SEQ ID NO: 59563 - DNA, 311 bp, Glycine max
tgatacatgttatggtttggtttggttcaaggataaaagggatgccccacattatttccatgacacaaatgcgaagatgatgatttggaaacattatgccttaatggtcatgcatgcacctatgtggacacatcagtgttaaatatttatggtcatgtgatgctagggctcaagattcatttcctctttttagtcaacccaacgtttacaaatatgttcttttctcaatatgtgcattcatccgagtccattttgggcgtctgggaaaatcttacagcattccccttcaagtgatacacattttttaaaac

SEQ ID NO: 59564 - DNA, 455 bp, Glycine max
  unsure (1)..(455): unsure at all n locations
ctcgtcccggatcttaagtcacgcggctgcagcttatggagaataaaggtgattcanaggtggtttgatgataaccatgatgatnaccaaagatgatgacaaaggtgatgagcaatagctcatagatcaatccaagaacaactcaagtgaatcaagaacaattcaagagttccagataagaatcaagatgaattccagactcaagaagagagtttagagtncagaatcaagaatcanggttcatgatctcaagaatcaagatcaagattcaagactcaagattcaagaatcaagagaaggcttaatcaagataaatatganaaggtttttctcaaaaattgaatagcacatggtttttctcaaaacatgtntaccanagagnttttactctctggttatcgattaccagaatggtgtaatcgattaccagtagccaaattggtttttgaaaagtt

SEQ ID NO: 59565 - DNA, 330 bp, Glycine max
  unsure (1)..(330): unsure at all n locations
taaaactcagctctacctcatcgtccctcacagtctttagatatgggagccaatcctatccttggttcggactctcagccacttatgataaccgccgatgatcccattactgcttcccctaagctctatgtgctttcttcacgccgcatcccatgccttgcaaactccttggagtaccctcgcgttgtggtcactaaaaccccgtgcgatgaaaggcgtgatgctntcgtctaatggcgctcctctcttggagtagccaagctgtcttatggcgagaacgggattattattaatacaaccccttggtcccatcaagggaacatttggaca

SEQ ID NO: 59566 - DNA, 357 bp, Glycine max
  unsure (1)..(357): unsure at all n locations
atcaatggggcaaaacacacccaatgattattatgatggatggctcaaattctcacaaagggaaaatcatcactttcaaattgagctttcaaaactatcatgacatgtagagaagaatcaaggatttcaagtcacaaaatgtcaagaactatttattttcaaaacaattacccatttcttgaacatatcctataaatcaaagaaaaacatgcaaagtcgtacgtgcacacaannattgacctaaatattcactgaaattcgacgaaactaacaacattaacaaattaacacaagctacaaattacataacaacaaacttgcaaaccaagacactccnnccccccccccatacttaaa

SEQ ID NO: 59567 - DNA, 316 bp, Glycine max
acatgacgtgcgagatcagtgtctggaagggggagggatcggcgccaagaatggcggcgacctgcgattgctgcacctcatgatccatggcggcggcggcggcgacgacagaaaataagaatagcgacgactataacacacaccggggggttagggttcttggtctttgatcatgacgacatcaaaaaaccacttacgccctcactgtcttaatttggaatcgacatctacatggccagcgctctaactaggccgtaagtgcccgcgatgctactcatccaacactaagttctgctactacaacaactacagtctt

SEQ ID NO: 59568 - DNA, 306 bp, Glycine max
  unsure (1)..(306): unsure at all n locations
agagttggagtttgacttaattggttgttcagatggttttgtatgctttagctntgaatgataatggctgatcttacctatcttgtgcagaatactcaagtttatgggttttatgatgagtgcctgcggaagtaagtacctgctcatgtcatggctgaggataagcaattataaattgcgcaatgataccaaattaattntgactgaaagctgatctggaattcatattattttgcttttcttttccattctttaatccttatatatattttgcttctttttataactttcattcttgaagatgtg

SEQ ID NO: 59569 - DNA, 429 bp, Glycine max
  unsure (1)..(429): unsure at all n locations
agctgtgagcatatataaacgacaataactttctagtcggatgtcttattgagtcctgttatatatagagacgctcatgattgaatgacgaagctatgagcaaattccaacgactattactttntactcggacgtctgattgagtcccgtaatatatcgagacactcgttattgaatattgaagctctgagcccattcccacgacaagaacttcttactctgatgtctaattgagtccggtgatatatcgagacgctctggagtgaactttgaagctctgagcaaattcagaccacaataacgttttactcggatgtctgattgagtcctgcaatgtatggagacgctcgatagtgaatgttgaagctctgagcatattctaacgacaataacttcttactcggatgtgcaattgagtactataatata

SEQ ID NO: 59570 - DNA, 435 bp, Glycine max
  unsure (1)..(435): unsure at all n locations
tactcagcttaacattcaacttcgagcgtctcgntatattatacgactcaattatacatccgagttaaaagttattgtcgtttgaatttgctcagagcttcaacattcaatttcgagcgtctcgatatatgacgggactcaatcggacatccgagtaaaacgatattatcgtctgtaatggctcagagcttctacattcaatattgagcgtctcgatatgttacgggactcaatcatgcatccgagttaaaagatactgtcggttgaattggctgagagcttcaacattcaatttcnagcgtctcgatatgttacgggactcaatcagacatccgagtataaagtattgctttcgattggctcagagcttaacattaatttcagcgtctcgattatgacggactaataggcttcgggcaaagtattgcgttgatt

SEQ ID NO: 59571 - DNA, 296 bp, Glycine max
gaagtccaacgcagcacgcgtttcgttaagatgggaagttaagcaatgaacgagatgaacgtggagtgtagtttccactgtactttactctagcagtgggtgtggtgttatcaaaggcaacaccaacaccacttgaatatgctcttgcagcaagatagtaatgattatgttcttggttggcatgcaataacacatccattgtgtgtcccggtgatatgcaaatgtattaccttgccaatggcttggttaacataccatcagcaccaacaacagtgaggttgtgttttgaaacatag

SEQ ID NO: 59572 - DNA, 283 bp, Glycine max
  unsure (1)..(283): unsure at all n locations
gattataataaaaaaaaacagttttctgctttttttacaagcaaattctatctggctctcaaaaaacacttttttaaacaacactcttctccgaatcacttttttgaagttaaacatactggtccatatacaatctcagatatgagaagttcaatcccattatacaccaagagagacagnggattagtgaatcctttaaacaagttacatgcaacacctgttctcagaataaaacacacactaattanactaaataccattcaactaccgacgaattgataca

SEQ ID NO: 59573 - DNA, 332 bp, Glycine max
cggcactaaacatttgtatgtgggctaattgcgggtgacgatttatattcaaccgtgattttgttcaatcaaaattcttacttaatatgtaccttctccagtgatttcagatcactttagtcttaaaaaactactttaaaatttatggtttttattttttttcaaaaagaagttgagaccgaacacgcgtgggaacaaaggaattaacatattattcttcgtcaattaataaacatgttctctcctaacatattgttgtcttatttaatagtaatatttaagaagacaaactcacccaaacacatgggaataaagctcattaaaattaacat

SEQ ID NO: 59574 - DNA, 429 bp, Glycine max
  unsure (1)..(429): unsure at all n locations
acttagatactcagcttctgttggtaacatantatatcgatatagaatatattattattctaacgaacatcgaatattatggatcccaatttgaagttggtgaagcattctcctatttcaccgagtcatatccgagcaactnggcttatcagcccagaatatattattatccagtaacatgacaactgattatacgtacaataacagtgtcaaaacaagttaattaaggcgaatgctgtacgaataaccaaaggcaaaaacaacattatataataatgggggttgattagtttatactctatacattgtgggcggtagaatttaatccagagtcacaaacctcacatattccttcacgaagatcgggtgttcatgtaaacagctggatttatataatattattttcccattttcggcctttcctatata

SEQ ID NO: 59575 - DNA, 181 bp, Glycine max
  unsure (1)..(181): unsure at all n locations
aacataaatagttaactgattaaaattatcactctctctcttttgtgtatcactcttttcctcgggggaacactcttctttttatattcctttgtgagcctcactattttctttctctcggtctctcttttctctcattctgacttggncatcacatgcttctctatgggatagaggttta

SEQ ID NO: 59576 - DNA, 443 bp, Glycine max
cgacaataccttttgtttctgatgtcggattgagtcacgtaatatctcgagacgctcgaaattgaataccgaagctctgagcaaattcaaacgacaataactttttactcggatgtcggattgagtcacgtaatatgtcaagacgctcgaaatagaataccgaagctctgagcacattcaaacgacaatacctattgactcggatgtccgattgagtcacgtaatatctcgagacgctcgaaattgaataccgaagctctgagcgaattcaaacgacaatgactttctactcggatgtgcgattgagtcccataatatgacgagacgctcggaattgaataccgaagctgtgagcaaattcaatcgacaataactctctactcggatgtcggatagaggcacgtaatatgtcaagacgctcgaaatagaataccgaagctctg

SEQ ID NO: 59577 - DNA, 336 bp, Glycine max
caatagacctactcggctttatgttaaatcaaacacagaagagcagatgaagctttcagcaacaaaaccaccctggtggaggagacctaactcaaagaccaacctaccccaacaaaagagcctgtccttgcttcaaaaggtgctggccaagcagaccatacatttcttcaacaattcaacaacagttacaacctccgaaacaaccaacaattgagggccctccacaacctttcctcgaagaacttgggagggaaatgactaatgataacatgccgttttcgcaagagaccagaagcctccattctagaagcttaaccaaatcagatgaggacaatt

SEQ ID NO: 59578 - DNA, 443 bp, Glycine max
cattgactccagatggctgcaaagaaggtcttatatctgtatggcgatctgcataagaacatagaccactgactctggcaacagatgcagaattatgattcatggcaagctgagttactaggttgaccaaggcatcaagttttccctcaagctttttattttcagcagatgaagattaatccgtggccacctcatggactcctctaaggacaataacataatttcttgcactgaattgttgggagttagaagccatcttctcaatcaaattcctagcctcagcaggggtcatatcaccaagagctccaccactggtagcattaatcatactcctttccatggttgctaagccctcatagaaatattgaagaaagaagtgctcataaatctggcggtgaggaaagcttgcacacaatttcttgaatctttcccagtactcatac

SEQ ID NO: 59579 - DNA, 313 bp, Glycine max
cttgagaagctcctatgagaaaacctgcttgaggagatagagctgatcttcacgcacacctactgtatgttagctcaccttcttgagaagacgggttaaaaagaatcctaaagacgctcgggcgaagctacacatacctctctgatagtctaactcacgttcttgagatgagaagctagagcttaaccactcaccctctattataacgaaactcacccccatggcgggagacgtgcacataaacaaagaagttcttattacaaagacgatctaccaggcgcctacttacagcgctgaaaccttgtactacgag

SEQ ID NO: 59580 - DNA, 432 bp, Glycine max
  unsure (1)..(432): unsure at all n locations
gctntgaatgctctattcaatgggagtgacaagtatatcttcatattgatcatcttatgcacagnggccaaggatgcatgggagatcctgaaaaccactcatgaaagaacctncaaagtgaagatgtccagattgcaactatnggctacaaaattcgaaaatctgaagatgaaggaggaagagtgtattcatgacttccacatgaacattcttgaaattgccaatgcttgcactgccttgggagagaggatgacagatgaaaagctggtgagaaagatcctcagatccttgcctaagagattngacatgaaagtcactgcaatagaggaggcccaagacattngcaacatgagagtagatgaactcattggttcccttcanaccttngagctaggactctcggataggactgaaaagaagagcaagaacttg

SEQ ID NO: 59581 - DNA, 441 bp, Glycine max
  unsure (1)..(441): unsure at all n locations
tcttatccaggcacattctttgtggtgaagctccttcttccatggcttattccctagnggatggtgcctcccctcttctcttctcctttgccttgcgttgcatctccatggtggaaaatcaccattaaaaaaccttattgaagctcaaagattcagtctccatagaagctccacaagcaagcttccatcgatccctaaaaaacataacatgatatgatgcatgaggcgtacatgacatctatgacattttaacaatcatgacgatccctgccccacatgaactcgagccacgtatatatgttttcaaagtattattaggacattacttgattcacccatgtacaaataaatatcttacttgtatcaagaatatttataacaatattcacatatcaaaacataaacatatgcatctaatcatactatcacatttctaaattc

SEQ ID NO: 59582 - DNA, 438 bp, Glycine max
  unsure (1)..(438): unsure at all n locations
tgatgaaatcttgggaggagagcatttatttgtttactttctttctctatgtataagtttgattcagacaaaagggtttctccaatagtccaattttatgatttgttaggctctgattattagtattttgcatataacttgagccatgaaattatgatcagatttgtgtacctataagcaaatgacattattttctgtggaactagatttgaagctattatagattggtacaaattttctagttctgtaatccttatgatccttttgtacctagctttatttggctaatgacctttcatgtacttacacttcattgaatcacaattgaaatattatcttgaatttgtttaaatagatcttctgatcctatgacttgtgtaatatatagggcacaagntcattgatggttaagttaacttatggattgtatttacaaaa

SEQ ID NO: 59583 - DNA, 445 bp, Glycine max
acctgcacgcatgcaagcttcctcattgctgccttaagctcttcaaaggcatgagtaacttcttccctcctatggaatgcatccttcttgagcagtgcattcaagggctgtgaaatttttccataatccttcacaaatctcctgtaataccttgttaaccccaaaaatcatcttaatcctttaggattcttaggtctaggccactcagccattgctgccaatttactagggtcagcttcctcaccttttcctgaaatgatatgccccaaatattccaaagaattctgaccaaaattgcattttttcttgttcacctttaattcatgttgctgcagaacttgtaagattgccttcaaatgcttgtggtggtcctcaaggctactactatatacaagtatatcaacaaaaaatactaatgcaaattgccttaacaagggtcaaaaca

SEQ ID NO: 59584 - DNA, 455 bp, Glycine max
  unsure (1)..(455): unsure at all n locations
ggcttgcggagcttctatggaggctggatctttgagcttcaatgaggtcctttaatggtgattttccaccatggagatgcagtggaagacaaaggagaagaggagagaggaggcgccatccactatggaataagccatggaagaaggagcttcaccaccaagatgagccttggataagaagcttggagaggatgcttcaatggaggaaaagaaagagggagagaaagagagaggggggagcatgaaattgaaggaagaaaaagggagagaagttgaactttgagttgtgtctcacaagactctcattcatcaaagttacaacaagtgttacacatgcttctatttatagactangtagcttccttgagaagctttcttgagaaaacttccttgagaagcttctttgagaaaacttccttgagaagctagagcttagctacacacacccctctcat

SEQ ID NO: 59585 - DNA, 451 bp, Glycine max
catgcaagcttctacttatgtggcagggcgggcttccttcactatcttgtctccaacgagagctatgaccaccgctcttccttcccgtgatgcttctcttcatatctgcctgaaaggcttatagcctaaaccatacttcccacgatttcctttggcatttatcaggctagttatgccgtcgttgtctttgcctaaacccattccgggttcgtaaccgttccccaacataactcgggccatcattactgttgcatcggacaggcaagcttgcccagagaaggaatctacggaggaaatgcttaccacctcaaaagactggaaagcggtttctaatgactcctctgcggcctccacataaggcatagaggatgggcagctcaccaagatgtcttcctcgcctgacacgatgaccaaatgcccctccactacgaatttcaacttttggtggagt

SEQ ID NO: 59586 - DNA, 463 bp, Glycine max
cactatagatactcagctatgctgcaatatttacatagacctcctcaacctctacagcaaaatcaaccacagcagagcaattatgacctttccagcaacagatacaaccctggatggaggaatcaccctaacctcagatggtccagccctcagcaacaacaacagcagcctgctccttccttccaaaatgctgctggcccaagcagaccatacattcctccaccaatccaacaacagcaacaaccccagaaacaaccaacagttgaggcccctccacaaccttccctcgaagaacttgtgaggcaaatgactatgcagaacatgcagtttcagcaagagaccagagcctccattcagagcttaaccaatcagatgggacaattagctacccaattgaatcaacaacagtcccataattctgacaagctgccttctcaagctgtccaaaatcccaaaaatgtca

SEQ ID NO: 59587 - DNA, 464 bp, Glycine max
  unsure (1)..(464): unsure at all n locations
catgcaagcttgtgactcttggcaatntctttaaaactattctcttaaaatagntgngactcttgaaagaatctttagaaataagtcacttgaagaaatgtgactttnggaaatgtatttttcgaaatcagtcattggtaatcgattaccattaaggtgtaatcgattacacatcaacagatgtgactcttcattntaaatttagaaaatcaaaacatttagaggctctcgtaatcgattacaagtattgtgtaatcgattacacaagattaaaatgatttaaaactgtttaaaaacaagttgtaactcttgaaatttgaaatcttaacgttntaaaacactggtaatcgattaccagagagtaaaactcgttggtaatgattntgtaaaaacttcttgtgctactcaatgttttggaaaatttttttagtacttatcttgattgagtcttctcttgtttcttg

SEQ ID NO: 59588 - DNA, 76 bp, Glycine max
  unsure (1)..(76): unsure at all n locations
ttctttacggaattgcgaaccttcgcatngcttctggaataaatacgggggcgcttttgatgataagataaacctt

SEQ ID NO: 59589 - DNA, 442 bp, Glycine max
agcttgttgagatggttgttgaggtggtactattctactggacaatttctcagtagtatttctctgcaaagtcacatctcttctccctaaattgattaatttttttgtccctgccattatcaaaatggttgttgctctctgtttcttttgttttgtcactattgcttctttctccaccacctggatcatggttcttgatctgtatatttgttaagtggaagtggcctaatctggaatgccaagtggcaaaagaaagatcactattagaaagagtattcgcatgagacacactaggactaattctatttacactagttgaaacagaatctagagaagaagcacttggcacaggttcatagcctaccatccctttaagaagcacctctttagagacctgagatttgaccaaacaaaattcagacagttgtgtctcatagtaatt

SEQ ID NO: 59590 - DNA, 434 bp, Glycine max
  unsure (1)..(434): unsure at all n locations
tcatgtcttcattggaacttacctgtgttgctatattgaatacctaggtctgtttcgggaactcgtggttaacccaaggaccttttttggtttatgctgcaaggattgaggaactcgtgacctgaggtaccaggtaagcttcatgtctttgtgtcattgtcactgatctcactgccaatcttgttgccattgtcactgctgggttcaaggtaagctttgtgcctccgcgtacgtgctaaatttgagaagcaatgctacctttttctaactcatgagggatacatagacaataatatatttagaaatgttgcagnagttttgtttgtttcactcgcttcaatttaattcaaataaatttctttagtaccaaattactacactttatttccatatgcttcaagcaaacatatacaccaacttcttttatcaattta

SEQ ID NO: 59591 - DNA, 396 bp, Glycine max
ggctgcagcttgagaccttctcttcttatcctttaattcataacccgggggtggtccacatacacgtgctctgtcaattctccgtgaagaaatgcgcttttgacatctagttgatacacattccatcccttttgtgctgctagagctaaaaccatccggattgtgtcccaccttgctaccggcgcaaacactttggtgtaatcaatccctttgtgctgagcatagcctttatctactagtcgggctttgagcttatcaacttcaccattctcatttaacttgggtctaaaaacccatttcactccaatcttcttagcacctttgggcaaaagtgtaagctgccacagttaattccttttgattgctcaatcttcaaatacattggccttcttcatt

SEQ ID NO: 59592 - DNA, 395 bp, Glycine max
gtgaattcaaagattacagctgttgcgccgttaattagttttagaattttaattcaaaggagatttaagaatgttgtagatgttggaaatttcctccactgcctagctgaactgcctacaatatttcttaagccaataggagtagttacttacccattaagagcctcttattatatattttgtttttgctataaaaggttaccatggtcacatttttctgaatgagattagagtgaataaaaatagagagattaaatgtgagaaactcttcctcctgtatgtgagtgtgtgagacaattcttctctcaattttattcttacggtgcgcgtgtgtttatgggtttaatttatctcacggttgataattggtatcagagtatgagaattatgatagt

SEQ ID NO: 59593 - DNA, 445 bp, Glycine max
  unsure (1)..(445): unsure at all n locations
agcttctgtctctgaganactgtttcccagaagacaacagggagtgaagaatgctgaataccctagccttgcaacaagtcctagggaagtagacacggagatggacaagaaaatccgcagtattgtgagtagcattttgaaagacgcctctgttcctgaagctgatgaagatgtcccaacatcttccaccccgaatgtttctgtgcctgatgttgagaaagatgttccaacatcttccggccctaacgctgaagtactctcttcccccagcaaagagagatcaacagaggaagatgatcaagccgcagaggagactcctacaccacgggcaccagaacctgctccaggtgacctcattgacctggaagaagtagaatctgatgaagaacccattgccaacaggttggcacctggcattgcggaaagacttcacaacagaaaggga

SEQ ID NO: 59594 - DNA, 303 bp, Glycine max
aaacgaaacggtttaagacttctccttcgctttcacattaagcataaaagaatggcagctcacccaaatgtatttcttccctgataccatgaccaaaagccctttcactaccaaattcaacttttgggggagtggtgaagggacacctctactgagtggattcaccggcgcccccacataacagttgtagggggggttatatccattatttggaaggtaaccttgacaagtgtgaaggcctatctgtactgggagatcgatctttccccaaaccttccggcggtgccgccaaaggcccaactg

SEQ ID NO: 59595 - DNA, 433 bp, Glycine max
  unsure (1)..(433): unsure at all n locations
agctngntatatttacaactntngatgcttttgttagaaacatcaaacatgcgttagtaaaaacaaattgaacacttatataaaaaaatgcattggattcttagtataaaacttttttatatcaagtccattttatatacacgtttgttcttttacaacgtgtagtgatgtggaaaaaatggaagtgcccattaataatatcgttcttttttttacaggaccgtacatttggctaagtgaaatcacaattttagatataattaaaatggataaaataagatttgcaattgaaaattgattntagtaaaaatgaanattaagaattaattatagaagcaagaagacaatttataacgaataanattcnaatggtcaaaacttgaggaatcagatttacactatgacatttataacgataagcataattaatttg

SEQ ID NO: 59596 - DNA, 436 bp, Glycine max
tatgctgcaaacatctacaatagacctcctcaacctcagctgcaaaatcagccacagcagaacaattatgacctctccagcaacaagtacaatcccgggtggaggaatcatcccaaccttagatggtcgaatccttcacaacagcagcaacaacaacagcaaccttattttcagaatgctgccggcctatgcaaaccatacgttcctccaccaaaccagcagcaacaacaacaacaaccccagaaacaacaaacagttgaggctcctccgcaaccttcccttgaagaacttgtgaggcaaatgactatgcaaaacatgcaatttcaacaagagaccaaagcctccatttagagcttaactaatcagatgggacaattggctacacagttaaatcaacaacagtcccaaaattctgacagaataccttctcaatcta

SEQ ID NO: 59597 - DNA, 124 bp, Glycine max
  unsure (1)..(124): unsure at all n locations
gaccccgcgacatatctccaggtaccactctgtggtgaacaataaaagcaggaagtttcacccttcaacacttnctcatctcaagcttgtaggattatggggtacccatcacatgtggtactag

SEQ ID NO: 59598 - DNA, 424 bp, Glycine max
aaactaagcttaagctaggccaaactctcgtgcatgcagaggcttattttatattatgccaaactccctaataaatgtgatgacaagcttaaataggtggcgtggtctgtgctcatgcgcttaacgaaaatctggatcgcttagcgcacataagtggattgtggcctaccgcgctactctcgctcattggatgaactgatgcgggacacctctctactagaggatccacgggcgccccaccgtcaactgctgggggggaaataacaataccctgaaagaacaagacaggtgtcatggacaattgcttaggagatccattctaccttaactcatggggggtgcctctttagacgaaccgttacctagtggcatagaattttagcaaggtcgttccactattaatgttaacttccccttgccaaaa

SEQ ID NO: 59599 - DNA, 301 bp, Glycine max
  unsure (1)..(301): unsure at all n locations
caccatcattccctcttctcctnctttcttcttcattatgatctctattctccatttgatccaacctctcatggagcgcatcatctcgttggttcattaacctctccaaatgttgcatcaaagcttgcatttggaattgcgaaagccccactccatcattaggattagtacctgacatctcanacaaacaaatcaaacgtaacaagacaattatagttgctggttgaatacctcacccactcaagtgtatcacacaattatggcttttctctaatgaaacactcttgccttttaccactct

SEQ ID NO: 59600 - DNA, 433 bp, Glycine max
tgcgaaagccccactccatcattaggatttgtttcttacatctcaaacaaaccaatcagacgtaacaagacaattataggtgctgtttgaatacctcacccactcaaatgtatcacacaattatggcttttctctaatgaaacactcttgccttttaccactctaattccccttgagttcttaagcaattcaagaaaatatggccacaacaaagaaacaattaccaatatgtgtaaggtaaggctagacaaggaaaaagttaaccaagaaaaaggctaacaatggttttaggcacaaatgaaggaaataaaattcagaatttaggaattcaagtaacaatccttcatgcaaccaatatattaccttaaagagttttttttttaagttcttcagcatgaacattcacccaatttttttttttaatttgctatac

SEQ ID NO: 59601 - DNA, 441 bp, Glycine max
ttaagcaccgcggctgcagctttacctttatttaaccctagacctttctcgttcattcaacaatgtcatagataaagcaatggtgatgttcaaaggacactttaaatccctttttaatcaactgacctgcacttagcaagttttggtcaatgttaagtacataaagaacatctgatattaaattgatacctgaacacgttgaaattacaacagttccttttccttttatgggaatatagccaccattcccaattctgacctttgagacattagttggcttcaaatccttgaatagagtcttatcatttgttatgtggttcgtacaaccactatcaatcaaccaactttcacttgattcactactcaagaagcatgtggccacaaacagttggtcctcctcgtcttgattagcaatctgagctccctcatcatggtgatttt

SEQ ID NO: 59602 - DNA, 400 bp, Glycine max
tgtgaggcagtccaaatgccttcaagacaaaatgacagcatttgtttgtgcaacctggcttgccatcatcaaccaagaggaagccttggctagagagctttaccctgattattgccctccattttcctctgctgtagctaatggatccatggtgatcaacgattgcagtgagtatgatgttgatggggctgaagataaaccgaatctttatgtttaggaccggaagcccgaccatcttcatccatcaaaccttgggatggagagaatgatgggaaggatgccaattcaacaaccttctcatcccatgaagggagatgttgcacaaacctagattatatccggaagaggaagatttctagtgacttcaacatgatgattgatcataatatctacacatgcg

SEQ ID NO: 59603 - DNA, 473 bp, Glycine max
  unsure (1)..(473): unsure at all n locations
ttacaggcacctgcggcatgcaagctnntgtcagcgaaatcactaaaaccgnttattgtccaactttcttanacgatcctctttgcttttatcggntaacatggaccgttcaaaagcataaaatcaacatgtaactttactacttttgcaagaactacgtaggtctgatttcctcatcacaattgaggatacgtaggagcaaaagccccacttttgtcgactagcctaagagatcgttaatggtccaatgccttaacgtttctcttctttcaaatccaagaaatcgttaatggtccaacgccttaacgtttctctcctttccaaaatcaaaagatcgtttaatggtccaacgccttaaatgaccttttgtgtcggtaatatatatcttgcgaaaatagataaaacaacttaaccaacgtttagttttgaaagaactatgtatgtctgattttctcatcgcaattgacgataca

SEQ ID NO: 59604 - DNA, 388 bp, Glycine max
ttctagggtaaaattgggtgttgaggagtcaaattttgattcggtagaattttaggtgtaaatccagtttgagcaagtttaaattgatgttatagacttgtgtgaggtgagagtttgctccaaatttaccccattctcaatttcacttctcaaaccttgaaaatccattaaattgaggggttttggatacctagattttgtgttgctttggtctgaagcttgtccttggtttagacatgattgatacatgatttgggacttgtaggattcgatttgggcaaaaatggatgaaggcaagagtagttttcgaaatctgtactttattgcagaatttgctggtgagatgtgcagcagaattttgtataagtgcagaaaaatgctcgtgtat

SEQ ID NO: 59605 - DNA, 362 bp, Glycine max
atgcaagcttaatctacgtgtaaaatgtaataataaggtatataaaatgttattcataacatacacctctaccctaggaggggtgatagtcacgttgggtgggaacttttcttgatgcgtttacctcaaaggaggcagcaagaacgcaaaggttggacaaaaaatttggcatgtgggcgtaaatcgagacggagttaggggcaaaatggggagaacgagaagggcaaagtatctggggagcatcacagaatacaaagtggtaatttagatggaaaaagagggacatgaattgaggatactctaatcaaagagaaagatgatggtcgtgaaagaattacgccatcagtactcacttctttttg

SEQ ID NO: 59606 - DNA, 403 bp, Glycine max
  unsure (1)..(403): unsure at all n locations
gttctctgtttctaattattaaggatgttttttctttctgacgatatttgtctttgtattcagatcaagatctatttgtttcgttcccccacatagttgaaatattggtgaaaaccgtggcaaataacaataacagttgaactttgtattctgaggaacttggtatctgtacatgcatccacagntgaatttttttgtttttcattcttaccccagaacttgataccatcatacagtttgattttttttatgtatagttctcacccttaaagngtcttgtttgattactatcgtcttccgtgtgtacttatagcatannataaaataaaaaagaatgtaacatgaattggatttatgtaaattttgcttgccattgcatcgacatgcctaaaatgaaattcca

SEQ ID NO: 59607 - DNA, 444 bp, Glycine max
  unsure (1)..(444): unsure at all n locations
agcttccncaacatccaagtaattcttcattctttttgtacanactatcacaaccaagaaaacagggcataggtagaaaactctgcccaaaacaccaaccaaaatcacagcttttctcacttaaagaccccagtaacaattccttcgctccaattcgttaaccgttggatcgactccaaaattttactggaagtctctagtacataagcctacattntgaccgttgggatctactagcaaacttccagaactcattctacattactctttcctcaaccagcaaatacatagcattttcctgcacttgtgcaaaattctgctgcacaatttcacagcaaaattctgcacaaagtgcagatttcgaaaatcacactttccctcatccaatcttgcccaaatcaagtcctacaagtcccaaatcatgtatcaatcatgtctaaacca

SEQ ID NO: 59608 - DNA, 451 bp, Glycine max
  unsure (1)..(451): unsure at all n locations
gaggatgcttcaatggagganaagaaagaaggtgttttttagagaggggggagcacgaaattgaaggaagaaaaagagagcgaagntgaactttgagttatgtctcacaagactctctttcatcaaagttacaacaagggttccacatgcttctatttatagactaggtagcttccttgagaagctttcttgagaaaacttccttgagaagcttctttgagaaaacttccttcagaagctagagcttagctacacatacccctctcataactaagctcacctccttgagaagcttccttaagaagattcctaaagaagctagagcttagctacacacacctctctaatagctaagttcacctccttgagatgagaagctagagcttagctacataccccctataatagctaaactcacccctatgcccaaanacatgaagataaaaaaaag

SEQ ID NO: 59609 - DNA, 449 bp, Glycine max
  unsure (1)..(449): unsure at all n locations
agcttggaacatatagncngaattttgggtcctcttaangacttattcaaaaaatctgctggctgatcattagaaccaatgaactcaatgacaatctccttggacagaagcttctctcgaatgaaatgacaatcaatctctatttgcttagtcctttcatgaaaaactgggtttgaggcaatatgaagagcagcctaattatcacaatacaacttcattggcaactcttcacaaaacctcaattcctgcagaaactgtttaagccacatgagctcacaaataaccatagctatagatcgatattcagcttctgcactggaccgagcgacaactgtctgtttcttgcttttccaagaaataagatttcctccaataaagacacaatagcttgatgtagaccttctatccatgggacagccgcgccaatcaacatcacaatattccgatag

SEQ ID NO: 59610 - DNA, 391 bp, Glycine max
  unsure (1)..(391): unsure at all n locations
tctanatatccgaaacatgatattattgtgggccttatgtatattgtgtctagttatgcatatttgtcaagtgtgtggtaaattattttttttaaccattatattggtataaaattgtttctactaaaaaatggtgacaatttttcattggaaaccttaaatgcatataagatgagtatttttcttttaatatgatttattctatacataagtgcgatcatcatttagatgcctaaaaatatgtatttctttgattgcacttaacaaattcagatactagtgggtgttatttacgatgatcacttgattttttgctaaacacataagttgttgatgagtgttccataatagtagggatcgaaaacaaattttcaactttttgaggaatgaa

SEQ ID NO: 59611 - DNA, 450 bp, Glycine max
agcttaagtcttcatgttgctcatgttgctccttctatctctaacataatggtgagcatgatgacaaatgaaagagaaaaaagctaagtcataagtacatggtggtttgaagtttaattcaagttgttaatttcattattgggttatggatagtccatggaaattctccttcattttttccttatttacacaccactacgtcatttttgttataaagtgtcaagcatttcataaatattcaattctatgttacttttatgaattatttaattaattcctaatttattaatattcaaatttattttagtaaaaaatcagatgcatttattagatttaatgacatcattcacaataaatagatttatatattataaatttatgttgtcgcctttcatatactacattgatctgattaatcaaacttcggacacaaatctcgcatttcatata

SEQ ID NO: 59612 - DNA, 413 bp, Glycine max
  unsure (1)..(413): unsure at all n locations
ctaaagcacagcaacacagaatctaggtgtccaacactttcttctttcaatggcttttctaggtttgaaaggtgaaatttagaatgaggtaaatttgaggcaaactctcacctcacaccagtccataacgtcaatctaaacttgcccaaactggaattacacctaaaattccaccaaatcaaaatttgactcttcaacacccaattttgccctagaaatggctcttggttcactntggtcatttgtttttctctctagctcaacctaacctttctcacatgtcctaaatgacatttcaagctagtattaactcactttaacctccatttaccacagaattcagacttaaccttccaactctcaaagtctcactctttttccactcataacatcacattctcactttctaacct

SEQ ID NO: 59613 - DNA, 449 bp, Glycine max
  unsure (1)..(449): unsure at all n locations
agcttgtgtattgctgcattctactaatatatatatatgcccactgctntgcctgagaataacaattgcttgaccacaacagcgctggaggcggcaacagacaatggtctttcaaataaacctgttgtacatgaacaaacattatatcatgcgttgaccgtgccaaacgaaccaacgaagtcattgcataattgttacattaattatattcaatgtacctgaacaaaatgatttccaaacatgtgaccgacacatatgatgcggtggccagaagagtcaggtggtggttgacttctaagagggaaaaatgtcatgctctgttgttgggacaacgatacaaggattacgttataccgtgaagcaatcacatatcccatgtctggtatatccacccacttgtccacactaacctgaatgaaccanacatacacatgtgagtaatttaaaca

SEQ ID NO: 59614 - DNA, 448 bp, Glycine max
ctagtgagagagtgcagatgggttcgagggtcactatattcttctttgcaaacacacttttaagtagaaattctatgagggtcagagaaagttgaagagaaacaaaatcataagggggttttgagggagtcattgaattcaaacctttgaaggaatcgacaacttggacaacgatgaatggaagaagcagagaaaaaggttacgcgcgcgcgactgagaggaagctacttaattagtagtgattccaggaataataagtaagcttattcaaagacagtcaaaaggaaaaaaccatctttgtactaccaatacaactacgatagtctttgtcaacctatcgttgtactccttaaactcactattgaagatggttattcaataaccgtcattgtatatatattcattaaaattactacactgccaccgtgtattcttcaacgacattttc

SEQ ID NO: 59615 - DNA, 429 bp, Glycine max
  unsure (1)..(429): unsure at all n locations
agctggccacccagctcgcccagtcgagctcagttatcccaggcgagcagggttgcttcctccacacgcaacagccttctggaggaatcttctggaggccccaagtgggcctggttgctatttgcacccgcatttttactaagtacaccccccttttctatttttttgtaactctttttccgtaacgttacgaaactttacgaacttcgtaacgatacttattttttcttccgcaaggttatgaacccttacgacttatgtatttactcttttttagctttcgaagaagttacggaaacttacggattgcgcaaaaacacctctttttgacttccgccacattacggaatttcacggatcgcacaagccttgcttctttngatttctgagacgtctcggaacttcatttattgcatgtcatcaagtaat

SEQ ID NO: 59616 - DNA, 422 bp, Glycine max
  unsure (1)..(422): unsure at all n locations
gtgcgggtctgtgagacgaaggtcaagtggtctgttatatgtgaagatgatgttccaagtaccttggatttggtccgaccatgccctcctgatttccagctgggaaattggcgggtggaggaacgccccggcatttacgcaacaagcataatgtaaacctttacggttttaaaagctctatagttgggcctaggctttagagttttcattntgttaaggctttgtgtcttttgtctttgaatttataatacaaggatctttcttcatctgttcctggtctctacccattctcattcatttgcatgtttacttctttttctgaaacggcagattcgatgacgagtcccccgaaggtactaatacctgngacccgtctatcaacttcgagccagaaatgaaccaaacggaagatgaaggagatg

SEQ ID NO: 59617 - DNA, 444 bp, Glycine max
  unsure (1)..(444): unsure at all n locations
atttattacatgttattcattaagattgttagatttttgaangatctctatagatattctattacttagatttcaatgagacttatctctagaaaattgcttttgatcattaagattttatgagattgtggattcatggtaggcgcatccacagtcaagcatagtaaggattttgcaagacatagtgaagctggttgggctctacactatgcaacataatggtgattgtaagttgtgccatgctaattaagagtaaccttagcacgtgtcacaaccaggctggggcaggtaccccactcccatatatgatgctagatatcaccactcatcatatcccattaacttcctaaaggatcatgactgactaatgcccaaacatttttctattataggatctaatttacgtctcttttngaatatccttcactgtggaactgatacatg

SEQ ID NO: 59618 - DNA, 395 bp, Glycine max
  unsure (1)..(395): unsure at all n locations
agcttccatctagtggtaatcatatcacaagatcttcaagtatgngcttcttaaatctccattaaatttttctgctttaacctctcttacattgatgtctcttcattaaatctgcatgaatctactcatatgtactgtgctaaatgttgntaacttgaatctttagagattccattgattaaacttgctatagaagctacacttgattttctatggatcaaattcttggtcttgtcttgaacataattgtgttagaataagtcctttagtttgtcttgtatttttgtgctgaacctaatcataaatttttaaaaatataaaagagaggagacctcaaaattaaggactgtcaccgtgtagttgcttacagcatgctagcataaactgccataaat

SEQ ID NO: 59619 - DNA, 375 bp, Glycine max
tcttgagcgattgcgtgtcccttctgaggtatgccttgtatatctaatttacgccagataacttcctagcttttatttattttaatgatggtttgttgggtgtagtatgccacaaatttgactggaggttcatttgatgaagctcgaatgcttcaaaatgtagaagcatgtgaatggttgaccagtgccttgcgtggtcttggagtgcctaatctagatcctagttatgcaaacatgagagctgtatgttcctttctttacttttctcttaaaaatcatctggtaaaacaaaccgatcatgatttggccatttatgaaacaaaattatcaatgagacatagagcgcttgtttatttatttataaaaatattatgg

SEQ ID NO: 59620 - DNA, 411 bp, Glycine max
  unsure (1)..(411): unsure at all n locations
gatttcaaaaagctgtaatcgattacaatgtttttataattgattaccaatgtgcttgaacgttgaaattcaaattcaaaagtgaagagtcacattctttctcaaaaaagctttgtgtaatcgattacactaatttggtaatcgattaccagtgatagtttctgaacaaatcaaaagatgtaactcttcaaatggtttttgactntttcaaattggttttaagtttttctaaaagtcataactcttctaatggttctcttgaccagacatgaagagtctataaaagcaaggctttgttttgcatttaaataatcttgaacaacctttacaatacaatcctttacaacctctgaatctctntgaacatcttcttcttcttccttgtgctaaaagctttccaaaagttttatg

SEQ ID NO: 59621 - DNA, 381 bp, Glycine max
  unsure (1)..(381): unsure at all n locations
cagcgtaacgagagacgggtgcgatatatgctcaacaaaatgaccaccctcacacagatttggaggatgttgctgcttaacaacattctccctatcgaccataactcagacctccccctgccaaagtgtcagctggactatgccatcctgactcaggagagtggacatatcttcccagccaccctatctcacatgctatgtatcagattgatgggatcacaccctcttgacacctagaggacccggagaggttcaacagggccctggggtattctgctttgatcacaagcccgtgccaattctatggagtgtcggncaaccataacaagcttattctgactgcaatcacagagccttctttgagaagtactacattgccag

SEQ ID NO: 59622 - DNA, 126 bp, Glycine max
cataaaataaaaataaaaacaaaaacattcaccaaacaagattatgatgataaagaaactaatactcaattgtgatatataacatacatatatctacaaaatgtaaatctaagtaaaagaatatga

SEQ ID NO: 59623 - DNA, 400 bp, Glycine max
ggcttagtgtcttcctaccgattaaagcaaagtatgacgcttttgtttccataaataaatatcttacggtgaagctcctggagagcttgtgtttgaccaaatgtggtcatcaagtccacatagcctctaggctcttctttcttgcctgcaaagacgaggagtcaactgacatgaggatggacaatgtcaggggagacctcaagtctctaaaaagatttccaatacaggatatcatggaactaccctagacgataaggactcttgacaccatgaagtttgcaatgataatggagaccaccccgaggttggcttggttgacaatggtgatacccttgaattccctatccgtgaaggtgatacgaggaagacttctttgtattggagcgttgacaaaaataat

SEQ ID NO: 59624 - DNA, 419 bp, Glycine max
  unsure (1)..(419): unsure at all n locations
agcttaagaattcaatttcgatcgtccccggatatatctggtctttatcagatatccgagtaaaacgntattgtcggttgaattagctctgaggttcagaattcaatttcgagcgtctcaatatattacgggacgcaatcatacatccgagcaaaatgttatcgtcgcttgaattagctcaaagctctcaaattcaatttccatcgtttcgatatattaccggactcaatcagacatctgagtaaaaaagttattgtcgtctgaatttgctgagagcttcaacattcaatttcgagcgtctcgatgtattaccggactcaatcatacattcgaggaaaacgttattgtcttttgaattggctcctgaggtcacaattcaatntccatcatctcgatatattacgggactcaatcagaca

SEQ ID NO: 59625 - DNA, 450 bp, Glycine max
ttgagctaattcaaacgacaataacgttttgctcggatgtattattgagtcccgtaatctattgagacgcttgaaattgaattttgaagctgagagctaattgaaacgacaataactttttactcggatgtctgattgagtcccgtaatacatcgagacgctcgaaattgaatgttgaagctctcagcaaattcaaacgacaataacatttttcctcagatgtctgattgagacccgtaatatatcgagacgatcgaaattgaattctgaagctctgagctaattcaaacgacaataatgatttgctcggatgtctgattgagtcccgtaatacatcgagacgctcgaaattgaatgttgaagctctcatcaaattcaaacgacaataacgttttgctcggatgtatgattgagtcccggaatttattgagacgctggtaaatgaatttg

SEQ ID NO: 59626 - DNA, 454 bp, Glycine max
  unsure (1)..(454): unsure at all n locations
ctgaggcatgcaagctgggagaggatgcttcaatggagganaagatttatggagagtaagagagaggggtgatcacgaanatgaaggaagaaaaaaggagagaagttgaactttgagttgtgtctcacaagactctcattcatcaaagntacaataagtgtacacatgcttctatttatagactacgtagcttccttgagaagctttcttgagaaaaacttcttgagaagcttctttgagaaaactttcttgagaagctagagcttagctacacacacccctctcagtaactaagctcacctcttgagaagcttccttaaaagattcctaaagaagcttgagcttagctacacatacctctctaatagctaagctcacctccttgagatgagaagctagagcttatctacacacccnctataatagctaagctcacccccatgacaaaaaaaca

SEQ ID NO: 59627 - DNA, 407 bp, Glycine max
  unsure (1)..(407): unsure at all n locations
accttanagtcatacacactctgtattatttgtgtttgacgncaacaacgtaatacaattttacattattaatgcatcaccattacattcgatattaaattaatctaatttatttttttttctctaattctcttaatttttaaactaaatcctataaatatttaacttcaacaaaatatcatatttaatctctctttagatatttngctttattattcatgatctattcagcccttntattttaaaattgtctaacaattcttttattaatatttattttttaacatttcttattatcctatatgaatattggaaggttgtgagaaaaaaaagggatagatgaaaggtgggttacgcgcgtgtatataaatgctagaaattgtaatgaaatggtatactactggtct

SEQ ID NO: 59628 - DNA, 371 bp, Glycine max
  unsure (1)..(371): unsure at all n locations
agcttgctctaaatntacattgttgtttgtatttatgggaggaggttgnatgtcatttttgttntaagagtagtgtcccactggtaaaactaactttccaaatgtttgccttcgcaggaaatggccccgaggaagcttgcctcatagaggtccaggaaggacaaggcagccgaaggagctagttccgctccggagtatgatagtcaccgctttaggagtgctgtacaccaccagcgcttcgaggccatcaagggatggtcgtttctccgggagcgacgcgtccagctcatggacgacgagtatactgatttccaggaggaaatatggcgccggcggtgggcatcactggttactcccatggccaagtttga

SEQ ID NO: 59629 - DNA, 321 bp, Glycine max
  unsure (1)..(321): unsure at all n locations
tttctcgggagtatccatcgtttaaatacttatgtctcganatattatgcacctgaatcgttaattcaagtgaaaagctctcaccatttgaatttctcgagggattttgttgttcaattttcagtgtctccatatatggtgtgcctgaatcggacctccgtgtgataacatatgaccatttgaatttcttgagagaattcgttgttaattatcagcgtctcgataatgatgcgcctgaatcggacatccaagtgaaaagtaataccatttgaattttcgtcagcttccgttgttaatttcgagcatcttcacatgtgatgt

SEQ ID NO: 59630 - DNA, 428 bp, Glycine max
  unsure (1)..(428): unsure at all n locations
agcttgttcctagaagctaanttatgcattgtctatatctgctcaatgcagatggccgaaaataactatgtacaactaatttggaattgctgtggaaccaaggtggagattgttggatgaaagaagtggttggacgagactgtctgtctaattgatttttgggtatagtcaacaagttttgttgtaaccattatatgttttttcagttagtttcccaccccttgagcaaaccattaggctttagccttctctttccaaaaattgttcttggcacttgagagcaaattatagatctacttgagctaagtgttccttcctcttcacatcaggaagattaaattctagatgaatgtaaatcaatttgaatcctattcagcttaaccaaagcatcattcaccatagcattaatgtctccaaagacatcttta

SEQ ID NO: 59631 - DNA, 360 bp, Glycine max
accttttactaaaagttggccaacacaacaccttgtggggacaaggaggctattgcccaaacaaccgacaatgttatccactccgtcaaactccatccgaactatagggttatatgggagagggacgaacacaatgctgctccctctgaagaagaagtcattccaccaactggggggaatatgtatgaagactaaaatgactgaagccactgcattggccagaattacggcttaaatggccgacaatagactaaaaaccgccttcgaggctgagtctcaacaaaatatggcagttgaagcccaaaccgaagatcatgagaacaaaaaaacccaggatcgaagaccggattgcatttatga

SEQ ID NO: 59632 - DNA, 433 bp, Glycine max
  unsure (1)..(433): unsure at all n locations
agcttgtcggcagaactaacaatttccattaattattntatcactaataactcgtccttagattggaatttttaaaataagatcaatgctttgaggaattattctatatttcataatgtggaagcatttaaacaaaattaaaattttattttgatgtgaattatagcaatgggatcaacacaaatgaattactgtaggacaagagaattagtcatttacattgcatgataaagaaaactagataaaataacaaacaaaatgctgttgataatacgaaagttcacgagaccagtgctactaatagttagtgggggtgtgtatgtttttccctaaaccctanagacacataagatgtgtaacaaaccaactaagaccagtatagaacaagcagggctggtttaacagcatcaaataatctatcataaaaatgcta

SEQ ID NO: 59633 - DNA, 441 bp, Glycine max
  unsure (1)..(441): unsure at all n locations
agcttgatacacaacttggatttttatgatcctcanaacctgtaggttgggaaacataaactttctcttcaatgtatccatttaggaaaacactttttacatacatttgatataacttaaaatccataacacaagcataagcaaagtctagctaccaatgcataggtttcaccaaagtctatacccttttgttggttacagcccttggctactagccttgctttattcctagtgatcaaaccatgttcatctaatttatttttaaatacccatttagttccaatgatgttcatatttttagaataaggtaccaattctcatacatcattcattntaacttggttcaactcctcatgcatgaaaattatccaaaactcatctttgagtgtctcctctatagataaggattctacttgagacacanatacaatatgctcacaa

SEQ ID NO: 59634 - DNA, 397 bp, Glycine max
  unsure (1)..(397): unsure at all n locations
agcatatatatacctgttttttttcactnttaaatcatcttactaccagaaaaatcctgattccttcattattcgtggaatctgtgaggaatcacctaccaggttccttccatgtttagggcatttgacccggagatctccctattgagtgatataaatgaacattccaccatttgaagggcaataactataactattatcacaatcatatacacaccgtgcttgagtgatggatccgaagaacatgtcaacatttttttcgttgtcaagagaactaccctctggttcaattgttgatgaacggtgttttaaagaccttttgccctctattgtgcttgacatatttgaccgcagaccttggagtttattaatctttcatcgcactcatttttcaact

SEQ ID NO: 59635 - DNA, 434 bp, Glycine max
ttacaggaactgagagatgcctgctgcatgcagctttgaatgctagaaactatgtattgttgtttgtctaaccccattacaagcctagaaaggccttcagattcatttagtgtgttcattgctatatgatatgggatgaaatgcataggttgggacttgtgttagttgcttatgatggtatgagcctaaacacttgagcttgagtgaaacaatgactgtgaggctttggttgaagatccttccttgatttctgccatccttactagcttatttcagttgcgactctaatgtgtatgtagctatctctgaaaagctacatgtttgtgaaaatcaattgattgaagctaacaccatcttgagtgatcactgtagtttgtcacttgaggacaagagaactattctttctttgcttgaggacaagaaatactgttaat

SEQ ID NO: 59636 - DNA, 315 bp, Glycine max
tctatgtacccacggtggtgcacattgtgttttttgtatttttattcccgctctgtttactttttataccccctgttgacgtgcttaagccattttacttaagtcatttctcgcttaacttgaaaataaaataagtttccaccgaacgtttgaattgtaatatccgttaacttcggttaatataaattccgaccgttcggtcgtgccgtaaccacgttggaaatcaaaaaagaggtaaaagatattataataatcagaaagacatcttttaggaaataaagcggagaatcaatcggacgattttcttgggatttc

SEQ ID NO: 59637 - DNA, 299 bp, Glycine max
  unsure (1)..(299): unsure at all n locations
agcagatctcatcaattgtgttctgaagagagagagctcacgaaagcaagtgagtgacagctacactatttccattgcttaagattatatcttaacctgttgcaaaaagtttgtcatatctgtatcttgcaagtttcccaatttgcctttaatgtatattctaatgggtgtggatcaattatttggtattactggttttgttcttaagatagttctcgcgtcgagggcgcgctatatttatctttttttacttatggtgctgatggcgggtgggaagaatatactngtcaatactaatg

SEQ ID NO: 59638 - DNA, 400 bp, Glycine max
  unsure (1)..(400): unsure at all n locations
taccatgccagcaccattttggcccaaccccattctctgcttatatccatctntcagcatgattcaagcgcccatcatagaggcatccgacaaacctagctatgtcaaagaagagtccacattagcatctgatcacaagtctccaacgcttgagacgcgggatagtaatgcctcaacgacttcaacataaggaattgaagatggaggactaactagtatatactactcgcctgatactatagtgagttgacctaacaaggacgatgggaccaccccagcaaaaaggatctaaggctgactcagcagacaattgtcagcatgaggtatatccatgacttggaaagtgatttgaaacgtgcacgagccaatttgaattgggagattgacttctgtctcacat

SEQ ID NO: 59639 - DNA, 255 bp, Glycine max
  unsure (1)..(255): unsure at all n locations
agctngaatgtgtgtaacccaccatcttctcatatttaacaccgataacgtgtctactatcattnttatcatctccctctncatcattggaggcactacttgagctgccanatccctccaccatcttctcatagtagtccccttgtacttatcanagtcccgcaccttgaacttcatatgaatgaccacgtcgggcactaagcacaactttgccatgtcagcaaaagcataatcttcacctccttcaatggccct

SEQ ID NO: 59640 - DNA, 346 bp, Glycine max
  unsure (1)..(346): unsure at all n locations
tccttgagaaacttccttgagaatcttctntgatattctttcttgagaagattcttagagaagctactgcttagctacacacacccctctaatagcaaagctcacctccttgagatgagaagctagagcttagctacacacacaccctataatagctaagatcactgttagtcgtcttatacgactaacttttgtatagaaaacattatgcaaacttgtatagctcccccaatttgcggttaatttgtagcgattttggaaataacacttgttttatcgctaaagctatctctagaatatttacattggatttaatgatgaaattttgacaagttccagtgaaaaa

SEQ ID NO: 59641 - DNA, 275 bp, Glycine max
  unsure (1)..(275): unsure at all n locations
gctttagactatagaactacataggnctgaattcctcattgtacctgaggatatgtangagcaagggcaacacccttgtcgacctaaaaaaaatataaaaagggaaaagaaaataattttgaagtcacgttgcggacactcgattaaaggctgtcatcccttgtgacgggcaccctgggttctaaaacctatcccatgcataaacaactcccgaacccatattttcaanatttccagacctttctttgatcgttctaacggcaatctcgaccccc

SEQ ID NO: 59642 - DNA, 429 bp, Glycine max
  unsure (1)..(429): unsure at all n locations
cttatcatttgtcaatacaatattattattattactgtatgtataagattttagattattaaattaacacttttcaatagaaaagacaattataatttgataaaggaacatgtaagtatgtaataattatcaacaaaagaaaatttgagtaaataagagtacaataagttctatttttggcttttacctgatattgacacactcaaaaggaagaaatgccaattgttccctctactctccanatagagacacatgcacataagtgatgagaataaataaataggtattgaggagctattggctaatgtgtcaaagtgaaacaataatcaagtaaactgaagaagcaggtgagaagacaaagaagtatgagagacaatgagaaaagaagacagaattagaattgaatagaaagagaatagaaatataaga

SEQ ID NO: 59643 - DNA, 458 bp, Glycine max
  unsure (1)..(458): unsure at all n locations
aagcttgangaatatctcgagatttaaagactctaatattatcttatcactcaacattnaagtatttttcctacatatttacttaattattctctgtctaaatattaatgagaaacaattaagtggataggaagataagacaatatntttacaatgataatacanataagtgacaaaagttatgtgattaactaaattaactatttttcttagaagacattaatcagctganatgatcttataattaaggattgaagaagtataataaacaaataagtatattattttggtcataataataagaaacatggactttagatgtattacttgctaaaaaaatatccttaatttattgtgaaagatgttcatttattctctatacaaattgattaacttgctagaaacgaggatcgaatggtgtgttagagaaatgtaataacttttccccaaaagaaaac

SEQ ID NO: 59644 - DNA, 352 bp, Glycine max
  unsure (1)..(352): unsure at all n locations
acccgagcactcacgcaagcatccagngcgncatttgttctcctcaaagcccttgaatggaccactggacacggcgcagaaagagaaaccgccaccaggggcggctgataatcaacgcagatcccataccctcggatattctgggccacaagactctctcgactaaccacgggccaaagcagctggtcttaatgcagtggcagggacttcaccctgacgaaacgacgtgggaagactggtcacgccttcaggagcttcatcaccttgaggacaaggagctggttggagcacgcgggaatgtacaagtagcagctatgaaccgcaagcaaccacggccgatagcgataacaac

SEQ ID NO: 59645 - DNA, 342 bp, Glycine max
cctaacggtcattttgttttacatagatatctgaaaaacaaatcgcatttcattgtaatacttaacgttagtctatatccgttaaatgataatgtgacgaataaatgtcacatcatcacacctaatcactaaacacataggcacaagtgtccatgtcattaatttttgatttttttttttaaaaatgaagccacacttgagacaagtgggtcatggaagcaagcacctcaatggtacccgaaaacccgaagtcattctaatcgttgagccacatattccaaatcgcatatccaacaaaggatctgggtaagccaccggtgagggtgttgctatcagtcaagt

SEQ ID NO: 59646 - DNA, 298 bp, Glycine max
  unsure (1)..(298): unsure at all n locations
attccctagaggatggtgcctgcgattanctcatgtcctttatctctcgcctccactccatggataaatatcaccactgtaggacctgattgaagatcaaatatctagcctccatagaaactattgaggcaagctgacatcaagtggtatcatagcacaaaagcctcaagtaagttctccataaaccttcaataactttcagctttaccttcagctccataggggtttcttcatttttttactgcatgagtttcctaatatgtcttgtgttggatgatagtaacatgactggtcataa

SEQ ID NO: 59647 - DNA, 382 bp, Glycine max
agcttagcatgccatcaccattccggcccaaacttatttcaagcttatacccattctttacatgactcgagccaccatcaaagaggtatcagacatactcgattgtatcggaggagactccacataagcattgttcacaattttcaatgcctaaaatgacatttctagtgactcctccactacttcaacataaggagtataagacagatgactagctagtatgtcctcctcgcctgatactataacaagctaacccctcaccacaaatttcaatttttgatgcaaagactatgggaccaccccagtagaatggatccaggggtgacctaacaaacaattataagcaggagttatatctatgacttggaaggtgatttgaaac

SEQ ID NO: 59648 - DNA, 416 bp, Glycine max
gtcactcccgcattgtatctctagcatgtattgtatgttgttctcgtcctttgtcacgggaagccggaaggtccatatcaccttcttaattgtacacatggggcactgcgcccccaaatgcgcaagtaagaagagataattttccgggctctcgtgtccgtaaaatgcattcatatcataagcatctcttcataacatcataatggacatatcctgcatttgtccgttatcatattccagcctcacattttgcatgagtcatggcatcatcgcgcatatgcgttcaacaaactttatggtctgcaaaattgcataccatttgttttcatgtttgatgatgcttgcggtctcctctacagaacaaaaacaagaaaggcggaagcgtgaatctttacacgtcattcttagtatcatgt

SEQ ID NO: 59649 - DNA, 426 bp, Glycine max
  unsure (1)..(426): unsure at all n locations
agctngtgcaaatcaagtcactctctgtatttatcttatcatgcattggannggggnnctcgcctttgtcacgggaagccggaaggtccatatcaccttcttaattgtacacatggggcactgcgcccccaaatgcgcaagtaagaagagataactttccgggctctcgtgtccgtaaaatgcattcatatcatgcatcgcataagcatctcttcataacatcataatggacatatcctgcatttgtccgttatcatattccggcctcacattttgcatgagtcatggcatcatcatgcatatgcgttcaacaaactttttgatctgcaaaattgcataccattggttttcatgtttgctcatccttgcgttttcctctacaaaacaaaaacaaanaagggggaagcgtgaaacttcacactacat

SEQ ID NO: 59650 - DNA, 438 bp, Glycine max
  unsure (1)..(438): unsure at all n locations
tctnttggaccttgaacaagcaatcaactcctcttttattttcatgctatgngcttgcgactggtccctttcttcccttcgcaacttgagttcattattgctaccccatagagctccgcgaaatttgttccggccatactcttccttgcgagccctcttggtctcttgttcaagggctcttgcggtaattgcattctcttcccgtaacccggcgcactccttccgaacatgtgtagcagccaacttgaacttctccttggcgagttntgcctttcctaactcgcttttgagagcttggacttcctcgtcctcttccggtgcttcaaaattctcttcgctgacgactnttaacttggcgagccaatctaaacctcgtatgcgaactttcagccattcgtggtacccaccaatgatgccattacgaatgcctctaagctc

SEQ ID NO: 59651 - DNA, 454 bp, Glycine max
  unsure (1)..(454): unsure at all n locations
agctntgtagcatanggactaatgtttgcgagtgtttgacatcnnggcctatggntgctgactgaggagctgggatggatgatgaagggatgtcattggntctaagcctttntcttggagccctctaccactaaaaagaactcaaaacttcttagaccaaatttattccagttcaaagactgaaaaagtaaacttaaaaagacattatatgcttagcgagacacagttcacttagctggccttcacaaaacacactactgcttagcgacatgtgaggctgcttagcagaagttgcagaaattcagcttctgcataattggcttagctgacaagttcccgctaagcctagcgtctgccgcaaggatatgcgctcaactcctcataggttgcgcttagcggcaccatacagttcacaaaatacattaagtatgggagcttagtgagcggngctcgc

SEQ ID NO: 59652 - DNA, 299 bp, Glycine max
aaaaggatcatttgtaatgtccaatgccttaaaatgatcacccctccagtaaaaaaaagaatcacttgattcacacatgtggaagaactacgtaagtatgatttcctctccaaaggagggtacgtaggagcaaaagccccgcttttgtcgacctccaaaaataaaaagaaataatagtttaagataacacaatttcacatttctaaaaaatagggttgttgccttcgagacaaacgtaagaggtgctaatacctttctcaagcgtaaatataactcccgaacttaaaatttttattttg

SEQ ID NO: 59653 - DNA, 433 bp, Glycine max
ctatctcaactatttcacaagttgggagccatgtgttctttgtttcatccaatgataattctttgtggcatctgcatcttggccacttgagtgaaaaacgacaagtaattttgagcaagcgaggcttacatggaaatcataatgtgaaacctcttcaattttgtcagaattgtgtctatgggaaacaacatcgaacaaaattcctaaaggttctactcactacaaaggctatattggactacgtctattatgactattaagggcaaggtacttcctttccatcatcaatgatgaccacaaaatgacatgggtattgatgatgaaaaaaaaatttgaagctttcaaatgtttttaagcattaaatgattctaatgaagaaccaaataggaaagacagtgaagtgtcttatgactgacaatggcttgaaattctg

SEQ ID NO: 59654 - DNA, 432 bp, Glycine max
  unsure (1)..(432): unsure at all n locations
agcttgattagagagttgaatattctctagtttctctntgattattagtcaatacattcaaggaaacttcgaatgaacaatgtccgattgatttttttatattattttattcaaagatattttgattattttattattattttgccttttttatttttttttggtttaatcagggttacagggtgaacgatcggttagattttattttaacggtgattaaacgaaattacaaaacaaatgagcgattaaaattcattttatcatttattaggtgagaaacaacttatataaacagttaatagctcgctaaaaagggtatggaaaataaatgtaatgaaagtaaaagtacacaaaacaagtagggaccactcanggtgcatagaatgaattgaaagatccatttcatgaacttaccgcgtgaagactgacaac

SEQ ID NO: 59655 - DNA, 376 bp, Glycine max
gtgcaggagtatggaggacccatcacacggaggacatgtgtttttatgcgaaggtgcacaacaagtttacacaatcacaaagcgcgcataaacccaccatcccctgtggcccacctccaactgagctcacaggactcccacgtagcccatattctcgtttttttcaacaccgggtccccaacaatactcccaagcttcctcaacatccaagcaaaacaacattcaaacagcacaagctatcacagcgcagctaaacagagcaaaaggagaagaccctggcaaaacaccaaccaaatcacagcttttctcacttaaagacaccacgaacaaattctttcgtccggggcattaaccggtggaacgactcgaaaatctt

SEQ ID NO: 59656 - DNA, 442 bp, Glycine max
  unsure (1)..(442): unsure at all n locations
catgcagcttctacatatagaaaatcttaatnnatttattatatcaaagaccttnaaaacttaatgaattttctcatgatgcaagttaattcaaatgcctaccgaaacatctatttataactgaagctgatactaattgaactaatattaacacgtaaagaatgattacctacctaaaggaattttcatatattagtacctatgcccattagactaagggtgtgtttggatttctggtaagagggttccaaagatacgtttgagaataaaatcagtttggagtcgtgtttggttatcctttagaaatatgtttaagagtaaatatttgtctcanaactcaatttcagagaagtaggacttgagatacttttgtaaactctgtctacaaacttagttcaagcatgtaataataaggccgtagttttttttatgagatgggata

SEQ ID NO: 59657 - DNA, 440 bp, Glycine max
tgaaagattaaataacactggttcccgttattctttatttgaagctgtcataatctgcaagtaatttatgtccaggtcaaccatgttaacagcattacctataaaaccttctggagttaccccgtttgcaatgcttgccttataatcattcctatgcaaccacccagtgtaaggcctgtcaaaccaatgcacatgcataattttttttaaagaaataaaaaacacctcatcacaggccctaggcctataaaagtaatcaaataacaatgaaaattacagtcataatgactcatgaagcaatggagtaccttatatcttcaaagcagataacatggaaacgcttactaatagcttttccacgaacagccgcttcagcatgtaaagcacgctcataatcaatttcttcctttagattatatttctcaagggaacctgcagta

SEQ ID NO: 59658 - DNA, 391 bp, Glycine max
  unsure (1)..(391): unsure at all n locations
agctnttattctanaactacattttacttanttttactngncnnngaaaatgagaagatccttttaaacatgattccaacagacaatcaaatatactctaattttcactagaagctcaacatggaagaagatgccatgaaagattgaacaatacatcatgtcatacgaatttcattatatcctcaatatttaagacaatctgttgatgcatgattttgggaagcttccaaatattatttttactcatcatcaacatctgaaatgtccgaacaatgttcgacaatgatttatatgtgggctataactacaattgtttttcgaagggccaattctactattactccacacctcaatcatttttttataaanaaaagtatgcttattgtgaaaa

SEQ ID NO: 59659 - DNA, 446 bp, Glycine max
  unsure (1)..(446): unsure at all n locations
gcatttatgcgagacagagaccaacatgttagcgatcatcactttttccaagaagaattaaatctaaccacggctcacaagcacaaagtggcggacgagtatgcccgagtgtacgcggaaaaagaggctagatgaagggtgattgactcgttacatcaagaggcaacaatgtggatggactgattngctcttactttgaacgggagtcaagaacttccccgattgctagcaaaagccaaagcaatggcggacacttactccgcccccgaggagatccacggacttctcagctattgtcagcatatgatagatttaatggcccatataattagaaaccgctaggaagtttgtattgtcactcagatcttgactagttataactttctgaataaaatgagtttatcccgcattttatctcttgcatgcattcatttttctttacctac

SEQ ID NO: 59660 - DNA, 408 bp, Glycine max
  unsure (1)..(408): unsure at all n locations
ctctntctaagcaaattcttcttgatatcatcaaaatcttcatgatttacaagtataagccttgtgtatggaatcaatgtcaatttctcttcaattttaggaaaaaaggaattattttgaagaagtgctaaagttgatgtctcgctaagcgagctcaatgcgcttagcgagtgtcatttgctaagcgaggcatcaacacgcttatcggataggaggaatctggaagggaatctgtcacgcacgcacgcgcttagtgtgtcatcagctcactcagcgagtcatttgtcacctttatggcttatcgcgagtttggcgctgtgcaaaagttcacttactcgcgctaagcgcaagaatggcgctaagcgcgacgtcgaggtcagtgagcccttttaagcctggaatggcaga

SEQ ID NO: 59661 - DNA, 447 bp, Glycine max
  unsure (1)..(447): unsure at all n locations
agcttgcattacctcttagtaggtggtgtaagctctattggagctngaaggcctangatcttcttcattaatggatntctttgcttcttggaagatgaatggccgcggaatggagaaggaagagagagaggagatgccacttataggagaagatgagtctagaagaagctcaccaccataggaggccatggataagagcttggaggaagaaggagataaatganaggagaggaagcgaagagcatgaaattttgtgctctaaaagagctctgaaatctgaagtttaattttcaaatcatcaaagttgaaaaaaatgcacacacatgacctctatttatagcctaagtgtcacacaaaattggaggaaaatttgaatttcacttgaatttgtggagccaaactntggagccaaaatttcactaattatgattagtgaattntagttat

SEQ ID NO: 59662 - DNA, 449 bp, Glycine max
ctcagcttccatcactcctccttaggattcttctcggtgttggctctctttctacttgatagacgatctgccaactgtgttgccagttgtcccacctgaacttccagattcttaatggctgattctgtgctcttttgatttgacattgatactagcatgaactgagcaagagtctcttccagcttcattgttcgatcatagagacttgttgtggtggcctatttgatggacgaccttggtctttattaaactaatttccagggtgatttctccattgtccctgctgtgaacgatattgttggccatattgaaatctagaatgcccacttgcattgaaatttggtcttggctggttccccatatagttcacttcatatgctatttcttctttgggaatacaacagccagaatcatgtgctccaccacatatgacacaatctgcaacctac

SEQ ID NO: 59663 - DNA, 272 bp, Glycine max
gatttctaggtttaatagaaggctttaactaaattaaaagtaacatgtaattttaaagacatgaaaggaataagattggagttttcaaatgcctgaaagcatttaaaactcttatttgaaaagaaatccatatcaatgaattttggatcaataatggaacgagaagaagaagagatttgtgtaccgtatccgctattcttagatgaaaaaaatatgcaaagggaatagaggaaagtatcggtgtttcctgagtctcagaatgtcgttgactc

SEQ ID NO: 59664 - DNA, 391 bp, Glycine max
  unsure (1)..(391): unsure at all n locations
ggagatgaggaagtgttgaagggtgaaacttcctgcttttattgttgaccacacagnggtacctgcagatatgtcgcggaggtcatgagaccttgtggacgtcacgcggggtgctattgcccaaaaccaaacttgaccaatccccacccaacccgggcataatcggtcagagagaacctgtgatgtacctaaacaggcgagctcctggcagtcagcagataaaaggaacacagaccacaaagcgaggacgcttgtggtggctggccaactgcgaattctgtgtgatatgtggattatagacctctggtaattgattaccacgggtgggtcatcgattacacggcttaacaatgaagacaggaggctaacatggtctctgcgaatcgattac

SEQ ID NO: 59665 - DNA, 479 bp, Glycine max
  unsure (1)..(479): unsure at all n locations
agtcacctgcggcatgcaagcttcgatatcttgacttgagctacaatgattttgaaggtatggcaattccttctttcctttgngcaatgacctccttgactcatctcgacctctctcttactgaattctatgggaagattcctcctcagattgggaatctctccaatttggtctaccttgacctcggaggttattctggtttcgaacctcctctgtttgctgaaaatgtagaatgggtatcaagtatgtggaagcttgaatatcttcatttgagaaatgcaaacctatccaaagcatttcattggctacacactctccaatctcttccttctttgacccacctatatttgtcactctgcacactccctcactataatgaaccatccttgctcaacttctcatctctgcaaactctctatctttacaataccagntattcccctgccatttcttttgtccccaagtggatattcaaattg

SEQ ID NO: 59666 - DNA, 402 bp, Glycine max
tagcatctgccaatcgccatgatgtaatctccatcttgacagtctctcatcaagttggagtggtatcacagcattgaactaagttgatcgttccaatgggatgacggttttgattgctgcagataaagcgtgcgattgtgagtttctggtcccatgagttaaactataaggattaaaaaaaatattgtcgtaactttaacggcgcacaggataagtaaaccttttattttttttattattttttttaacaacgggttatatatatgtagcagtttattctaaacaatggactacgtgtgaaatctttgaattctatgtaagaaatgttatttcaaacttctcatcagccttcatgtcaatgatgacacgctccatatgaattctatgtctaattaagctctc

SEQ ID NO: 59667 - DNA, 423 bp, Glycine max
  unsure (1)..(423): unsure at all n locations
agtcacctgaggcatgcaagctngcagtgggcattttgaaattaatacgaactttttataattcttaatgatagntnnttaaagcctcctttgatacaaatattacgaaggcagctttataaaaactgcccttgtttgtaagcctattactatggttttttaaataaaccacctttgtctcatttttaattactttattattttatgcttttcagactttggaacacgtatngcctttcatctncctctcgcccttcaccctaccgngagcacatctcactctcgcccttcaccctgtcatgacctccgcaagcttgccatggacattccccaacttgtgctccatcccgtcactggtgttgctcccacacaccatgcatagtgccttcaccagtggcaggaaaattccccccaccctcatcg

SEQ ID NO: 59668 - DNA, 456 bp, Glycine max
  unsure (1)..(456): unsure at all n locations
tataagaacanaatttcctcaatcatttccaaatatgcatgtgttttatgaagcatcaacaagaatcaagccaaggctattgtgcaagcaatcaatgggggcaaaacacaccaaattattatgatgatggatggctcaaattctcacaaaggtaaactcatcactttcaaattgagctttcaaaactatcatgacatgtagaggaaaatcaaggatttcaaatcacaaaatgtcaagaaacttttattttcaaaacaattacccatttcttgaacatatcctataattcaaagaaaaacatgcaaagtcatacacgcacacagaattgacccaaaatattaaactagaaacccaacgaaactaacaacattaacaaattaacataactaacaaattatcaaaaccgacaaaactagcaaaaccaaagaacactccccccatacttatacaacacat

SEQ ID NO: 59669 - DNA, 453 bp, Glycine max
  unsure (1)..(453): unsure at all n locations
agctngttaagtcattgaagccctatatttcccttatacttggtggagtaggccactcaggaatgacctttattctcttagggttcatgggaagcccttgatcactatttaaaaagttaaggaaagtaatggaataaaacatacctttttctttattttcatgttgattattcctacaaaaaattaagacaaacctaaggtatcccatatgagcacctaggtttgtataaaacaaaaaataagaacaaacctacctaatgagtccctatgtacacaaatcatgaagatgatgggtgcatgagtgattttacaaaagagggttgcaccactcaacacattcatcataccacctatcatagggatttggtgtctcataatacctaatttgggcaccaacaaagcacaaggaattaagctcttatgaaccanaccttcattcaacaactcctttac

SEQ ID NO: 59670 - DNA, 451 bp, Glycine max
  unsure (1)..(451): unsure at all n locations
taaaggagcattaanaccaagtgtatttacccccattgcttatagtccgaagatttcgtcaaggcctctccctcttgattcaggtcatactatttagcacacagactctatctatgcactgtacaaaacacacgactcctcaactgttgtcaaaataattttatctcgtcgtgcctcaaagtgattcaacttgtcgggttcccacattggattccatcacaatactcgtcgtgcagaaacttgtcactcttaaaaggtcttacaattgtgtgattgcacaattcatagtcttacaattgtgtgattgcacaattcataactcacaactcaatacatacaatatctcaatacacatgtatctcacaattcatcacatattcaatttatcacgctaatctaataaatcttgtgcaaaacacaaacaaaatatacaaaattcttctcacaacat

SEQ ID NO: 59671 - DNA, 389 bp, Glycine max
  unsure (1)..(389): unsure at all n locations
ccgcggcatgcaagcttgcttagctgtcatagcacatgtgtgatcttagngccttataaaaaacttctttttcgagagaagagaagatatattatgcgagggagcttattaaacttttattcctagagagtagatatacagcttagtgggatagaagattctaatataatcatgacgtcataaataaactgataataacattctaaggctagatgataacattatctttatctttatctcaacaacctaaaaatttaggacataattacaaattcttaataaaaatattattcattttcaacacaaggtgcgactggtctaacaaaaaccacctttttcgggacaagaacaatgcagtcccataagaaaatagatgtgtagttattaat

SEQ ID NO: 59672 - DNA, 279 bp, Glycine max
atactatcgccctgctgagacgcgagactttcctggttgacagccttcctctcactagagcaaatataactaatatagagttgaaaaatattcggaattgaacagtacaaaagaaaagcccaaatactccgttcttatagaggaacaacccgaagtggacaagatgatggacgactcttcatctttgatatctaaacaccaaagtgaatattacaatgtacctgctgtgaaccaaagaagatggacattttgaaagagttaatgaccacttacattgaa

SEQ ID NO: 59673 - DNA, 419 bp, Glycine max
  unsure (1)..(419): unsure at all n locations
agcttgcagaattggtcttcgccagtgaaaggatcaatgtgggtccgaanagaaggcaaattgatcatcctactaggacgactgagaaaactggggcaaataaagagggtgagaaagagggagaaacccatgctgtgactgccattcctatacggccaagtttcccaccaacccaacaatgtcattactcagccaataacaaacctcctccttacccaccacccagttatccacaaaggccatccctaaatcaaccacaaagtctgtctaccgcacttccaatgacgaagaccacttttagcacaaacaaaaaaaacaccaaccaagaaatgaattntgcagcaaanagcctgtaggattcaccccaaattccggtgtcatatgctaacttgctcccatatctactngatagcgcaatg

SEQ ID NO: 59674 - DNA, 448 bp, Glycine max
  unsure (1)..(448): unsure at all n locations
ntcctcgggccattttctgcgaagggcaaacattggaaagttagttttaccaagaaatgctactcttaaaacaaaaatggcatacaacctcctccaataaacacaaatatcaatgtaaatttagagcaaactcatgcacatacttccttgcgaacattcactcgcacaagatattcttctaactaagaaaaatgcacccatgcacaatcaaggcaccttcgttacctagattatttatatgtacttccaaggtgtatttgctacctacatcacatgcacttccttggctaaatttacatacatccatactcaaagcatcttggctaccaaaaattgcacacgtgcacattctggtatttctaatacctatgcatatacaaactntgtgatgaatcttggctatctacacaataaggtgctacatttcatgctctattcaagtggtttt

SEQ ID NO: 59675 - DNA, 330 bp, Glycine max
cctgcggcatgcaagcttctgtccctgagaaactggtttccagaagacaacagggatttgtatatgctgaaaaccctagccttgcaacaagtcctatggaagcagacaccgagatggaccagaaaatccgcagtgttgcgagtaacattttaaaagacgcctctggtcctgaagctgatgaagatgttccaacatcttgcacccccgatggttttgtgcctgatgttgagaaagatgtttcaacatcttccggcccaaaggctgaagtactctctttccctcacaaagagagatcaacagatgaagatgattcagcgacaaaggagaacc

SEQ ID NO: 59676 - DNA, 408 bp, Glycine max
actcagcttgtgacacgtggagatatatgatatctatcacgctctctatatctgtcatactgacttttgcttcacgctgacggccggaaatacccgagtgggtatccgtataaactttgtgcgttctgtaagacgaaaagcctgataacacgcagagactaacatcgtcttctgcgaccttcaacaatcgcggccgacaagcccggcgacacgaggagatataccttatcttccgcgctcacaagatctgtcatactgacttttgagtcacgctgactgtcggaaatacccgagtgggtatccaataaacttttgttgtctgaaaaggaatagcctgttagactcaaagactaacgtcgtttatgcgccttctcgatgcggtcgaatgcccatgcacacggaatttac

SEQ ID NO: 59677 - DNA, 53 bp, Glycine max
ggataaaatatattcttgataatgatggcttacaatggttgttataatgagct

SEQ ID NO: 59678 - DNA, 347 bp, Glycine max
gaatttctcaagagccttcattggtcaatttcgagcatctcgatatattataagcctgaatcggacattcgtgtgaaaagttatgaccatttgaatttctcaagaggtgtccgttgttcaatttcgagcctctcgacatcttatacgcccgaatcgaacatccgtgtgaaaagttatgaccatttgaatctgcaagagtttccgatgtttaattttcgagcgtatcgatatattataagcctgaaacggacattcgtataaaaagttatgaccatttgaatttctcaagagcttccggtgtcaatttcgagcctctcgacatattatgcgcccgaatcggacatccg

SEQ ID NO: 59679 - DNA, 408 bp, Glycine max
  unsure (1)..(408): unsure at all n locations
tgttgacacgcggagattacgtcaactnttgttctctcttgatttgtcatactgacatttgagtcacgttgacgggcggagataccctactggttatccgtataaacattcttttttgctgtctgtaaaacgaaaagcctgatagcatgcagagactaacgtcgtcttctgcgcccatcgtcaatcgcggccgacaagcccgttgacacgcagagatttacgtcattttccgcgctcacaagatctgtcatactgacatttgagtcatgctgacggacggaaatacccaagtggatatccgtataaacattcttttntcctgtctgtaagacgaaatgcctgatagcacgcagagactaacatcgtcttctgggcccttcgtgaatcgtggccgacaagctccgtgac

SEQ ID NO: 59680 - DNA, 408 bp, Glycine max
  unsure (1)..(408): unsure at all n locations
agctntatatagacttcagagttntgacccgttgttagatcccaattagttgttgtctaatagctttggcacttgacacgaggttgctattgtacgaagagagagtgggggccacaaacactttatttagtagtgtttatggtagggtcgatggtctagggtctaaggtttaaggtgtatgttttacttattttaaggtttaggggttagttagtttatggtttagattttaggtgattagggtttatgcatgctatttaaatgaggattgagtgttataggttttcccattataggaattanggttttgttagcattgggtttaaggcttacttatntttggngttagggcttatggatttatggtttagtggttacttttatttatgaataanggttagcatattc

SEQ ID NO: 59681 - DNA, 386 bp, Glycine max
  unsure (1)..(386): unsure at all n locations
ngattgattntagtacaaggtgaagcttctctgtatttctatcattcgtgattctacttatgttngttactgtttgatgtaaatcttgaactcattatgtgccatgttattttgttggcttttatattatcatgctgatgagtttgttttcttagttgttcatgttttaagaatcttgtgttttgtttcaatgttcatcacggcactaatttttgtactattgggacaacttccaagttgatagcagggaagggtgggtggttctattattcctatagcaggtgcactaaaaaaatagatcatgaagatgtgacttacacatgttcatgcagagaatttaatgaaaaatctattctgaggtgtcttttataaaaaaaatgcatttt

SEQ ID NO: 59682 - DNA, 248 bp, Glycine max
  unsure (1)..(248): unsure at all n locations
cacctaaaagtcacctctctcctttttattcttcaattcgtgctccccctctcttttctctcctcttctttcctcattgagcatcctctccaagcttcttatccaaggctcatcttggtggcgaagctccttcttccatggcttattccgtagnggatggcgcctcctctcacctcttctcctttgtcttccgctgcatctccatggtggaaaatcaccattgaaggacctcattgaagctcaaagat

SEQ ID NO: 59683 - DNA, 455 bp, Glycine max
  unsure (1)..(455): unsure at all n locations
actaagcttgagccaaaatctgactcaccatanaccttgaccagtgtgataatgccaatccttaccctcggaagcaaaaaaaaagaagagaaggaaaatttccaatcaaaggaaaaaggagaaggaaaatttccaatcaaaggaaaagaaattcccaatcaaagagtgggagaaagccaaaagaaaagaaagaaaattcccaatcaaagaatgggagaaagaaaaaaagagaagttaaaaagaagaaagctcctggtcaaagaaaccagaagaaatgtgccgagaggtccttggactagacgatatctgaacaatacagaattgtcaccaaatgaacaaaagaaagaaaaggaaaccatgacctaaaagtggtcttctccctttgattaccaaccaaaatcctgtgcgctagcgactttttcgcccgcactataacaaaacagaaaaggaaaaag

SEQ ID NO: 59684 - DNA, 427 bp, Glycine max
  unsure (1)..(427): unsure at all n locations
actaagcttctttaatacttactttaacaacaatccacctatcctttatctctgagttaggntggggagtatcgtcaagttctttcaaagcactgttgaatacaaggaacattacaatattgatgttgctgagtaatgctaatgcaaatgtattggaaaacaacactggcctgttaattattcctttaaggtagttgtttggcctattatgcaaggaacaaaaccagacaacaagattttccttatgcaaaatgacaaccatttgctagtgtgcactgcaatggagaccaatataggttattgtagtattatacattatttaaattcatttgttcagttatacttacccattcaggtaagctcctaggtagacatcccgttttgaatgttgcatccaattcttcatgtaacttttcgattcaaattg

SEQ ID NO: 59685 - DNA, 296 bp, Glycine max
  unsure (1)..(296): unsure at all n locations
agcttctaaggaggtgagcttagntatgagaggttgtgtgtgtatcttacctctaacttctcaagggaagtttctcaaagaagcttctcaaggaaggtttctcaagaaagcctctcaagggagctacctaatctataaatagaagcctggggaacaacttgtggaactttgatgaatgaaaagtttatgagatacacctcaaagttccacttctttccctctttattccttcaatntcgggcctcccccttctctctttcttttccttcattaaagcatcctcttcaagcttttta

SEQ ID NO: 59686 - DNA, 423 bp, Glycine max
  unsure (1)..(423): unsure at all n locations
ctcgcagattggtcttcgccagtgaaaggatcaatgtgggtccttatttaggcaaatntgatcatcctactaggacgactgagaaaactggggcaaataaagagggtgaggatgagggagaaacccatgctgtgactgccattcctgtacggccaaatttcccaccaacccaacaatatctttactcagccaataacaaactttctccttacccaccacccagttatccacaaaggccatccctaaatctaccacaaagtctgtctaccgcacttccaatgacgaacaccacctttagcacaaaccaaaaacaccaaccaagaagtgaattttgcagcgagaaagcctgtagaattcaccccaattccagtgtcctatgctgacttgctcccatatctacttgataattcaatggtagccata

SEQ ID NO: 59687 - DNA, 459 bp, Glycine max
  unsure (1)..(459): unsure at all n locations
gacaagtgcctctccgacacgatgagcattcttctattatcatgttatgacaaaacagaagaacacaanaaatagaaagcaaaagcctaatgagacccccaaaaaccaaggaaattgaanaggatgcattccatgtctcgtgttgggttggagaaaagtgctacaaggaggatcttgtcgaaacgatttctgcagagtgctttcatagagcaaacacttttttatttttgtcatctacaagcattgcatataattgcttatctgagcaaaataccgaaagccttggatgtgtgacaaaatcatgtattgtattaatagctgatggtggaaaaacatggtacttggcagctagtagtggagtggcatataactgtaggcactctaaaactttgatgaatatagnttcctttatgaatgctgtaacagcttgtcaactgttatattatgtaagtaaaacat

SEQ ID NO: 59688 - DNA, 452 bp, Glycine max
agcttctgtgatcctaacagaatttattcttattattaacagacttcatactccactaatattactaacagcttctaacagaatttggcattatcctgaaacagcactactgctattcgatcctacagaggctacacaaaatcatcaagatatgaaggtctgttagtgctcctcttgggcctgctgtcatgggcttctgctgcagcttcttcctatcagctgaccacaattacaaagagaaacaacattaataactttgctcgacaaaaatctcttgcccctgacagcttagaatgatatactggcagcaaaataggatgaaagatgtaaaaactcactccaccaatactacagttccatcactatccatgcacataaacatgaaagtcttttcctgaacatagaccccagcaacaatttgtgatcggtaagcacatggaagtattacaagt

SEQ ID NO: 59689 - DNA, 444 bp, Glycine max
  unsure (1)..(444): unsure at all n locations
tgagagcattgntatactcttctaattgttcactcttctatggctttaggcaattaaattaatacttgagttgtattaataatctttatcatttgaagagaatcatatgttatcatttgaagaggtcactttgaagttcattagtgatggtgaacatatactcttcatgttgctggtctttaaataagaattaaaactacaatgtttttcaatgagtggatttcttgaagagcttatattgtaattttgtttacaagaagaaaatgtttttatgtgtattcttgtttgtttcattcttctcttgcatctaaaacttgtgttcacaatgttaattaatctaaccatacacgcaatagcaaatcaaattaataatgttgatacacatttatgagttagtgtttttttctttttgaaaaaatgggtagagcttagaagtaatttatg

SEQ ID NO: 59690 - DNA, 436 bp, Glycine max
  unsure (1)..(436): unsure at all n locations
agcgttcacaacaancaagcagattaacattcatacagcacaagctatcacagccaagcaaaacagagcaaaggcagaaaactctggccaaacaccaaccaaaaatcacagctttgtccactcaaagaccccaggaacaattccttcgatccaattacgtaaccggtggatcgactccaaaattttactggaagtcgctaatacataagcctacattttgaccgttgggagctactagcaaacatccagaactgattctgcactgctctgtgcacaaccagcaaaagcctagtatttttctgcacttgtgcaaaatcctgctgcacaatgtcacagcaaaaatctgcacaaaacgcagatttcgaaaaccacacttcccctcatccaatcttgcccaaatcaaatgctacaagtcccaaatcatgtatcaatcatg

SEQ ID NO: 59691 - DNA, 445 bp, Glycine max
  unsure (1)..(445): unsure at all n locations
cggagagactnntttgaaaggatacatggatagaacctactgatggataaagaatactagggaggaagcctaaagatgattntagaaagaatacttgggtgaagtatggagagacttttcaaaaacaatacataggggtagcctgtagaggcttggagaatacttgtctaggagcctatgaaagcttcatgaaaaaagaatattgtagttggtgttattgttagtggataatcctacaagtgtagggactagacgtagcctaaggttgtgggtgaaccaatataaattttgtgtgtgctttatccttccttactaatgattagttgcttttatatctttttcttggtaaacaagttttacaatgttatatctttgatataaaatcataagaagatttcccagactattttcttaaagttcagaagcaacctctactcttcactat

SEQ ID NO: 59692 - DNA, 382 bp, Glycine max
  unsure (1)..(382): unsure at all n locations
agctngagatgaggaagcgttgatgggtgaatcttctctgctnttattggcgaccacagagtggtacctggagatatgtcgcggnggtcaggagaccttgcggacgtcaggtggggtgctattgcccaaaaccaagcttgaccaatcccgtcccaacccgggcatagtcggtcagtgagaacctgtgatgtacctaagcaggtgagctcctagcagtcaacagataaaaggaacaaagaccacaaagcaaggaggcttgtggtggctggccagctgtgaactttgattgatatgtgggttatggcctctggtaatcgattaccaagggtgggtaatcgattacaaggctaaaaaaatgaagacaggaggctaagatggtctc

SEQ ID NO: 59693 - DNA, 437 bp, Glycine max
  unsure (1)..(437): unsure at all n locations
tacccatcacatgtagtactatgtgtttgtcgggcgatggtgcacaacaaggttttcacattcacaaagcgcgcataaacccaccatcccctgttgcccacctacaactgagctcacgtactcccacgtagcccatatcctcgtttctctcaacaccgggtccccatcaatcctcccaagcttccccaacatccaagtaactcaacattcaaacaacacaaaccatcacagccaagaaaacagggcaaaggcagaaaactctgcccaatacaccaaccaaaatcacagcttttctcacttaaagaccccagtaacaattccttggttccaattcgttaaccgctggatcgactccaaacgtttactggaagtctctagtacataagcctacattntgacccgtgggatctactaacaaacattcagaactcattctg

SEQ ID NO: 59694 - DNA, 415 bp, Glycine max
  unsure (1)..(415): unsure at all n locations
agcttcttaaggaagttttcttattatagcttctaaggaagctatctagtctataaatagaagcatgtgtaacacttgttgtaactntgatgaatgagagtcttgtgagacatacttcagagttccacttctctacctcttttattccttcaatttcgtgctcccccctctctctttctctccctctttcttttcctccattgaagcatcctctccaagcttcttatccaaggctcatcttggtggtgaagctccttcttccatggcttattccctaggggatggtgcctcctctcacctcttctcctttgtcttccgctgcatctccatggtggaaaatcaccattaaaggacctcattgaagctcatagatccagcctccatagaagccccacaagcaagcttccatcataca

SEQ ID NO: 59695 - DNA, 267 bp, Glycine max
  unsure (1)..(267): unsure at all n locations
atatgcgagacagagaccaacatggtagctatcttcttccagtaccaagaagagagagggggaaccacggaccacgagcataaaatcgcggatgagtatgcccaagaatacgcggaaaaagaggctaaaggaagggtgagcgactctntacaccaagaggcaaccatggggatggatcggtgtgctcttaccctggacgggaggcaagaacatccccgattgcagcccaagccaaagcgatggcggacacctactccgcccccgaag

SEQ ID NO: 59696 - DNA, 395 bp, Glycine max
  unsure (1)..(395): unsure at all n locations
gtatatctatccaagaaatagaggcacgtctagtctttacggaagatcatgaagaatatggataagcaattgattatcacgatgataaagcaactaatgtcatggcggcctcacttcttatggaaatgttgtctaacagtgttgatgggctggagtgtattatatcaatttaagcttggggggcacataatagngctatcttaacatttttagtttactttctccaaactcaatcaacttgaagttagggggaccatatggtgatgttattaaagcattacaagtctactttctataaacctagtagttctaaaagatccaaattttcacatgcaacacaaccatgttagccataaatcatangcattggtagtagatagaatggtggcaacatg

SEQ ID NO: 59697 - DNA, 447 bp, Glycine max
acttgaaaaatgtcaacaaattatgcatataatgttttttatacattattgcaacacttttacaaaagttgcgtataacctatattgctaaagtcttttggggacatttttatgctttaacaacatgagttatacaaaacatttaaaatgtcgcaaaaatatattgataatatttattcataatttagcaatattttttcaatgttgctagagatttttagcaatatgtttattaaatattagacaaaaatttttactaaaagacacatgttttttcaatacatattgctcttttcggactaactaactaataaattaaaatataaaaaaatatgccctacaattatggctgtgtaaaggtcgctaatattttattatattaagaattctcttcaacaatcatattggtattctctgttcaatttattatatacatattatctttac

SEQ ID NO: 59698 - DNA, 442 bp, Glycine max
  unsure (1)..(442): unsure at all n locations
agctntctgctttgtgcatcatanatagtattattattgtgtaacacagntattgatccaaatggaacagctgttgatctttctgatgagcaggcaaagaaagtctctgacattataaatggatctgccaatgaagctttgagaactctctgtttagctctcaaagatgtaaatggaacccaaggagaaagcagcatccctgaagatagctatactctgatagccattgtgggaatcaaggatcctgtgcgcgctgtggttagggaagctgttaaaacttgtttagctgctggaataactgtccgcatggtaactggtgataacataaatacggctagggctatagctagagaatgtggcattcttacagaggatggtgtggccatagaaggaccccactttcgggacttgtctacagagcaaatgaagagtattataccaa

SEQ ID NO: 59699 - DNA, 396 bp, Glycine max
  unsure (1)..(396): unsure at all n locations
tcggaagaaagtgatgaggtacaagccctaaatgcattatcttgttagagcctgngtagtcgaagagaagttcaagttcatagccatcaaagtctgaaaagagtatgatgaactaagggatgtcaatatggccaccgatgaagccttggaatgagaaaccaagaaggcccgaaaggaacaacacgaccaaagcaaagttttgaggggctttatagggcagcaatagtgagctcaagctctgaagaggtgaaaggaatcatcatgggtcaaaggcatgatcttgaaggatgagctaaaggtttgccttatgtcgaaaagaaatttgtcccaacagttaagcgagactgaagggaatatgtgggccatcatcgataagtgcaaagagaagctaaatct

SEQ ID NO: 59700 - DNA, 419 bp, Glycine max
  unsure (1)..(419): unsure at all n locations
agcttctttctttatatttctattggaacagttttgtcacctgtgtagtcttttaatttctgctcaataatcatatatattcataccgngaataataatcttcctcttgttgtccctgagacatgtttcttcaagttgctcaagtagtatttgtacgtttcttgtaaatgctgtgttacttgaaagagataggagatttcatgtaatcataggtgttgtgtgttgtttgtgatctcatgggtagacatacttggtttaatgatgccacaaaatcatccatcttttttatttctggaatttattttgtaaaatatgaatgttatcaactttttattttagcgtttgtagattacctaattttcatctgagttaatgatgatgtgacatgttatgttaagtggcgggtccaaaaatatggt

SEQ ID NO: 59701 - DNA, 425 bp, Glycine max
agaaactcagctaaagtatgcccgagtcattcatccctatgagatgttgttgttttattggcgatcaaaattgccattccttggattatatggttgaaccaagctcacgcttttacaaaaaggttcatcaagtcaagttgaaatatggaagtaaccgtcttgcaaaattggtgcaaaagatgaatcgagtcacatcactgcttcgtctactgccaaacatatttaggattattgatgtccttgttacttccagtttcaccttgacaaagatgtcatggaccatgttgaaaatctaaattgattcaaccccatatcttgcgtaaaaattcgcaatacttcaactgtacatcattcgcatacatccatgcttttcattggttgcattgctcattgcattctctccttgagaaataaataaaataaat

SEQ ID NO: 59702 - DNA, 348 bp, Glycine max
  unsure (1)..(348): unsure at all n locations
acccgtatcccggtgagagtgtgatccctaaattttgagagaaacgactatcatttagtactcatttttgcgtgaatctctgaagtatggactaaatctaagaaaatgaggatgatgaaggccatgtctgattgtgatagccacttagccaaaaagctgaccatgtgcctgaatgaattatcccttgtacctagtttgagctgaatgaattattgattgattgaaccctgagcctatacagtgttatctcctgctaccttgacttaggttgtaggagagcatcatccacaggaagcgtggttcanagcanatttgtcccanatttgngggagtaattatcaaggtaaa

SEQ ID NO: 59703 - DNA, 428 bp, Glycine max
  unsure (1)..(428): unsure at all n locations
ctaagcttcagccaatggacttaccttgaattaattcccttgaattttcttttattcttgnttccctttccttgatgtgaagctcactacaagccttaaatgaaaaaccatgatatcaccatatccttaaggaattctggagctttggaattgttttgggaataagtgtggggggttcttgtttaattggataactcgttctgttggctatgcttcatgatggattttgggccatactctgatgtacattgtatattggctaaatgttggacatcctgactgataatgttgcactcatatgcttttgagcttatttatactattcctacacttaatactataatctaccaacttgcgtgggtattcttttcattggctcaacaagacgatactacctgttgctctccctcgatcactatcttaatctt

SEQ ID NO: 59704 - DNA, 442 bp, Glycine max
  unsure (1)..(442): unsure at all n locations
tccaacgctctgtcaagctctttataatctggatgtaatctangatctctatcatatactatgctagatggcacaccattgtacctgacaaccttacttatatacaagggggcaactttttcaaggaaatctgatattaaagggaatgaagtgagcagacttagtcaatctatcaacaataacccagataaaatctaaacctctaggggttctaggtagtcctactacaaaatccatggaaatattgtcccacttccactggngtatctctaagggttgaacttccctgaaggtctttgatgttctatcttagccttctgatagactangcatgcatacacaaactcactaacctctctctttcatgtgggccaccaaaacatcgtctttaaatcatgatacatcttggtagcaccaggatggatgctcaaattactcctat

SEQ ID NO: 59705 - DNA, 443 bp, Glycine max
  unsure (1)..(443): unsure at all n locations
ctcccgatatatcatgggcctcaatcgtacacccatgtcattatgttatttcgtctgaatncgaccagagcttttgtgtttaatttcgagcgttttgataaattatgtgcctgaatcggacatccgagtgaaaagntatgaccatttgaatttctcgagatcttgcacttttcaattgcgagtgcccttatatatcattggccacaatagtatatccattgcaaaagttatggccgtctgaattggaccagagctttcgtgttcaattccgagcgcctcgatatattatgtgcctgaatcggacatacgagtgaaatgttatgaccatctgaatttctctagaacttacgtttttcaatttcgagtgactcgatatatcatgggcctcaatcgtacacccatgttaaaagttatggtcgtctgaattcgaccagagcttttgt

SEQ ID NO: 59706 - DNA, 426 bp, Glycine max
  unsure (1)..(426): unsure at all n locations
tctcagagtcacctgcggcatgcaagcttccttaagaagattcctanagaagctagattctagctacacatacctctcttatagctaaagctcacctcttgagatgagaagctagagcttaactacacaccccctattatagctaagctcacccccattgacaaaaacatgaaaataaaaaaaaaaatccttattacaaagacaacctcaaatgccccgaaataaaaggctaaaaccctatactactagaatggccaaaatacaaggccttgacgaaggaaaaacctattctaatatttacaaagataagcgggctcatacttagcccatgggctcgaaatctaccctaaggctcatgagaaccctagggcctttccttggatctctagcccaatctacttggagtcttctaaccaatgcccttac

SEQ ID NO: 59707 - DNA, 363 bp, Glycine max
ctcattgactccagatagctgcaaagaaggacctatatctgtatggtgatctgcaaaagaacatagaccactgactgttgcaacagatgcagatttatgattcatggcaagctgagttactacgttgaccagagcatcaagatttccctcaagctctttattttcagtagatgaagattaatccgtggccacctcatggactcctctaaggacaataacataatttcttgcactgaattggtgggagatagaagccatcttctcaatcaaattcctagcctcagcaggggtcatatcaccaagagctccaccactggtagcactaaacatactcctttccatgttgctaagaccctcatagaa

SEQ ID NO: 59708 - DNA, 393 bp, Glycine max
  unsure (1)..(393): unsure at all n locations
gcacgcagctgcagcttagccaactgtaaactgggcaaaattcttgaatgctttngtgggaaaagggatcattcggatgccagtgaatggatttactcangccatttctggtggctattattgtcctggacctaaaaataatctatttgacctagggccacttcaagaaaaaggcttaactattttgattcaacatgggaagtganggtatatcattatgagaaagggataattatgcagtcagatatgagtggaaatagaatgttttctgtgttggctaccatgataccaaaagccttcttgtgtttccaaattgtatcagaaaatgaatctcatctttggcattgcccgcttggtcacttangctataacggatngaggacactttttgat

SEQ ID NO: 59709 - DNA, 446 bp, Glycine max
  unsure (1)..(446): unsure at all n locations
ctaagcttcgccgtcattntaagtgtttttcaatcatatattttgttggactaaggggagtgggtctgtatgatgaatanggactnttttcctccacccagcatatttttttaaaactaaaaataactctacatatagtctatacggattatcaatcatcaatttaaaaataatggttcatataagtcttgaacataaactatcgcattattagtatgatgctctaaataactaaattaataggtcaattatgttaaaaaataattaatattgttacatataatactaaaatttctaatgtatatttaatatgcatataagtttacataacaattaattttgatctaataatattttttttaacatatataaattttaaattccgtaaggcccatatggatttacaatccgtataagctatacgtaaggataatttttatttttcg

SEQ ID NO: 59710 - DNA, 462 bp, Glycine max
  unsure (1)..(462): unsure at all n locations
tctcattactcaagcttcacgtcttttgaccgactataggacaaatccttgatntttatttttgttagtcacacttaaagtttcttgtccctcccatccccacattcgtacctggtgatattaaacaagacaaaatttaaatacagactcttaagtattttctttcttcaataagagatgacctaggtaaaacttctactattaagcagattatctaggtaaaacttcaattctgatagagaataatgctagtccgtaataataatgataggtaataccttcaagaggagggcattgagtttggcatcttctcccaaacaatagccatgagactccaaaatatcctcaaacaaaaactcgagtctgtaacagtcgccattatgccacacccagaagtccagcctctttcttaggggcaggacccagcccgcgacgccctcccaggaatcgaggacgctcatg

SEQ ID NO: 59711 - DNA, 320 bp, Glycine max
  unsure (1)..(320): unsure at all n locations
agagaagcagacagacacgggcaaaagcgaaacgagatagccgcagacctcgccaggtgggacgaaaaggaaaaaaggcgtcaatcgcgaggcggcacacaacgccggagaagcacgccaaacagagcacaaacagagaaggggagagaagatccccctggcgaagacgccgcctccctacgaagagaccataaatggagccaccgactgccacaccaaaggaagnggaagaaacacagtgcatgatccaaggacaggaaagggcggggaaaccaacggacggaagcacccaatccaagaactctcaagaaacggaagca

SEQ ID NO: 59712 - DNA, 418 bp, Glycine max
tataaaactcagctctcagtctgaatatgggattatccttcggcatctattgttatttagagattatagcttccagatgaggaagcgcatatactgcagtaagtttttgtaaacttaaggcttgcatcatccccacatctcatcaacactaccagtttaatcttcctgccccacttactaatcaaattcttttggctagacctggtgtttctgtacattgagaaagtggaagcaagcttgaatggaaaaaatattagcaattgtacttccaaggaggaggtcttccgctatatcttgacacttcattctcttttaaagtatcctcctggagactaccctgataatgcaagagaagacattgtgaaggggtttgttagaaaatgttcattcatcaagtatttcctactgtgattcattg

SEQ ID NO: 59713 - DNA, 423 bp, Glycine max
  unsure (1)..(423): unsure at all n locations
agagacgacccgcggcatgcaagcttcaagaaacaaaatatcctttctcttagattctgcacacttatcaccgncaaagntggatgatatgataggatgtgaaaagctcaacaacttgacgttattgatttcagggcagcatctgttctcacaccatgactagtacactgaaccactgactctgccattaacatcttgttcccacaaacaacataggtcatgttgtactaccagcgtatcatgcagcaatactaccttgtttagatctggaaagagctgtgacggtgcacaaaaatcatagtatgaaacattcctgaatgatcactgagcattctcgtatctattactaaaatcttactcgcggtctcaaactgactacactcctatttcatgtcggtgcgttctaagatcttgcatgaaagt

SEQ ID NO: 59714 - DNA, 426 bp, Glycine max
  unsure (1)..(426): unsure at all n locations
taatgtgtaattggatataatataaatcgaaaataatttatgtattggcgacatactcatgatatgnaatgtgattntcaattctagctaggctagctagctaggtgtgcaagtagccacacgcccacaccatttttgattttatgattttatacatttattgtatggattaactcatgatcaatttctaacctcaaagccttttttgtatgctggtaattaatgtatgaaaaagtgagttcagtgggggagaaggaatggtacttcttttgcataagagggagaaaatacaggaacagcataaggcctaatagagtgacaggttctggattttggaaagccacacggattgatatacctatattctgtgttaaagaaccccagaatgcattggctaaagaaatcattgtctattatcgtggaagt

SEQ ID NO: 59715 - DNA, 342 bp, Glycine max
  unsure (1)..(342): unsure at all n locations
aagactttaagatcaagcatcaagaatccaatccgagattcaagatgcaagagaagaaatcaagaagctacaagtcatgacttcatataggataagtattataagaatttttcaaaaaccaaatagagcagttgtggtttacaaaaagaaattgctcagattttctaagtcaccagagtgattactctctggttatagattaccagttatcactaatcgattaccagtgaccagtttggtcttcaaaatgttttcaaatgatttataacgttccnaaatgatgttcaaatagtgttatcggatacactatattattaaacgactacaagcgaatctgaacat

SEQ ID NO: 59716 - DNA, 452 bp, Glycine max
  unsure (1)..(452): unsure at all n locations
ctcttattntccactgcttgcaggcaaggatgtatgttgtcttgctcctccaagcacaactatcgcattacaaatgacaattagctttgtgggctcaatagttgtgtcttgtaagtgagacaaaacaagtgcatgaaccaagtggcaaaacatagaaaaaaattattaatacttgaagatttcaatccatgagggcaacttttgtaacttagactcttatttgtatcaagtgtttttgttaaaataatgcttcattctcatatctttcatgtcaataaagtcattaagacaactcttagggtcttcatatgaccctcaaacgcatgaaccaagtggcaaaacatagaaaaaattactaaaacctgaagatttttattcataaaaacagattctggtacttagattcttatttggctgacggatattttgtaaaattaaatttcattatcata

SEQ ID NO: 59717 - DNA, 154 bp, Glycine max
  unsure (1)..(154): unsure at all n locations
attcatagttcattttaaggatngaactantataaatcttgtctttcattcagactttctcaattcctagttttgcaatcaatcctgaatattggaattgatgattattttttatccaactatgattttaaagggttttgagccattgattctt

SEQ ID NO: 59718 - DNA, 179 bp, Glycine max
  unsure (1)..(179): unsure at all n locations
agcttcatctcctctntctacttctcttntctatgctttcaaagaatataattaccattgntgataatttctagtgacattggaggccaacaaacatacccgtggcggggggtgtcctatgaatcatcacctttggttttttctaaccattctcatcatcactgtgntgcttttggcga

SEQ ID NO: 59719 - DNA, 372 bp, Glycine max
tgctatctagcaatagtaagggtatacaaagatatttgctatctcaccacatggacgtgaggataaacagagaaaatatgaggtagagaattgcatcacaatcttactaagcgtcaaaaaactaaagaagctcttcgcaacaaattcagagcgtatgatgaaagaatgcgatgcaacaagacagtaagcactgtgctcgccgaataaaacaaagaaaatgaaaaggcgacaattcttaaaccgagatataaatgggctaagataagaaaacacgaatatgtgatataaaaacaacacgcagaacagcatgaaatccaagctcctattttgtggaacagacaaaaatctctgatagtggaatacctactacaa

SEQ ID NO: 59720 - DNA, 322 bp, Glycine max
  unsure (1)..(322): unsure at all n locations
agctngcttgtctctngatcatacaagngntattttaanaacctttatgaaaactctattaattntcattcataggacgacatagntagtatctgtcgtctgcatatctgtttgtgaaaatcatttctttgtaaaatagttatcatatttgctaacacactattcaaacccccttctagcgtgatccttgatatttcggtggtatatctcatgattactaccataagctcatagctgtagaaacaacatgagaatatggagacgtttgatatgatcaaacacctcgaaaggggtacaaggtttgacacatcatggngggggg

SEQ ID NO: 59721 - DNA, 381 bp, Glycine max
tggggtatatcttaaatctcttggtgaatatttatctaaagagcaattattttatcattgtacttgtgtgtctatgtgatttgatccgcgtctcacattatcggcatatatcatagttaacttgctaggcttgtaccattgttcaccatgatcttcttccttggattaatgtttggtttctacgtaaggttttggttgttattaaaaattgatgtggtgctctttcttcttgcttacgtgaaaattcttatttttagcacaagatgagtagctcaattgggcttcgtgcaagatcgaatcatatacccctttatactattaatgagtcagatgatgatgcagatattttgcctcgtaaaagagggaaacctaacgaaaata

SEQ ID NO: 59722 - DNA, 439 bp, Glycine max
  unsure (1)..(439): unsure at all n locations
agcttccgntttctagagcattttttatttatttatcttagccnctgctttcgcggagcttaagaaaaacgtcattggttcttctttctttcttccaaagccatttctgaagttccaagcactttctccatcacctaaaaccaccattagccaccacaaaccatcattgttctccattgaaaacccacatcgagaggaacccttcaaccgaagtggaatcttccaacttggcttgcggtttcggtagagaacagaaactctaatctgaccttttgttttctttcgaggtaaccatggttctatgcttgtttcttgttagtttcatcttgtctttgcgtcttttcatgagaggaattatcccacccatgatctagaagtggctgctggagtttttgcccttaagatttggagacattatctggttggctctaagttcaag

SEQ ID NO: 59723 - DNA, 446 bp, Glycine max
cgagccttgaatcttgattcttgattcctgatatcatattttctcttgaaccttgaagtgttcttgattcaatcttgaacatcttgaactcattctttaattcttgagatcatcatctttgttatcatgaagtgttcttgacctttgagctttctatcatcacctttgttatcatcaaaacttctttgaatcaatcttgattcatcatgaagcttgcttctacaatctccccctttttgatgatgacaacttctgaaatcaagaaacacacacactttttcctagtcgatcactctcatggatttccattctccccctttgtttttgaatttatgcttctcttaaaattaagttgattactcatgtgagttcttgatttaatccctatttctctccccctctggcatcaacaaaaaatccaaagtgcgtaacaaatttaaagcatg

SEQ ID NO: 59724 - DNA, 249 bp, Glycine max
  unsure (1)..(249): unsure at all n locations
gcaagcttcaggatgttaattgcttcagatggtgatataacgacaaaggtctgtgtggtggncagcagaggagcataaaccacagagtctagcgacaggtgcagaattttgattcatggccagttgggttaccaggttaaccaaggcatctagtttgccatgcatagcataagtatgccctagccattcatctctatgagatgttgtcgaagtatngacaatcaagatttctattccttggattatggg

SEQ ID NO: 59725 - DNA, 433 bp, Glycine max
  unsure (1)..(433): unsure at all n locations
ggcgtccacattttatatagacactgtttattgtctactatcatngnnatcatttctttctccatcattgagggtgctacctaggctgccaggtctctccacctttgggtgtatactttgaaagatttcatgcccctttttgcacatgttatgtagttgcatcctatccggagccatatcagaattgtactgacactgcctaacgaacgcaaccattagtgatgcaagttccattggagcttgtaggcctaggatcttcttcatcaatggattcctttgcttcttggaagatgaatggcagtggaatggagaaaggaagagagagaggagacgccacttcaaggagaagatgagtctagaaaaagctcaccaccatangaggccatggataatagcttggaggaagaacgagatgaatgaacggagagggaga

SEQ ID NO: 59726 - DNA, 396 bp, Glycine max
  unsure (1)..(396): unsure at all n locations
cgcaacctttgagactgaactttaagcgctctctgtgtgctatgcgcatgtatattctaaggcgcgtaagcgaaggatctgtagccccatcatatttcaacacttgactaatgtatctaagggaatttgagttctttcattatagatggcatcgaggaaaaaggaaaaccagngtgagcacagatgacatcccttcaccatctactccagtgcctccgtttgcatcagcaggaccagaggcccagagctcccaaatcatanaaactatgttgcanagcttatttcagggacaagttattattatgcaaagcgtacagatggtagctcctccaaggtccattctatcagtagagtagttccttgagcaggtggccctgcctggagcttaaccctcga

SEQ ID NO: 59727 - DNA, 353 bp, Glycine max
  unsure (1)..(353): unsure at all n locations
gatgaatgaaagtcttatgagacacacttcaaagttctacttctccccctcttntattctttcaatttcgtgctcccccctctctctttctctccctctttcttttcctccattgaagcatccttccaagcttcttatccaaggctcatcttggtggtgaagctccttcttccatggcttattccctagtggatggcgcctcccttctcctcttctcctttgccttccgctgcatctccatggtgaaaaatcaccattgaaggacctcattgaagctcaaagatccagcctccatagaagctccacaagcaagcttccatcaagtggtgatcagagcacaagagcttcaagta

SEQ ID NO: 59728 - DNA, 456 bp, Glycine max
  unsure (1)..(456): unsure at all n locations
tacaccacaacatgccctanaaccttacttggagaagtntttattgtttattaagcagaactattccatgaaatagaaagaagtcgacagcagtagtagtaataaaagatgctaaccctgacgataattttgtattgaagagggtgaggaagcttgtatccggcaaacaacacattggggtctctgtgaagctgcctgaacatgaaccataaaacaaagaatagttagggtttcgcggtgacactgagaagtgaaaagtaaggaggaaggagaatggaggtacatgcggaggatgttgccgatagtgtgctcctctctctcgatggtgaaggacgcggcattgatgatctttgtgtccctctcataagacaaccctggttttcgaaattgaaaaggaaaaaaaaaaaaaaaaagaaaacatggagttcataaagtgaaaatggaagaaatataata

SEQ ID NO: 59729 - DNA, 451 bp, Glycine max
  unsure (1)..(451): unsure at all n locations
aagctctcaagcaacatctgatatntagtaaatttgtccaattatgttatgtctttcttttcattaaaagaacaaacataaaaatataagtgaaatttgagatgaaaagaaacatctctcttttgttatgttttattatttatctttgatttaaatgtattcagtcaaaaacatcttttatttacatttaatatatatataatttgatctataagaacatagcacgtatttcaatatcaacaaatacatcggtcataaagaatgaattaaccttgattcgttaatcggaataatattgaatatgatttcattaaataataatatattgaatgtgaattttataaataaaaaaataattaattaaattttttgataaaaactattatctattaaatttataatatttttttcaataaaaaattattataaaaaagttgaatcatataaaaaa

SEQ ID NO: 59730 - DNA, 282 bp, Glycine max
  unsure (1)..(282): unsure at all n locations
agcttaataaatctatatatggtttaaaacaagcttcccgtcagtggtaccttaagtttcatgggataatttcttcatttggntttgatgaaaaccccattgatcaatacataatcacaaagtcaatgggaagaaaatattgtttctttgttgatatgtagatgatattttaacttgagcaaatgattaaaggttgctacatgagatgaagacaattttgacatgaaggatatgggtgatgaatcttatgtcattggcattaagattcatagagatagacct

SEQ ID NO: 59731 - DNA, 424 bp, Glycine max
cagcttaactaaggggagatggaccatttcaagtgcttgtaagtttattgacaatgcttacaaagttgagctgcccggtgagtataatgttagttccaccttcaatgtctctgatttatctctttttgatgcagatggagaatccgatttgaggacaaatccttctcaagagggagagaatgatgaggacatgttcaagagcaagggcaaggatccacttgaaggacttggaggacctatgacaagggctagagcaaggaaagccaaggaagctcttcaacaagtgttgtccatactatttgaatacaagcccaagtttcaaggagaaaagtccaaggttgtgagttgtatcatggcccaaatggaggaggactaaatgacatcactttgtctcaattttagagtggttaagtttgctaaataa

SEQ ID NO: 59732 - DNA, 448 bp, Glycine max
  unsure (1)..(448): unsure at all n locations
tcttacagcacgcagctgccctagcgcatacctttgcagacttgaaatttctacgttctttgcattctgngaagnnagatgagagaccttnctatctaagttaggcgagggcgccaatgttgctgggatgcttgacttgactgtgatgtctttgcatgcctattatgcgaataagaagatatatctttatanaacgtaagcgcgtatagggatactagcgtacaatagaagttctatctatttacctaacagctattttcttcttctatagtacttcagagaagtcattcgacgaacttaactcttctttagatgaaattgacttatgcatgagcaaatttatagaagctcttcgttaagttttcaaaaggctgattntaacttataggctgactaattntgacttatgagagaagctctagctctctattntttcttcttttatata

SEQ ID NO: 59733 - DNA, 419 bp, Glycine max
aatttaattaacggaaaagtattataatatctccaatctttaaatcttcaaaattccaatatctataagtaaagcccacattttctggaaatcacacctaagatattttttttttgtcatgagttagacacttttggtgttttccaattcattgaatcatatattaatcatactcttaatgtgtgaatattgttagttcaagaaaattttacgctcgaagaaaatgaaatacaaaattgtttagagtttcaagaaaattccattatcgtgataaaaaaaaagcctaaaatttaacttttatgtaacatatataaacatactaaaaaaacaactaaatacaattttgttttgttgttgaatacatcaagatacaaacaaactagcattcatccatataactgaatgcattcgaacatttg

SEQ ID NO: 59734 - DNA, 380 bp, Glycine max
  unsure (1)..(380): unsure at all n locations
agttttgaacttcgattcaaatgtttcttgttaacacaggaagctccaactccatgaattggatgaattgtggtttcaagcttatgagaattccaagctntataagcaaagagtaaaaatttatcatgacaaaaagttgtcaaaaagaaattttcagcttggtcaacaggtattgttatttaatgatagattaagatgggttccaggtaatctgaaatccaagtggttcggaccattcatcatcaaagaagttatgccacatggagcattgatattggaggacccaactaccacaaagacatggaccgtcgatggcaacataattaaacactatcttgatggatatttcaagaggcttacctctattggccaactgcaag

SEQ ID NO: 59735 - DNA, 449 bp, Glycine max
  unsure (1)..(449): unsure at all n locations
agcttcaatggaagaagactgttgcgtgttttnttaagaagnngggggcattccttccagcgtgtacctaaattttcctcagttaaagatcctccccttcagaagacagtgaaagctcgttaggaagatgtcaatgcaattgtgactttccaaaacaattaaaaaaaatttcttaaaaaattgaagacaggtaactgaccccatcctattgcaaacaagatttgcaagctgatcagttgcatctttcgtggtaatccagttatttgaaagacttgctaccctattttgcagttctctcaaaccaggatctctagatttatcaacagcaaccactaggattgacaagtcatcgctaggttcaattgacatcagtgattcaaatgacggaatcataccaacattctgcagatcagtacttatagtccatgtatatacatccatcccatgga

SEQ ID NO: 59736 - DNA, 421 bp, Glycine max
  unsure (1)..(421): unsure at all n locations
agctngacaaantaacaanncaatgtctctaatattatctcctttttcttcngnncntcatcttcttggattgaatgttttgaaagaaatttatgtatatttgttatatgaaattggcccccgcaaacatcaaagtgtgggtattaaatttaaagtgcagcaaaggtattcgaaagattcccccttataaaggggttcataagggggtggtctaccctcaagccagggctcgtcatcacaaagcgagggttggcggtagggtggaaatgagccaagccaagccaagctttattaggcttgagctcggcttgagttgaatatgtaaggcttgagcttggctcattacctgtcataggcttttttttaaggctcggctcggcttacataaaagtctggnttggcccactagcttatttaaaag

SEQ ID NO: 59737 - DNA, 438 bp, Glycine max
  unsure (1)..(438): unsure at all n locations
ccctcagctggacttcaggctctccaattctattttngtggtaaggttcaaaagatggaaggcataaagctttggtgcatcactcttgctcctcacagcaaactgaatgtccatgtcaaagctttcggatgataatattgagatcttgccaatactttcttttattccatgaacataaccgatatggtagcttcttttacgcctgctgattaagtcatctacggctttcggtttaatatcatggaaggcaatgaggtctccaacctcaggctcatattttccattcacatcattgctgcttctgttcacagatatttggtagaacaagctcttggtaggtatgaagcttcttgacctctccagttcaatgcttgagatttccaaaaagaagcccgcgcacacctttcaagatcgaacatagatcgccccgagattctc

SEQ ID NO: 59738 - DNA, 289 bp, Glycine max
ctctcctcctgccgtagcaacaaggagaagaggattgatggaactttaagaatgggggcacctacttatatagtgctggaaaggctctcaatcaatcctacatgcaatcttctctgttggctcaaaaagtgcatttcttattgaagaggacaaggcctcaaaatcatacccatttgaaacccctcacgttagtcactaatatgttgacagtggggaagatataaaaatgaaatcaatgagatttatataagaagttaatcttcgcgcctaatagatgaaaaacctgtat

SEQ ID NO: 59739 - DNA, 391 bp, Glycine max
aggatatgtaatttattatttacgatatctaagttatttgttttttcccttttattgccttagtaccatccttttgcattatctcatattgcttttttctgtttcttcattctgtattagatttgacagtgactggaaaaaggttgaagcatttgttgtatcaaagacagtcatccaggtgatttcaaatgcaagttgtgactggatatctacattagctgctgtttctgggttgatatccataaatgttgaggattgaatcacgcatcttatagttcttcgaagtgtgtttgattatgttacattaagtattttggcactttccaattaagaattggttattggcatgaaatgcccaacatataacatttcttgacttgacgagctttca

SEQ ID NO: 59740 - DNA, 386 bp, Glycine max
ggagctggatcttgagctttttgttttttttatgggaatacccccaggaggtgtgtgttaaacatacgatacatcgctagaggagcctcatccctatggaataagccatggaagaagagcttaccaccagatagccttggatttaacttgagaggatgcttcatgttgataaaaagagggagaaaataataggggggagcatgtattgtagaagaaaaaggagagaattgactttgagttgtgttctaaagactctcattatcaagtttcaacggtgttcacatgcttcttttaagactaggtagcttcttgagaagcttcttgagaaactttctttgaagctccttgaaaaacttcttgtaagctgagctagctaacaccccctt

SEQ ID NO: 59741 - DNA, 429 bp, Glycine max
agtcacctgaggcatgcaagcttgaaggcaaactggatgcgtggtcaacttgttacctatctggccttgaatcaaaaatctgtacctgtcacaagggtttgtggtttgtgctcctctgctgaccaccatacagacctttgcccttccatgcagcaacctggagcaattgagcagcctgaagcttatgctgcaaatatttacaatagacctcctcaacctcaacagcaaaatcaaccacagcaaagcaattatgacctttccagcaacagatacaaccctggatggaggaatcaccctaacctcagatggtccacccctcagcaacaacaacagcagcctgctccttccttccaaaatgctgctggcccaagcagaccatacattcctccaccaatccaacaacagcaacaaccccagaaacaaccaaca

SEQ ID NO: 59742 - DNA, 397 bp, Glycine max
  unsure (1)..(397): unsure at all n locations
ggacactactcttaaagcaaanatggcatattacctcctcccatatatacaaacatcaatgtgaaattagagcaagcttatgcgcatatttccttacgaacattctcttgcacaagatattctattaactaagagaaatgcacccatatacaatcaaggcagcttcgttacctagattatatacacgtacttccaaggtgtatttgttacttacatcacacacatcgccttggctaaatatacatacatgcatactcaaagcattttggggtaccaaaaatngcacatgtgcacatcttggtatttctaatacctatacatacacaaacttcatgatgaatcttgactatctacacaataaggtgctacatatcatgctcttttcaagttttttttt

SEQ ID NO: 59743 - DNA, 383 bp, Glycine max
  unsure (1)..(383): unsure at all n locations
cccgtggaggcgagaattttcagagagacttctatcaacaaaagaaaagaaaagtgtgtcataattaccttataaaccagctgatgatagaagctctttcatattagtttttttcaaaagatatttgtagattatgtataaactagcattaacttatagagaagggtattcaagttttttctttttggtgtctttttgtagtaggacttctaaatacatttatccagatagacccttaatattaatatatatcaacaatacttagaatcttatgagactgagcaggattattgtaggcaagtagtatttgactcctacggttctctttntgatctcttgcaatctgagctaacatgaccgtggagtaaatattccgaaatgac

SEQ ID NO: 59744 - DNA, 375 bp, Glycine max
  unsure (1)..(375): unsure at all n locations
tctactccttggcacttctggtgctgctgtattaatatataagatttgtctatctattaaacaaaaaacttattaaatgagaattgttctcacttattgacattcatttagtcaaatgatcactcggtgatagatttctaatacagagtgattatttttcctataaaaaatcataaaacaactcatgctccaagtaaattatacctctttagaatcaacacaaaaggaatttgacagcacacatttatcgtaaagaatacataccattacatatataaataataaattctaaactgtactgcaccactcatcttattctgtatgtataatacatacttatngcataacttcttcgcaatgaattagttcatattc

SEQ ID NO: 59745 - DNA, 440 bp, Glycine max
  unsure (1)..(440): unsure at all n locations
agctngtggtaagacataacacttgtttaacacttatatgattttgattagtgtcatcaaaccttagggttggatgatcttaaacctaacatgagcaataaaaggtaaatttatagaatcaaatatctaattcacttaattgagtatgatacttgaattattataaaaaaaaattattttttcgatttttattaataaaaaagataaatttatacagaatattatgaatttacaatacttttatcttttttaagactcttatcatacgtttttattttatttttattacactcttatcttatgctcataaaatatattttattttatctaacattatatgtatttttcaaaagagaaaaacttatttttntatcagcaaattttaatttattagaatattaattntggtactatgcctgttttttctctcataatattaa

SEQ ID NO: 59746 - DNA, 485 bp, Glycine max
  unsure (1)..(485): unsure at all n locations
tcttcacgttggaatatgaatgtagcatatatatctcaagacccttaggtgctttgctgatggcttcttcccgttccaagcttcagttggagtcttgtcttttatagacttagttggccatctgttgagtatgtaaacagcagtgtagactgcttcagcccagaatgtgttaggtagtcccttctccttgagcatcgatctagctatttccataaatgtgcgattctntctgtcggacactccattntgttgaggagaatatgcgactataagttgtcgcttaatctttcaaactcacgaaaggtgtactctttgccgcgatcacttcttagtacttttatctattttccactttgagtttcagcaagggccttgaactttttgaatactccaaagacttctgatttttcttttagaaaatatgctcatgtcattctagagaagtcatcaatgaagagtatgaagtacctgttggtctcatgtga

SEQ ID NO: 59747 - DNA, 470 bp, Glycine max
  unsure (1)..(470): unsure at all n locations
agacgagagcactgagctgcagctttaaatgtgcagatatatcangagctgtgtttttatattactgcgatcccattaaaggaagttctcttaagacctttnttgtaagttgcatgctattatttacggatgttctgatatgtgtgcaatagatctgtgcccctgttagacataaaaggaaattgtacgccatattatttattgtctgttgatacttcacactctttcaaatcattttatacctctctaatcaattaagtaatttcagctgcttgaatttttcatagttacttgtattctattcatgttattgcatgtctccttctagtttgttcatttgcaaataatcctaaatgtcattgtcctccaattataagccgaggcattttcttaagttgagtgagaacccttatacctttccttcattagttngcttcaattacatttttacttcacaatatttgatatat

SEQ ID NO: 59748 - DNA, 192 bp, Glycine max
  unsure (1)..(192): unsure at all n locations
ctcatcaggtgataattatttcttttttattagagattattcgtcatgcaatatatatatatatatatttgcggagagaataaaatataatnaaaaaattgtcttctaatataatttttatattatcaattaaaggtatcgcttatagcaacccgttaatttatcggatttctctttgaattattcttatat

SEQ ID NO: 59749 - DNA, 463 bp, Glycine max
  unsure (1)..(463): unsure at all n locations
agcttagaacagaaacttagtacccaaattccttgtttatgttgttcacaggagcagnggcagcctttccaccaccatattttgccacanattcatctttgacacgctctaganaagccatgggtaactgtcttccaattgattcatctgcaacaacacaatatgctgcaaaattccgaaagttcgatattntagaacactaccaaactcaaaaaaaaattaaggttcacctctacaaaagcagtatcagttgataaaattagaacttanaagaaaaccaataaaagcagaaatgcagaaacatagttatcaatcttcgatagaggcactttgcagctccaaaagagctatagcaagataacagatagctgaatgactgcaattctgaagattctacgtacannataaatatttttacaacatatatacatgatcaaaagtgaaaaattatctaaatttaata

SEQ ID NO: 59750 - DNA, 415 bp, Glycine max
taaagtttttgctgctaaatatctccaaatggtgatctttgccctgtacaattgaaacaatagtatctgcagtttctagtgcatgaagaatttggtgtgttaggatgttgtaatctttttatatcaaatttaaacttattacctgcggtgtgtatgtcatagaagttgatgtttattctcttgcactcagctattatcttctactcattttagcatactgcctttatgaactagatatcgtgtatcaaaaacggcatctggaaaacatgtctcaataccatggtgatgaaatggagtatgcggcagacgataatgaaatggctgaggtagaataggatatgtatctccgtggcagagcatttggtgaatcatattcatatgatgacgacgactacgaatatgaccctttggtttg

SEQ ID NO: 59751 - DNA, 459 bp, Glycine max
  unsure (1)..(459): unsure at all n locations
agcttggagttgcatagngctactaatgtttctgtgtttagntactctntcatgccgncgacaattaacttggggtcctggctttatgatatttaagtataatgtggtaacctgtttcaagtttggtctttggaaaatgtgtaaaaggatattcatgttgattaatacaaatgattcaacacccataggatacgaagagacttttggtgtattgctaaactgttgattactgaatctgatggaaggctaactggatgatgtctactcctatatcaatgatatagagtcctgngaaatggagggtttttgcttataaaaaattcaaatattgaaagttttatttggttaatatcttggtttagtgaagattctaataagcaagaagaaaagacgcacttatcttcaaataattgtagtttctcctacattgaaaaattcaaataaaaagggtgatccttt

SEQ ID NO: 59752 - DNA, 434 bp, Glycine max
  unsure (1)..(434): unsure at all n locations
tttgtgtgagtaaagntctagagtgtctctacattatgacaanaagcaattaattagtaagcatgcaagctctctgagacacacacatgtgccacacacacacacatatatatatatatatatattgtagttcatgaagctgataaagaatggcttcatgatgcacatatataatcattgtcctacaagagttatattgccgtggtatctcatacaagcctctaaagaaaacaaaatctcacgttaaacagaggcaacagaactgacccagagattaatagagagaaagtccaatgaaactaaaaaacaggcacattataaaccaacgttttatgtaagctgtgatcttaaattntaaattcaaaataatatctaaaagataatttanataaatcacanattaagtggaaatcttgcaaggggtcattattatc

SEQ ID NO: 59753 - DNA, 421 bp, Glycine max
  unsure (1)..(421): unsure at all n locations
taatactcttgctccatttatattatttaacgcatnttgattggctactttatctttnttttttccaccaagctattaatttgaggagagagagctaatttattntaaggatgtttgaaagggttgttttacatttggctgncgcaatcgtatatggttttactaacccaaacgaaaactaataaatatgtgggggcatcatanagatagcttntttaggatatgattntctgagtaatgaaacgaaatataaaaatatattatgattgaaattagttattggagatgggagcacgcgtgcgaagccatcgcttcgttctgtgagtggcggctcgtgaaggtgttgatggaaggaaaggangtgaagtggtggatggagagtgaacggttganaggacttgatgagaaaaatctggtagaa

SEQ ID NO: 59754 - DNA, 410 bp, Glycine max
  unsure (1)..(410): unsure at all n locations
atcaagtgatggcaagctggctctaattgatgtgagaaagctgttgaagattatcaagcgagctctggggaagagagtctcataggtaaagcattcgggtggagacatagtagagcctcacagaagatgtgcacggatttaagagcaatcttttctcttgtgatatangagctgaacgaattgtctgtggaggtgaagaaggtgttgtcaggatctggaatttcacagaagctttggaaattgaacggagagcccgtgcattaagaggaatacgattagacaacagaatgaggcgacggaaactccagacagagctgagcaataaaagtggtcggagtgatcagtgttcagttgcagcgaagaagaatgctgtcactcgtatttggcccaaacgtggtatgagtggaaag

SEQ ID NO: 59755 - DNA, 420 bp, Glycine max
  unsure (1)..(420): unsure at all n locations
agcttcccaccaatggtattngaagtttaataattccattgtttccttnggaattatggagaatattattgatcagtgtatatagctaaagggtagtggtagtaagggtatttttctaattctgtatgttgatgatatcttgcttgtaactaatgatcttggtcttcttcatgagactaagaagtttctctctagccaatttgaaatgaaagatatatgtgtggcacgctatgttataacgatagaaatattctgaaatagatcacaaggattgttagacttgtcttanaaagcatatatcaataaagtactagagaaattcaggatggaaacatgctcagcatcacctattccatttcagaaaggagagtaaattagtctcacataatgtcctanaaatgatctataatgaaaacaaat

SEQ ID NO: 59756 - DNA, 468 bp, Glycine max
  unsure (1)..(468): unsure at all n locations
ctaagcttacaaagattaagatttatttcgactttattctctntaacatatnnttttattattagntagtatttattaaataaaaaggaagctttacaaaaaagaactaaagattctgtctaaatgatttgtaaaaagggacaaagaactcaaaagcatttgcattgaacaataatactcaattagtaaacgacttaacagagaaaggagaatttgattgccccaattagtgagaaatcaaatcagctaagtatttgtctagttcaacatgtgcacagattcatgtagaatcagtaaaatgtttcttaattacaagagagaaaagtggtaaaagataacgacaaacaagctgaggaagctaagcccaaaaattgagcatcattgaactagagacataaacagaagcaatcacatgacttctcaggtcaagcaacanaccaaaaccaataccaatggagcacagaagat

SEQ ID NO: 59757 - DNA, 451 bp, Glycine max
  unsure (1)..(451): unsure at all n locations
agcttgcacatatcacctatgttcaccactatgtttccctcagatgggnttatatctatccactctccctcatttgatctcacttgaagccctcctatctcatctggatataagatagtaatacaactcatatcagtgtgcatcccaagcccctcaacttgatcttctataacttctggagctgagtaattggttaccctcaagtaaccgtggcacttcttgaactcagaatcatagaacttcttctcaatgccatcccctatgctcatcaatacaagctntagaattntcttagacaaatcttccatcttactgcaatattcttgtattatcacactgttcaaaacacacaaaaataagttataaaatcatgtcgcaataaaatcttggttggattntnttttatataaatacttataagagaagaanattaaaaaataaaataaacttt

SEQ ID NO: 59758 - DNA, 224 bp, Glycine max
aacagctgatttcatgctagtgatactttttttaaatttaaggaaactagaatacatccgtttgtaaatgtacagaccattcacagcattggaagatgaaacttgttggcttttcacaatctgaagagggctttactggtggcttatcgttcccccttttggatccacttgagtgattgtcttttcgcgatgctgtgatatctggcgcatggtcgtggggatag

SEQ ID NO: 59759 - DNA, 389 bp, Glycine max
  unsure (1)..(389): unsure at all n locations
agcttgtaatcgattacaaaagtcttgttatctttccataggagattntcaaaaaataatttccaagagtcacatctattcaaatggtttatgaatgaccatcaaaggtctatttatatgtgacttggaaacacgaattagaggagagtttttattgcccaaaaagttttatcctctcaaaagattaagagagtttttctaaactgaaatgtcttatcctctcaaaaagattccttggtcaaacacttgcatattcaataacaaatcttgattgatcatcattgtacaatctatctctttcaagagagattccttcttctcttcttcttacttctgaanatggattgagagactganggtctcttgttgtanaggattcctgaacataa

SEQ ID NO: 59760 - DNA, 476 bp, Glycine max
  unsure (1)..(476): unsure at all n locations
tgatgcaccttcataacatattgtttgagggcatttttgtctgcatctntactatcaaattccatgccaacatataattcttggccaacattaaagttcgacggcatctccaaaccgcaaatgtcctcctcatcaggataagtccagctgatattgttataatgtgaggcatcattccaaaatggattttcaattcgttgtgcacctaacagttcaaaataaaataaaaaatcaaataatacttatttagcattaaatacaattgtcatcaaataataaatgtattgtctaatttttttatacaacacattataccttctgctgggtgaacaattcttactggttgaggaatgttggtgacttcatcgtctgtgtcagatatatcgtcaacactgtcatcttcgtctaaagactcttcaacatatgagttagacacaagataatcatcatcatcatcatcgtcttcgcaatatgaa

SEQ ID NO: 59761 - DNA, 397 bp, Glycine max
cgcttgtggagcttctatggaggctgtttctttgagcttcaatgatgtcctttaatggtgaatttccaccatggagatgcagcggaagacaaaggagaagaggtaagaggcgacgccatccactattggaatagccatgaaggagcttcaccacgaagatgagcaaagagagtgttggatcgagtggcctcaaaataattaagaaggtgggggggtggaattaattattcctaaacctttactaattaaaaaattactcttctaaggcttttacttatgttgtcaagagaatatggagtagaagagaaacttatcagagagtaaaagcgaataataaatgcacagcgggaagtaaaagagtagggaagaaggaaacaaacacacacgagttttatac

SEQ ID NO: 59762 - DNA, 415 bp, Glycine max
agcttagcatgctgcgcttatcgctcatctctattttctgtgaaatcatgctgttctgttgagaatatacctgtgctaatctcttgtgttacgtctgatattatgcagatggcttctaagagaaggaaggcaccgtctacacctacccaagacagatttgatagatccagattctcgttccacgaggctagtgaaacatacactgacatcgtggcgcctgatacgctgttaccagagaggaatgtggtggtatactatacagcgtttgacgagttcaaggtggagctggagagatgccactgggatgaatagttgactgattttgctgacgaccacatgatgttgccattgtgaaggaattgtatgctaacctctctgaccgcgaggacatctcacctatgcaggtgatggtgag

SEQ ID NO: 59763 - DNA, 396 bp, Glycine max
ctatacgagacatcttaccaaacatagacacgctcacgataactcgcctgtgcttttattccatgctatatgtagccaagtgattgatccaacaatgtgtgatgagttggaaaatgaggccgcaattatactgtgccagctggagatgtattattccactgctttctatgacatcatgagtcactcgaatgtgcatctggtcagagaaatcaaatattgtggtcctgtttatctacggtggatgtacccgattgagcgatacatgaagatcttaaaagggtatacaaagaatctatatcgtgcggaagcatctattgatgagaggtacattgcagaggaatccattgaattctgttcagaatacttacagaacgtatagctgtcgggctgtctgag

SEQ ID NO: 59764 - DNA, 464 bp, Glycine max
  unsure (1)..(464): unsure at all n locations
agcttaccgggctgacattctatatannnggattattggatttttttggaatagagagngngtatcttctattgaagacaatttttgagataattgattaaattaaaataaatttgtgttagttgatcatgtgttcggtgattntataatgggatttactttttttttttttccttaatgatatatccctatttgattattcaatcagctcatttgaaaagaaaaaagaaaatgataaatccctatttaaactgttatgttataatttcatattttacaaagtattaaaattaatattatattcagtaaaaaaaaaattaatattgtatcaacatcataacataaagtataagacagtgattactggatattaattgtaagcaaagaanaaggtagtcgaaaagaagaaatgaattntctggtctaaagtcattgaataactaatcttaagtatagnttttaaa

SEQ ID NO: 59765 - DNA, 470 bp, Glycine max
  unsure (1)..(470): unsure at all n locations
agtcacctgcggcatgcaagctntnttctcntatctttcaacttatcccatgtgtctgtctcaacggtctttactaccacccacacctttacctcaatgtggcaaaccatgcccctaccgctgcatgccacccattaaccccatcttcttcattggtggactaaaccacaccatccacgacgcctttcggggccatcgtggtcaatggacacaccacatggagatgcggttccctttcgtcacccgtccaccatcaaaaccctaaccctcgagccagaactcaagaaactaatttgaaccacaagactacaagatatggttgaaaaccatcgaagcactggtagatctgagatgccattaacatgcaccaagcangactatcgagatgtgttgtgtggaagaaagatgaagatngagaaagagagaaagagagggatagggaattattntaaggagaacacgagagaaca

SEQ ID NO: 59766 - DNA, 423 bp, Glycine max
  unsure (1)..(423): unsure at all n locations
ctcagctaatgcagaataagcctccatatgtctggantagtgtaatctttcttcacaaaaagtaacctatagaacaatcacccctttgttacaaaaaccaacctttatattgctagcccacgaatgaaaaggaatatcaaatcctttnttcatatttttaccctatccacgaaaaaatgcgcatcatctctttgccgttgatcttcattgagaaaacatcttgtcctctgaaccatatgcaccangttaaggaaatctaccaccttttccattactgagatctaatacccttgagatatccgtgagaatgctaaaggaaatgattngtaggctattccggggaaacatcaactatatttaaccaagacaatgattcccaccataaaggcaatattttataacagttgaagaacagatgggatg

SEQ ID NO: 59767 - DNA, 456 bp, Glycine max
  unsure (1)..(456): unsure at all n locations
agcttgcatgccttactatggagtcattgaagatatttggttgttgattacggnngaattagagtacctcttttcaaatgtaagtgggtcaatggaaacacaagtgtgcgtaaagacaaaatgggattcactttagtagaccttaaaaaagttggttacaaggacgacccattcataatggcagtgcaagctcgacaggtgttttatgtaaaagatccatgcgactctagatgggcagtggttttgcaagggagaacaatttgtatcggtcatgatgttgatggatcaacacttgatgtcactgacatgccatctttctncaaagatatgccttcaagtactgttgaacaagaagaggatgatgtatatgcaaatcgtactgatcatgacgangggttatgggagaacattcatacgtaactatgtaagcacaaccatataagtattacttaacat

SEQ ID NO: 59768 - DNA, 416 bp, Glycine max
  unsure (1)..(416): unsure at all n locations
ggtaacttaattggtgcatctcaagacatttgatatttggttttcattatgcctcatcatagtgagagtgaaaaaaatttcctaaccgaatactaggggggttaatcgattaattctctcttgtttaaggtcttcggaggtgaacaagacactntaatcaattacttaggtcatctaatcgattacattgttcttgaggtcttttccagatgttggatgaatactttaattgattacttagataatctaattgattactaccttatagatttaatcgattacaggtggttataactggtttctctataaataaccagcttgtgttcacatctacacatcatgagatcattagagaatactcaatacatctcanaaattacttcttagcctcagaatgagcaatatttcatactttc

SEQ ID NO: 59769 - DNA, 389 bp, Glycine max
  unsure (1)..(389): unsure at all n locations
taagtcacctgcggcatgcaagcttgcgggatacctgaggtcccactangaagttctatgttctaatgagaatggnngaataanaacaaaactaaagtgattatcaaaattcgtgatgaaacacggctccacaatttagtatttatctgctctagagtgaaatcatagttgaaatttgcttgcattcccatgatctcatatgcacangtttgtatcatcttaccaagcaatagccaaaaaaataaagaataacagaatgaccaacttccccgctattttccatccatttttctcaaatcagtattgaagcggaagataanaatcagaaaagaccatgatgtgaagtgatgcacctgaagaaagaccatgcgagggtgaaagcgtacgag

SEQ ID NO: 59770 - DNA, 401 bp, Glycine max
  unsure (1)..(401): unsure at all n locations
tctcctcaactctgattcgtgaagtttctgacgcattatcttatttttattttcttcatttaaggaagtaataaaccgaacctcatttaccttgctactttcatcaccagctctcttcgccacttgagctagaaaagcttcatgacgagattcactgcgttgatggcgggcatacatgccctctcgtaacttcatatgacgatcagcatgccattcngtaacacgaattaacttttgtgatgtacgttgaagcttttggactctctcattctctaactcacttctgattctcatagcacgagcatgcttttcttctgcttccctttttaagtctgaagttgttttcttctttttgtcaggagacattagtttatcatgcagagtacgtacacgttcagcac

SEQ ID NO: 59771 - DNA, 380 bp, Glycine max
aaattctgaatccacacaaggtactgcaaaaagaatgtttcttgctcttttttgctatgggtcaaatattgctatcatatctaattctaatttttgtagggtcgggctctaattttttaactgcctatgaggattgtcaatctccaactaatcaacctgtaatcaacactgaagggaataactataattatgatttataatttcatatatcagtgcacatgctcttaaattaatattcacaattgttatcatcatatcgtactatggtattaaacaatttcaggatattctgatcttggtgatcaactcatgcaatgtaaatattgtaatgcacaaatgtggtatgatgaaagaatatcaaaagataaaaaatatgggag

SEQ ID NO: 59772 - DNA, 243 bp, Glycine max
  unsure (1)..(243): unsure at all n locations
tgtctgttatgataaagattcaagctcaggctgatcagggatatatgtcaaagggttcatactcacagtgttgtggcagtctcatgtatgccatggtctgcacaagacctgaccttgcttatgctgttagcatggtcagtagattcttaaaccaacctcagaaggaaccatggaaggctgtgaagagaattntcagatatcttatagggactgcagatgtaggttngatctatggatctcact

SEQ ID NO: 59773 - DNA, 405 bp, Glycine max
  unsure (1)..(405): unsure at all n locations
agaaaacggatgcacattttatctatatacaatcgctgctgcttgcttgaatcttgatttcaggtatatgattgtcatcatcaaaaaaggggagaatgtacatgcaattggctttgatgttgtgatgatgatcatgatgatgtgttgcaattgatgcaaatgggcttttcaagattaaaattcacgacaatacttcaagattacaagtcacaacatcaagatgatcactagaatattaggaagggaattcctaattgaattagcaaaggttcggccaagtgatttaaaataaaaagtgtttttcaaaggttttactctctggtaatcgattaccagaggatgtaatcgaataccagtggccaaatacantttattacagctattanaatttgaattcgaaatttt

SEQ ID NO: 59774 - DNA, 422 bp, Glycine max
  unsure (1)..(422): unsure at all n locations
agaagagctagctaggtacgtatacngactcccttcatacagattcacttaantgngtctcttgtgtatggtttgatcctcccacgtgttttgtttgtttggagattattaatatattttgtggtgtacgtagctcgttggaagcttaggggttgggttgccaatatagttggaatgccagcctcttcccctcctgagtttacctcctttttctttgcttaaaaagaatgtaaactgacctagctaccttgcctaatcatccactccttttggatattgttgaaatatatacttctagctatcaaagatatggtatcaattccatattcctttcaccacgtangcatttcttcccanatatgaattatcttcttcatcatcttanacctatattagaaaactctaatgaagtatgatagtca

SEQ ID NO: 59775 - DNA, 434 bp, Glycine max
  unsure (1)..(434): unsure at all n locations
agcttgtgcttagagagagcttattcttcttttttgnttttngactaannaacaaagtgattctcatcaaggaagctattcctttatggagaatcctccttcggcttatcgattctttgtggattattggcgtcgtctgttcatattcttcatcttatccatattttctatttttctgttcttgagttctcggaaggtcaacaatggtggttcttgaatttgcatccggaatgattcanaccaagtgtccatggcttggattgcatcacatggtatcagagcttgaattcggagagcaattacaaaatatatcctcaattaggtgcagtttatcattttcatttttgagttttttcagaaaaatgagaaactaattnttgttngattcttgtttaattgtgtgtttcttgtgtggttttgagttaatcttgcat

SEQ ID NO: 59776 - DNA, 278 bp, Glycine max
caatatggtaatcgattatcagagagtgaaaactctttggaaacagggtttgtcaaaaactcatgtgctattcaaagtcttggaaaactatctaatacttatcttgagtgagtcctttctttattcttgaatcttgatcttgattctggagatcttgagacttgaatcttgatacccgagtgtaggctttcttcttgagtctagaatccctctcgacgctagaactcttgacttgtgcttgactcacttgagatgttcttctgattcacttgacttgt

SEQ ID NO: 59777 - DNA, 405 bp, Glycine max
  unsure (1)..(405): unsure at all n locations
agcttatggtatgtttggatcttcgttgatagagtactcattattatgnnnaagagtaaaaatcagntcagaattatgtttggtaccctctaaaatatgtgagatggaaaacaaatatcagatctattgaaagcaacttagttaaccaacttaaattataaaatntgatctaaacatactttaaataagttaatactaaatggttttgagtagtaagtgtgaatgaagaagcctagtactgtttttccagtgtacaatgataacaataaaatttaaatctaacacatcatataaattattcaaactcttccatgttagacggacttatattagataaaatcanatgtgtataactcaattggttgaatagagtgtggagagtgttatanatntnntttatacaca

SEQ ID NO: 59778 - DNA, 411 bp, Glycine max
  unsure (1)..(411): unsure at all n locations
acttatctgactttttttgtatgtaaacttatgattgtgaattttcaattttagtttaagtaaataatgggaattaagcgttaatttttgtgtacacatgtgttaatataattttgcatttttagtaggaacttatgattcatgttacgatctgggttatataatcttctactcccttcccggtcttagctaggatctttgatttgacaacatnggatatgctgatggttggagagctctttgaatngatttccccccttcttttntctgctntatttaaggagaattcgtactccctctttgcttttggtaaattatccatgcctcaaaaaatgtacagagttatctttattggaatacaacacaaggtgtcttcaatacttanatcatgtgctttgaaagcatttggac

SEQ ID NO: 59779 - DNA, 388 bp, Glycine max
  unsure (1)..(388): unsure at all n locations
aggtcagaatctaaagaacttcnatctttttttattatcaggaaatcaacaagggcattaattcatcaagaagcatacaaaatccgactatcgaagccttgtatttcctatagatgttccaaatgctcaattacaagttatgaaatgcaactntgaaataaacatttctagtctattaatctgcatccatttcttcaagagctgctntggcagctgcctttgcttcttctagaagctcatccgggacctgtaaaggattaattcagcagcatatagactaacaagcttcaaaaactaacaaaaaactatatttccaggcaaaccatggttagagaagtgggaaacnagtaaataataagaaaagaaaccagcattcanactcaaaaca

SEQ ID NO: 59780 - DNA, 367 bp, Glycine max
  unsure (1)..(367): unsure at all n locations
cctgaacgggggctatagatnttttgtagtttacacacacacacatattcttaaatcgagagttgcccagtctgtatttggatgctttgtcatgtctctttatataccaattgttttattttttaatcagccaaagaaaatatattactgatggtacaaggggtaccatgtctcatacaattgtgtttatgatgcctttcaacctataaaacaatgcagcgtccctaatacaaagaaaaaatatacatcccatttagaccaaaacatatctcagcaactgcaattgaaacctgcagccagcaaaacaacaaaacaaagctggctaactaactataataaaactaataaagctgtgccacaatcaaaa

SEQ ID NO: 59781 - DNA, 385 bp, Glycine max
  unsure (1)..(385): unsure at all n locations
aaatagacattaaattaaaaaatgtgaaatttgatccatttcaaatcatttaaaaaactaattgcgaattatctaatacaaaaaattatttgtccaaaatgataatattaattacaatttatgtcacctaagaaaatattntcctacattatgtttactctatttataattntatattaaatcaaaatatggaatcatcatttactaatcattaaatcatatagaaattacttaagtgttaagtgtgtataaatccaaacaagtaaagtgtaaattttaaatgcacacaattnttttaagtagattataaagagctaacaaagcttatggactagctgggttaatcctcgtgtaaatggataggctaaaaaatgccaaattcaaa

SEQ ID NO: 59782 - DNA, 393 bp, Glycine max
  unsure (1)..(393): unsure at all n locations
agctttaggggtgnnctattacttgtataggtttttacctctataanacacattaacattngatggaaacctttattacacggattacttgagtgaaactccaattctgattggagagcaatgccaaaagcactaataaaactacatctaagttttgtaattgcttttattatttatactgtgttgcgagaatttgtttgattttgggaggaaagaatgaaaacacagcacacaacattntttttaatttgattntaatctctaccattaattggtntagttgtcatctaagcgctaaaatcaattgttctcatttctcatttgaaacatcccattttatatatatatatagatganagtgtgttaaaactccctctgagtccaacaactttt

SEQ ID NO: 59783 - DNA, 405 bp, Glycine max
  unsure (1)..(405): unsure at all n locations
cacgcttgtgcgcttatcgcaattctgaaccgcttagcgtgcattaatgaattttggcttagcgcggctnttctcgctcagtgaatggactgaagcggtgcgcttagcgggatggcccttcgctcagcaaacatgcacaactcattcttcttccagattcttcctcgcgcttagccgaggaatgttacgctcagcggatggctcgctaagccaacagattgacttagtgagagggtgagaatcaacacttcacaaactaaccatcaatttgaggagttngattattaaacacacaaaatggaagtactaagtatttattacctatctttaccgaagagtaattacaatactacaaaataaccattaaattgaggagttngatacaatttacacaagttntataca

SEQ ID NO: 59784 - DNA, 363 bp, Glycine max
  unsure (1)..(363): unsure at all n locations
ccctaaaacataattggctccattatcaagtacaacttgaaccatgttctcttcttcaacttcctccacaatagcatcaagcaactcaaaaagcttttcacctgtctttacaaaatcagagccatcaacagatttcaaaaacattgtaccaacttgaaagttaattaaaaaattaatgatgcatctttgtttccgatcagttcatgcatcagacataatagtacaacattgctccttgtggcctttcatcaaattntcagtgtattcaacttccttcttcaggagtggaactctgatgtcatgaataactggaatgggcaaatgtggcccatattgaccaatggctgcaaccatattctcaat

SEQ ID NO: 59785 - DNA, 425 bp, Glycine max
  unsure (1)..(425): unsure at all n locations
ttttcaacatctctttcaacaatcaagaaatctatctttcaatcttctttctcaacatcattcaactctttcaacagaatttttctgattctttntctcttcatctttctaaaagtttttgttcaaaactttttcttccaagtaaaggtctttggtcannaaactgtgctattcatctttntcattctcttctccctctgccaaaagaacaaaggactaactgcctgaattcttttgtgtctctgttctccctttgcaagagaattcaaaggaccccgcctgagaattctttngattcttcccttccctttaaacaaaagatctcaaaggactaaccgcctgagantatctttggttcccctttacaaagattcanaggactaaccgcctgagaattctttgtgccaacacattggagggacatc

SEQ ID NO: 59786 - DNA, 387 bp, Glycine max
  unsure (1)..(387): unsure at all n locations
tcttctcanaatttgggctggagncttacagaacacttgcacgacgttttcgtttccgagagcattagtcacttgtgcattntgagccttgtagtccaagtagctttggaaaaatgccatttcttctccttccttcatccaaaaccatttccaacgtgccaagctatttctccatcacccacagccaccagtagccaccacaaaccgccattgttctccattgaaaccccacaccgagaggaaaccttcaccaaagcggaatctttcaacttgcctcatggttntggttgagaatgaaaccctaatctaatcattcattttccttgagggaaccgngattctatgcttggttcttgggtagttcatcttaccttttcatcatttctg

SEQ ID NO: 59787 - DNA, 353 bp, Glycine max
  unsure (1)..(353): unsure at all n locations
tacagcacgttagagcctgtcacacacgcttcaggcatcaaggatggtcatttctcccggagcgacgcgtncagctcatggacgacgagtatactgatctccaagaagagatagggcgccggcggggggcatcactggttacccccatgggcaagttcgatccagaaatagtcctcaaatattatgccaatgcttggccaatagaggagggcgtgcgtgacatgaggtcctgngttagtggatcccatttgatgcagatgctatcggccagctcctgggatatcagttagtgctggaagagggccatgagtgcgagtatggtcagaggaggaaccggtctgatgggttcgatg

SEQ ID NO: 59788 - DNA, 458 bp, Glycine max
  unsure (1)..(458): unsure at all n locations
agcttctcccncaattntctataaatagggggagtattgatgtgaataatggttcagccccttaggcacttctctctctttcgaatttgcttggaaaaattgtttccgtgaaaaaaatctaagccgaggcgcttccgaaacgtttccgtgaggaatntcgcaaaggtttcgaccgttcttcgacattcttcattcgttcttcatcgtccttcgatcttcaacgggtaagtacctcgaaccaagccatttgattcattctatgtacccgtggtggtccacattgtgtttcgtgtatttttattctcgtttcatttactttttatacccccttttgacgtgctttaagccatttatttaagtcatttctcgcttaacctaaaaataaaataaatttccaccgatcgtttgaattgtattatccgttaacctcggttaaaatgaattccgaccgttcggtc

SEQ ID NO: 59789 - DNA, 253 bp, Glycine max
  unsure (1)..(253): unsure at all n locations
attatatgtacttnccaaggtgtatttgctatctacatcatatgcactttcttttgctaatttatatacatgcatactcaaagcattttgtctaccaaaatttgcacacgtgcacattctggtatttctaatacctatacatatacaaactttgtgatgaatccttgctacctacacaataaggtgctacatttcatgccttattnncagtgtnttgctacctaaagccgcatgcaaattcaagtatattttc

SEQ ID NO: 59790 - DNA, 449 bp, Glycine max
  unsure (1)..(449): unsure at all n locations
agcttgacaagttggcttgtttaagtaatgatattttatatttattatatcaactattatctataccatttttatggcattatgaatgataggatgaagtgatataaagttcttagagagttcacttgcatgtgaaaaattttcaaaaagaaaaagactaagttaaaaggataatgcaacaagattaatattttcaaagaaaaagaatgttttgtaaagacattttcagacaatttaaatatntttatttggctatattagtataaatcatctctaattcatatatttttttaatattatgttcttttttttcattntcttttgatatattttatgtttaaataatttgaattcgatcaatatgatttcggttatcaattattttggaattgacattacttatacgaaatttataagttcttttttagtaggatttactagcttaaaat

SEQ ID NO: 59791 - DNA, 392 bp, Glycine max
  unsure (1)..(392): unsure at all n locations
ctcagctcttccacgtaagtcacacctcatctgagacagttgtcaatactctatcaggaaagcagagaggaatgcaccaccaactggctcaaccatgatctggagaagaaagaataaggataggaattggttaaaataccgggttgggttttgaccaaggtaacttatgtgatgagaattgattctagtcagtaagacanagtgtagccgtgtgggtggatacttcttgaacgtggtatcttngtaattaaaaattcaatagtttagaatgaagtctggttaaataaaaaatggattatatctggtttgaatacttctgactggtctaaaactaaagtgtataagttgctttaatttataaaaagaaaaaccttatgcatttattttttttt

SEQ ID NO: 59792 - DNA, 416 bp, Glycine max
  unsure (1)..(416): unsure at all n locations
agctnttgttttcaattatgagcgtctcgaatattaaagttttaatttgacatccgagtaaaaagttattatcgttagaatttgctcatagcttccattctcaattacgagtgtctcgatatattacgggattaattcggacatccgagtaaaaagttattgacgttagaatatgcttacagcttttgttctgaattgtgagtgtcttgatatactatgggacacaatcggacatccgagaaaaaatgtattgtcatttgaatttgctgagagctgctgttctgaatttccagcgtgtcgatataccactggccacaatctgacatccgagtaaaaaggtgctgtcgtctgaatttgctcacagcttttgntgtcaattttgagcgtctatatatataacgagactccatcggaca

SEQ ID NO: 59793 - DNA, 483 bp, Glycine max
  unsure (1)..(483): unsure at all n locations
ccgcctctgcttgaccttctttangcccaatatcagattctttaggtatatgcaaaagaacaagaggagttagtgggttaaaaccataaacaacttcaaaaggagaacaattagtggtgctatgaacagctctattgtaagcaaattcaacatggggtaaacaagcttcccaagtttttaagttcttcctcaaaactgtcctaagcagagttcccaaagtcctattaacaacttccgtttgcccatcggtttgtgggtgacaagtggttgaaaataacaatttagtgcccaacttgctccacaaagtcctccaaaaatggcttatgaacttagagtccctatcactaacaatgctccttggcaaaccatggagtctcacaatctccttgaaaaacaaatcagccacatgggaagcatcatcaactnttttacatggaataaaatgagccattntagaaaacctatcaacaaccacaaaaatgg

SEQ ID NO: 59794 - DNA, 457 bp, Glycine max
  unsure (1)..(457): unsure at all n locations
agcttataattatgagtcttataattgttctttttctattttaaaagnnngaagntactaagtcaagggtgagttacaaagtcttgtagttttccattagtatttagtatcttggaataaggtattaagcatttatgtgattagtcaaatggtcactgatcatactcttgtatttggtgtgacaaagaaataaaatcttcttcttccaacaggttgaccttntaacaatttgttgtcctccgagatgactagtttaggaattatcctctcaatgagatcatttagttgacactaattcttagatgcgtagagttatctataaaaactggccacaacttcctccaattntgcctgatattgtattagaatcccatccttcttcccaatgttcatattttgtgtagcacatctcaccttggtcaatnggtgaaaaaatgcaatatttttatcaccttca

SEQ ID NO: 59795 - DNA, 267 bp, Glycine max
  unsure (1)..(267): unsure at all n locations
cccaagagatcattaatggtccaacaccttaancgttctctactttaaaaactaagagatcgttaatggtccaacgccttaacgtttctctcctttcaaaatcaaaagatcttttaatggtccaacgccttanacaactttggtttggttgaaatatatctggcaaaanaagataaaaacaacttaaccaacgtctagttctgcaataactacataggtctgatttcctcatcgcaattgaggatacttangagcgagggaaacacc

SEQ ID NO: 59796 - DNA, 344 bp, Glycine max
cgaatactctcgagaaattcaaatggtccgtgcttgtcccacgcagtccgttaaaccgcataatatatcgagacgctcgaaatgaaaatcggaagctctcgagaaattcaaatggtcgtaacctttcaaacggaagtccgatttaggcgcataatatatcgagaaggttgaaattgaaccacgaatgctctcgagaaattcaaatggtcataaattgtcacacagaagtccgatacaggtgcataatacatcgagacgctcgaaattgaacaaccaatgctctcgagaaattcaaatggtcatatagtttcaaacggaagtccgattcatgcgcataatatatc

SEQ ID NO: 59797 - DNA, 446 bp, Glycine max
  unsure (1)..(446): unsure at all n locations
ggatcttgctcacctgagctgcagcttgtcattagtttcgtgtttatatgtatcatttggtctaagaagaggcanatttgattatcctactttgatgaataggaagcctggagcaaattgagagaataagaaggagggaggaacccatgctgtgactgtcattcctacatggccaaatttcccaccgggtcaacaatatcaatactcagtcaatatcagccattctcattacccaccaccctatcagccaagtacacccaatcatccacaaaggccacccctaaattagccacaaaacccgcatgttgcacatccgataccaaacaccacccttaacacgaaccanaacaccaaccaaggaaggaattttccagaaaagaaacctgtagaaatcaccccaattctggtgtcgtatgtaaacttattcccatatctactcaataatg

SEQ ID NO: 59798 - DNA, 489 bp, Glycine max
  unsure (1)..(489): unsure at all n locations
aagctcgacgattatggngtatccatcatcatgtggactatgtgtgttgtctgtctatggtgcanaacaattcttcacatccacaaatcacgtataaacccaccatcccttggtgcccacctcaactaagctcacgtactcccacgtagcccttatcctcgttcctctcaatgccgggtccccatcaatcctcccaaagcttcaaaaaatccaagtaattcaacatccaagcatcaggaactaacacagccaagaaaacagggcagaggcagaaaactctggccaaaacacaaaccaacatcacagcttttcacactcaaataccccagtaatattctcttcgttccaattcgttaaccggtggattgactcgaaaaatttactggaagtctctagcacataaatctacattatgaaccgtgggatctgctagaaaacgtncagaaccanatctgtactactctttccacaaccagcatatacacaaca

SEQ ID NO: 59799 - DNA, 446 bp, Glycine max
  unsure (1)..(446): unsure at all n locations
ctgcagcttcaaatccaagatctaaccttgtagatgttctataaatgggannctattacttgtgttggttgattccggtgcatcccattcctttatatcctgtntgtgtatagaacaacttaagctttttgtgtcttctttaaataaaggtttggtggtagagacccctactagtggttctgtgttaacttctgatgtgtgtttgaattgtcctatggaaatttctggtagaacattcttgattgatttaatttgtttgcctttgagccaggttgatgttattcttggtatgaactagttatcttccaaccatgtcttgttaaactgttttggtaaaaatgtggtgtttgatgattctggngtaagtaagggtatgatgcttatctctgccaaccaagtggttacatctttaaaagaagatgctcaagtgtacatgatcttgtcta

SEQ ID NO: 59800 - DNA, 499 bp, Glycine max
  unsure (1)..(499): unsure at all n locations
catcacgtgccatcacactcagcttcttagatcacccttcactntctttnggatcttctttgtctttttcatattactcctataggcagccctattatgaagtgaagctcccggaataagatctatttgatgctcaattcctcttaaaagaggcaagccatagggaatgtcttatgggaagacatcctcaaactcctttaagaatgtatcaaaaccttgaggcaactcaagggcactagtagacaaaccgatgtaatttggaatgagtaaatacattggttgtctagctagcatcactcattttacctctttaggtttgacgaacaaactctcttttatcactaattatttttcacttttttttctcttttcttttgttctttcttggcactctttttgccttctttttctctttggcttttctctctcaaaggactttttccttctttgattntcctttctctnntctttttcaatctcacttttatttgatcctcac

SEQ ID NO: 59801 - DNA, 404 bp, Glycine max
  unsure (1)..(404): unsure at all n locations
agcttattatctacattntcaaggattattacctttacatgaagcattagntntctattttaagaaaatgtcttataattaattagcatttcctttaatttttataagaaaaattatttgacaattaatccttgtttttcaagacatgaaattaagaatagtataaaagcttatagctacatgtattttattggctcgtattggtttaattttgattttcaaagataggagaatcatactatgtgttcttccattatatatatatatatatatatatatatatatatatatatatatatatcttgatgttacctctgattgatgtgaagattaggtcttgtctaatgccttatgtttgtgtatgaatcancttcacacctgcatatgaactanagtattttttt

SEQ ID NO: 59802 - DNA, 400 bp, Glycine max
  unsure (1)..(400): unsure at all n locations
tctaaaaacatattgnggcagctaatttatttaagcctagnaaagccttcagggtcattatgtgtgtttatttctatatgggatgagatgaaatgcaaaagttgatacttgtgttagttggttataaaggaatgagcctaaacacttgagcttgagtgaaacaatgactgtgaggctttggttgatgattctttccttgatatctgccattctcactagcttatttcagttgcgactctaatgcatatgttcctatctttgaaaagctgcatgtttgtaaaaagcaactgattgaagcattccatgatattcatttcatatgattgaatttctctgtgaagcaaacaccatttggattgaccactgtattttgtcacttgaggacaagtgaactgttctt

SEQ ID NO: 59803 - DNA, 444 bp, Glycine max
  unsure (1)..(444): unsure at all n locations
agccttctccctatnnngttataaatatggggattagtgaagaagaaaagggntcagccccttaggcacttctctctctttcngaattgcttaggaaaattgtttccgtaaagaaaatccaagctgaggctcttccgtaacgtttccgtgagaaattacgcgaagatcctcaaccgttcttcaagattcatcgatcgttcttcgttttcttcagtcttcaacgggtaagtacctcaaactaagctnttcaattcattatatgtacccgtggtggtccatattttgtttcatgtattttcattctcgttttcatttactttttatacccccttttgacgtgcttaagccatttatttaagtcatttctcgcctaatctaanaataaaataaatttccaccgatcgtttgaattgtatcatccgttacttttggtaaaatgaattc

SEQ ID NO: 59804 - DNA, 420 bp, Glycine max
  unsure (1)..(420): unsure at all n locations
tcacataccttgtacagaagaattatcttcgctgcagcacttgcgttacagacagccgcaaaagattagcttaaaatggatggccaacacaactacaaaagatgcaatcaccanactcaacagaacaaacaataaacacaatagtaattaaataaacttaagaatttttaaaattatatgtacaaggacttgtgctcacttttaaaacattgatttgctcttttggttctagatttgtgctatatgttaatattatactaatattatatcttggattacagtgaagtcgagtcctatactttntaaaatgtcatatattcctatgggtgggtcggatggtattggtatcctgtgtcatatgtggcacattctagactatanaacatctntcacattcccagcacagaatatccacctatg

SEQ ID NO: 59805 - DNA, 462 bp, Glycine max
  unsure (1)..(462): unsure at all n locations
cccgcgatccttgagtcacccccgctgcagctgaggtggaaatatatggccatttccctccactccttgagagaatttattggtcttctgagatttcacaagacataaatgagggtgaaactcaaagaaaacagagttgtctttagccaattgactcacacttaaacaaatttttcgaaattaaaggaacatgtaacaacttatgaagcttaagggtatggcaatatcattaggagaaacaaaaactaaggaaccagtgttggagatacttaaaccttcaccgttgcctatgaaaatctgctcaggtccatcaaaatgagtaaattgtttaatattttgagaatcaccagtaacatgaaaactggcttcaaaatctggtattcaagtggagccagatgcaccattaccatgagaggaggagtttgtgagcatggcactggctgactgggacangaaaagtgg

SEQ ID NO: 59806 - DNA, 363 bp, Glycine max
tgaagctcattacaagccttaagtgagaaaccatgatatcaccttacccttaaggaattttggagctttgaaattgatttaggtataagctgggaataagagtgggggggggtatgtatgctactaacagacactattagaccaacctatgtaatttgaatgagtaaaacattggtgtctactacatcactcttttacctcttacgttgacaacaaacttctttatactaattttactcctgtattctctttttttagtcttattgcactcttttgcctcttttcttctgctttttctctaaagactattcctatctgattctttctcttcttctcaacccacttattgatctacaacctact

SEQ ID NO: 59807 - DNA, 383 bp, Glycine max
  unsure (1)..(383): unsure at all n locations
atattgcaaaaatattttgtgtngcagaaagtgctaagcacagcctgccgcgctaaaccccaaatgcttatgggatttaacaacttcaaatttgggcttaancacaagggntaggctaaagcgctatggttttaaacttaaacgtcacgttggctcgctaaagcgcagtgtgcgctaagcgcgccatacgaatttcagtttttaaaaatcaaaggcagaggcactntgggtgttacctttgcacccaaacctttgcaccttcctaaccttgagcacttgtgtattttctgctgcgtttgtactggttctctacatcttcattgcttcatttcaagaacaatccaagtaagttagtccatttctatttttatttttcattcttc

SEQ ID NO: 59808 - DNA, 444 bp, Glycine max
  unsure (1)..(444): unsure at all n locations
agcttctccccaatttctataatagggggagttgtgaattgaanaattgttcagccccttaggcacttctctctctttcgaatntgcttggaaaaattgtttccgtgaagaaaatctaagccgaggcgcttccgaaacgtttccgtgaggaatttcgcaaaggtttcgaccgttcttcgacattcttcattcgttcttcatcgtccttcgatcttcaacgggtaagtacctcgaaccaagccatttgattcattctatgtacccgtggtggtccacattgtgtttcgtgtatttttattctcgtttcatttactttntatacccccttttgacgtgcttaagccattttatttaagtcatttctcgcttaacctaaaaatanaataaatctccaccgatcgtttgaattgtattatcccgtaacctcggttaaaatgaattccg

SEQ ID NO: 59809 - DNA, 434 bp, Glycine max
  unsure (1)..(434): unsure at all n locations
aaatgctactcttaaaacaaaaatggcatacaaccttcttcaataaacacaaacatcaatggtaatttaaagcaaactcatgcacatacttctttacgaacattcactcgcacaagatattcttctaactaagaaaaatgcacaatcaanggcaccttcgttacctagaatatttatatgtaccttcaggtgtatttgctatctacatcatatgcacttnctttgctaaaattatatacatgcatactcaaagcattttgtctaccaaaatttgcacacgtgcacattctggtatttctaatacctatacatatacaaactntgtgatgaatcctggctacctacacaataaggtgctacatttcatgctnntattcagtgttnntgctacctaaagccgcatgccaaatcaagtatattttcttttgctgact

SEQ ID NO: 59810 - DNA, 300 bp, Glycine max
  unsure (1)..(300): unsure at all n locations
agcgacctcacgcatgcaagcttgtcagaagtctataccgctgannaaggttttttagcttatatatcncctttctctttcggtntctgaaatctacctcattaaataaacaaagagatcttgtttcatctgtttttgcagttccaccttttctcatatcattttgcatgtttttgtttctttggtcttgtttggtatagatatgagggtcgattctttgaggatcctaacaacgagggtttgacaatcgattttgatagagatatatgccacacgataaacgaggaagaggaagatgac

SEQ ID NO: 59811 - DNA, 248 bp, Glycine max
cacctataaaagaacattttcgaaaaaaaaatttatgatgagaagaagttcgtattggaagtgggattaaaggcttagaggattgattgttgtgtggatggttgcatgtttgtatgatggagcgcttactaaatcccaggttcgctacaggcccaagtatcgtgcgaagactattggaacaatcattaaaaaccagttccagtaaaggcaatgttctattttctcgaataccgatgttgcatgaaata

SEQ ID NO: 59812 - DNA, 339 bp, Glycine max
  unsure (1)..(339): unsure at all n locations
aaagtcaagaacacttcatgataaccaagatgatgatctcaagaatcaaagaatgagttcaagattgaatcaagaacacttcggggttcaaaaggaaatttgatttcaagaatcaagaatcaagtttcaagattcaagttcctagaatcaagatcaagactcacgactaaagattcaagaatcaaaagaagactcgatcatgataagtattaaaaagttctttcaaaaactgagtagcacatgaatttttctcaaaaaccttttaccanagaagttttactctctggaatcaattaccagatggttgtaatcgattaccagtagcaaaatgggttcaaa

SEQ ID NO: 59813 - DNA, 383 bp, Glycine max
  unsure (1)..(383): unsure at all n locations
tgagttacaaaaggaaaaagtgcatttgataattccattatctctgtctaatgaggttctttatgaagtttttgaagaaatgaccgttgttagactttggctcaaattggagaaactcttcatgattaaatcaatttacaacaagtttcttttgaaacatgtttgtttggcctcctaataagggaaggtatttcattgaaagaacatcttgatgaacaaaactctattctgatggagctacacgacattgatgttaagatggaagacaaagatctggcaatgattctgttatcctttcttcctcctcctatgaaagttntatgagttttcttagtgtagtcaaggactccattacacttgaagaagtcaggtctagtctctat

SEQ ID NO: 59814 - DNA, 468 bp, Glycine max
  unsure (1)..(468): unsure at all n locations
ttaacncacctgcangctgcaagcttaaagatagtagctgataattttatttatcttttatcatatgcattgtgngacgtttatttgacattttagttaactttaggctttgntttgaatcacattagtttttaatacaatttttactttgtcttgggtataattttatgttttagttattttttatgaatgttttatagtttttcagcaaaaataggtcattctggcaagagcactagagagccaaaatcaacagaaagttatagaaggagaaattgaaaaaattgaagataaaagctaggaaaatcaagagtaagatatttttcaaggataaatcagtggaaaaagatgatgnatacttgaattaattacagatattttttggttgttgatatacacatcattntataagggatcacattcctanagggggatatgagaaatgagttngtgatatggattgatgga

SEQ ID NO: 59815 - DNA, 383 bp, Glycine max
  unsure (1)..(383): unsure at all n locations
ctcacattcttcggattcttcacaagttgtgaaggccatttgtcagaattttgggactgagcttggtacaactgagtagccatctgccccatttgattagtcaaactttgaatggaggctcttgtctcttgctgaaatngcatattctagatggtcattggcctcactaactcctctaaggaaggttgagaatgggcctcagttgcttgttgtctttgttggtgctgctgcattggagaaggaacatatggcctgcttggaccaacaacattctggaaaggagggacaggctgttgttgttgtggaggaatttcccatcttaaatttggatgattcctccaacctggattgtatctgtgcttganagatcataattattctac

SEQ ID NO: 59816 - DNA, 382 bp, Glycine max
  unsure (1)..(382): unsure at all n locations
agctntctccccaatttcataaaatggggtttgtgatgtgattaagggnncagccccttaggcacttctctctctttcgaatttgcttggaaaaattgtttccatgaagaaaattcaagccgagccgcttccgaaacgtttccgtaacgtttccgtgaggaatttcgcgaaggtttcgaccgttcttcaagattcatcgntcgttcttcgttttcttcagtcttcaacgggtaagtacctcaaaccaagcttttcaattcattctatgtacccatggtgggccacatttcgtttcatgtatttttattctcgttctcatttactttttatactcccttttgacgtgcttaagccatttatataagtcatttctcgcttaatg

SEQ ID NO: 59817 - DNA, 376 bp, Glycine max
  unsure (1)..(376): unsure at all n locations
acattggatttggtacgaccttgccctcttgatttccagctggggaattggcgagtggaggaacgccccgacatttacgcagcgagcataatgtaaacctttacgggtttaaaagctgtatagttgggcctaggctttagagattatcttttggataaagctttgtgtattttgtnttntaaatatataatacaaggatctttcttcatttgttcctacgtctctacctattctcatccatttgcatgcttacttcttttctgaaacggcagatccgatgacgagtcccccgaaggtactaatacctgngacccacctatcaacttcgagcaagaaacgagtcanacggaggatgaatggaacgaggatgtgggac

SEQ ID NO: 59818 - DNA, 344 bp, Glycine max
  unsure (1)..(344): unsure at all n locations
atttaaccaattatatgcggccacattttttttgtatggaattcgtacttgattggtatgtaccatataaccatgttcatagtttaactacccttccatttgaagtgaaaaaaaaatttctggttatttcttactttattttttaagttattatgcattatcattggaaaaaaaacttaaacggtcaatcaattaaaagttatatntattataatttttaagataattattatgaaagttaataaacctcttataaataataatctggtattagataataatgtaaaaatatgtgattgatgcatttttcttttgtcttttagcgtntattacttcattttact

SEQ ID NO: 59819 - DNA, 353 bp, Glycine max
  unsure (1)..(353): unsure at all n locations
caataacatgctcattaatatccctaaccatggcaagcttttgtaggtcaaaatctaataaaagggtttgctattctggatttagtgatgcattgtcaaactaaaattacacgacattgcattctaacttctaagtcatgacaaacaatagggtaattntgactttctttgccaaacgtgcggngaacgcggaatgctgaccaaagaggcaaaataacgcagtggaagtagggatgtgaatggatagtatgtatagctgtctccgattaaggtaagaaagaacctttcattctcaggtttggtgtagntgtgatttatttcttcctaanatatgcactcttcaaacatatttg

SEQ ID NO: 59820 - DNA, 454 bp, Glycine max
  unsure (1)..(454): unsure at all n locations
agctngatcaaaacaattatttaattattccaatttttttttatcatacaanngctcattcaaatcattctcaaacactcatttcatgcaaaacaatccactgcacatcattttcaatcaattcattgttcaaacaagatttttggtacaagcaaacaactcaaagtgctgaaatttaaataactaaaatttaaagaactgaaattaaaatgactgaacaacaatcataaaataactaaaaataaactaaaatgttcaagatgcacaaatttaaatgtcctgctcatcctgtggctgatcttcactaagatcccgtgctggagctgcttatgaatcctggataggctgctctagctccgtgattggtgtagatggctgggtctccttaagaacaagtgcaggagatggctcangtatctgatctgtggaagtcccctcctcctgaaccatgtgg

SEQ ID NO: 59821 - DNA, 418 bp, Glycine max
aatcatgctcaatatgatgcatgcacctgacctcaactctgaaaatgcaatgtagtaccatccccaaggaaatagcctaagtgtgtccacacgacactctcacttatgaaaactatgcagtaagtgtcaaggtcactctgtcatgcacaggcaactccctcccccccccccccccacgcttatcagcctgagtctcaagggagttccaaactgagtggcatgcccccaagtacaagtatttttcctcattaaaaattacaagtacttactgacaaagtttatactgtttccaagcaatatgaagtatgaaacatgggcaccatcaatgcactgaccgtggataattaaagattctaagccatacccccccagagatgcttaaaactctctaatcactctatctcccgcaccatggata

SEQ ID NO: 59822 - DNA, 425 bp, Glycine max
  unsure (1)..(425): unsure at all n locations
ttcttatacttcgtggtgtgggccactcatgaatgacctttattcacttatggttcttgggaatcccttgatcactatttaaaatattaagaanagtaatgcaataaaacatacatntttcagtattttcatgttgattattcctaccaaaaagtatggcaaacctaaggtgtcccatatgagtacctaagnttgtattgaaactaaaaataagaataaacctacctaatgagtccctatgtgcacaaatcatgaagatgttggatgcacgagtgattntacaaaagagggttacaccactcaaaacattcatcataccacctattttagggagtttgtgcctaataatacctatnttggacaccaatatagcacaagggattaagctcttgtgaaccaaacccttatctaacaactcctttact

SEQ ID NO: 59823 - DNA, 316 bp, Glycine max
  unsure (1)..(316): unsure at all n locations
agcttaaagtaagcccgagtcattcatccctattagatgtttnntgaagattggcgatcaaaattgcccttccttggattatagggntgaaccaaacttatgcttttataaaaaagttcatcaagtcaaaatattgaagtaaccgtcttgcaaaattggggccaaagatgaatcgagtcacatcactgcttcgtctactgccaaacatanttangatttgtgatgttctttgtactttcagtttcaccttgacaaagatgtcatggaccatgttgaaaatctaaattgattcaaccccatatcctgcgtaaaaatt

SEQ ID NO: 59824 - DNA, 189 bp, Glycine max
  unsure (1)..(189): unsure at all n locations
gcttactaaggcacttgttctagctctttctgacgtttctaaaacttatgagctagaatgtgaagcctctggagtgggagttggagctgtattggtacaaggtgggcaccctaatgcttantttagtgaaaaaaatcatagtgccaccctcaactaccccacctatgataaagagctttatgccttaat

SEQ ID NO: 59825 - DNA, 418 bp, Glycine max
  unsure (1)..(418): unsure at all n locations
agcttgagaggattgatggngacccggngnngagataaacttggatatgtgctacgngggagtacgtgagctcaattggaggtgggcaacaagggatggtgggtttctgcgcgccattgggatgtggaaagctttgtgtgcaccatcgcccgaccggcacctagtaccacatgtgatgggtaccccataatcctacaagcttgagatgaagaagtgttgaagggtgaaacttcctgcttttattgttgaccacagagtggtacctggagatatgtcgcaggggtcaggagaccttggggacgtcaggtggggtgctattgcccaaaaccaagcttgaccaatcccgacccaacccgggcatagtcggtcagtgagaacctgtgatgtacctaagcangcgagctcctggcagtcaaca

SEQ ID NO: 59826 - DNA, 357 bp, Glycine max
  unsure (1)..(357): unsure at all n locations
aaacatttaccacccaagatatgaagatgtgagatgtttggtttcttgccttgaacaaatcatatgggagtttctttaaaatgggtcttaataagccctatttaaaatgtagcatgcagtggtaacggcttcagcccaaaagtattttggaagaggagtatcatttaataaaagtctaacaatctcttccaaagatctattttttctttcaacaacaccattttgttgaggggttcttggtgcagaaaagttatgctcaatcccatgcttatcacaaaataattcaaattctttattntcaaactcacccccatgatcactcctaatagatataatcttgagaattttcttattttg

SEQ ID NO: 59827 - DNA, 475 bp, Glycine max
  unsure (1)..(475): unsure at all n locations
agtcacctgcggcatgcaagcttggagaggatgcttaatggagganaagaattatggttataaagagagaggggggagcacgaaattgaaggaataaaaagaggagagaagtggaactttgaagtatgtctcataagactctcattcatcaaaggtaccacaagtgttacacatgcttctatttatagactaggtagcttccttgagaagctttcttgagaaaacttccttgagaagcttctttgagaaaacttccttgagaagctagagcttagctacacacacccctctcataaataagctcacctccttgagaagcttccttaagaagattcctaaagaagctagagcttagctacacatacctctctaatagctaagctcacctncttgagatgagaagctagagcttagctacacacccnctataatagctaagctcacccncatgacaaaaaacatgaaaataaaaaaa

SEQ ID NO: 59828 - DNA, 306 bp, Glycine max
ggaaaaaataaaattctggaaagataattggatgggggaaagattataaacttgaacaacaattcaatcagttatttcttgatagtgatcagcagaatagtaccatatccaacatgggaaccttctcccaaggcaattggtgttgggacttaaagtggagaaggaatctatttgactatgagcaacatacagctgtggcattcatggaagcaattactgacatcaaatccagcctcacatgcaggatattatggtctggaaagctgaccccagtggtatatattctactaagtcagcctacagact

SEQ ID NO: 59829 - DNA, 454 bp, Glycine max
  unsure (1)..(454): unsure at all n locations
agctntgagggtgtgtaacccaccattttttcatagtagaacaccggtcacgtgtctactatcattgggataatctctttttctgttattgggggtgctacttgagttgccaagtctctccatctttgggcgtattctttgaaagatttgtgccccctttttgcacactttttgtagttgcatcctatccggagccatatcaaaattgtactgacactgcctgacgagggcaaccattatgtccttccaagaatggactcaggaaggttcctaagttagtataccaggtgacaattgtcctagtaaaactttcttaggaaaaatatatcagcagtttctcatctttgcgtatgcccttatcttccgacaatacatctttggatggttcttggggcaagtagcccccttgtacttgtcanagtccagcaccttgaacttgggaggggtgatgata

SEQ ID NO: 59830 - DNA, 459 bp, Glycine max
  unsure (1)..(459): unsure at all n locations
agcttgannacccttaatttagttntaattggattattntgctttgcctaacatgtttaatagatgaggcatttatattgagtgttttaagactaggcatttgtgagatatagtctaagtctttttcatgcttagtgttgatcaaatatgaagtgaataaagtattcaagttctctaagtttcctaagaacatacttctacttgaaatttggctagaagtatcanattaattgatttcctaccttggtaattgagtgtccaagccagtttcagaagaatgaatgatctataacttaagataatcgattgtctcatttgataatcgattatccaacacttggaaacaaagagaaactctctgtgtgattctataattgattaccacacatgataatcgattacctagacaacacagaagaaacaaagatactcaaactgaaacaaattaatcgattaccc

SEQ ID NO: 59831 - DNA, 477 bp, Glycine max
  unsure (1)..(477): unsure at all n locations
ttcgtcttcttctttagtccagtcttcttctggcttcaattcatcagngggctttccttctgtgtccagcatcttgggatgttcccagcctttgatgacagctttccaggttctgctatccagtgatttgaggaaggccaccatctttgctttccagtattcatagttggttccatccagaataggtggtctgttcactggtcctccttctttctccttgttcatcagaatttatctccctagatctcactcagtgatttcgagtgcccgctctgataccaattgaaattctgatactgnngacagatttcgtacaggatgtcacaacatcgcgcttcagaacatgcagattatctctgagtgtatgaacagattaaacaagtaaataacacaagagaattgtaacccagttcggtgcaacctcacctacatctgggggctaccaagccagggaggaaatccactaaaatagtggta

SEQ ID NO: 59832 - DNA, 463 bp, Glycine max
  unsure (1)..(463): unsure at all n locations
taagcaccgcggctgcagcttaaagatgtagctgataacgtcaatttatctgttatcatatgcattntgngacgnttatttgacattatagttaactttaggctttgttttgaatcaaattaatttttaatacaatttttactttgtcttgggtattaatttatgttttagttattttttatgaatgttttatagtttttcagcaaaaataggtcattctggcaagagcactagagagccaaaatcaacagaaagttatagaaggagaaattgaaaaaattgaagataaaagctaggaaaatcaagagtaagatattnttcaaggataaatcagtggaaaaagatgatgattacttgaattaattacagatattntttgtttggtgatatagacatcattntataagggatcacatcctacnaggggattatgagaaatgagtttgtgatatggattgatgga

SEQ ID NO: 59833 - DNA, 441 bp, Glycine max
  unsure (1)..(441): unsure at all n locations
tgctgctactggtggaggtacttttattttcttgtcagacctcaaggtgatggcactcacattcttctgattctccacagtttgtgaaggcaatttgtcaaaattttgggactgagcttggtacaactgagtagccatctgccccatttgattagtcaaactttgaatggaggctcttgtctcttgcttgaaatgcatattctagatggtcattggcctcactaactcctctaaggaaggttgagaatgggcctcagntgcttggtgtctttgttgttgctgctgcattggagaaggaacatatggcctgcttggaccaacaacattctggaaaggagggacaggctgttgttgttgtggaggattttcccatcttagaattggatgattcctccaacctggattgtatctgttgcttgaaagatcataattattctactg

SEQ ID NO: 59834 - DNA, 391 bp, Glycine max
  unsure (1)..(391): unsure at all n locations
ctatacaaatcagaagatatgttgtttgatttgctaactgattaaatcttaatcatcttacaaacaaatgtgaaatctaagcatttagttttttgtcttagagtattcaagatgttttgagagcttttcaaactttataagaatatacaaagagttttctacataaagaatttgaatgatagcgtgtaggttcgttactcatttcttcaaagcatctagtatttataggttttcattttcaagtgtttgttgtttctaaacgattataattttcctttgagcttgcatatgaagcttgtggttattagatcatttaatgcttgcattaaacgcatatcctgcttcatgtangaaaaccactatgactggctttcgtgttgatcactataac

SEQ ID NO: 59835 - DNA, 261 bp, Glycine max
  unsure (1)..(261): unsure at all n locations
accgctgaacgccagtatagtgacaattaacaattataccattatggagaattttttggaagttacatgggagagcgaaagaaagggacatgatcgattaacactagacgagattaactaagaatgagaacaaatatttcgaattatccaccagcttgcttaatattaaaggtataagtntttttctatatggaggaatcaaactcaagtactaaatgatttataccaatttatccaagtgagttagaattctacatatgt

SEQ ID NO: 59836 - DNA, 381 bp, Glycine max
  unsure (1)..(381): unsure at all n locations
atgtgcctgctgttgcttatgggttcattgttcaagaacatgtcatttnttaatcctttacagggtgtttattctctccttgaaaaaccactatcaattgtgtagaacttagtcttacaattgtttatcaatccttggatgatttaatatgtttgctcaatgttatttntattgagagctttatagtattgatttaggaggtccttctttttaaatgtgttctctctgcgactacagtccagtcctatgtagcatggttgaatcatgtgaatgataatatatatgttcgtatactaattattcaaaatggcgtcagaatgaaattgattggctttttatgtgccatattcatggcatgatggtaatgacgagtggtgtatg

SEQ ID NO: 59837 - DNA, 327 bp, Glycine max
  unsure (1)..(327): unsure at all n locations
tgcagcttgaaaataatatctgattttaatttcttttccggccccanggcgagagaaactatggcgcagacacagacggcgctactagagttaacaagtctctccatctttgggcgtattctttgaaagatatgtgccccctttttgcacactttttgtagctgcatcctatccggagccttattagaattgtactgacactggctgacgagggcatccattaggtcctttcaagaatggactcaagactgttcctaattaagtataccaggtgacattcgtcctaattatactttcttatgaaaaatagttcaccagctcttcatc

SEQ ID NO: 59838 - DNA, 292 bp, Glycine max
agcttgtgcatccaataccctgatgaggatgttctatatgttcttaaaactggactggatcatttgctttccaaggttcatgggcctgcaggggaagacccgcaccaacctttggaagaatttcacattggctggttcaacatgaaacccccaaatggcccagaagaacacatatttctgaagggttttccttattcattaaaaggagtggcaaaggactggctatattaccttgctccaagggccatcacgagctgggatgaccttaagagagtattcttaaaaaaaattt

SEQ ID NO: 59839 - DNA, 388 bp, Glycine max
  unsure (1)..(388): unsure at all n locations
cacttannaaaatgggttgtgtcataccctaatttcgtccggggacctttgcttgatgacatgcgacttttatttggtccttgtaaggtgcttggcacccatcattangcaatttgtgaaattccgggacatgccgaaaaacaaaagaaaatattgatgcacaatccgtaaggttccgtgacacaccggaaatcaaatggaagcattgttgcacaactagtgaggttccgtaacattccgtaagtcaaaaaagggatgattatgtaatccacaaggttccgtaacattatagaaagaaaacaagtatcattacgaaattcgtaagtttccgtaactttacgaaaaaagaagtcaccaaaaaaaggcagggggtgtacttagtaaaaat

SEQ ID NO: 59840 - DNA, 440 bp, Glycine max
  unsure (1)..(440): unsure at all n locations
agcttganaccatgttgctggcaagttaatctatttcatgtactgnnntgnacctctggtactcacaatatatataaatataatttatcttggctgataaaaaaaatgtgggtggaaaaataagcactgcagaaggttttctatttttttacatcaattcatttcctaagggactcaattcctcattcattgaaccagtatgcaacattntacatcanacaccaatatataacattntaaagcanacaccactatataatattntaaatgaaacaacagtatatacatgctagttcctacgtacgtacctggagttgctataacccgaacgaccttcaacaacaatgtcaattaaaagtagtctatgataacctgaannaaaaaaccaatggtcatggacatggctgacacattnggagaaggattntggtattcatttc

SEQ ID NO: 59841 - DNA, 404 bp, Glycine max
  unsure (1)..(404): unsure at all n locations
attaaaagggggggtgcaacaatttaagtgttatctctagagaggccacacatgtcacaataaattatgttcctactcccaattatttttctcaattaattggttttcccgttccacctgacctaactcttacgtgcctttgcggagcttttgaacctcgatcagttaaatgacacaaggagcctactcatgcactaacgttatgatatggctaanagcaagatgattttctctttttttgcattaaatatatttttcataatctaactttcacgtcaatcaaaactagtctgtttttcaaggccgccctactacagcaaccatgtngaaaacaaggcctatgcatgccatgaaaacgtgcatagcgaggcacatatggtgtgaaaacttaatatgagagtgat

SEQ ID NO: 59842 - DNA, 258 bp, Glycine max
aaataaaatttatctagagaacaaaggtggttccgtgatcatatattattttaggggtgagtgattttctttgtatgtgtcttatagcatttggcaaagatttttctattatagttgggttaatacggttctactactaaatagaatagaccaagtttggtagatctacgattgccacatggaaacatattcatggagtgccggaagcatatttggtggtttgcaccatatggttcatttatcaacatatatagaaat

SEQ ID NO: 59843 - DNA, 443 bp, Glycine max
  unsure (1)..(443): unsure at all n locations
agcttctagnatatatagaccttcttcaatcatgtattcgnngnnnctaaacggacatatttcatctcttaagcttgtgtctaaagaatgtggtccgtggaacattaaatgcacgtaccttcgcatgctgagaaaccactctttgtcgctgacgtattgaacactacaacaaaaaattactttcttttttgtcagagcaagtctgtgtagtagaagtcttcttttgatgatgattaaggaatttcanagcttgacttcatttatttttcataggatttgacatatcctaggatacctatcttgcaaaatagatcttagacatagtgtattaaatgaaatcccaaatgtcatctttaatttatgtcatatcaaattatgattccatcttgctattgttngaaacatcatatgcaaactttatgaaacatgttctgatatagcat

SEQ ID NO: 59844 - DNA, 364 bp, Glycine max
  unsure (1)..(364): unsure at all n locations
gcctttctcaaggtgaaccacgtaatcctgtgtgtgttctttctcatctctttctctttcaattctgatgcaatttgtgtgtatgataattntgttatgctgcatctattgctgctgttcttgcttgttcttcatcacttccataatagncctggctatcgatgtangcaccttgtgcaccggtgagggccgtatgaactgctaacgttcccttnttactcattatttatttctttntattgttaatttattcaaatgttctcatcgtcatctttctcctttcgctatgttatttatcttttggccaactntggcgaaactgcatcgtgtcgccgtgttgtcgccaccatcttcgcgatcgtga

SEQ ID NO: 59845 - DNA, 477 bp, Glycine max
  unsure (1)..(477): unsure at all n locations
ggatcttaagcaccgcggctgcagctanataggtgggtcggtccgtgctcgcgctcttagcttctatctggatcgcttaacgcgccatagtggaatgtggcttaacgcgcctctcttcgcttaacgatgaaccgaaaccgggcgcctgattaaccggaacggggcccctaacgaaaccgacagctcaattttttttggatactttctcgcacttcaccactgagtgtcgcgcttaacgaatacttgctaactagcagaatggcttagcaagaagttgaaaatacactttttccaattnttctaattaaccttgaaatgagagaaattgattattaaacacacaaaacaaaagtataaataatctattacctatnattaacataaagtacttataatattacaaaacaactantaaatggagaagttngagacaatatacacaaagtttatacacaaaagttagtcgtttcaccgact

SEQ ID NO: 59846 - DNA, 383 bp, Glycine max
  unsure (1)..(383): unsure at all n locations
cacacatagtgggtgtgtatgtgatgtgtgaacctatggtagaatggttggatattttggaatggattggtggacctttgagtcattgtttgttggtaggttatgtgagaagatagagtcacccatacacccaacattttttaagaatgatgatgatgcataaaatatgtatggcacagggcaagtgtaccttatatagtagtatcgtggatctaattctggatatcgtaccctagagaccagttgtgctcccaaatagtcaaaattatcaaactaaacaattggaagaaatattaataaaagaatgaattgttttgtgattntagttttaaaagaanacaagtaattattggcaaagagaattgagtgatattaaaaatgat

SEQ ID NO: 59847 - DNA, 295 bp, Glycine max
  unsure (1)..(295): unsure at all n locations
gatcgacttccaaattttactggaagtctatagtgcataagcctacattttgaccggtgggatctacaagcaaacatccagaactcactctgcactgctctttccacaaccagttattttgacagcaaaattctgcataagtgcagatttcgaaaatcacacttcccctaatccaatcttgctcaaatcaaatcctacaagtcccaaatcaggtatcaaacatgtctaaaccaaagccaagcttcanaccacagcaacacaaaatctaggtgtccaaacccctcattcaatgggt

SEQ ID NO: 59848 - DNA, 431 bp, Glycine max
  unsure (1)..(431): unsure at all n locations
gaaaatgatttcaagattgagtcaagaacaattcaagaatcaagagaagtttgatttcaagattcaagaaaagatgaattcaagtttcaagagaagaaatcaagaagacttcacaagggaagtattgaaaagattnttcaaaaaacaaacatagcacaattttgtttttcaaaagaggttttctcanaattttctaagttaccagagtttttactctctggtaatcgattaccagtttcctgtaatcgattaccagtgacaaaattntgttttcaaaagctttcaactgaatttacaacattccaattaatttcaaaatggtgtaatcgattacaatatattggtaatcgattaccagtgtgtttgaacgttgaaattcaaattcaatggtgaagagtcacatcctttcacaaaaatgctttgtgtaatcg

SEQ ID NO: 59849 - DNA, 454 bp, Glycine max
  unsure (1)..(454): unsure at all n locations
agcttgaccaatcccgacccaacccgggcatagtttgtcatttagaacctgtgatgnacctaagcaggcgagctcctggcagtcaacagataaaaggaacaaagaccacaaagcaaggaggcttgtggtggctggccaactgtgaactttgattgatatgtgggttatggcctctggtaatcgattaccaagggtgggtaatcgattacaaggcttaaaaatgaagacaggaggctaagatggtctctggtaatcgattaccaaggggtgtaatcgattaccaggcttgaaaacgaagtcaggaaactaagggagcctctggtaatcgattaccagcctgtgtaatcgattacacagagggatgggtcactggtaatcgattactaagtatgtgtaatcgaatacacagtngcattttgcatatttcatgtcctgaggctgtgtaattcaagtt

SEQ ID NO: 59850 - DNA, 455 bp, Glycine max
agcttatggtgtcagatgcaaggggagaaagggttttatatttcatcacaccttatcatgcaaaagcctttcgggcttgaagaaaacaaaacacgagcactcaaacatgacaagtccaagctcttctagtaatgattgattggataaattgttaaaattgccataagctctgccaagagaaagagaaaacaggaataaataggactgaaaccgccaacattgtttaaatttccaaaatacccctaataccatggtcaaaatcgaatatacatatatatataatatgaaacgatcattagaagaacaaatatcttcagatgaatacaacgatgaagaaaaactcttgtaatccattgtctcagaaggcatgatgaatcccagaatacgcaggtatatatcccacaaaacgaaaatctcctgactttttatatctggtgaacacagcatagcatgac

SEQ ID NO: 59851 - DNA, 397 bp, Glycine max
  unsure (1)..(397): unsure at all n locations
tatctattagctaaccattaactaatctgtagaagctctctcatatagcttctctaaaagatgagaggacgtctacaaattagctaatggttagctaatggacaactcatttttatggagaagctcattttattnttttcttcatatcttctcctaaaagtgcttccagagaagcttacccaaacggacccttatccaatatatntcattggttaccttttagaacaacttgacttttgtgagacaaatgttttcaggaatggtgaaactatattttcattgtatgatntaataaacgcccgtgactggaaaatgtgaattattttgatttttgatacatcagtcagtgtggcatatctatatgggtatgaatgtgtgatgtaaagttgttttcact

SEQ ID NO: 59852 - DNA, 391 bp, Glycine max
  unsure (1)..(391): unsure at all n locations
atttttttttgtagtgatcgattattattaaactttttgctcaatccactaatagaaactaatttcactggtggttattattaatatgatgaaattttacatatttatttaaaagtactgattcatttctagtttgtttttaaagttaataaaattaattttcctccttcgaaaaaataaaattaattctttcgtaactttaatataaattattaaaatgtgtgtttaaattatttttataagatctatatgacacattttctatatagattttaccgcttattccattttttttaattagaagtagaagttcacattgataattcacataacctttaaagtccgacataactgataagtagatgtanagaaatttttagaagatatttta

SEQ ID NO: 59853 - DNA, 365 bp, Glycine max
aggatagtggtcttaccagcagcatcaagacctttttttttggaattgtacatagaccataggaaaaaaaaggtatagtttaattagtcaatttaattaggtaaaataaaagaaaattaaacctacacccttcttaatcctggaaatcaagtaaggccaattggcaaaatctaaagaaccctttgaaaataactacaccttacaacaatgtcatcaatggcttgcaaaacccaaataatggaatacaaccccaacttagtttaattatttacattatacaggccaaaaatattatagtaattttctagaatttacgcctttcttcttttcccgtgcctcattctctatttcatttttctcatcac

SEQ ID NO: 59854 - DNA, 407 bp, Glycine max
  unsure (1)..(407): unsure at all n locations
agcttgtagcanattcgaacgacaatttctntttctctgttgtncgatngagncccgnaatatatcgagacgctcgaaattaaaaaccaaagctcgtagcaaattcgaacgacaataacatttcactcggaagtccgattgagtcccgtaatatatcgagacgctcaaaatttaaaaccgaagctcgtagctaattctaacgacaataacatttcactcggaagtccgattgagtcccgtaatatatcgagacgctcaaaatttaaaaccgaagctcgtagcaaattcgaacgacaataacatttcactcggaagtccgattgagtcccgtaatatatcgagacgctcgaattttaaaaccgaaggtcgtagcaaattcgaacgacaataacatttcactcggaagt

SEQ ID NO: 59855 - DNA, 320 bp, Glycine max
  unsure (1)..(320): unsure at all n locations
aattcgagcggctcgatatattacgggactccatccgacttccgagtgaaattgtattgtcgttcgaatttgctacgagccttcggtttaaaattcgagcgtctcgatatgttacgggactcagtcngacttccgagtgaaatgttattgtcgttagcatttgctgcgagcttcggttntaaaattcgagcgtcacgatatattacgggactcaatcagacttccgagtgaaatggtattgtcgttagcatttgctgcgagcttcggttntaaattttgagcgtcttgatatattacgggactcaatcggactttcgagt

SEQ ID NO: 59856 - DNA, 260 bp, Glycine max
attgtgcttgattacatttatgggctgtagactgaatcatgactctggaaatgtatgacggtaattaatgctgagacagctatgagtctggaagtatagaatattgagaccatggaccaattgttaatcgatgacgatgtaagtttcgcttcaaagctgcgctgaaattatgtgaacacaacattggtttgcgactttttctccgtaatattttattcgttcctatctttttatgttttactatttatcattattttctc

SEQ ID NO: 59857 - DNA, 406 bp, Glycine max
  unsure (1)..(406): unsure at all n locations
agcttggacaatggcagggagtcgcattctacccttctatgggagggcgacacaagggctcacgggtgcgtcttccaagggaggaaggcgcgcggagtncccaccaatgttggntaagttggttttatctttttttttgcaagatatattttaaccgaacaaaagtcgtttaaggcgttggaccattaaacgatcttttgattcttttgaaaggagagaaacgttaaggcgttggaccattaacgatctctgggtagagaaacgttaaggcgttgaatcattaacgatctcttggggtggtcgacaaaagcggggtttttgctcctacgtatcctcaattgcgatgaggaaatcagacctacatagttcttgcaaaagcggataaagtattgggattgatttatgc

SEQ ID NO: 59858 - DNA, 435 bp, Glycine max
  unsure (1)..(435): unsure at all n locations
ttgaactnttcttccttcgtgcacaatagcatgttctagtcctagtctagaagctatgtgtttcactcccatgacgtcatcctctgagaccagtttcatctatatatntgcatcatttttgacattntccaaagctaattttatggattgaagactagtagtgcatttgagacctatcaatcctaacaagatcagttcttcttgctgaagttgttctccatctctttgtgtataagcaaaagcaattggcttaaggtcagcatcccccatttgttgaatcacctggccaactntgaacttcttattttccatggcatgtgtggcgtttaaacaaattagttntacacatganattaanaataaaaaaggaaccttcgagtggcttttttaattgggttaaaattggtattacttggagatggtataacttgaact

SEQ ID NO: 59859 - DNA, 440 bp, Glycine max
  unsure (1)..(440): unsure at all n locations
ggctgcagctgtatattaaaagaaattctgtgtttatattatgactganaatgttagtcagtttgtcagattgattgtgaaggaatgcattgaccgtatcctggtgagagtgtgatccttaaattttgagagaaacgactatcatttagtactgatttttgcatgaatctctgaagtatggactgaatgcatgaaattgaggatgatgaaggccatgtgttgagtgtgatagccacttagccaaaaagctgaccctgtgcttgaatgatatcccttgcacccagtttgagctgaatgaattattgattgattgaaccctgagcctatgcaatgttatttcctgctaccttgtcttaggttgtaggagagcatcatccacaaaagcttggttcanacctaattngtcccaaatttgggggagtaactgtcaaggaaaattt

SEQ ID NO: 59860 - DNA, 415 bp, Glycine max
  unsure (1)..(415): unsure at all n locations
acagagcctggcttttatagactcttcatgtctggtcaagaagaccattcagaagagttataacttttagaaaaacttagaacccatttgaaaaagtcaaaacctttttgaagagttatatctttatattgttcggaaacaaacactggtaatcgattaccaaatatgtgtaatcgattacacaaagctnntgagtgaaacaatgtgactctttactttntaaattgaatttcaacgttcaaggacactggtaatcgattaccaaaacattgtaatcgattatagcctttggaaaatanttggaacattgtaaattcagtttggaaactttttcanaactcatttgctactggtaatcgattaccagagagtaaaaagctcttggtaagaatttgtcaaaactcatgtgctattc

SEQ ID NO: 59861 - DNA, 343 bp, Glycine max
aaagagcaatgcatgtgtaaagttgcactattttcccttattaattattaaaaataaatataatgtattttattaatttcgcgcaggagatttttcttcattgactaattatacctacatttaggtacttgtaatacacaatattcatgttccatcatcaaccttactttatctaaagtttcaaatcaatcatagtaaataaacattaacttgactgtttcaacttccatgcaaacactataatagtatgtctcttgtgtgtttgcatgaacacactccattgaatactatttgatcatttcatttgatgattatattttcttacttctttgacgttcttaat

SEQ ID NO: 59862 - DNA, 422 bp, Glycine max
  unsure (1)..(422): unsure at all n locations
tatatctatatatctatagatagatatatagatatagatatatagatatagatcatacaatgaagtaccgcacgagtgggtatatangaatccaaatctgccgaatcactcatgttatgatcttctacatcctangtcttnccggtccttcatctggcttatgttcttcatgtagcattcagactgaatgactctatgaaattacgtcgctacttccacatggtacgggtaacgtaggagacatctctatntttcccggngggaatccttagaattaccacagcttagctttcaattcgcctctgaccatcaaatgaaatgtgaataacccgtcctcccctctttgaaactttgaaacaaagggtgcttccggntctgtcngtgcttgaaacaatnttgtctctctcatattactatatctc

SEQ ID NO: 59863 - DNA, 401 bp, Glycine max
  unsure (1)..(401): unsure at all n locations
agcttagcatgctgcgctattcgctcatctctattttctgntnaaattttctgttttcttgagaataaacctgtactaatctcttgtgttttgtcttatattttgcagatggcttctaagaaaaggaaggcaccgtctacacctacccaagtcagatttgatagatccagattcacttcccaagaggcttgngaaaaatacactgacattgtggtgcctcataagctnttaccaganaggaatgtggtggtctactatacagtgtttgatgagttcaagggggaactcgagagatgccactgngatgaagagttcgactgatttgttgacgacaacattgatgttgccattgtgaaggaattctatgcaaacctctctgaccccgangacatctcacctaa

SEQ ID NO: 59864 - DNA, 429 bp, Glycine max
  unsure (1)..(429): unsure at all n locations
agccgggctatacgagacatcttaccaaacaaagtcaggttcacgataactcgcctgtgctttttcttccatgctatatgtagcaaagtgattgatccagtaatgtttgatgagttggaaaatgaggccgcaattatactgtgccagttggagatgtattntccccctgctntctttgacatcatgattcacttgatngtgcatctggtcagagaaatcaaatattgtggtcctgtttatctacggtggatgtacccgattgagcgatacatgaagatcttaanagggtatacaaagaatctatatcgtccggaagcatctattngtgagaggtacatcgcagaagaagccattgaattntgttcagaatacttagagaangctaaagctgttgggcttcctgagtgtcggcatgatgacagagtgggt

SEQ ID NO: 59865 - DNA, 139 bp, Glycine max
  unsure (1)..(139): unsure at all n locations
tagagcaccgcagctgcagtgagattctataggtacctaaagcttggtatatgttatacngncnccgggaaaaggatccgttacatttcacaccaccatccaacccgaaacattaaagtgtaaagctgggggggcctaa

SEQ ID NO: 59866 - DNA, 429 bp, Glycine max
  unsure (1)..(429): unsure at all n locations
cctgcggcatgcaagctttattaagctgaaccttttatcaaaatttctgtttattttattcagaaaaataaaagttatctcttttatcttagtgagagtgaattctcctaattcttgagtgattcaaaacaccctggctgtatcaaaagaccttcacaacctttgtgtgttgcccttgcaggaaaagagtgattggttcctttctttcatcttcacccttggtatttgaaaccacaattccagaaaatccacctctgcccagaattatctcgtggccataactcctgttttacgcactcaaattaagtgattcttgagcctaaattgaatttcaaaacaagaccttttcacctcgttntagaatcacctcatttggagccctgtagcttcagttattgccatttctatatttctgtccagccaccactt

SEQ ID NO: 59867 - DNA, 489 bp, Glycine max
  unsure (1)..(489): unsure at all n locations
atgcttacatcagatttagtaatggacccactaacctagaataatttatacttattgccattaacctagggaattaaaagaacttaatggttgagtgtaactgaaattgtggcaaccaaaagtctgatgcctgtgttgcaattgggcccttattacaacttgaactaaacctaactaaagcctttttagttgattaacccaaaacatatttttggtcagccaactttacaaggattaggccattatttagacaaactgaacactctaaaattgagacaaagtggtgccatttagtcctcctccatttgggccatgatacaactcacaaccttggacttttctccttgaaacttgggcttgtattcaaatagtatggtcaacacttgttgagacgctcgaaatngaacaacggatgccctcgagaaattcatatggtcataacctttcactcggatatgcgatttaggcgcataatatatcgaaacgctc

SEQ ID NO: 59868 - DNA, 452 bp, Glycine max
  unsure (1)..(452): unsure at all n locations
agcttcatgggacaatttcttcattngantntgttatttctttctggatcaatgcatataccacaaggtcagtgggagtaaaatatgtttccttattttatatgtagatgaatatttacttgcaaccaatggtcagggtttgctatatgaggtgaaataatttttgtctaaaaattttgacatgaaggatatgggtgatgcatcttatgtcattggcattaagattcatagaggtataccttgaggtattttaggtctatcacaagaaacctatattaacaaaattttagagagatttcanatganagattgttcaccaagtgtctctcccattgtgaaggctgatagctttaattngaaccaatgcccaaagaatgactttgagagggaacaaatganaaacatttctttatgctttagtntnggaagcctcatgtatgctcaagtatgta

SEQ ID NO: 59869 - DNA, 446 bp, Glycine max
  unsure (1)..(446): unsure at all n locations
gccttaactctgctgcttcggtaaatgattatcatgattaggacttgtatgattctatttgggtcaaaatggatgaaggcaagagtgatttcgaaaatctgcacttttatgccgaantttggttgtgaaatgtgcaacaaaattntgtgcttgtgccaaaaaatcttatgccatgctggntgtggaaagggtttgacatattgtgttctgggacgtttctagcagatcccaacggtaaaaatgtagacttatgtactaggaaccctncagtaaaatttcgagtcgatccaacgggtgaacaaatggaacaaagggaatgttactggggtattngagtaagaaaagttgtggtattggtttgtgtttttgggcaagagtttctgcctctaccctgtttttcttggntttgaagttcatgatgtttggatgttgaaaatgcttggatg

SEQ ID NO: 59870 - DNA, 451 bp, Glycine max
  unsure (1)..(451): unsure at all n locations
caagcttgagccaattcaaacgacannaaactntttctctgatgtctgattcagnncccgaatatatcgagacgctcaaaattgaatgttgaacctctgagcaaatgcaaacgaaaataattttttcttggatgtctttatgagtcccgtaatatatcgacacgctcgaaattgaatggtgaagctctgagcaaattcaaacgataataactttttactcggatgtctgattgagtgcctgaatatatcgagacgctcaaaattgaatgttgaacctctgagcaaatgcaaacgacatataattttttctcggatgtctttttgagatccgtaatataacgagacgctcaaaattgaatgttgaacctctgagcaaaatcaaacggcaataacttttttctcgaatgtttgattgagtcccgtaatatatcgacacactccaaattgaatg

SEQ ID NO: 59871 - DNA, 340 bp, Glycine max
  unsure (1)..(340): unsure at all n locations
tatatcgagacgctcgaaattgaaaactgatgctcgtagcaaatgcaaaccgcaataacttttaactcggatgtatgattgagtaccataatagatcgagacgctcgaaattgaaaaaagaagttctgagcaaattcaaacgactataactttttactcggatgtcttgatgagtcccgctatatattgaggagcacgaaattgagaacagaagctctgaccataatcaaaccaaaataactttatattcggatttgcgaatgagtcccgtaatatatgaagacgctccaaantgaaaacagaagctctgaacaaattcaaacgaccataactttttact

SEQ ID NO: 59872 - DNA, 464 bp, Glycine max
  unsure (1)..(464): unsure at all n locations
agctagcatacaagattctccttgcctggcactttataaccttctggttgggncatatagatgtcttcctctanatccccatgcaagaatgcagttntaacatctaactgctccaagtgaagattctctgcagctactatgctcagaataactctgatggtagtcatctttacaactggagagaagatctctgtgaaatcaattccttgtttctgctgaaaccctttcaccacaagtctcgccttgtatcttcttctaccgtcagattcttcctttagcctatagacccacctattctgtaatgccttctttccttctggcaatttagttaaagaccacgtcttattcttctgaagggatgtcatctcatctttcatcgctagctcccactcaatagtgtcattcccctgtgtagcctcattgaaacattctggctcaccagcatncagtaacaacaaataatg

SEQ ID NO: 59873 - DNA, 398 bp, Glycine max
  unsure (1)..(398): unsure at all n locations
tgcagcttattaagttagcaaacctttatggttgtcttattaagcctagnccaacaagagggagctgaggaggaagcttggattgattcagtctaactagggatcgaggtttagtaatttaggctacagcatagaacacaaaagcatgattgattagagaaacatctttatatacatcaactagtttgttagatataccaacatctttacctactgctgtcaattttacttacttgcatttttactatttttagcctagacttagtttaattttgttctaaatcatcaattatcaatgtttctttcaacaatgtcttatttctgaatttaaccctgtctaagactagttccttgagttcgatacttggattcatccgtattaattttaaatacttgac

SEQ ID NO: 59874 - DNA, 394 bp, Glycine max
  unsure (1)..(394): unsure at all n locations
taaaanangtaactctacaaaatataataaatctaatttaaagttattataaattaataatactatatatccccatgacacgggatttctatactagttattgttaattcactcatcaatggtggacgtttattttatttttattgaaataaatgtccatgtattacgttgttgagttttgcattgaagcataagatttagcatattctaaatctttctgcaacataatcttcttaattaaggaaaatattgaatacggttttatattttcaagatattgtatcctcctacaccatattttatttatttttttatcttcaaaatatttattaacattttattactcttttaaataaattttttattagccgattaaaataatttttctttacta

SEQ ID NO: 59875 - DNA, 252 bp, Glycine max
  unsure (1)..(252): unsure at all n locations
tgcatgcgctaatgttatacccatgtggaggtggtgtngttaatgngccacccacatttgtccatgctctacgttaaagatataattagggattattttcattaatagtctttattatgtttccctatattggactgattattcattataaataagaacacacaattacagtgaatacttttgtatactctagatgtccagtcctgggtatgagagggtgtgttgagatncacattgactatagacacgacc

SEQ ID NO: 59876 - DNA, 388 bp, Glycine max
  unsure (1)..(388): unsure at all n locations
tctaagcgactgagctgcagctgtaaggagtgcaggatttgttatcttttttcacacnggcttaattagggagatttgagaagacaatgggctcatgttggaaagaaacaagagacctgatgcacgttcaaaaaacttgatgaattgaaacatggaaacacgtcaccaactaacttatcacactgcgtactggaagaatttgggtagagctcactgttgcatttctcattgctctttgataactggcttgcgatgcagagattgaaaataaatactgcctagccatgcaccagataacatgatctttcggttatcttaatctcggacttatgttattaaaagaataacataaattagactgattgtctttatcagagatcatttcctg

SEQ ID NO: 59877 - DNA, 408 bp, Glycine max
  unsure (1)..(408): unsure at all n locations
ggaaaaacctgatccttcactgtgcttcgattgtattcttctctactcttattaatggccaacctggcggcgaattgagatcacaaaggggattgagatagggggatcccttngcctcctatctctttattctttgcgcagaagtgctctcagtgcttatctcccaatcagttttcagacagttgttgcatggtgttaaaatttgccccagggcacctcctattactcatctattnttttcaaatgacaacattttgtttgtcagagcggatgttcgagaagcacatcatgtttttgaagtgattcatgcatgtgaaagggtgttgggacagaggataaatctcaacacacccgagatctccttcagccaaaatgtttcgactttcagatcanatgagctagagatgc

SEQ ID NO: 59878 - DNA, 416 bp, Glycine max
  unsure (1)..(416): unsure at all n locations
agcttctttgagaanactttcttgagtagctagatcttagctacacacacccctctcataactaagcccacctccttgagaaacttccttaagaagattcctaaagaagctagagcttagctacacatacctctctaatagctaagctcacctccttgagatgagaagctagagcttagctatacacaccctataatagctaagctcacccccatgacaaaaaacataanaatacaaacaaaagtccttactacaaagactactcaaaatgccccgaaatacaaggctaaaaccctatactactagaatggcaaaaatacaaggcccaaaagaaggaaaaaccaattctaatatttgcaaagaagaatgggtccaaccttgacccatgggctcaaaatctaccctagggtcatgag

SEQ ID NO: 59879 - DNA, 431 bp, Glycine max
  unsure (1)..(431): unsure at all n locations
tatctatatatcttcattatcattnncaggatctgataacttcttatcagacgttagttcatcatctgaattaacatggatggattcttctacaactaaagttcttgtactaaaaacttatatgctntagatgtattagataaaccaagaanaatccctttgtccactttggaatcaaacttagcaagtngatctttagtggtcatgataaagcactcacatccaaatggatgagagtatgaaatattgggtcttcttcctctctatggttcatagggagaacttnttatcaatggtctgatcaatattctattctaaacatagcaagttgtatttactacttnctgctcaaagtacttangaagtgaattttcatatagcatggttctagccatctcttgcagaggtctatnttccttttaactacccca

SEQ ID NO: 59880 - DNA, 402 bp, Glycine max
  unsure (1)..(402): unsure at all n locations
aaggaattctatcaatagacctccaatctttaatggagagggttaccactactggaaaacccgaatgcaaattnttattgaggcaatagatctaaatatttgggaagccatagaaatagggccttatatacccaccacagtggaaagagtttcaatagatggtagttcatcaagtgaaagcataactatagaaaaacctaaagatagatggtctgaagaggatagaaaacgagtacaatacaacttataagccaaaaatataataacatctgccctgcgaatggatgaatatttcagggtttcaaaatgtaagagtgctaacgaaatgtgggacactcttcgattaacacatgaaggaactacggatgttaaaagatctacgatanatgcactaactcatga

SEQ ID NO: 59881 - DNA, 277 bp, Glycine max
atcttgagtcacctgcggcatgcaagctgtatattcccaattatggcatttgtttaatttgtaataatctgtttagggtacgctgcttagacatttcttggattatgagaaactggcttttaagtgaaaagagcttagtttgaatgcaaaagtacagtgggctaactcagtattggctaacgctatcatcgtaatgcacttcacgcgcttacacaagagaattgcagacataacacaagcgccgctaaggcaataaggcctagtgtactgtgcttca

SEQ ID NO: 59882 - DNA, 320 bp, Glycine max
  unsure (1)..(320): unsure at all n locations
caatgcaaggaagcatgacttatgcctaggaatcntaaattttggtgttgaatgttaaaaaggcatgaatattaggacatgtttgagggtctttattcaaatttaatttggctgtcccagaggaataccttgcacctaggtagcatggaaaataccttcaacggtatatatatatgtgaatatatggcatgaaaataccttagcaaatgagtgaatagttaatattgcacttcaaatatgtatagttgtggatacgaaacataaagagcctttcaacaaatgtacccatgccatagatggcccaagaatgcatcccaaat

SEQ ID NO: 59883 - DNA, 380 bp, Glycine max
  unsure (1)..(380): unsure at all n locations
agcttctcggctcatactgggaatacctctagtttattattttttgctattctaaagcaccncaccccagaagggaaggctccccaaggtccaactccaacacgactcgaccggccggtattnccacacgacaagaactttccttccgagggccatttcaaaattcaccccacttccaatgacgtacgaaaatcttcttgccatcctcatcgccaatcattttgccgtggtaactccccgggagggtcctcgaaccccctttcccgaagtggtatgaccctaacgcaacttgcaagtaccatgggggtgtcccggngcattccgtcgaaaaatgctttggcccttaaatacaaggtccaacatttaatggatgctggatg

SEQ ID NO: 59884 - DNA, 300 bp, Glycine max
  unsure (1)..(300): unsure at all n locations
ccctggaatattagggtgaaccaagctcatgcttttaccaaaaagggtcatcaagtcaaagtgaaatatggaagtaaccgtcttgccaaattggggccaaagatgaatcgagtcacatcactgcttcgtctactgccaaacatatttangaatatngatgtcccttgtacttccagtttcaccttgacaaagatgtcatggaccatgtngaaaatctaaatngattcaaccccatatcctgcgtaaaaattcgcaatacttcgactgtacatcattcgcatgcatccatgcttttcattg

SEQ ID NO: 59885 - DNA, 475 bp, Glycine max
  unsure (1)..(475): unsure at all n locations
ttaagcgacgcggctgcaagcttctatggaagtctggagaatgaaggccctctgtatgtattaactgtaaaccaagntcatgatcgcgtaaaggaaattgtaaccgtgtttggcaagtcccagaagaagacatcatctcccaacaacatgtggaagaaacgctcaatattctttgatcctccatactggtttgatctatatgtgcgtcactgtctagatgttatgcatgtggagaaaaatgtgtgtgatagtttaattggtactcttcttaacattaaagggaagacaaaggatggttngaaatgtcgtcaagacttggttgacatgggaatacgagagcagttgcattccatatcacnaagtcggcgaacatatttacccccagcatgccacacactgtcaactgcagagaagaaaagtttttgtcantgtctgcggaatgtcaaagttccacaaggatactcttcaaatatca

SEQ ID NO: 59886 - DNA, 396 bp, Glycine max
  unsure (1)..(396): unsure at all n locations
acttccttgagaagctntcttgagaaaactttcttgtgtatcttctttgagaaaacttccttgagaagctagagcttagctacacacacccctttcataactaagctcaccttcctgagaagcttccttaagaagattcctaaagaagctagagcttagctatacatacctctctaataactaagctcaccttcttgagaagccttcttaagaagatggatgtgcatcattntcttctattntctaaaccctttttgcacccatttaattactggatggtcttaantggtcaataatcaggcagttttattattggggctcatttagctaatttgatgttttaatctaatntcaggaattaatgaaacattgggcttaatcccgattttggttatg

SEQ ID NO: 59887 - DNA, 461 bp, Glycine max
  unsure (1)..(461): unsure at all n locations
agagacgacctcacgcatgcaagcttctgcttatgtggcagggcgggctacctttattttcttgtcttaacgcgagctntgaccactgctcttccttcccgcgatgcttcttttcatgtcctcctgagtaggcttatagcctaaaccatacttcccacgatttccttgggcatttatcangccagttatgccgccgttgtttttgcctanacccattccgggttcataaccgttccccaacataactcgggccatcattactgctgcatcggacagacaaggctgcctagagagggagtccacngaggaaatgctgaccacctcataagactggatagcggtttttaacgaatcttctgcggcctccacataatgcatatacgatgggcttccaccaatatgttttttcgcctgacttattatccattgtccttcacttcaacttagggttacttttcttg

SEQ ID NO: 59888 - DNA, 407 bp, Glycine max
  unsure (1)..(407): unsure at all n locations
agcttcttgcgnagccgctcttgctgttcanaatttcccaaaaacaaacccctcttattactagctattntgaattctctagtgtgaatgtatgtatacataattttgatgatgtcaaaagaagaatcaaacaaggctcattttgcttcaagattaatacaagattttttcaacaaacaaagccttgattcaatatttcttcaagatcaagccttgcctcaaaatgtagagatttcaagtcatccaaggcacatgtaatcgattaccaatacatgtaatcgattaccaaggcacatgaaagtgtgtaatcgattacacatcatatgtaatcgattaccagagactctgaaccgtgggaattcaaattataactgtgtaatcgattacacaaacattgtaatcgatta

SEQ ID NO: 59889 - DNA, 311 bp, Glycine max
  unsure (1)..(311): unsure at all n locations
acatttctttgaaagcactcaaggcaaaacattagtaacaaaagtctaacatatttaaaattttcttctaaaagtttgttgtcattaaaacattcatctcattaagggttctgcttcaacactaagaatatcatattccatggtctattgaaagtgggttgtaataaatgttctcgaaagagtatctcacaaaaaggtaaattagtattggcaaaatatttctaaatacttaattcaccttttctcttttcttgagcaccatttaacccattttatttctacaacagatacatnatatgaatctctgtacc

SEQ ID NO: 59890 - DNA, 461 bp, Glycine max
  unsure (1)..(461): unsure at all n locations
acggaccttaagcgacgcggctgcagcttatgctaaagcagtattttgttgtatatattatgaaaagagntgatctaaggatgaatgctctcctanaacttaagcttttgcatcctagaaaaaccatgatttgcttgcagtccggtctcaatacaagcctagaaaagtcctttggattcaatttgtgtttatgactgtatggcatgagatgaattgcaaagattgagattggtgttggttgttggttgagaaatagccttaaacacttgtgcttgagtgaaacagtgactgtgaggcattggttgatgacccttccttgatatctatcttgcttactagcttatttcaattgtgttggttaataatcatggtcatatctttgaagagctgcatgtcatggtgaaaagtgttgattgaaacatcgtatgccactcatgtcatgtgagtgaattctttggaac

SEQ ID NO: 59891 - DNA, 420 bp, Glycine max
  unsure (1)..(420): unsure at all n locations
ctcttgcttntatcgggtaacatggactgttcaaaagcataaaaatcaacacatcactttactgccttcgcgagaactatgcaggtttgaattcctcttcgatggaggatacgtatgagcaaaagccctgcttttgtcgacctcgtgagatggttagaggtcgaacgccttatcttttctcaccaagtaaaatggatcaatttaaggtccaatgccttaaatgaccaccttccaagtaaaaagaatcacttgatttgccccttttgaaagaactacgttggtctgatttccttatcacanaatgaggaatacgtaggagcaagggaaacacccttgtcgaccanncaaaagatanaataccaaaggcataanaagacattataaacgtanaagggaaaataaaatgaattgaagtcatat

SEQ ID NO: 59892 - DNA, 365 bp, Glycine max
  unsure (1)..(365): unsure at all n locations
agctnttaacattggttggggcaactttcaacattggttttcaaccgangntgaaattaccgatgttaacattatcaatgttaacatcggttttcaaaaaaatgatgttaacatacactacacgacatcgattnttatgaaaactgatgtcgtaagtaagaaatatacaaaaaaaagccaaaactacaaaaactgatgtagaaattgtctttacaacatcagtttttggcaaaaccaatgcagaatgtgcttacgacaatgatcttagccaaaactgatgtagaaagtgcctttaatggatactctatacataggttntagaccaactgatgttgttttttgtacatttttatgtgggatcgagt

SEQ ID NO: 59893 - DNA, 406 bp, Glycine max
  unsure (1)..(406): unsure at all n locations
aatagatctaaatcaaacagtcttcctgatttatattggccttaaccacacaatgaatcttggtgaattcataccaaacataaacctagatgtccagacaatagggtttcgaagaaactttatgggacataacttacacttagatattaccttcataggcagaataagtgaccaaatatcccctagatataggataaacacgaatcctttagtgacaaccttatcatctgatggaattcaatttttgtcgcccgaaatctttgattccttcagaaatcaaaataatcaatggcaaacacatattgatgtcgcatcctttaggagtgcaataaccactttcagaatgggctataatatanacagaagaaatagtcttttcagtagattactggatacgaagacatac

SEQ ID NO: 59894 - DNA, 354 bp, Glycine max
  unsure (1)..(354): unsure at all n locations
gatcccattacgaaggcactaaccttgtctctactaaataatctgtacattgatgctaattggtatcttttgttagtcatataaattcttatatgtggttgagaccgatacttcattaatgtcactcttatttaatgttgggtttcaggtttgggctcactgctatttaccttttcgccattcagtatattaccaagattggtggcaaggtgtctgtcaaacttatcatgaatgaaaacaatgagaacacnagaaaacgggctgatagcttggtctcaaggtaatggcgcggatngaangtaccatgttgcttttttcacctatcctaaacagtgaactangggttactttctc

SEQ ID NO: 59895 - DNA, 402 bp, Glycine max
atccacgtcaactagaagatatatcatgcatatgaggctgtgattcaacaatcgttgtttctttcatattgacatcctcatgtttggccatgaaagtttgtctcattaaataaaagattaataatataatttagtctttaatcactacaaaaatcttaacgtcacattattattgttcacgagaatatgtaacattgcgattcttgtgatgattaaaaatcatcagattttgtgatctacattttgtaatggtttgacctccacagataaatattattatctctagttggcaaacgttgttcaattgtaacacatcatataaaatgaggaactaaaaatcaacatttaatatagaggaactaaaaactaaatttttaatatttactgatctagatatatgtt

SEQ ID NO: 59896 - DNA, 453 bp, Glycine max
  unsure (1)..(453): unsure at all n locations
agcttgcttccaaactatncaanncgttctcattctctttgtatcncnnanaggtatccctaaactgctctctattccacctttttaaccttgtcttcaatctctttaattnttcttttagcacaaatccggcccatccaatttgctggtgtgactgccaacaatccttcactgttgacttaaaaagatttatccgacaaccaacaatcaaggattcgaaatggcttaaggccccaatcagcgaacttagatcggagtaacacaggacagtgatccgagaaatttctcttcangggttgctgtaagcttgctggccatcttgtgagccaatcangagacacaangaaacgatctaacttgctctttgctgatccattggctcaataccacgtataantactgccagtccaaggcgctttcaccgcctncaagtcatctatccactcattaaac

SEQ ID NO: 59897 - DNA, 452 bp, Glycine max
  unsure (1)..(452): unsure at all n locations
gttggacgtctaagaagcanatatttatattatcgnctttctgttccaccnagaaacacctcataaaacaagcacgaaattaaaaaaaatatgatttggagccttcaaacatgttcaagtacccatgttcggnggttgtttaaaattatgcgcgagtcgcctaagacattcgaggggcgctatttctcatgtttggacgttaaagaagccaaaaaaaataatatcgtcagtcgactccaccgaataacacctcaaaaaacaagcacgaaattaataaaaaacaggatttccacccttcaattgtattatggaattcaaacacgctgtaaacaaacaaataaaagttacattaaaaacaaaaaaagaaatgttgcattcagtcgtttagcgacgtggcatccacatcgtcttcgaattccataccatgtttagtaaaaaagctaaaatttcta

SEQ ID NO: 59898 - DNA, 411 bp, Glycine max
  unsure (1)..(411): unsure at all n locations
agcttcctaacaaanatttttatgcatgtggactttcttctagnaatnnngacttacagcaacctcttatccctcttccattcccacctaaagcaattccaaacaaaaaaatggaagaagtggaaaaggagatcttagagaccttcaagaaagtagaggtgaacatacctctactagatgccatcaagcatattccaagatatgccaagtttctaaaggagctgtgcacccacaaaaggaagctaaaaggaaatgaaaggattagcatgggcaaaaatgtgtcagcattgatagggtaaattgttcctcacattcctgagaaatgtaaggacccaggtactttctgtataccttgcattattgggaaatagtaaattgagaatgccatgctagatctaggagcatcagtta

SEQ ID NO: 59899 - DNA, 350 bp, Glycine max
  unsure (1)..(350): unsure at all n locations
aacattcataaacagtgtaagctcttttggctaagtgactatttcaatcaatcatggcctacatcatttccaaaattcatgcattcattcagtattcagagatntatgcacaaatcaatacccaatgctagtcattctctcacaattaaggatcacacaactcaccggattgtggctaatgattaccttcacaatttacctgtcaaaccaactaacatttttagtcatgctcctaattcatgttctttatcttctaattaccgcatactcattcaaagcatatgatctaatcattgcaattcactcaattcatgtaattgatcaatccaacttcattcacaaacacacaa

SEQ ID NO: 59900 - DNA, 366 bp, Glycine max
ctagatctccacatacaccaagcgcgcataaacccaccatccccctgttgcccaccttcaactgagctcacatacttccacgataaccatatactcgtttttctcagcaccgggtccccatcaatgctctcaagcttccacatcatccaagataaacaacattcatacagcacaagctatcacagtcatacataacagagcaaaggcaagaaactctgatcatacaccaaccaaaatcacagctattctcacttacagaccccagtaacaattacttcagaccaattcgttaaccggtggatcgactccaaaatattacaggaagattatagtacatatgcctacattgtgaccgatgggatctac

SEQ ID NO: 59901 - DNA, 198 bp, Glycine max
ctcagcggatggctcgctaagctagaagatgggcttagcgaaagggtgaaaatcagcacttcaaaacttgcctaattaacctgaaattgagagaaatatgattattaaacacattaaatggaagtaataaatatttattacctatctttaacaaaaagtaattacaacactacaaaatacccattggcataccctaat

SEQ ID NO: 59902 - DNA, 419 bp, Glycine max
  unsure (1)..(419): unsure at all n locations
tagcttctttgagaaaacttttttgagtttctagtttcttancnacacacacccctcttataactaagcccacctccttgagaaacttccttaagaagattcctaaagaagctagagcttagctacacatacctctctaatagctaagctcacctccttgagatgagaagctagagcttagctatacacaccctataatagctaagctcacccccatgacaaaaaacataaaaatacagacaaaagtccttactacaaagactactcaaaatgccccgaaatacaaggctaaaaccctatactactagaatggcaaaaatacaaggcccaaaagaaggaaaaaccaattctaatatttgcaaagaagaatgggtccaacctcgacccatgggctcaaaaatctacccttaaggtcatga

SEQ ID NO: 59903 - DNA, 435 bp, Glycine max
  unsure (1)..(435): unsure at all n locations
tcctatctatatatcttttttatcttntcaggatctgataacttcttatcagacgttagttcatcattgaatttaacatggatggattcttctacaactaaagttcttgtactaaaaacttatatgctttagatgtattagataaaccaagaanaatcccttttgtcactttggaatcaaacttagcangttgatctttagtgttcatgataaagcactcacatccaaatggatgagaagtatgaaatatgggtcttcttcctctctatggttcatagggagactntnntatcaatggtctgatcaatattctattctaaacatagcangttgtatttactacttctgctcaaaagtacttatgaagtgaattntcatatagcatggttctagccatctcttgcagagntctattttccttttaactaccccatt

SEQ ID NO: 59904 - DNA, 181 bp, Glycine max
tgatttcacttggaaaaaaagaatgtgttgaaagagttgataaagaatatggtgttctgagaattggatgatcacttctaacatatgaatgcatgatggacatgctacgcaagcttgcaattgatcccatatcactctggagcatctgattatttagatgcaaactgattatattctcagt

SEQ ID NO: 59905 - DNA, 467 bp, Glycine max
  unsure (1)..(467): unsure at all n locations
ttaaaagaacaacatatacattntttgttgttttaagggaataaaaattgtaattaaactagagaattttttattaaatgtgtcactatgacaatgataaatcgattcaacttaatgtggactaaaaaacataatcaaataaatcaaaaattgagaaatcataaatttttattagattatatcngaatttagatttgaatttaaaaattgattcaatcccgtcaaaattgaatatanttttattcataaatntataatggccctcatatgtttatttttattntctatatactttgaaaattatcatataaattatacctatgaaaaatacatttgattaaagaacttttttaactacctatttgaattaagatggataaatatattattagttatacagtgatatataaatgaaatatttgataacataaatgagtcttattatatatatatatatatatatatat

SEQ ID NO: 59906 - DNA, 347 bp, Glycine max
  unsure (1)..(347): unsure at all n locations
ctctagagcgacctgccgcatgcaagcttctcttcatattctcttgcacttgctttatctgtgtatgtgataatgcaaactctggagnttgatcgtaacactcctcgaatgggttaatacagaatcaatgtgaccttccagattcttagcagattgagctactagtgttgtgtggctaccaattgaatcaagagaatcatgaatctgtcttgagccatgtaatagatgttctgatttctttcaatgcttctaacttggcttcacatattgtgctgaatattttaattcagacgcaagtctcttcagttcatatttgaatgcatgtgccctgcgtatatataacttta

SEQ ID NO: 59907 - DNA, 488 bp, Glycine max
  unsure (1)..(488): unsure at all n locations
tgcaatcaccaaaagagagattatgatgaaagcatanatgtagcattgattgtgaactttcaataaaccaccacactatagtgggacatatgaaaataacacagttttgaagtggtttttttctttttagtttaactagaggtatttgaagtttcttatttgacattcaactaatctaatcctttctcatcgagtcagtccattttgcgagtaaattaagtagtattgctatttgtgatttcatgctcaagtcgatgattgaaccctagaccttgattaaaaaatccaagtcccaaaccacttttgacaacaactnttgttcctttgaacctggaagcctaaaaaaaatgttggagaataatcctttcttggtgtacacaagtcaaaaaaatacattgcagaaggccaaaccaatttctcacaagagccaaactaccacacatctttaaacttctagtaggtccgaatacccatatcttcaataaatg

SEQ ID NO: 59908 - DNA, 299 bp, Glycine max
  unsure (1)..(299): unsure at all n locations
acttatcttggatgagtcttttcttgattcttgaatcctgaggcttgaaacctgatcctgaatattcttcgatcttggaaactgaaacttgaatcatgaatctttgaatcaaatttctcttgattcttgaattgctcttgactccatctngattcaatcatgaagcttgcttctacaagttttatgcaaatgcttggtctactgaagaaggcgtcatggataagcgctccagagtgcggggccaatggattccatatgacatagatgccatcaaccacattttatggcatccactaatc

SEQ ID NO: 59909 - DNA, 463 bp, Glycine max
  unsure (1)..(463): unsure at all n locations
tgttaacccatggaagctcctaatatctcccacactctgtggtgtgggccattcttggatggccttgattntctcagggtccacttggaccccatttctaacaactacaaaccataagaaaactatattatctacacaaaaagtacacttctctatatttgcataaagggtgtttttcctaaggactgaaatatcatcaaaataagcaactacaaatctacctatgaaatcccttaagacatgatgcataagcctcataaaggtgcttggtgcattagtgagcccaaaagacatcactagccattcatacaaaccaaacttggtcttgaaagtggttttccactcatcaccctttntcttcctgatttggtgatacccacttttaagatcaattnttgaaaagatattggcaccatgcaactcatcaagcaaatcatcaagtctaggaatgagatgcctatac

SEQ ID NO: 59910 - DNA, 88 bp, Glycine max
  unsure (1)..(88): unsure at all n locations
gcttgagaagtatctcataaactattnggagatgtgaccatanggatgagaatattgagatggggtcttctttttcttgcaattctgt

SEQ ID NO: 59911 - DNA, 363 bp, Glycine max
  unsure (1)..(363): unsure at all n locations
tgagcattcataatttaggtcgaatgcttgngaatcataaataagttgtgggctatctagcctattgaatgacattatttgtactatntgtgtaatttttttattaaattattatttattattaaaaatttacgataaatttggatcagaacgaagtacttgagtaatttggtaattttcacaaaactggtggttgatcacgatacataagttgtctgacattaaatttgtttggttgaacttggttgtcatttcgccacgttcaaacaattctcatctttttggaaatcacgacgcacgtggtttcatgtacatcacacaagttccttctcatttgaccatataacaataaagccacgatct

SEQ ID NO: 59912 - DNA, 388 bp, Glycine max
  unsure (1)..(388): unsure at all n locations
tcactcatcacattcacagggcaaaagtgcatttctcattattttcacaccctactaccagatcctcaatctttnttntatgcctttatctctattngcttaaaataacctctcgaatctatcaataaaaattctgagctgactaatgtgaaacagatttaatataattacatttttttaatcaataaatactactttattaattttactaaaaatatgtatgcaagaatttatcccacaacttgtttcttcttatctttcatcttaaatctcttttccgacatgccaacttatattatattctattcaatttaacatattttggggtttttttttacctccgcatgataaaaagatgacttctcttcactcttctcatctactacaa

SEQ ID NO: 59913 - DNA, 421 bp, Glycine max
  unsure (1)..(421): unsure at all n locations
gagaaaatgagtctgtccttacagntgattcgtgctcaatgatccttgaagaggtgtcacccttgatgccaaccctgatatcaccattcttctctgcatatacataagataaaagattaaaatatgaaaatatgtttttaatctatataaattatagattttgattttagttcctccaaaattagagttntagtttatgtgcgttgtactttaaaagtgaacagtgaacacttttggtgacggttgttattatagacctataacctattaactacaaacatgtaaaatgaattcgcaacccattgtttagtgaagcatcattgtttaacagatcaatgacaatgacagagatcaaaagtactactaatctaataaaaataaaggcacacaaacctaaacaacatttaaagagaataaaact

SEQ ID NO: 59914 - DNA, 356 bp, Glycine max
  unsure (1)..(356): unsure at all n locations
ttattctagaaggtccatctataaaccaaatgcgaagatcataactactcatgttactccaagaatcaattaacaagtgatcggtcagacctaacaactattttggaggcttcattgtgtaatttgttgactcaattgatttatgtttaaaataattcttagatgggattttctaatacaattgagatgtttaaaatttgatgacaatgggattntctaatacaaatgagatgttaaaattaaatttaaaaattatcattttctgtattagaaaaacatgtaataacaaacaagaaatgccaacacacaagtacaacaaagtcatttcattcacctttntctttctccctcctttc

SEQ ID NO: 59915 - DNA, 444 bp, Glycine max
  unsure (1)..(444): unsure at all n locations
cgcctgtctgatacagcagtaatgatgttccgagttatgttggggaacggttacgaacccggaatgggtttatgcaaagacaacggcggcataactagcctgataaatgccaaaggaaatcgtgggaagtatggtttaggctataagcccactcangcagatatgaagagaagcatcgcgggaaggaagagcggtggtcaaagctcgcgttggagacaagaaagtgaaggaagcccgccctgccacataagtagaagctntataagcgcgggtctgggagacaaaggtcaagtggtcgcaatatgcgaagatgatgttccgagtacattggatntggtacgaccatgccctcctgatttcagctggganattggcgagtggaggaacgccccggcatttacgcaacgagcataatgtaaacctttacgaatttaatagctctat

SEQ ID NO: 59916 - DNA, 354 bp, Glycine max
  unsure (1)..(354): unsure at all n locations
cttttcatagtataatactggtaatgtgtctactatcattgtcatcatntttttcttcgtcattgaggtgccacttgagctgccangtctctccacctttgggtgtattcttttgaaagattcgcgccctctttttgaaccatgtctgtagttgcatcctatccgaagacattatactgacactgcctaacgaaggcaaccactatgtccttccaagaatagactcgggaaggttccaagttagtgtaccaagtaacagctaccccagtaagactttcttggaaggaatgtatcagcaattcctcatctttttgcgtatgctcccatcttccgatatacatctttagatgggtc

SEQ ID NO: 59917 - DNA, 431 bp, Glycine max
tctaagcctcgtttctctcgccctttgtcaacatcaaaaagccaaagtacgtggtaaacaacataaggcagaaaataagaaggaaatataactaaagttcacataaccattcacaagtcaaaatcaaatataattcagtcataaaatactaagtaccaaatactgaaatataaataaagttcaaagaataatgacttaaaatgtagccaaatatacggcttaaaataaaagataataataatctaaatctaggaacgtggtggaaggtcgaagcaccgacaaagataactcacatccttttcaagctgagtgatgcgggtatccattccttcaaagcgagcatcaatggcatctatgcgaccatccaaggaatcaaagtgttcaccaacatatgtgcgaaggcctcgtaattctgaaagaacttcattcat

SEQ ID NO: 59918 - DNA, 428 bp, Glycine max
  unsure (1)..(428): unsure at all n locations
tgtaggattatggggtacccatcacatgtggtactaggtggcggtcgggcgatggtgcacaacaagttgtccaaatccacaatgcgcgcataaacccaccatcctctgtagcccacctccaactgagctcacgtactcccacgtagcccatatcctcgtttctctcaacaccgggtccccatcaatcctcccaaacttccccaacatcaaagcaatacaacattcaaacagcaaaaactatcacagccaagaaaacagagcagaggcagaaaactctgccaaaacaccaaccaaaatcacagcttttctcacttaaagaccccagtaacaattccttcgttccaattcgttaaccgttggatcgacatccaaattttactggaagtctctagtacataagcctacatttngaccggtgggatctacta

SEQ ID NO: 59919 - DNA, 343 bp, Glycine max
ctgcagcttgagccaagtgacagcgccctggttttgctaaagtgatacgccatagagttatttgggtaaatattagagttggatttctctccaattttcctttgagcaaaatgtaatacatctgtgtttgggccggaatttaagggtgaattttagtctagggagaaacctcatttggaacgagcttttaggaaaaaactattgggaaacaggtttctgaaaaaacttgtggaaccactttatggaaaaaaatttataacctcttttatttaacacacctctacaggggtgggggtggcatgggaaatttttacccccataagccccgttaaaaactaggcct

SEQ ID NO: 59920 - DNA, 476 bp, Glycine max
  unsure (1)..(476): unsure at all n locations
taactggtttgttaaatgacatatctaaatctaaatcattttgtgataacaagatttgtcttanaccagttcaatcatatgcatcaaagtataaaaactttcataaaacaaaaaaatggttttgtggatgaaaagctggaaataacattctgagtacaacattatgacaaaaaacattcttagtattgcatttgcataacataaactgagattttcataataacaatattctgataaatttttttatttaaataatgaacatcaaaacataagaaaatgtgcattgacattaggttctcataatcatatcaaacatttcataatgagttttgtgactaaccaagtagagagtttagttatctaagtgtttgaacctctatgttaagactctttgcataccanaataatcttgagtaaaagttcaaaaaaggtaaagtttcaagaaagggtaacanagtcacaataacccctcattc

SEQ ID NO: 59921 - DNA, 384 bp, Glycine max
  unsure (1)..(384): unsure at all n locations
agctataacctcattgtctctcacagtctttagatttgggagccaatccaatccttgtgtccggactctcagccacttatgatagccgccgatggtcccattactgcttcctctaagctctctgtcctttcttcacgccgcatcccatgccttgcgaactccttggagtacctttgcattgnggtcactgaaaccccgtgtaatgaaaggcgtgatgctntcgtctaatggcattcctctcatggagtagccaagctgtcttatggcgaggacgggattataattaatacaaccctatgttctcatccagtgaacatatggacatccttcgcatgaagatacaatcctgattcttctttcttctacgagggaaccaattaacag

SEQ ID NO: 59922 - DNA, 466 bp, Glycine max
  unsure (1)..(466): unsure at all n locations
gtgagatcagatgcaaccatctccctaagagttctctcacgaggaggaggttgattcatgttctcagtataaaaattagtagtggaatgctcaaaatcagaatattcagaatcaccctcaacagaattctcagaatgcacagaatgaccaagatgcacactatccctaactaatctatgaaaggttctatctatntcaggatcanagggttgtaaatcacttggattgctcctagtcatgcactatatgcagaaaataatgtgtttctcaacagcacctaacaggggggtaaaactatagctatactcaaacgatatcaaaatgaggtgaaattttgtgaggaacaccctaaaatcatgaaaagatagcacagaaattttcaaacacaaattcacagtctaactatgaaaactacctaagcaacaattagaaaaataggacaataatacttgaaaaataaaaaaac

SEQ ID NO: 59923 - DNA, 326 bp, Glycine max
  unsure (1)..(326): unsure at all n locations
ttaagcactgagcgcatctttatatttattcccgggggttccatgtgttcggtattatattctcgttcatttacttgttatacccccttttgatgtgcttataccattttatttaagtcatttctcgcttaacctcaaaataaaataaatttgcatcgatcgcttgaattgtattatccgntaacttcggtgaagatgaattccgaccgttcggtcgtgccgtaccacgttggaaatcaaagaggtaaataataatatataatcaacaatcctttactaaataagcgaaaatcaatggacgtttctctttggattctcattctatc

SEQ ID NO: 59924 - DNA, 370 bp, Glycine max
  unsure (1)..(370): unsure at all n locations
tcanaacataatctattataaatcaatcagtttatggcttgcctcctaactatacgccacccaatgttgtacacgctcttgatgagaatgtcgacaactccgcacctatacccattgagatccaacaaccccaatctggtcatgcacaggtccctcaacccatgggggagacacatgaagtacctcgagaccacactctagctgactttgagccttgcctcggatatgccactaaggggcaggcgtttggtggcataccctagccaaacactttggggggccctcaatatttcccacaaccacaacccttacatttngcggtggaaagactgcctcttgccatggtggaaagggaaaaaattgatcatat

SEQ ID NO: 59925 - DNA, 68 bp, Glycine max
tcgaaatacaacaacggaagctcgctttcacttctaacggacctaactgtatactcggatgtccgggt

SEQ ID NO: 59926 - DNA, 404 bp, Glycine max
atcttaagtcacctgccgctgcagcttgaccaatctgactacctaaccttgtccccggtgaaatgccatcgtaccctcgaaagcaaaaaaaaagaagagaaggaaaatttccaatcaaaggaaaaaggagaaggaaaatttcctatcaaaggaaaaaggagaatgaatatttccaattcaaggaaaaaagagaggaaaggaaattcccaatcaaagaatgggagaaagcaaaaagaaaagaaaggaaattcccaatcaaagaatgggagaaagaaaaaataagaagaagaagaaagggaagatagttctccgatccaaagaaaaacagaagaaaatatgcacgaaaggtctcttggaccggacaatatctgaacaatacagaattgtcaccaaatgaacaaaaa

SEQ ID NO: 59927 - DNA, 475 bp, Glycine max
  unsure (1)..(475): unsure at all n locations
atttggtaatcgattactagtgaaagtttctgttcaaatcaaaatatgtaactcttcaaatagtttttgacttttacaaattgcttttaagttttattaaaagtcataactcttctaatggttctcttgactagacatgaagagtctacaaaagcaagactttgttttgcatttttacatctatccaatctatcaatcaatcttttccaattcattctttacacaagccaattgtccactttgatttctgagtctctttgaattccttcttcttcttccttttgccaaaagctttccaaagttttctggttntctaaaccttgaaaacttgtgctattcatccttttcattctcttctccctttgccaaaaagaattcgccaaggactaaccgactgaattctttntgtgtctctcttctcccttttccanaagaacaaaggactaaccgcctgaattctttngtgtctctcttc

SEQ ID NO: 59928 - DNA, 329 bp, Glycine max
aagagagcacaaatcatagacttatcccaatgatcttgtatcatacaagtagctttctcactatcttttcctcttaagttgctttcgaccttattggaacaacacaatttatttcttttttttaacatacaacttaattgtttgtgtgctgatgcttaacctttttttttattctaatgacttcctccccaaatagagaacttgcttgacctatgcctctaaatcaaacaagataagagatattattagttagggtcatcatgacaatcattactatcaggagcaagatgattatattcagaagcttttgcaaaagctggatgacacat

SEQ ID NO: 59929 - DNA, 389 bp, Glycine max
gcttatccttatggcctggcctccggacttcacccccgtgccattccggaagatttttctcagcccctactttcgaggggcaactcccaccttatgaagactatcccgggcaagatgatggggaaggagatacccatcttggccccctgctccacctcaaagatctgtccccacatgaactaccccaaccgaacatagtccgccataccccggcctcacccacacctttaaaagaatctgttcccttcgcggaagataagggaaagattgaggcgctcgaagagaggttaagagcagtcgagggccttggcaattacccattctcggatttagcggatttatgtctcgtgcccaatatcgtcattccttccaagttcaaagtaccggac

SEQ ID NO: 59930 - DNA, 385 bp, Glycine max
  unsure (1)..(385): unsure at all n locations
agcttcttaagagtagttttctctcttattgattctcggcatcaacaacagctattttaaagctcattgttgactttgaaatattagaacataatgtcatttctctctctctacttattttaagaaataatgtcacctacaatggatgggccaatccttatcaaataatatgtntcataaaagaagtttaaataaacctatctcacttctttctgttggatcaagtggcctcggaattattaagaaagggggttaaattaattattaatgaacttttactaataaacatctaaccttcttaatgtactagattaattangcttttactacacantaagatagtaaagaccactattgaaacttaaccaantagtaaagcgataat

SEQ ID NO: 59931 - DNA, 463 bp, Glycine max
  unsure (1)..(463): unsure at all n locations
ggtatgtgttcatcactacaagatntccacattngtgtttctctccgattgaaaaaaattggtcgctttacactaaatntgtttgctttcacttcttaccaatctgatgcattcttggattttttttttttttttgctatttcaagtttgcttctcctaatgtgtatgagtggtttcagaattcacggtaaaggaatgtgtaataggtttttatgaagaaaattntttctttttttgggtaataagtcagagatgcttttcaagcttttgctacattgctcgatcagattttgttctgggtaagttaatcttttcatttttctaagtattattatatatttgtatattacaatcttactgactntaacatggggaagtcttccttttctgttggtaagttccaacaacatacgtgttccttccatacntgcaattttatgacttccctatcattacataaata

SEQ ID NO: 59932 - DNA, 406 bp, Glycine max
  unsure (1)..(406): unsure at all n locations
agtcacctgcngcatgcaagcttcactggcacaagcgcctgtgagtaattgctataaaccaagggttgtgtttcanaccatcctgaagtacttctgcccactacataatntntcaagggattagtggtagtaaaacccttcacatggcctncagagcagcgatacatcttttgagaggtactgattgcctgtggcaacagcctatgaaaataaaacattaaaaatcattggaaaattctgcttacatttagtanttaaataataaatatacaagaaaaacacacgtggcattaagatgaaactgtaaaaatcaattattttaaacatgcaaatgatagttatatgttagcattcgacgcatgcaaatttagatagccaagacaggttgtgctctgaagcatatggg

SEQ ID NO: 59933 - DNA, 453 bp, Glycine max
  unsure (1)..(453): unsure at all n locations
atgtctaagtgaaagaataatgattggcgaactctctcttaccaccaaacacctcattaatgtctattatttttctctgtctctctcttgtcattatagatcatatcacttatcatacttacacgtttctttatttctctcactagttgtcaattgtcaaataggttattagtgtccaccaaaattttttgctgagtgaaattacttgaatggctaacctccatttcagcatcatcaagatatccaacagtcaactntgtaatgtcaaccaggaatggatcatccagagagctatgttttgatgagggatcatcaagatcttttccccgaacaatatcaagaataatagcacaatcagttgcagatctacagaaaggaccaagcttatcctagtagaaagaatacatgtaagtntaacattcacagcatcctacanataacaagggatgatat

SEQ ID NO: 59934 - DNA, 490 bp, Glycine max
  unsure (1)..(490): unsure at all n locations
actctccgtttgagagacaacacatgttcaccattntntttatacaaattcttaaaaataggaaataaaaataagcatttttgtaactatttgtaaaaaaacagagaatgaaaaataaactaactttcttggtgtcaatgataaactctcagtttgataaactacatctgctcaccagtttttaaacaagtctttaaaaaatataaataggaaataaaataaaaatgatgccatctttgtaaatatttataaaaacagaaaatggaaacaaaaatatttttaaaaatcaaatatgcccatagctactaagataaaggctcaatggttntgtatatctgctaggtataagaaaactattttattatccgctttttctaccaagcaataagtagaaacaattagcatcctaaatttacatcaagtttctttacaattatgaaatattaaaaatctaatcctctgggtctctctctctttctctctctatctt

SEQ ID NO: 59935 - DNA, 427 bp, Glycine max
  unsure (1)..(427): unsure at all n locations
gagaacctgtgacgtacctaaacaggcgagctcctgcagtcaaccgataaaaacaaaaccacaacatgatgctgtgttgggctggccacctatgaatctcgagtggtagttggaatatgacctctnagtattcgattaccaagggtgtgtgatcgattacaacgattaatatatgaagacaggaagttaagatggtctctcgtaatcgattaccaatggtgcgtaatcgattaccaggcttaaaaatggggtcaggaagttgagatggtctctggtaatcgtataccaaggcgtgtaatcgattaccacgctcanaaatagagacagtatatagacgacgtctctggtaatctattaccaatactatgtaatcgattacacagagtaacacgtcactggtcatcgattaccattatgtgtaattgat

SEQ ID NO: 59936 - DNA, 390 bp, Glycine max
  unsure (1)..(390): unsure at all n locations
tgctcaatgtagatggttgnggataagttcatgtatgcttgtatgtgtgcaattgtgttntatacggatgttagttcaaggtggtggattgttgggctgtgactaaaatccatatgaaagtttattctgttatttttttctgttttgtcctctgcttataaaaggcaaggatgccttatattttggataggcttctacttgtatattacatcagtaataaaagctttctgttttccctcccgtggatgtagccttactcaagggtgaaccacgtaaaatctgtgtgtgttttttctctctttttctccctttcattntgctgcaacgttggtgtatgacatttctattctgctgcatctnnctgtgcnntgtcttgttgtcttcatactt

SEQ ID NO: 59937 - DNA, 475 bp, Glycine max
  unsure (1)..(475): unsure at all n locations
ctgcagctctacatgaaatctaattcctacgtatcttatagcatgactgtatgatacaatgttccttgatccttgttagtgattctaattatatttttgttttataaatctaatgtggtgttgacgttgaagtgtggattattatacgagagggcatgcaacgaaagtgagggtgtatatttgtgtaataataagtcctctctgctgttaccaaagaaccaagtggcagaaagcttgttagctatgatattgactctgtctatatgtangttatattntatccactcctgccacaacttagtgttgctcttnttttgtatagaatgttataaccacacaagctggtgtcttattaagtgaatcaatagctggaaaatatgatatcaataggcacgtattgatatttatatcactcntcgttctgatcttggaacatcattaaatggccaaagggagtggtatacacatgctcata

SEQ ID NO: 59938 - DNA, 470 bp, Glycine max
  unsure (1)..(470): unsure at all n locations
tcacttcttctctntcattcatgagagtatntagtctcatgtattactcttcttgaaatctctcttactccttactcaagtgattggtccatccatgtggagcccacccaagcaaaactcttgctccttggatagtcctctatcacaatccaatcaaatttgaagtggttggtttacgtcgtttttctaagaagaaaaaaggaaactcaacccanaccaacccatttgcaaacggtttaagtgggattgggtccacaggtcaaaacatttaattntttccgctattttttaaaacgtaatatttttattaaatgaattagacantaattgttctttttttattntctattaatctttttatgatggtgtcacatcccacttcactccattgactcctatttatctatctatccatgaggaatgggaaattagcatatcatattcgagataatgagtttcataaacatagt

SEQ ID NO: 59939 - DNA, 202 bp, Glycine max
  unsure (1)..(202): unsure at all n locations
tggctatttgcaccccaatttttactaaatacacccnctggctttttttggtgattctttnttcgtaaaggtacggaaacttacgaaattcgtaacgatacttgttttctttccgtaatggtacggaaccttgcggaatacataatccatccttttttgacttacggaatgttacggaacctcactaattgtgcaatgatgc

SEQ ID NO: 59940 - DNA, 366 bp, Glycine max
  unsure (1)..(366): unsure at all n locations
cttggagtttccaagtgccaattcgtcttcttctttagtccagtcttcttctggcttcaattcatcagtgggctttccttctgtgtccagcatcttgngatgttcccagcctttgatgacagctttccaggttctgctatccagtgatttgagaaaggccaccattcttgctttccagtattcatagttggttccatcaagaattggtggtctgttcactggtcctccttctttctccatgttcatcagaatttatctccctagatctcactctgtgatttcgagtgttggctctgataccaattgaaattctgatactgnngacagatgtcgtaccggatgtcacgacatcacgcttcagaacat

SEQ ID NO: 59941 - DNA, 314 bp, Glycine max
ctgcaagctgtgccatgaatatgtgaatcgggcttaactgggataatttatttctaagcagaacgccaccctttagcaacagacaatgatgtcaagtacaacccatgggataaccttgattctggaatggaaagctcggatgccccatcctataactcgttttcaacgaaagtaactcaagattgggagcacgttgattaaatacttgacatcatactactgtgccttcatcctttgttcgagattcatatatatattgagaggtcttggtacaacgactgtgccttgtgaattggtacgcagaaattttaatt

SEQ ID NO: 59942 - DNA, 384 bp, Glycine max
  unsure (1)..(384): unsure at all n locations
tctaactgtgtgtatttattaatgccttattaaattatgtatctcaatgctaatacatataagtgatgtgatgtgaatagaagagacagttggatgaaaatgaaatagaagaaagaaattaataatatatatatatataaagtgatatgacgcaaaaagaaaagataattaaataaagaaaaataaaaagtgttacagagaatattttatggttggggtgtttaaatattattaccaattcatttagtgttgtctcggagtcttttcatggtgattntggttactttcattaccaaccatcatgcctgcacgctcacaagtaggaagaaggaaaccaagcgtgagagacgcatgatagacagatagaaaacattataacaaagg

SEQ ID NO: 59943 - DNA, 294 bp, Glycine max
ctgcagcttatgatgatgaacttcaatttgtgatgccatagcacagggttgattccgactcatgacaagcctcagagttaatccatgttcaagatgcagagatgaaatcatgggccacaagcgcgacttctatatgataagtattaatagaattcttcaaaccaaatagcacagttttgttttacaaaagaattttctcatattttcaaagatatccaagtgactactctctggtaagccgttactagttattcagtaatcgattaccagtgactagtgttgattctcaaaatg

SEQ ID NO: 59944 - DNA, 486 bp, Glycine max
  unsure (1)..(486): unsure at all n locations
ctcaagctctgaacaatatactaggccttcattgttctgtctatgggcttggcggccactctcaacaaagtactttcgacacctactgtacgttgatttcaccaatgctgttatgggaatgttgcgacaatcctttaaaaccttattgatacattctgacacgtttgttgtcatgtggccatatccaccagcttctctatcagaagccatcgaccatctcttctttgagatgcgatcaatccatgttgctatggctggactcagttcacgaaatttttctaaattttgatcaaaaatgtgcttgcatggagtgtacgctgcataaaattagttatgaataacacatttcagtataaatgaaagaaaaataaacgtgaccagcanatatgatatcttacccaatatcttcaacatttctttgtgtttggattattgaatttacgactgaagatgcttgctatgtgtcgcacacaatacacatgatag

SEQ ID NO: 59945 - DNA, 302 bp, Glycine max
tcctgagttcgatagccatcgttttatgagcgctgagcaccagtagcgtttcgaagccatcaagggatggtccttccaccgagagagacacgttcagctcagggacgacgagtacacggatttccaggaggagatagctcgccgacattagacgtcgctggtcactcccatggccaagttcgatccagatatagttctcaagttttacgccaatgcttggcctacggagaagggcgtacgagacctccggtcatgggtgaagggccagtggattcctttcgatgcagacgccctcagttagt

SEQ ID NO: 59946 - DNA, 383 bp, Glycine max
  unsure (1)..(383): unsure at all n locations
actcttaattttttgggccttatacgtgtagaagcaaagcttcatgatgaatcaagattgattcacagatgttntgatgatgccaaagaatcaagagttaagcaaagtttcaagcaaatattcaagaatcaagtttcaagtttcaagtttcaagattcaagattcaagattcaagaatcaagtttcaagaatcaagaataaccaagatcaagattcaagactcaagactcacgactcaagattcaagaatcaagagaagactcaatcaagataagtattaaaaattttttcaaaacattgagtagcacatggaagtttcacaaaatcattaccaaagagttgtactctctagtaatcgattaccatattatagtaatcgatta

SEQ ID NO: 59947 - DNA, 255 bp, Glycine max
caattctccacatccacaaatcacgtataaacccaccatcccctgatgcccacctgcaactgagctcacgtactcccacgtagcccttatactcgttcctctcaacaccgggtgcccatcaatcctcccaagctttcacaacatccaagtaatgtcacatgcaatcatcatgaactaacaaaaccaagcaaaatatgcaaaggcagataactctgtccacaacacaaaccaatattacagcttgtcacatacaaa

SEQ ID NO: 59948 - DNA, 336 bp, Glycine max
atgatggttgggcctacttctatggtagcagggcctgtatgaatgatgtgagacaaaatgaaatatggtccttaccttattcttttgaggaactttctccttagctagctgatgagattgattccattcgtatgcatgtagatgactaacaagactatgggatgtggtgaccctcgagctcatgaaagatgtcttttaaggatgcgttttggtatttgcagactccgctgcaatctagatacgggagtaagctgctactgcggcaaggattgcaccctctaattcatttatatgatcggaggcggatatataaacatctccaagcggatgatattc

SEQ ID NO: 59949 - DNA, 380 bp, Glycine max
  unsure (1)..(380): unsure at all n locations
acatgggcgtgtttcaacatcccaaacactaatttattccttgctaccccctccaagacaaagcatatntgttgtctaacaacaacaaaaacaaaatagaaaccccaagtaggaaccaccgctaaaccggcgggaagagcaatgcaactacacatgcatgaagttaggcaacaatgaaaagaaaaagaaaatagaatccgtcaaaggcgagtgaagaataagagagacaaaagatctccaaaatttacaaggaaggcacacaagtgcaataagggataatgtataagacaaaaggagtcgagcccaacccacaagttgaatgaataaaagtacaagaaacactctcgagggtatactcaatataccctaaacactcttta

SEQ ID NO: 59950 - DNA, 431 bp, Glycine max
  unsure (1)..(431): unsure at all n locations
gcttctnccctatntctcctataaataggggagaagtgaaaggataaaatgttcagtctctcctgataattcgagatcacttgaaattagtgaataaaattgtttccgcgaagaaaatccaagccgaggcacttccgtaacgtttccgtgggtgatttcgcaaagattttcaactgttcttcgatgttcttcgntcgttcttcgtcgctcttcggtcttcaaccggtaagtccccgaaatcgaacttttcaattcattctatgtaccctgagtggtcctcatttgttgtcacgtgcttttattntcatttcatttactttccgtacccccttttgacgtgttttagtcatttacttaagtcattttctcgcctaatcaaaaataaaataaatttccaccgatcattcgaattgtaacatccgctaatttct

SEQ ID NO: 59951 - DNA, 133 bp, Glycine max
gttttatacttatcagcgtacaccagcgttaggcaccatactgcttataaataccccgcctgcctatccagtctgtgtattataacattctgcgactggaccatccaacgatgagacctgatgcagcgataca

SEQ ID NO: 59952 - DNA, 307 bp, Glycine max
  unsure (1)..(307): unsure at all n locations
gcttctcgatatattatgcacctgaatcagactttctttngaanagttattactctattgaatttctggagagctctccgtgngcaatctcgagcgtctcgatatattatgcacctgaatcagacttctcgttgataagttatgaccattcgaaattatggagagccttcgttgtgcaattccgagcggcttgatatattatgctcctgaattggacttccgcgtgatatgttatgaccaattgaaattctcgacagcttccattgtttatttcgagcgtttcgaatattatgcgcctgatcggact

SEQ ID NO: 59953 - DNA, 434 bp, Glycine max
  unsure (1)..(434): unsure at all n locations
tgttcttaagcanaagctaactaatgcccccatacttcttgatatattgttcgcctgaatcggactttcgtttgaaaagttatgaccatttgaatntctccagagctttcgttgttcaatttcgagcatctcaatatattatgcacctgaatcggacctccgtgtgacaagttatgaccatttgaatttctcaagagcattcgttgttcaatttcgagcgtctcgatatattatgcggctgaatcggacatccgtgtgacaagttatgaccatttgaatttctcaagagcattcgttgttcaatttcgagcgtctcgatatattatgcgcctaaatcggagctccgtgttacaagttatgaccatttgaatatctcgagagcanttcgttgtcaattacaagcgtatcgatatattatgcggctgaatcggaca

SEQ ID NO: 59954 - DNA, 221 bp, Glycine max
  unsure (1)..(221): unsure at all n locations
ccttggtgctcatttctgccncaaattgtgataggagagcattttctgtgtcgtgaatttgttggttacgagtgggacttccacaatacaggtttgggtggacttctttccctcttgatattcgtgggtatggggtattgggagatatgacgggcatgtttgatagctttctgctgagtgacgactaattgtgaagacatatgctgtaaactagttgaaat

SEQ ID NO: 59955 - DNA, 379 bp, Glycine max
  unsure (1)..(379): unsure at all n locations
agcttgaggggcgtacctcaccatctttatattatgaataccggaatgtgtctaccatcacgattattgtctccctttccatcattggggggaccacttgggttgccagaacccttcatctttgggcgtattctntgaaagattcatgcccttttttgcacatggtttgtagttgtatcctatccggagccatatcagaattgtactgacactggctaacgaaggcaaccattatgcctttccgagaatggactcgggaagggtccaagttagtataccaggtgacagctgccctaataagacttttntggaagaaatgtatctagcagtttccatctnttacgtatgcncncatcttccgacaatacatttttagatg

SEQ ID NO: 59956 - DNA, 385 bp, Glycine max
  unsure (1)..(385): unsure at all n locations
tgtaagagataccaaacataattggaatgtgctacctcattgccattctttagttcaaccttaaaaaatattagatagtgcataatgacatttgttaaataacaagtcaaatgtacaccaatgcaacttgaaaaaatttaaataataattatacacaaaanagcattgtctaggtacgtaccattccgaagcattttttttcttcaaatcttttaattggattaatatattttgccttttatgtattaattgaagattagctgagctgaagactaaaatctatatattacgaaatagcaaaacataaaaggtgaaaatattgantaattaatttgtcaactatcatatatcaatcatgcatgctatgatccatggattcatcact

SEQ ID NO: 59957 - DNA, 105 bp, Glycine max
cccatactgcttataaatacccccgcctgcactctccagactgtgaattattaacatttgcgactgaagcatacaactgttgtgatctgatcgcacgcatcacac

SEQ ID NO: 59958 - DNA, 322 bp, Glycine max
  unsure (1)..(322): unsure at all n locations
ctgcatcattaagcatgaataactngaattatantagctacctacnaggcatactgatacaaagacaaaggatcaaattctcaatcacagcagccaaaagatctagaacattcatgttagttgaaaggaacagcagcaaaaaatttacttaatgacatttaatatagacatatagtgaatataagcaactagcaaaagcttaagataatttgttattagattgagaaaatttcttacattggctgctgatggtgatcgcaaacacttcagctcatgctgtatgatctaacagatctgacgcttggtcttcctctcatttttt

SEQ ID NO: 59959 - DNA, 311 bp, Glycine max
tcttcttcttctccgtcttctccgcgatctttcttcgaggttagtctccctaactctccattgcttttactatccaatattgattcagcagtggaaccttaggatagtaaccttagggtagtaaccttagggtagaagacgagaggggagaagattagagtatgccggaaaaaatggggaaatggctgacgacggagtcttccggaagacccgttaggggttcttccggaagttccggaagaaccttttccggaaagtttccgaaagaagtgttcttccggaagtaaccaaacatcttccggaagaacact

SEQ ID NO: 59960 - DNA, 326 bp, Glycine max
agcttgcttctacagtaatggattggattcttagacttgttcttaattctattgtggattcaaacttccccttcttttccaaatatgtctacaatcatgtttatgccttgaagagatctgattagcttttctaatttattatagaagctacactaatgaatctgtggcctaattaaattggatcattcttaaatcaattggaccaaaacacacacacactctaatcacacacacacatcacacataagatctgctaatgtcacccttcatcacggaagttgcaaatctgctaatgtcatacactatcattgtaatataagaaagag

SEQ ID NO: 59961 - DNA, 297 bp, Glycine max
ctgatgactgggaagcacgttattctgttgtttccagatggttccttcgccaagtatgtgtatatgtgtatatctgtattatattcgccgctctggctgctgtttgtattttgttttgtgcagaagaaaaaagaataagtagagacgagagtcgtcatcacgaagagggcaggacggacgaaatcagtgtcctatctttgctttcctcttatctccgatgaaaggtaagtaaagaggggcaactgtcataccctaatttcgtccggggattattactagatgacatgcaatatatga

SEQ ID NO: 59962 - DNA, 258 bp, Glycine max
taatcattgcatcatcattatttataagcaaatcagatatttagttccggtggctgttgcatgcaactaccacgctaggacacccctttgcctgctgattaaatatagtgttagatggctctcgagagatttgaattttcttctcattctcatagacagtacgcgagtgagaatagaatttatgatgaacgcatgtgctatgcgagtgaactattccctttcttctttgtggtatctactccaaatatgctttatact

SEQ ID NO: 59963 - DNA, 327 bp, Glycine max
tcctctcaactcttctactttgtcttccgatgcatttacatggtgtgaaatcaccattagaggacctcattgaagcttaaagatccaccctccatagatgccccacaagcaagctttcatcagaaccttgtgctatttcaatttggaattcccttcctaaaatactagagatcttcttgatgtagtatcttgtattcttggattgtcgcctcgaattaaacatgagaagcgctttttataagacatcatatcatcacgatcatatggcgtcatcacaacatcaaatgtaaagctttgcttctacaatctcaacgtctttgcttttac

SEQ ID NO: 59964 - DNA, 364 bp, Glycine max
  unsure (1)..(364): unsure at all n locations
tattggctgagtaatgacattgttgggttggtgggaaacttggtcgtataggaatggcagtcacagcatgggtttctccctcatcgccaccatctttatgtgccccaattttctcattcgtccacgcacgatgattaaattagcctcttctcacatccacttcgatcctttcactggcgaagaccatatctgcaaagctgtgagggtgctgtacccaccatcttttcattgtagagtatcgatgatgtgtctaccatcacgatcatcatctccctttccatcattgtgggtaccacctgagccagcagattccttcacctnttgggcgtattcttagtagattcgcgccccttttcacactttt

SEQ ID NO: 59965 - DNA, 234 bp, Glycine max
ttttatcatacctacgttaatgatacaagcctcagaggagtttctactataatcatatcctcgtttaacattctttatactttgtttggtaaaacaaggccatttatgatacatgaattaacatactggtgaacagtcattttccctccttataacatatatatgatgactcgcatcactataaacaatggtaacctttaatacaccaacctatacaagacctacatttttaaa

SEQ ID NO: 59966 - DNA, 471 bp, Glycine max
  unsure (1)..(471): unsure at all n locations
atcatggatgcatttcaatatgttagtcgttttagatatttactccatagattagtcttttgtaaataatatactaacaacatatcaaacaacaataacctcaataaaattaaatatgtatttcattggtcataaaattttaaaacatgaataaccatgaatatcatcgaagctaaatagacagtggtattttataaagtatattatatatttcaatcatatntagtttggctctcatttagtaagttctatacaattaccaatatactatgtaagtatctatgataactattattggtattaatattcattctctctcttctatatatgtntattggcatcatcgagaattatggacaggatggagacgatgttattgaacaagaataaggaataacatacaatctcgtggtgtntatggcatgctatcttaacatcattatagacatatacatactaaactgtaattta

SEQ ID NO: 59967 - DNA, 477 bp, Glycine max
tccacacaggacacaactgatacaagcaagtgaagcaaccttttgacagataactcaattatagttacgttgctctttaaaagtgaactcaacctaccatgtacagttgctaatatctgaatcaaactgtaataatttatctttctaatttctcatttagcttaacacatgaataaattagagtttaacaaagaatacattcaaacttttcatttaccatctttcatttatctagtctaggagagggttctactctctgattttctcacaatgagcactcaaaaattatctatgtgcacagtggacggtgctcaagaaccttctaatccattttacattgacccaaatgacaactccatggttctagtttcacctctcatgaacaaatttccatagttggtccagatcaatggagatgagtatgctaacttaaaaaactatgaaggtaagggatccatagcactgagtattcatcat

SEQ ID NO: 59968 - DNA, 509 bp, Glycine max
  unsure (1)..(509): unsure at all n locations
cattgtgttctatgagatcaaggaatgatagagnttgtctatacagtaatcgtgctcaatgccaccttttgctgcaacaacctttggctgccataagtgatgctacccgtgcactatgtctccataaacctgtcaatcgtcatgccaaaagcctttggagacgagcacacgcttatgacatgcttggattaacgaaagagagcttattggatgctattttatttataaatgagtgctctcagtcaaatgatcctgatctctcactgaggcaaaatatagatccagattatgccgagcgtttagttaagaagcagatgcgtgctgcttgtgtatttcgagaggcagctattaagcatggtgtggttcatagtcacggtgatggcggtgatatgtatgggccacagactgatgactctgaatgggagacagctagtgtaagcgatatttgaaatgatgggacggatgacatgggcngagacgaccatggtgattggaattatgatgatgag

SEQ ID NO: 59969 - DNA, 367 bp, Glycine max
  unsure (1)..(367): unsure at all n locations
aagcaacaaattaactggagatataccctcctcccttggtaatcttaaaaggcttcaattcttgtaagtatggcattctgtttgctaggttctacatatatataatgagtcttaagccttagcatgtattttttgtgcaatgtttaaaagtgtctgtttcttgtcctgctaccagaacattgagccaaaacaatctcagtgggactattcctgaatcacttgccagtcttccaatcttaatccatgtgtatgtaaaataatggtttctagaactttgccatctttttaaagtatatntcattaatttagtatctgattgattattcacacttctcttttgcagtctgctagattcaaataatctgag

SEQ ID NO: 59970 - DNA, 471 bp, Glycine max
  unsure (1)..(471): unsure at all n locations
ngtagcaganaccncactcnctatccattaggcatagaanagttgtacacatgctatcacaagttgtaaatatatgcttgtattcatgattntatacatccnccggtccattagcatatgcccactaacttaaaggaatttgctatattngtctattggaaaataatataagttgtggccttgtaggtgtgtttgtaaatataaatatgccatgctaaaacactatntagaagcaatatataaccatagagtatgatagtagtattgagtctattgacaatgcaattcttacaaaaaaaatataaaaaggattgcttacatgcatcnaattttttctcagcaaatgatcaaaatataataaaaatctataaaataaattaataattataattattattaaaaacggaagcacttgattattgaatcatagttntcccacagctcatgaatcactatgtctattaacctcat

SEQ ID NO: 59971 - DNA, 389 bp, Glycine max
  unsure (1)..(389): unsure at all n locations
tgctntgcaccttccttacatgcttctaatatatgtcttgtttccttctaagnaagaacgggcaatcattagtaacattaaggcgaaaggacttataacctcgnttgttaaaacataataaaanacatagtgcaatgatatttaataattaaataatatttgaagtaaatgtataattttgatttattaattatttaatatgattataatatagtattatttatgaactattaagaaatcattatatatttatattattataaaaataatccataatatatattaaaatttctatatataatataataaatatagaaaatgttattatattataggattcgtcatgctaaccagcgggaggattattaaatcgaccctaacccacccac

SEQ ID NO: 59972 - DNA, 391 bp, Glycine max
  unsure (1)..(391): unsure at all n locations
ctccctaagagtcctctcacaaggtgtttgttgagccatgttctcagtatgaaaattagtagtggaatgctcaaaatcagaatattcagaatcaccctcaacataatgctcaaaatgcacaggatgcacactatgcctaactaatttatgaaaggttctatctatttcaggatcaaagggttgtaaatcacctggattgcccctagtcatgcactatatatagcaaatagtgtgtttctcaacaagcacctaacaagggggtaaaactatagctatactcaaatgatatcaaaatgagctgaaattntgtgatgaacaccctataatcatgaaaagatagcatanaaaatttcaaacaaaaattcaaaagtctaactatgaaaactaccta

SEQ ID NO: 59973 - DNA, 318 bp, Glycine max
  unsure (1)..(318): unsure at all n locations
cgatccttgagttatctgccgcatgcaanncttctgttgtgatgttcgcaggngcacactatttactcacatgcaccaacaaccgcattaatgcatatctcaataattcgcatggaatcgatgagcgatgcagtaaagtgagggcatgatgtgttaattgctattcatgagtattaaatgccttaaaaacatgagtaaaagtagtaatggacctctaattatggtttcctttgtgagatatagtaaataattattcttgtgtgaatttatacagtggaaatcccattttgatgactaatggtgaacttatatggattt

SEQ ID NO: 59974 - DNA, 284 bp, Glycine max
atattgatattaggaaaagaatctacatcattattgtctcttagccttgactacggggcttgttcccagagtcataaaatcccaaatcactttggaattgaggccactgattatgtatataaggcatagactctctatgacacagcaatcatggatagtccctaccacaacatattagcctttcataattaacatacaaatatatttttatactcttatttttaataacccttagatttaaattcaatgatcaaaatcacggtcgcaagagcaacatggctaca

SEQ ID NO: 59975 - DNA, 227 bp, Glycine max
atttggagcacaccctaaccttccactagtctataacatcaatttaaactggctcgaactggatttacacctaaaattccaccgaagtaaaatgtgactcctcaacaccgcattatacacctagatatggctctatgtttactatggacatgagattttctctcttgcgcagcccaagcattctcataagtcctatacgacatttcagactaggaatagctgacttt

SEQ ID NO: 59976 - DNA, 296 bp, Glycine max
gggttcgagggtacttacccgtgaagatttattaacgatgtttatcgaatgaagaacggcgaagaacggtggaaatctttgcgaaattcctcacggaaaacgttacggaaacgtttcggaagcgcctcggcttagattttcttcacggaaacaatttttccaagcaaattcgacagagagagaagtgccaaagggctgaacccttctcttcttcacttcctcccctatttatagcaaaataggggaggtggttggcgccagctcgcctaggcgagctcagctcgcccaggcaagcc

SEQ ID NO: 59977 - DNA, 408 bp, Glycine max
  unsure (1)..(408): unsure at all n locations
tctctatacatatagtctgcacatgttttgtactttggttagaggttcaagaggtanggtattaacacactagaatggtttctctgggcttcactttactgagatgaatatctttttaatcttggaacaaatgcccaacattnttttctattaaattctgaaagtattttctacaaattttatacttttgaaaagtactctctgaaatacaaaaatttaaacattatattggaaagtactttctagaacatgttgttatatattccacaatttactctttcagaatgtttaacatttcgtattcaagatagtactttccggaagccacaaatctatacattattctggaaagtatattttagaataatgatatagaggtattttacgtgtagagagtatctatgatag

SEQ ID NO: 59978 - DNA, 472 bp, Glycine max
  unsure (1)..(472): unsure at all n locations
tcaatggaggaagagaataagagagatgttggcatggaaattgtttgagaagagggagaanagtttgaactttgaagtgtatctcacaagtttctcattcatcanagttatgacaagtgttacacatgtttctatttatagtctagcacatgggaagcttccttgagaagcaaggaaggtagcttccttgggaagctagaggaagaaatcttccttgggaagctaaaggaagaaagcttccttgagaagctagaagggggctactcacacccctctaatagctaagctcaccccatgccaaaatacatganaatataatgggaagcttccttgagaagcaaggaaggtagcttccatganaagctagaggggggctactcacaccctttcgatagctatactcactctcatgccaaatacatgaaagaaaaacataaagttctacacaaagactaccaaatgccctgaatac

SEQ ID NO: 59979 - DNA, 342 bp, Glycine max
  unsure (1)..(342): unsure at all n locations
ttcacacgacaataactcttgactcggatgtctgnattgttgtcctcgtaatatatcgagacagctcgtatattggaaaccagaagcctctgagcacaantcaaaacgacacataactttttacatcggatgtcccgattgaatcccgtaatatatcgagacgctattaattgaaaatagaagctctgagcaaattcaaacggcaataacttttaactcgggtgtccgattgtgtctcgtaatatatcgagacgctcgaaattgaaaactgaagctctgagaaaaatcgaacgacaataactttttactcggatgtccgattgagtcccgtaatatatcgag

SEQ ID NO: 59980 - DNA, 290 bp, Glycine max
  unsure (1)..(290): unsure at all n locations
gaccctaagcaccgcagctgcagcttggaaagngtgtttcaccttctcgctatatctatatggnggcttatcgagcgtccgctaagcgcaacactcctgggctaagcacgaggtaaaattcagaagaagatgagttgtacaggttcgctaagcgcattgcttatctcactaagcgcaccgcttcagttcattcgctaagcgagagaggtgcgctaatccaaaaatcactaacgtgtgcaaagcggtccatacatgcgctaagcgcacgagcacgaacaaggccacctatt

SEQ ID NO: 59981 - DNA, 375 bp, Glycine max
  unsure (1)..(375): unsure at all n locations
tcttatccaagacactctctnggtggtgaagtttctccttttctggcttattccctagnggatggcgcctcttctcacatcttctcctttatcttccgttgtaactccatggtggaaaatcaccattgaaggaccttattgaagctcaaagatccagcctccatagaagcttctcaagcaagcttccatcaagtggtatcagagcgcaagagcttcaagtaggtgctccttaaacctcaattaatttttagctttactttctcctccattggtgnttcttcattttcctccatgtatctactcacatgtcttggtgctaaatttgttaacatgattcctttagaattacaccgattaaacttgctatagaagcta

SEQ ID NO: 59982 - DNA, 311 bp, Glycine max
aagagggagagaagtgtgactttgaagtatgtctcataagacttttattcatcaaagttacaacaagtggtacacatgcttctatttatagactaggtagcttcctttgaaagatttctttagaaaactttcttgagaagcttctttgagaaaactttcttgagaagctagagcttagctacacacacccctctaataactaagctcacctccttgagaagattcctaaagaagctagagcttagctacacaccccctataatagctaagcttacacccattcccaaaatacatgaaaatcaaaaaaaaag

SEQ ID NO: 59983 - DNA, 350 bp, Glycine max
tcaactgagggtggattcgtgagaacttagacattaaactatgaaaggaacaccaggtccctctatatttatggaccacgagggaatgctaatccttcttgatttcctagatacgagttcggcatctctaaatgcacgaatcatagctgcccgcttctagaaatgcaaccgtagtgcttgggacaatctgtttactaaattccagcaataatagtttgcagagatcacatctgtatcaactatctctctggagggatataccagccctgaaccacagcttgaaattccttgagaacgagaatacttcctgaaacactccccacatggttcaaatataattgatactgttg

SEQ ID NO: 59984 - DNA, 301 bp, Glycine max
  unsure (1)..(301): unsure at all n locations
ttctaatccctgtaagataattttctttctagttttcagcgtttaaatcgttcaatgacaccaattgtaggagtatctacaacgtgaaagatatggaagtgctcggttggagaattctgcttctgggcttgaactaataagccaaaaggtttaagattntaacattctcatttcattgattcttacatttgagtggcttaatattgcctcttctttgaacctctctttctacagtcgttagatgatgcataaaatctttaatactgtagtatagctctccttggttttgttactcaagcct

SEQ ID NO: 59985 - DNA, 294 bp, Glycine max
atctcattggtggaatgtgtgaatgcatgaaggaatgcatataacacagatgtcatctacgaatgcgggggtccagggaattcgtccccttcttagacacaatgtctaagggtagcaaagtgcgccaacgtacgtttttaagaatgcgacacggaccctccgttggtttgtatacagaaagtatcaagacagaacccatatgcgatgcctatgccaaagacacaatgcggggatgtacacaagatgataatattcactgaacatatgcaaaacggtatatgatacttatgcatg

SEQ ID NO: 59986 - DNA, 484 bp, Glycine max
  unsure (1)..(484): unsure at all n locations
ttaagtcacctgctgatgcagctctaaccacacaccgacacttaatattcttgactatatgactaacatacactangatataaaggccctacatatatattgtgactgaatagcatgtctttgctctataataataaccttgggaattatacattaaccacttttcctgttaagggctaatgtttcccattatgaccatggcactagaaaagtctgcatataaattaagctgaagggtcattgctataggtagtgtgatctgagaatcctgataaccatcactagataactgctaatcagaatagacatgccctctttgttgatgagatacttgaaataagcagcgccaaatacagcacttgtggtgacataagtgggagaggttgtgctccaccctgctggacagtgattgatgatttgaaagtagactcatgtgtttcttgaaaactcctctaaacaaacctgcttgctttgatactctata

SEQ ID NO: 59987 - DNA, 511 bp, Glycine max
cactcaaccttcatcggcaagctaaaaatcttatagaactttcctaatccatattgttctaacaagaatttaattctatgaccaatactctaacattacctaaaaataacaagccaatattttcaaaaactaattcttatagaaattgcaataaaatcatatacaaaaatcaagacttgagggtaaacgcactacattacaaaccagtgtaaggaaagaacatatattatagtactcgattgctgtctccactctgccaacatcttttagagcataccttataagtaaatcaaataaaatattatataattgcgcataaaattgtatgttcaggttttttaaaacaattatgacataagaagaaaccaaccaagttattgtaagcttccaacaatctggtgttaaatgcaaccatgtccagctgaccttgctcataaaatatattggtgaaattaccagcgcaccagtttaagtgattaatataaaatgcgttcactatatgagcataata

SEQ ID NO: 59988 - DNA, 494 bp, Glycine max
  unsure (1)..(494): unsure at all n locations
gcttcttgcgtagccgctcttggtgctcanaanatcccaaaaacaaatccctcttattactagctantttaaattctttagttcctgaatgtacaaccttcaaattgttgctcgttcccctctttgttttcttgcaaaaagaatatctatatcaaagaaaacatggatgaaatcctaaggatgccatgtacatgtgtatttctgaagatatagtatttatattccatcaagcatacattgactgttgattacatgtaatagactttttataacatggttgccccacatcacaattaanaagcacaactaccaatctttcggagtcctttggttaaatttgcttgtctccttctgtggtggggttntgttaataatatntatactttgccttccaaaaaaacatatgactgattctcttttcattaatctattttgatgttattgataaaagaacggggtctcacctgactcactctctcttctcttctctgact

SEQ ID NO: 59989 - DNA, 452 bp, Glycine max
  unsure (1)..(452): unsure at all n locations
tcaagaaaaagatggcctcagcanactccttatttccagaagggaattctatcaatagacctccaatctttaatggagagggttaccactactggaaaactcgaatgcaaatttttattgaggcaatagacctaaatatttgggaagccatagaaatagggccttatatacccaccacagtagaaagagttacaatagatggcagttcatcaagtgaaagtataacaatagaaaaacctatagatagatggtctgaagaggatagaaaacgagtacaatacaatttaaaagccaaaaacataataacatctgccctgagaatggatgaatatttcanggtttcaaaatgtaagagtgctaaggaaatgtgggacactcttcgattaacaaatgaaggaactacagatgtgtaaagatctangataaatgcactaactcatgagtatgaacta

SEQ ID NO: 59990 - DNA, 344 bp, Glycine max
  unsure (1)..(344): unsure at all n locations
agcttctccatatgtgatgtgctcgaatcggatattctagtggaaagctattgacaattgagattctcgagagcnttcgntgntcagtttcgagcgtctcgatatattatgcgcctgaatcggacatccgagtgaagggttatgaccatttcaatttcttgagagcctccgttgttcaattcgagcgtctcgatatgtgatgatcctgaatcggaccttcgagtgataacttatgaccatttgaattttcgaaagctttcgttggtcaattcgagcacttaatgtatgatgtgcctgatcagactatcgaatgaaaagttatgacaattctatttgtcgagagc

SEQ ID NO: 59991 - DNA, 498 bp, Glycine max
  unsure (1)..(498): unsure at all n locations
agcttactatatttaagacgctcgaaattgaataacggaagctctcngtgaaatcttatagtcatatcatttcagacggatgtctgattcaggcgcagaatatatcgatacgctcgaaattgaacaacggaagctctcgagaaattcaaatggttataacttctcacacggatgtacaattcaaggacataatatatctagacgctcgtaattgaacaatagaagctctcgagaaagtcacatggttataacttttcacccggatgaccgattcggggacataatatatcgagacacttgaaattgaacagcggaagctctcgacaaattcaaatggtcatcactttccacaagaatgtccgattcacgggcataatatatcgagacgctcganatngaacaacggaagctctcgagaaattcanatggtcataacttatcatacggatgtccgattcgggccataatatatcgagatgctcgaaattgaacaacgga

SEQ ID NO: 59992 - DNA, 372 bp, Glycine max
  unsure (1)..(372): unsure at all n locations
ataaaccatatagtctgtcgacaggtgcacgattttgattcacggccagttgggttaccaggttaaccaaggcatttagtttaccttcaagtttcttagtctcggctgatgaagatgaatttgtgggtacttcatgcactcctctaatgacaataacatcacttttggcactaaattgctggtgagtggaagccatcttctcaattaaatttctggcttcagcaggagtcatgtcttctaaggctccaccactggcagcatttgtcatacttctctccatgttactgagtccttataaaatattggagaagaagctgtccaacctaccttcngcggagggcacgcgagactccggaagcgtgtcacgaaaga

SEQ ID NO: 59993 - DNA, 428 bp, Glycine max
tgtaggattatggcgtacccatcacatgtggtactaggtggcggtcgggcgatggtgcacaacaagttttccatatccacaatgtgcgcataaacccaccatcccctgttgcccacctccatctgagctcacgtattcccacgtagcccatatcctcgtttctctcaacaccgggtccccatcaatcctcccaagcttccacaacatccaatcaaaacaacattcaaacagcacaagctatcacagccaagcaaaacagggcaaaggcagaaaactctgctcaacacaccaaccaaaatcacagcttttctcactcaaagaccccagtaacaattccttcgatccaattggtaaccgttggatcgactccaaaattttactggaagtctatagtacataagcctacattgtgacgcgtgggatctact

SEQ ID NO: 59994 - DNA, 505 bp, Glycine max
  unsure (1)..(505): unsure at all n locations
atctctgagtcacctgcggcatgcaagcttatanatcaagtgataatatntagaaatcatgtgatcatcaattccaaaacatagggggagtaaacgcanattttatatatatatatattgtgtgcttgaatcttgatttcacgacttatattgtcatcatcaaaaagggggagattgtagaagcacatgactttgatgttntgatgatgatcatgatgatttgatgcanatgatgcaaatgattcaagaatacaagccaccacatcaagatgatcactattattttatgaagggaattcctaattgattatcacaggtttgccacgaatttgaagtaaaaagntttttcaagagattactctctggtaatcgattaccagaggatgtaatctgataccagtggccaaaaatggtttacaacaactactaaatatttgaaattcaagtttagaagtgtgtatngattacaccatatttggtatngantaccagcaggtaataaacg

SEQ ID NO: 59995 - DNA, 345 bp, Glycine max
  unsure (1)..(345): unsure at all n locations
tcacgcttcttagtttcagacgatgcagatgggtttgtagctacctcatgcactcctctaattactatggcatcatttctggcgctaaactgctangagttggaagccatcttctctattaaatttctggcttcagcaggagtcatgtctccaagggctccatcactggtagaatctatcatacttctctccatattactgagtccttcataaaaatattggagaagaagctgttctgaaatctgatggtgggggcaactggcacatagtttcttaaatctctcccagtactcatacaggctctctccactgagttgtctaatacctgagatatatttcctaatg

SEQ ID NO: 59996 - DNA, 418 bp, Glycine max
  unsure (1)..(418): unsure at all n locations
agcttataagcgcnggtcttggagacgaaagttttgtggtcgcaatatacgaagataatgttccaagttcattggatatgcgacgaacttgccctcttgatttccagctggggaattggcgagtggaggaacgccccgacatttacgcagcgagcataatgttaacccttacggttttaaaagctgtatatgtgggcctacgctctagagattttcttttggtaaggctctgtgtatcttgtttttatattataatacaagatctttcttatttgtcctacgactctacctattctatccattggctgcttacttctttctgaacggagatccatgacgctcccccaacgtactaatacctggacccactatcacttgagcaaaaacagtaaactgtgataagggacgagatgtggac

SEQ ID NO: 59997 - DNA, 412 bp, Glycine max
  unsure (1)..(412): unsure at all n locations
gacacttagaaactaagctggcacccagctcgccaggcgagctatttagcccaggctatcanggttgcttcctccagaagtaacagccttctggagggcccaagtgggcctggttgctatatgcacccccatttttactaagtacaccccattgcctgtttttttgtgattctttcttcgtaaagttacggaaacttatgaatttcgtaacgatacttgttatctttccgtaatgttacggaaccttgcggattacataatcatcccctttttgacttacggaatgttacggaacctcactaatcatccncttttttgatttccggtgtgtcacggaaccttacggattgtgcatcaatattntcttatggtttcggcatgtccctgaatttcacaaatagcctaatgatgg

SEQ ID NO: 59998 - DNA, 272 bp, Glycine max
  unsure (1)..(272): unsure at all n locations
gagtatgatgaactaaaggacatcaatatggtcaccgatgaagccttggaatgagaaaccaataatgcccgaaaggaagaacaccaccataacacgttttgtggggctttatttggcaccaatagtgagctcaaactccgaagaggtgacaggaatcatcacgggtcataggcatgatctggaaggacgagctatacgccttgcttangtccaaaagaaatttgtcccaacagtttaagtgagactgaagggaatatgtgggtatcatctat

SEQ ID NO: 59999 - DNA, 325 bp, Glycine max
  unsure (1)..(325): unsure at all n locations
tgcttgagatgangaagtgtataatggtganactttctgcttntattcattgaccacagagtggtacctggagatatgtcgcggtggtcaagagaccttggggacgtcaggtggggtgctattgcccaaaccaagcttgaccaatcccgacccaacccgggcatagtcagtcagtgagaacctgtgatgtacctaaacaggcgagctcctggcagtctacagataaaaggaacatagaccacaaagcaaggaggctcgtgtggtggctggccagctgtgaactntgattgatatatgggatatggcctctggtaatcgattacct

SEQ ID NO: 60000 - DNA, 395 bp, Glycine max
  unsure (1)..(395): unsure at all n locations
caagagtcttcacaaataactatcatgaagcagattattaacaaaactacccatcatatctcccaaaaccccatacccacgaaaatcaaaggagaaagaagtccacccaaacctgaaatttcgaagtcccactcgtagacacgcacttcacaaccccgaaaatgctctcctttcacgatttggggcagaaatgatggccaaaggttgaagctttgtttggagcttcaatggagaatgaagaagaagagaatggcaacgtgagggagaggggaaaaggcttctaaaaagtgtggggctgagtgaagagagagagagagttgctttttaatttaaaaaggctntttcctcatttcttatttatttaatatanactatgccacatgtctccatttgag

SEQ ID NO: 60001 - DNA, 261 bp, Glycine max
  unsure (1)..(261): unsure at all n locations
cgcacaacaagtttnccacattcactatgcgcgcatatacccaccatcctctgttggtcacctncaactgagcacacgtacttccacgtaggccatatactcatttgtctaatagcgggtccccatcaatccttccaagctgtcacaacatctcatgcacaacaacattcaaacagctcaagctatcacagtcaagcataacagagcaaaggcagaagactctgctcaacacatcaaccaaaatcacagtctttctcactt

SEQ ID NO: 60002 - DNA, 387 bp, Glycine max
  unsure (1)..(387): unsure at all n locations
atatgaggaagtgttgaagggtgaaacttcctgctnttattgttgaccacagagtggtacctggagatatgtcgcggtgtcaggagaccttggggacgtcaggtggggtgctattgcccaaaaccaagcttgaccaatcccgacccaacccgggcatagtcggtcagtgagaacctgtgatgtacctaagcaggcgagcttctggccgtctacagataaaaggaacaaagaccacaaagcaaggaggcttgtggtggctagccagctgtgaaacttgattgatatgtgagatatggtctctggtaatcgattaccaagggtgggtaatcgattacaaggcttaaaaatgaagacaagaggctaagatgttctcttgaatcgatacca

SEQ ID NO: 60003 - DNA, 400 bp, Glycine max
  unsure (1)..(400): unsure at all n locations
agcttgagccacgttaatgatgttcacataacattttctatcacaactacattatacttatataatcatgatttcatcgtgaagaaattaaacatagctatatatatttcgttcaaacaagaaatggtttattccctggcagaataaattaaaggtgccgcgcattcattattntattctatgagcaaaacatntaattgccaaggagccaaagcacaagatgcatatccagaggctaataagtagtacaagctataaattaaagctgatacacaactgtaaaatcccctacgcgcgtgcatatatatatatatatatatatatatatatatatatctccacttatctatcatatntcttcaaatgctgaactcgaagagaaatgcctatatattataca

SEQ ID NO: 60004 - DNA, 136 bp, Glycine max
atggaccgtatagagtacataagcattggcctgttcttataacatcagtgccggtggagacgagatccaccctagaacttccactgagagttctaaaaccacgaccgaagtccacctccaccgatgatgacccctt

SEQ ID NO: 60005 - DNA, 191 bp, Glycine max
cctatttataaaaataagcttaccaggataacaacaaggtgtggacgaatgtggaccaagcacccacagcaagcagccattgttccaaagtgagctagtgcatggcctatcactgactgccttagtgaaacaaactattggcgcattacaagatgccttttaacacaacattaatgaaaggggattatctc

SEQ ID NO: 60006 - DNA, 272 bp, Glycine max
aatcattctgcttagacgaatgagaaaactgcggcaaattaagagggtgatgatgagggagaaacccatgatgtgactggcattcctatacggccaagtttcccaccaaacccaacaatgtcattactcagtcaataacaaaccacctccttacccaccacccagatatccacaaaggccatccctaaatcaaccacaaagccttgctaccgcacttccaatgacgaagaccacctttagcacaaacccaaaaaaacaccaaccaagaaatg

SEQ ID NO: 60007 - DNA, 377 bp, Glycine max
  unsure (1)..(377): unsure at all n locations
cccatcacatgtggtactatgtggcggtctgtcgatggtgcacaacaaagttttccacatccacaatgcgcgcataaacccaccatcccctgttgcccacctncaactgagctcgcgtactcccacgtagcccatatactcgtttctctcaacaccgggtccccatcaatcctctcaagcttccacaacatccaagcaaaacaacattcaaacagcacaagctatcacagccaagcaaaacagagcaaaggcagaagactctgctcaacacatcaaccaaaatcacagtttttctcacgtaaagaccacagtaacaattctttcgatccaattcgttaaccggtggatcgactccaaaaatttactggaagtctata

SEQ ID NO: 60008 - DNA, 425 bp, Glycine max
  unsure (1)..(425): unsure at all n locations
tcttcatgttggttcccctatctcttacaaaatttatgatttagattggattgtagcacacattaatataggtgaaatttcattttttagaacatggacaacttccatgaaaggctttgatgtccctattaacatagacaaaacgtggattctaaaccttaaatttttgtatagtttaaaaacaaatacagaattagctcatcaacattgttaaataaagtagtatatgtgcttttatatatgcaacaacttcagtttttcgagtaattgattcatgacatggaattagaactatgtgactatttagtagtttttcttatctttctcactgctaaacttggtaatgtnagaatatgaatttgtaatttgtatcataatgtactttntctattcagtctacacaattttggaaaaatgtataataa

SEQ ID NO: 60009 - DNA, 394 bp, Glycine max
  unsure (1)..(394): unsure at all n locations
ttctccttttcctataatgggggagaagngaaggttatttgttcacttctcctgatcattcgagatcacttgaaattagtgaataaaattgtttccgcgaagaatatccaagccgaggcacttccgtaacgtttccgtgggtgatttcgcaaagattttcaactgttcttcgatgttcttcgttcgttcttcgtcgttcttcggtcttcaaccggtaagtccccgaaatcgaacttttcaattcattctatgtaccctgagtggtcctcatttgttttcacgtgcttttattttcatttcatttactttccgtaccccctttcgacgtgttntagtcatttacttaagtcattttctcgcctaatcaanaataaaataaattttcaccgatcat

SEQ ID NO: 60010 - DNA, 448 bp, Glycine max
  unsure (1)..(448): unsure at all n locations
tcttgagtcacctgcngcatgcaagcttctggtgggacatcttgacttgctntncaatctgacattcaccacagattctgccttcttctattatcagattgggaatgcctctcacagcacctttgtcaatgatattctttatgcctcttaagcgcagatgtccaaatctttgatcccatattctgacttcatcttctttggaggatagacatgtggaggagtagctggtttcttggggtggccatatgtaacaattgtcccttgacctgctgtccttcattataacttcactcttttcatttgtcaccaaacattctgactttgtgaaggatacatttgaatccttcatcacacagctgactgatgctgancaaagttgcagtcagtcccttcaccagcagtactttgttcagactaagaagtgcatcatgaactagctttcccattc

SEQ ID NO: 60011 - DNA, 371 bp, Glycine max
  unsure (1)..(371): unsure at all n locations
taatttctctcaattgcatcttctctcaatgagctagtgaagaagaatgtggcatttacctanggtgaaaaacaaaaacaagcctttgctttgctcaaagaaaagcttactaaggcacttgttctagctcttcttgacttttctaaaacttttgagctanaatgtgatgcctttggagtgggagttggagctgtattgttacaaggtgggcaccttattgcttatnttagtgaaaaacttcatagtgccaccctcaactacctcacctatgataaagagctttatgccttaataagagccctccaaacttaggaacattaccttgtttccaagggaattgtcattcatagtgatcatcaatcacttaagta

SEQ ID NO: 60012 - DNA, 268 bp, Glycine max
  unsure (1)..(268): unsure at all n locations
gagtcgtgaagtgcgtggctacgagtgggacttctaaatttcaggtttgggtggacttctttctcctttaattttcgtgggtatgggggttggggagatatgatgggtagtcctgctaggcttctgctgtgtgatgattatttgtgaagacatttgttgaaagctcgntgaaattgccatcgttggatgagttagacatacccattctgtntatggttttgtgatgatgttatgatgttatatgctgacattcttatggacactgtag

SEQ ID NO: 60013 - DNA, 391 bp, Glycine max
  unsure (1)..(391): unsure at all n locations
agtcacctgcngcatgcaagctngaagaggatgctntaatggagganaagaattaganaaggggggagcactatattgtatgaataaaagagggagagaagtcaaactttgaagtgtgtnccataagactntcattcatcaaagntacaacaagtgttacacatgcttctatttgtagactaggtatgcttcttgagaagctntcttgaganaacttccttgagaagcttctttgagaaaacttccttgagaagctagagcttagctacacacancccctctataactaagctcaccttcttgagaagattcctaatgaagcttgagctgagctatacacacctcttataatagctaagcttaccctcatgccacaatacatgagaataca

SEQ ID NO: 60014 - DNA, 390 bp, Glycine max
  unsure (1)..(390): unsure at all n locations
aataaaataacttaatgccattaacctagggaattaaaaaaaacttaatggctgagtgtaactgaaattgtggcaaccaaaagtcacccccaacagccaacaagtcagccaccatttggtctcccaaaaggctgatgcctatgttgccaattgggcccttattacaacttgaactaaacctaactaaagcccttttagttgattaacccanaacatatntttggtcagccaactntacaaggatngtgccattatttagacaaactaaacactctaaaatngagacaagggggtgtcatntagtcctcctccatttgggccatgatacaactcacaaccttggactnnttctcttgaaactngngcttgattcaaatagtatggacagca

SEQ ID NO: 60015 - DNA, 345 bp, Glycine max
  unsure (1)..(345): unsure at all n locations
tcctcttaccggtgaaaaacattgtcgtccagcgctngtattataatngcgcaatgtcggctganaaacatcagttggggctgtttaactaccgatgctggctactggtttttctatttcacccctgaataatacttggacgatgtcganttggaaatgttcgatcggagtcatccggtcatgcttctttttaagacctcgatctgtcatcttttcctggccgacgtcggctagcatttttttcgatcaatatcgggtgaatcatgcttttgccaggtgggctaacgttttcgtggctgatgaaatgagagcatgccagtgtcggccgaaacacaatctcgcacg

SEQ ID NO: 60016 - DNA, 253 bp, Glycine max
gacaaaaatctcttctagtcatctaaggtccaacatgctatggttctgccagggtcttcttcagctgagtatgacaatcctggaagagaatggacatacgcacctaaaggcgctaaacaacgtggtgtcattggaggctgactttgccaaatggagggctactgtctccatagtctagcaagtggagtgccctaaggtagctaatgccatcttcttatttgttgaaattgtgaagtcgaaccaccaactatct

SEQ ID NO: 60017 - DNA, 489 bp, Glycine max
  unsure (1)..(489): unsure at all n locations
tgtagagtgtagactcattccttaactatgatacatgaacttaacanattacaatgatggttattnttggagttttaattctacttatgctatatcacaaatcttacaaaactcttagatttagtataccactagagttcccacggagtcacaaatttgtacctcgagcatgagctcatagtaacacaataaaaagggaaagcaaaatttgacaaaaaataacagcataaactcaccatattgcaaaaaacaagccagctatacgattctaataaacttcagagaattgtcttcactagatntctagattagttcatgattgtttcatattgttctgactntaataaacacacaatgcttaanacttcatcaaattcaccaaanatctatagtaatcagcaacaaaggcaatcattttcagcatattgtctctttcacaaatcanaattcaattaacctttatacaatacaaaacatcattgaatagtg

SEQ ID NO: 60018 - DNA, 319 bp, Glycine max
  unsure (1)..(319): unsure at all n locations
agcttggacaaggacattgtaccctgtcttttattgtactttcctacaccatantttatacagttatacacacacacacacacagagataattatgtgagtntgattcttacccatcttgcgcctgatatcttgcttatatcatgtcttattgtgaactgtccttagtaaattatctgtttatgtccctgaaaatattcccaaatgcgacagaggaaggagtcatttgcaacaaatgagttttngtttattggtggattacagacagaacacttcatttgtttgggcggtccttcgcttctctatattactacaatatt

SEQ ID NO: 60019 - DNA, 478 bp, Glycine max
  unsure (1)..(478): unsure at all n locations
ntctaaaaaggaatccaataaagatcttctttntaattgtttatagaaaacaatctaatgaaagcttatcatgaactattaattaataccagtagtctttttatccattttaaaaatttggttgcagaaagcaatgtatattttggctattcttttcattcaaatacattaaatagtttgatatatttaaactataatggacactaaatagttttctttttatggtcatattgaaatactagcattttcccgtgccatgatatttccaactntattgagaaacatattgaaaantaattttataaatggatgctaacgataattattataattantaattataaatggatatggctaaatatattttctatagaaaagaaacataaaaactatttacacaaattattattattattaataaatggagcataagaaattntttaaaaatatttagatttaanaaatcgggagaataaat

SEQ ID NO: 60020 - DNA, 335 bp, Glycine max
  unsure (1)..(335): unsure at all n locations
agctngagatgaggaagtgtataaaggtgaaactttctgcttttattcgtcgaccacagagtggtacctggagttatgtcgcggtggtcaggagaccttgtggacgtcaggtggggtgctatttgccaaaaccaagcttgaccaatcccgacccaacccgggcatagtcaattagcgagaacctgtgatgtacctaaacaggtgagctcctggcagtctacagataaaaggaacaaagaccacacagcatggaggatcgtgtggtggctggccagctgtgaatcttgtgtgatatatagggtatggcctctggtaatcgattactaanggtgggt

SEQ ID NO: 60021 - DNA, 420 bp, Glycine max
  unsure (1)..(420): unsure at all n locations
tagaacaatatacttgtccttcatttaactgtctntggacttgtcggccacgatcaacaaagtactttcgacacctactgtatgttgatttgaccaacgttattatgggtatgttgcgacaatccttcaaaaccttatcgatacattctgagaggttggttgtcatgtgaccatatcgacgtccttctctatcataagccatcatccatttttcctttgaaatgcgatcaatccatgttgctatggctggactcagttgacgaaatttttctaagttttgataaaaaaaaaatgtgcttgcacggagtgtaacctacantaaaattgttaggaacaacaattntaagtatatatgaaacttaaattaacgtgaccatcanaaatgaaatcttacccaatttcttcagcatttcttttttg

SEQ ID NO: 60022 - DNA, 460 bp, Glycine max
  unsure (1)..(460): unsure at all n locations
ctgcagctttacgtacggatacagaatggcattgttcttttcgtcaatgggaacgattggagccaagcttgattctgtgaccacaaatagcatctgctctctctgctgctgcaaatttaacagcactatattatgagaaagagatgcatgactatgtgataagaaatgcatttagttctgacacatctgttgcacggttatgaaatgactagacgaagtatgcagatgagatgtgtatntatggttgtatataattntactgcaattaacttcgtgttcgattttaaagatntgacagatattaaaataagataacctgtctcatacctgtngtatataaagactctaggagggttatctggatactntttttgcatgtctgaataactgataccaaagtagcagtttaagcatttaacattacatagttgttagagaaaaatangatgaatattgacct

SEQ ID NO: 60023 - DNA, 423 bp, Glycine max
ctatcaatactcaagcttccacagaatagagaatcgacattatttatacaaaagggttatttgtgcttatgtgtcggtgctttgttgcaacatcttctgggtgagtagtttgaattctagataaacggatatgttttcaaataaaattatttttaatatagaatatatgtaacataaaccaacaaaaattaaaagaaaagaatgatgtctcaattctaagaggaaaatcattcgaattcaaaaaagtgaaatacttacatttatttaattttaagaaaattagtgagacgttaaaaatgtgcaagaaagaataactcaatagattaggtatgatgtttaaatattataaaatttataataatggctctcatcatactccataaaaagaatgtgttaatggtataatattttttatatataaaa

SEQ ID NO: 60024 - DNA, 180 bp, Glycine max
atcttgtgggatattgtgattgtgatcttgccggatatgttgatgatagaaaaagtactaccggacttgtatttcttatgggtgattgtgtttctacatggagttctaagaagcaaggcattgtgacactttctacttgtgaagcccagtatgtagctgcaacttcttgcacatgtcatg

SEQ ID NO: 60025 - DNA, 492 bp, Glycine max
  unsure (1)..(492): unsure at all n locations
gacctataaaactaagcttgacacacctgcttcatagacaagctcgaaagagctagtgtgtattnttcaaggaacaaagaggaattgtaatatattaatttgggatgggattaatgaaagattttatgctttttgtatcacactatctcctaaaaattaaaattcattgtcctaatggtacaccttttactaaaatagatgaattatcaaataatagtgccacatgaacatgtatatctggtacatctcaatctgtgagttgtacaatggaagtcttatatcaattgacctttatattgtgtcttttggtgtgatgatattgagttatagttgcaccttttatttnttcaagagccctacacttagctctgtangcttgatgtgtagataacttacaatcccatctctcaagtgccatanaaatcanagctttactcttcatatctagtgtattccttaataatgacatgaanttttcagttgactactcta

SEQ ID NO: 60026 - DNA, 390 bp, Glycine max
  unsure (1)..(390): unsure at all n locations
acaaagtgtttgacctgacaaactattccatgttgtactccatttcagataataatgtacaagagattaagatcaggtatcttttcttgttgattttcctgacatttacaatactctactgtggataaatatatggtctatggtatttcacaattcttttaaaattatattgcattatctttagttcttgatagtattaaagattcttccctattcatatntgtgtggctctacatgaattacactatctaactctgtngttgtgaatttttatcacccagngacatgttgttgatttactatatcaatagcatgtccactgaaatctctcatagagaaggactgtttaaatcgtcaacatctcttcatcgaaaagaagtggattcatga

SEQ ID NO: 60027 - DNA, 372 bp, Glycine max
  unsure (1)..(372): unsure at all n locations
cttgagtcggatcttaancacctgcgctgcagcttgagggcgaccccctcttattttatatgagatggttaccatgcaaatcgctccttcatattgggggcccttgggccgcaatcctccctttggcggtttttgaagacccgccccttntgtgcaatgttctgtagttgcattctatccaaaaccatatcaaaattgtactaatactgcctaacaaaggcaaccattatgttcttccaagaatggactcgggaagattccaagttagtgtaccaggttacagctaccncagtaagactntcttggaaagaatgtatcagcaattcctcatcttttgcgtaatccccatcttctgagcatacatctttagat

SEQ ID NO: 60028 - DNA, 459 bp, Glycine max
  unsure (1)..(459): unsure at all n locations
tgccttcacaaataatcatcacacagcaganttctaccaaaaccacccatcatatctcccaaaaccccatacccacgaaatttaagagagaaagaagtccacccaaacctgaaatttcgaagtcccactcgtagccacgcacttcacgactccaaaaatgctctcctttcacgatttggggcagaaatgagcaccaaaggttgaagctttgtgtggagcttcaatggagaatgagggagaagaaaggcaacgtgagggagagagaaagctgtctgaaaaaaaaagtgtgggggctgagtgaggagagagaaaangctttggtcttaaataaaaagggttttcccttttcccttattntattcaagctctgccacatgtccctatttgattggagcaaaagggcccactttctctntttgactgtgacccatactcagtcacaaaagtgagaaaaatctg

SEQ ID NO: 60029 - DNA, 355 bp, Glycine max
tgtataattatgggtattattagatgtatctttagagtagatttccctattttatcttgttgtagaagacagcagtgtgtactgtcttgtcaaagcttgtaaagctcgctctctcctatttgtatatatatatgttatttgaatgaaataaaactaagcaagttagtgaaaagttttcctcctcacatattcaaagcttcaagtggacagactaccaacaaggatgaatctgcataggagacaagtacagattcaagatttgcgttgtcctttttgaggggtgctgaagaggaggcatctcattctgtcttccattgcatcttgatccaaccaatatggtgtgaatcgatgtctt

SEQ ID NO: 60030 - DNA, 483 bp, Glycine max
  unsure (1)..(483): unsure at all n locations
taanaaacccatganagagtggaaggatataaattgcaaactttatcacggtaataacatcatgatgaaataataataaaacaaaacatataatagaaattcatcattctgcctattacttttgcatgctttaatataacagaagaattcataataataatatgagtattcagaaaatactaagatatcagaaaataatatttcacaacctaattcctcttgttcgctaatcgctattattactaaacttcttcagcttgctccctatccgttgtcacaagggagtgtaattagagactccatatagacatcccacattccatacacagtcacctaacgtccatctggaacattaccataggagcgatactttngcagntgtccctggtcattaataagtcattagttcatatatacctaattactattatacttttatcaaggggattttatatatcacgtcaactattattttcttaaaat

SEQ ID NO: 60031 - DNA, 124 bp, Glycine max
  unsure (1)..(124): unsure at all n locations
accttgaacaagcaattaactcctctntcagattcatgctatgtgctcgcgactggtctctttcttcccttcgcaacttgagttcactattgctaccccatagagctccgcgaaatttgttccg

SEQ ID NO: 60032 - DNA, 106 bp, Glycine max
tctagttgagacccttatccccatcactatttttttctattccttcttcatacacacaactacctcttatattattatatgaaaaaacaaaattttctgaaaaatg

SEQ ID NO: 60033 - DNA, 316 bp, Glycine max
acatgattgatacatgatctggacttgttgaattgactttgcaagattggatgagacgaagtgggattctcgaaatctgcacttatgcacaattttgctgtcgaaatgggcgcaccaaaattctggctgtgcagaacaacgctatgtatctgctggttgtggaaagaggaatgtacaatgagttctggatgtttgctagtcgatcccaacggtcaaaatgcccgtttacgtactaaagatttccacaaaagtttcgagtcgatccaacggttaacgaattggatcgaacgaattgttactgtggtctattagtgag

SEQ ID NO: 60034 - DNA, 482 bp, Glycine max
  unsure (1)..(482): unsure at all n locations
cggtcctgtggaacattgactgccaagatgttcttctataagatcaaatagagtctcgcgaatcccccagtgctcatgccacctgtaacaggaagacctatnttcctgtacatgaccgtgttggacgagtctatggggtgcgtgttgggtcagcatgatgattctgggaaaaaggagcaagccatctactatctgagcaagaaagttaccgcatgtgagatgaattactcaatgctggaaaggacgtgttgtgctctggtatgggcatcacatcggcttatgcagtatatgctcagccataccacgtggcttatttccaaaatggatcttgtgaagtacatctttgataaaccagccctcacgagacgaatcgctaggtggcaggtactattatctgaattcatatcgttacgtacccacaagcggttagggagtgcttacagatattgtgccacaccctcaggatatcggcgtgccccgag

SEQ ID NO: 60035 - DNA, 386 bp, Glycine max
  unsure (1)..(386): unsure at all n locations
ggtgtgatctccactgtctttgttgtttataangaccttgttggaagcttgaaaatcatccttgagtatatccttgtctctgttgatttcccatgtaatgaacttcttgagtgttttcttcaatgggaatacattggcctgtttcatgagactcaccacagatggtacaacctataacctgcaaaacagaagaatgtgtagggtgaccaataggtagtttagttggcaacatactgagtgtttctgttaaaatctcaagttgcctggaaagcaacttattttgtgccaataagcatcttgtgatgatatttctaacaagttnttctttgtgggttgatgaactctatcacgcagaatggaatgattgttggctgacatattctcaa

SEQ ID NO: 60036 - DNA, 440 bp, Glycine max
  unsure (1)..(440): unsure at all n locations
gatgttttgatgataacaatcatgataacaatagatgatgaccaatgtgatgaccaaaagctcataggtcaatcatagaatgagttcaagatgttcaagaaggaatcaagaacaacttcagactcaagaggaagagttgaagaacacttcaagaatcaagagggaaagtgaattcaagaatcaagatcaagattcacgactcaagattcaagaatcaagagaagacttaatcaagataagtctaanatgtgattttcaaaaattgagtagcgccatggattttcatananacatgttaccaaagaagttttactctctggtaatcgattaccagtggcanattgttttgaaaaagtttcaaattgaattaccacattccaattgatntcaaaaatctgaatcgatacaatgtttggtatcgataccagtgctttgacgtg

SEQ ID NO: 60037 - DNA, 408 bp, Glycine max
  unsure (1)..(408): unsure at all n locations
tctcaaggagggtgagcttagttttagatgggtgtgtgtatctaagctctagcttctcaaggaagttttctcanagaagcttctcaaggaagttttcttaagaaagcttctcaaggaagctacctagtctataaatagaagcatgtgtaacacttgttgaaactttgatgaaggagagtcttgtgagacataactcanagttcaacttctctccctttttcttccttcaatttcgtgctcccccctctctctttctctccctctntcttttcctccattgaagcctcctctccaagcttcttatccaaggctcatcttggtggtgaatctccttcttccatggcttattccctagtggatggcgcctnctctcacctcttcntctttgtcttncgcttcatctctatg

SEQ ID NO: 60038 - DNA, 347 bp, Glycine max
  unsure (1)..(347): unsure at all n locations
actaagctctgtttcaatacgagcgtctcgatatactacgggactttatcatacatcggagtanaaagtattgtcgttngaatttgctcacagctttcttgtntcaatgtcgagcttcacgatatactacnggacacaatcgcacatccgagtaaaacgttattgtcattttaattttctcggagcttccgttttcaatacgagcggctctatatattacgggattcaatcagacatccgagtaaaaagtttttgtcgttagaatttgctcaaaccttctgttttcaatatcaaccgtctcgttatattacgagacttaatcgcacatctgattaaaagttgttggg

SEQ ID NO: 60039 - DNA, 206 bp, Glycine max
catggcttattccctagtggatggcgcctcctctcacctcttctcctttgtcttctgctgcatctccatgggggaaaattaccattgaaggacctcattgaagctcatagatccagccttcatagaagctccacaagcaagcttccatcaaaactcatataggctgggtacttagcctagtttgttaagagaccaagccatcacca

SEQ ID NO: 60040 - DNA, 425 bp, Glycine max
  unsure (1)..(425): unsure at all n locations
ggtaggcctaggatcttcttcatcaatggattccttggcttcttggaagatgaatggaagtggaatggagaaggaagagagagaggagatgccacttcaaggagaagatgagtctagaagaagctcaccaccataagaggccatggataatagcttggaggaagaaggagatgaatgaagggagaggaagagaagagcacaaaatcttgtgctctaaaatctggagtttaattttcaaatgatcaaagttggaaaaatgcacacacatagcctctatttataggctaagtgtcacacaaaattggagggaaatttgaatttctattcaaatttcactcgaatttgaaattgaatntgtggagccaanatttcactaattatgaatagtgaattntagatatgggtcagcccactaatccaagatc

SEQ ID NO: 60041 - DNA, 243 bp, Glycine max
ttgataagagcttgagaagcatgaaaatacatttttttattaactgaagtttaaccatagggtttgaaaccagggaagtcacaaaagggtagtgagaatgaacattgtggtatgaagtcaaactctttgtatggggctgacactgtaaggctcataaagggcttgctatcatgaggaagtgcttgaccatctgcgagtgcaacacatagtctcaaagtacccacattgataatgtgatgtgat

SEQ ID NO: 60042 - DNA, 176 bp, Glycine max
atatctacagcgagcagtgtcttattcatatatatacaccacttcttattgagaaggtcactggaatagctcacaataacaaaacttcttgaatatcactcttatatcatgactcgcattaattaagctctatctccattttgttggcataaagatattttgcttatatatcgaaa

SEQ ID NO: 60043 - DNA, 434 bp, Glycine max
  unsure (1)..(434): unsure at all n locations
gggagggagattttatcacanaactggaagacttgtagtgttttattgtatgaaactgagtgttgggtggtaaaaagccactaacaaaataaactcaatgtagcatagatgagaatgttatgttggataagtggacatattatacaagataggattaaaatgaatgcattagaaagaaagttgagaacttgagatagcatctgttgtcgaaaaaaatggtagaatctcaccttaggtggttngggcatgtatgtagaagactagtagaagccccacttaagaggggtagcctgtagtcctatgtggngaagttaggctgaaaaaaattatagtctaaaccatttagagggtaatggcttctccatggacatganttgtaataaaacactatggcaccatttaatccatgtaactaacctcatgtagtgggaaaa

SEQ ID NO: 60044 - DNA, 433 bp, Glycine max
acttctccttccatggcttattctttaatagatggctcctcctttcacctcttctactttatcttctgatacatctccatgatgaaaaatcaccattgaagggcctctttgaagctcaaagatccagcctccatataaggttctcaagaaagcttccatcactaaatgtagccattaacttatgcgtaattttaatatcttaaaacaataatatgttatttctttcaacaggctaagagcatcattagtgggagtatgtactcaatagcaatgggagattaacatactatcagaaccccacacttgtgtatcaacaatgttatcacaatatcacataaaagcttatgtatgatgtgatacgctaaagcattatatcaatggtaaagaatgatgcaactgtctcagtataacattcatacctacataaaaaatt

SEQ ID NO: 60045 - DNA, 394 bp, Glycine max
  unsure (1)..(394): unsure at all n locations
agctntagttcactatttcaagtagtgcacgatattctttcagaggacaacatgttgcctataaagtactattangccaagaagatattgtgttcgatgggtatggagtatcataagattcatggtttgcccgaatgattgcatactgtacagacatgaatttcaaagaaattccaaatggtctaagtgtggggtatcacagtacatagtgaatgatgatgacgagtgtattattgacgaaaactcaaagaagggccacccaacgaaggtggtgtggtatcttcccatcatttcaanggttatagcgtcttgttgctaatggagatgacgcacaagaccttacatggcatgcanatgagagaaactgcgatggaatgctctgtcaatgttatct

SEQ ID NO: 60046 - DNA, 453 bp, Glycine max
tactggagatataaaaaaacattattcacaaggcatgctgttacacaccatattattaggatttattatcttaccaacaggttcatgaagagaaagcttcctacgaagtccatcaatgccagcagcaagtatggcagctaagcccaagtatggattggcagaaccatcaaatgatttcatctcaaagttgctcactagaccatcaggagttccaggtggagacgtagctcgcaatggagcctccttattttcgtttccccagaaaaggtatgcaccactccatgtgatgggccgtaatcgatcgtaacttcgaggaatttgaatagcaaagtaagatgacatagcagcataatttcaagagtaacaaataagagaagttcccaagagggtcactagctgatatgtactccgttcaactctagctaacacatgatgaatgcacgtaatatttac

SEQ ID NO: 60047 - DNA, 403 bp, Glycine max
  unsure (1)..(403): unsure at all n locations
agctntatagcttctttgtggagatatcanacattgttactggtgccgccccagatggattattctggtcagtggtgtatgaagggtgcatatctggctatgataactgcgtggaacgacgaccctaccaccgtaactgtggctgtgcactccataacacgtcacttattaatcgcacgcacaagcttccgaggtgtaacaatgtgtcataccctatgaggagggcatggagtgaaggaagcttggtcttggcaacttcttcttcatcatctccttctcaagttgcaactgggggaaggccacaaccaagttcggcaaacgttgaggaggaaaagaagaatcgctntaattattgaagntctgacaagaataatcttgttgaaaaactctgttttctctttta

SEQ ID NO: 60048 - DNA, 494 bp, Glycine max
  unsure (1)..(494): unsure at all n locations
cactcagcttgacatctaactaannatgaatcctcttcctacgtacctatctaggaagcttgagcaagtaaaaaaaaaaattgacgatgagagacaagnccatgccatcaattgtcttctagaagagacagtatccaaaaggcgacgaaatgaacataggaaaacatggtcttgtactcttgttgcacaaaagtgaacgagacagaagaaaagtctggcatcatggaaatntgcatacattgaaggcttgcattcatattatagaagagaaaaaagaatagtataattgcaggcaaacttatatacattattatagggttcatgagtttttgttttactgtaccattccccanagtaaatgtactatntttggattganaaaaaattggtggcaccaaatacttgtaacatctagagaggagcggaatgagagagaagacactactatangtataatgagaaatgctctatgcttctatttcactctacaaatc

SEQ ID NO: 60049 - DNA, 466 bp, Glycine max
  unsure (1)..(466): unsure at all n locations
gcacctgccgctgcagctttagccaatggactaccttgaataatttctttatagcccttttgatgccttgttccctttccttggtttgaagctcactacaagccttaagtgaaaaaccatgatatcaccatatccttaaggagatttggagctttggaattgttttgggaataagtgtggggggtttttgtttcatttgacaacttgttttgttggctatgcttcatgatgtattttgcgccatacttgatgtacatngtatattggttaaatgttggacatgctgaatgaaatgttngttctcataggctacaaagttaaaaataaataacatataaaaaatcgatatataaaatcgaaaaagaatagacagcactaaattgagtgataaatctaaatggacacaatatgaactcttgtctactcttatgttaaattatcttactctttaattctattttttcta

SEQ ID NO: 60050 - DNA, 455 bp, Glycine max
  unsure (1)..(455): unsure at all n locations
tataagaacaaaatggcctanatcatttccaaatatccatgttaattatgaagcatcaacaagaatcaagccaaggctattgtgcaagcaatcaatggggcaaaacacaccaaaagattatgatgatggatggctcaaattctcacaaaggtaaacttatcactttcaaattgagctttcaaaactatcatgacatgtagaggaaaaacaaggatttcaaatcacaaaatgtcaagagacttttattttcagaacaattacccatttcctgaacatatcctataattcaaagaaaaatatgcaaagttgtacatgcaaagagaattgacctanaatattaaactagaaacccaacaaaactaacaaaattaacaaaactaacaaaactagttgatgtcgcatcattttcttctatttcttaaaccctttntgcaccatttaattactggatagtc

SEQ ID NO: 60051 - DNA, 231 bp, Glycine max
  unsure (1)..(231): unsure at all n locations
gcttagaattcaattcgagcgtctcgatgtattacgagactctatcagacatccgtgntatatgttattgtcgnnngaatttgctgagagcttcaacattcaatttcgagcgtctcgatgtattacgggacttaatcagacatccgagtaaaaaggtattgtcgtttgaatttgctgagagcttcaacattcaatttcgagcgtctcgatgtattacgggactcaatcaga

SEQ ID NO: 60052 - DNA, 412 bp, Glycine max
  unsure (1)..(412): unsure at all n locations
tcttatccaaagttcatcttggtggngaagctccttcttctctgcttattccttaatggatggcgccgcctcttacctcttctcctttgtattccgctgcatctccatggtggaaaatcaccattaaaggacctcattgaagctcaaagatccagcctccatagaagctccacaagcaagcttccatcaagtggtaatcagagcataagagcttcaagtaggtgctccttaaacctccattaatttttttgctttaccttctcttccattgttggttcttcattntttctccatgtatctcctcacatgtcttgtgataaatgttttaaacatgattctttagagtttccacccgataaacttgctatataagctagatttgatttctatggttcaaaatatattgtcttgt

SEQ ID NO: 60053 - DNA, 479 bp, Glycine max
  unsure (1)..(479): unsure at all n locations
ngcacacaagattctccttgtctgacacttcannaacctttggttgggtcatatagatgtcttcctctaaatccctatgcaagaatgcagttttaacatctaactgctccaagtgaagattctctgtagctacaatactcagaataattctgatggtagtcatctttacaactggagagaagatctctatgaaatcaattccttgtttctgcttaaaccctttcaccacaagtcttgccttgtatcttcttctaccgtcagattcttcctttagcctatagacccacctattatgtaacactttctttccttctggcaatttagttaaagaccacgtcttattcttctgaagggatgtcatctcatctttcatcactagctcccactcaatagtgtcattcccctgcatagcctcactaaaacattctggctcaccagcataagttaacaacaaataatgcaatanaggggaatacata

SEQ ID NO: 60054 - DNA, 399 bp, Glycine max
tcaggcacattgtaagcgagaataagcatctgatcacatttttaagacttattcttacatgccttaattgtagcagataagaaaaatggccaaattgtagctcatcacagcatactcaaattgatgtatttaataaatgcaactggcgattatggaataattggtgaacagggtaaaataaggagacagtattcttaatttaaaaaaaaaattgtggattcaaagtacaattgtggccatgtttatactccactacttctattattttcttgtggtatttaagtggattgtagtgattggtgaataattcattgacttcatatactgagtaaacttaaagaagtattatatgtttgttgacaagcgaaaggcaatactatagacgttattgaccatatt

SEQ ID NO: 60055 - DNA, 297 bp, Glycine max
tatatgatttgcatgtccttgaacatgaatggtgtacgagtgtgtgtgttttgttagctacataagagtggaacataagttcacgcttgaagcatattgggcatagtctgagacacattcttacctatatatgcattgccccactctgctaattaataactccaagtcttaaccgacctagagataatagtgttcgccacagccacactgcttattatgtatagccaattacactattgtgcggatgcattgcatcgcatataactactgcacttagctatctttataacagtctca

SEQ ID NO: 60056 - DNA, 357 bp, Glycine max
  unsure (1)..(357): unsure at all n locations
actcaagctgggcttgatatacacttagctttaggggaatattataaataacgtaattataataacaatgtaaataggacagattatttgttatgtaattatgttaagggaaactatatattcttgtatttatgactcttaatataaatatatgctctggtgtgtaattttacacaaaattcatcacatgccattttctctcgttctcaacactctgttttatgttcatttatggggaggaataactatgttcgtctcgagagttccctattctactgataattgtttcaatgtgcagtcaacttctatgatggagagttttatgaagcttgcccagtcgaacacntataaaaattt

SEQ ID NO: 60057 - DNA, 292 bp, Glycine max
gattgagtcgcgtaatatatcgagacgctcgttattgtaaacacaagcattgagcatattcatatgaccataacattttactcggatgtccgattgagtcctgtaatatatcgagacgctcgtaatataatacagaagctctgagcaaattcaaacgacaataactttttactcggatgtccgattgagtctcgcactaatttagacactcgtaattgaaaacagatgctctgagcaattcacacgaaataacttttactcgatgccgattgagtccgaatatatgagacct

SEQ ID NO: 60058 - DNA, 475 bp, Glycine max
  unsure (1)..(475): unsure at all n locations
tctgttttcaatntcgagcgtctcgatatntacggggctttattctactatcttagttaanagntattggcgcttgatttttctaatagcttcccttctcaattacgagcgtctcgatatattacgggacacaatcggacacccgagttaaaacgtattgtcgtttgatttttctaatagcttcccttatcaattacgagcgtctcgatatattactggacacaatctgacacccgagttaaaagttattgtcgcttgaattttctcagagcttctgttttcaattacgagcggcctgatatattacgggacacaatcggacatccgagttataagttattgtccgttgaatctgctcagagcttctatttttaattacgagcgtctcggtattttacgggactacatcggacaatcgagtaaaaagtattggcgtttgaatttgtcacacttctgtttcaatacgagcgtctcg

SEQ ID NO: 60059 - DNA, 439 bp, Glycine max
  unsure (1)..(439): unsure at all n locations
tacanatctggtttaaatccaaacccatatgttaaatcatatcttatctagataagataagatctagatgaaataatatctagatgagatcaaatctaaataatatccagattagataagataagatctaattttgtagaataaattagtctgccctcttcaagtccaaacccaatgctggattcaagcccaagcccaattctagattcaagcccaatgcttcattaattctggaaattagattaaaaacatcaaattagctgaatgggcccaaataataaaatggcctagtaaattgacaattagactaatcagtattaaaatggtgcanaaggattaaaaataggagaaataatgcacatcaaacccccatacttacctttgcctcctggaaaatanataagacaaatcaggattcaagaagaccacaaacattata

SEQ ID NO: 60060 - DNA, 339 bp, Glycine max
  unsure (1)..(339): unsure at all n locations
aacctcggatccctgtcagatacaatactagaaggaattccatgccaccttactacttccttgatgtacaactccacgagtttctccattctatactccatattcactgggataaaatgagcagaattggtgagtctatctactatgacccacacggcatcatgtccacgactagtcttgngttaactacatacaaaatccatagatatgctttcccatttccattccggaatctccaatggcttcaattctccagatggtcgctggtgctcaaccttagccctttgacatgtcaaacatcttgctacatatgcatctacatctttctttatgccatgc

SEQ ID NO: 60061 - DNA, 223 bp, Glycine max
  unsure (1)..(223): unsure at all n locations
catttaattctgagcgtctcgttatattacgggactcaatcagacattcgagtaaaaagttattgccgcttggattggctcacagattcaacattcaatttcaagcgtgtcgatatatgacaggactcaatcagacactcgtgtaanaagttattgtcggttgaataggctcatagcttcaacattcaattttgagcgtctcgatatatgacaagactcaatc

SEQ ID NO: 60062 - DNA, 330 bp, Glycine max
caagccaaggctattgtgcaagcaatcaatggggcaaaacacaccacaagaatatgatgatggatggctcgaattctcacaaaggtaaacttatcacttacaaattgagcttacaaggatgttaagtcacataatgtcaagagacgtttattttcagaacaagtacccattacttgaacatatcctataattcagagacaaacatgcgtatttaacacaacaaaactaacaaaattaaactataacccaacaaaactaacaaattaaactaatttagacacctaaaaaaccacctaaactagcaaaccacagaacctccccccaacttaa

SEQ ID NO: 60063 - DNA, 343 bp, Glycine max
ctgagattcacttaaacatagtgagaacaattgtttccatgaagacaatccaagccgaggcgcttccgagatgattttgtgggtgatatcacgaagaatttcaaccgttcttcgtcgatcttcggtcttcaactggtaagttcccgaaattgaacatttcaattcatttgatgtacccttagtggtcctcatttgttttcgcgtgctcttatattccattcatttacttctcgtacccccttttgacgtgctctaagcatttatttaagacattatctcgcctaataaaaaaataaataaattttcaccgatcatatgtttcgaacaacctttaaattctgtt

SEQ ID NO: 60064 - DNA, 397 bp, Glycine max
  unsure (1)..(397): unsure at all n locations
tgctgaccnttttcggcttacatgactttaagaatgntagctgttgcgccaaatctaaatatacctacttggaaagggtatgatatcaataattattcattctacaccnagtctgangatcataaaagctcaatgcaaaacaatggtgtgactgttgatgcccactccgatcacttttctagtgcatcagacaacaatccgattcgagcatcgatgccttactttggagttattcaagnnntctgggatcttgactatgttggatcaagtggcctcncaataattaagaacggggggtgaattaattattaatgaaccctgactaattaaaaatttatccttcttaatggtacttgatttagataggcttntactatcccggttagaaaatatagaa

SEQ ID NO: 60065 - DNA, 330 bp, Glycine max
  unsure (1)..(330): unsure at all n locations
ccggccttaactcgctagctgtatgtcagtgtgaggagttagttgtggggcacagagagccaaccacaaccttggacagtcagattttgattcaggccagctgggttagcangttgaccaacgcatncagtttgcctttcagcttcttagtttcagatgatgcagatgggtttgtagctacctcatgcactcctctaatgactatggcatcattttctgcactatactgctgtgagttggaggccatcttctcgattaaattctggcttcagcangaggcatgtctccaagggctccaccactggcagcatctatcatacttctcttcat

SEQ ID NO: 60066 - DNA, 117 bp, Glycine max
actccgcttaatcgcctattaaacccaccaaagaaatacacatgcttgttatatgtgcttgggaagaagtcacagagatatcgatatcatatgtgttccaaatagtaagctcactct

SEQ ID NO: 60067 - DNA, 421 bp, Glycine max
gtgttgcatagtgagttttgcacgttgtatctctttatgtaggcacaccttcaaaccaataacatagtaaccgacaactttgatagcatgcaccctctaaatatcttcactctaaaatctcccatctttgttaaacttctctttcaaccctagcttagatattgtgatacaaatattataagcaggcaaaaattaataatgttaaatttccatgtatctcattgacgagtaattgtaaaagtaaaagaaaaacgtctcttgtgcacatcgaaacaaataaaacatgaacaagacattcaattgtcaagtgttataacattcaaaagaaacgagagaggtcgaaattaattcacataatattctatattgcgcgccataatttgtgtgaattaccgtacctcaatacacagcccaccatctc

SEQ ID NO: 60068 - DNA, 283 bp, Glycine max
ttgctcaacacgacacataagaccttatttggattaacttttcagtaaacacttgaaggaaaagaaaaattaaacagaaaagagacttcaattattacctctatttgatcaccaacattaatgacgagagcatcaaggatgataggaacattataccactgaatatttttgacgacttggaagccttgtacttatttgtcttgcaacagaacaaatatgggggatccatctgcatgtggcttcataccgagaacatgatcacgcattggacatggggggtaat

SEQ ID NO: 60069 - DNA, 338 bp, Glycine max
  unsure (1)..(338): unsure at all n locations
ntgcacgtatcagtcaagtgtatggaccatatcttaacctatgtgctcatcgataatggttccagtttaaacgtgatgcctaagagcactttgcgagaaataccattcaatgcttcccacttaaaaccgagttcaatggtggctcgtgccttccacggcacccgccgagaggttaagggagagatcgatctcccagtatagataggccctcacacctgtcaagttactttccaaataatggatattaaccctcctacagctgtctgtnggggcgcccgtggatccactcattatgagttgtttcctcaacacttcaccaaaagttgaaattctaatgg

SEQ ID NO: 60070 - DNA, 245 bp, Glycine max
  unsure (1)..(245): unsure at all n locations
tctggtatgctctgtatgcagagaaatacccacatttgttagcaatatcactataaatagtatttcatatgaataaggcagatatgaattcaatacaatagnntcctttccttctttcttattctcgggaggagttggaccctcgaaaccagtattcatcgtgttcttcctgttcttagcatntatacttgatcttgcgaccttttcaatntccttttgtagnttttttgatttataagaacttt

SEQ ID NO: 60071 - DNA, 411 bp, Glycine max
  unsure (1)..(411): unsure at all n locations
gactagggacccaaaatttggttttagaattagaaaagcatgataatagggacttgtttgtaagaatttgggctgccccatgattggtactttgcacctaagtaacgtgggaaatgctnttcaatggtgtgtagatatatgtgtaaatataaggggcataaaattcctcgccaagtataaataaattggtttcctaaatgaatgtatgatagcatggaatgcccttttgaatgcaaatgtgtgcacgatgtaattagctttccgatatgcatataaataaatatgagagaaacaataaaaatttgtatggtgtacttcacatgtatgtangtagtttgtgatagcaaaatgtttacgatataaattatgtgtaaagtttgacgcaacactttgagcatgaaagtgtgtttt

SEQ ID NO: 60072 - DNA, 324 bp, Glycine max
  unsure (1)..(324): unsure at all n locations
gatttgtacgaccatgcnnctcctgatttccagctgggaaatgacgagtggaagaacgccccggcatttacgcaacgagcataatgtaaacctttacggttttaaaagctctatagttgggcctaggctntagagtttttcctttgggtaaggctttgtgtcttttgtttttgaatttataatacaaggatctttcttcatttgttcctatgtctctacccattctcattcattggcatgtttacttctttttctgcaacggcagatccgatgacgagtcctccgaaggtactaataccggggacccggctattgacttctagc

SEQ ID NO: 60073 - DNA, 458 bp, Glycine max
  unsure (1)..(458): unsure at all n locations
aactatgtatggaananattcattactggtgttcatgacatacaagtgagcttgtaacaaatcttctacacttggagtgatcacctgcagtcctcttgaacccttaccacccactctgccatcatgccgacactcaggaagcccaacagctttagccttctctaagtattctgaacaaaattcaatgacttcttctgcaatgtacctctcaacaatagatgcttccggacaatatagattctttgtatacccttntaagatcatcatgtatcgctcaaccgggtacatccaccgtagataaacaggaccacaacatttgatttctctgaccagatgcacaatcaagtgaatcatgatgtcaaagaaagcagggggaatatacatcttcaactggcacagtataaatgcgggctcattttccactcggcaacattactggagcaatcacttgtacatat

SEQ ID NO: 60074 - DNA, 261 bp, Glycine max
  unsure (1)..(261): unsure at all n locations
gctaggcacctgtctagctcttctaacttttctaattcttttgagctagaatgggatgcctctagagtgggagttggagttgtattgntacaaagtgggcaccctattgcttattatagtgaaaaactttatagtgccaccctcaactaccccacctatgataaagagctttatgccttaataagagcccttcaaactcttgaaccatacctttgtttccnaagaaatttttcattcatagtgatcatcaatcacttaagt

SEQ ID NO: 60075 - DNA, 335 bp, Glycine max
accggcctataactcgctttagcgcggttggaacaagtcagggtttttatacagatgagtccagacatgattggacgacttgcctctgatttcactgggaatggcaagggagagcgcccacattacgcacgacatatgaacctttacgttaaagcttatagtggcctggcttagagtttctttggtaaggctttgtgtattttgttttttttatagtacaaggatctttcttcatctgttcctacgtctctacccattctcatccatttgcatgtttacttctttacttttaaaacggcagatccgatgacgagtccctcgaaggtactaatacc

SEQ ID NO: 60076 - DNA, 314 bp, Glycine max
  unsure (1)..(314): unsure at all n locations
tattaaccctagaagatatgtttctctagctcaatacataatggccatgtcatcaccgctacaaaggcatgcatttgaatacacaggatgcgtactcaccgccaagaatgtgggtccagagaacattatatatggaactgatttgatatgtaagagatgagatcgaccaataacttcaaaatgccagcagacacataaatntctcctggtgatgtgtctcatttacgagaataccatatcatcatactttattggtggatactctagtctcacattaattgtctcaattcttgaagcgtacctatatatttgtt

SEQ ID NO: 60077 - DNA, 483 bp, Glycine max
  unsure (1)..(483): unsure at all n locations
cctctccatatcaaccagtgcaaccatgaaactattctcatattatatgagaataagtcatagatttgtaccatcaccaagattctgctgtagattagaaaagcaaccacaactatgtaccaatggctcacaatataagtattataaaaaatcccctgcattgacacaagagttgtcaattatcaataaatatatctagggaactagcatgatgtgtnccttcttttttctgggtatctattccccacatatttatttacagcggttctctagattagtatgtattacaccttagacattgtatatgttgggattatttaaagctattacaaagaatagtttgtaactgttggagctcatatagaaatggactaaagcaatgagtcgacaaatttacatgaatcacaacaagtttgaatattcaatctaactacaataataaagcacatacatgaatacggatgagagattatgatgtaatat

SEQ ID NO: 60078 - DNA, 318 bp, Glycine max
caaaattgctttggctagcgagactgactcgcttagcccacgcttattcaagctaaagaggcatggtggcttatcgagactggcttgcttatccgccaacagaataccaaaagactcaaacactctgacctaactaaactaactcgcttagcgcgacatgccggcttagcgagttcatataaactcagaaattaaaattggagaattaaacattcactaagcccaagtgcagtggcttagcgagttcatacaaaaaagcatagattcaacagaaatgatgaacacgcttagtgggacagggccggcttagcgagttca

SEQ ID NO: 60079 - DNA, 396 bp, Glycine max
  unsure (1)..(396): unsure at all n locations
atcttattggtctcctgagatnttacaagacacacatgagggtgaaattcaaagaanacagagttatctttgacaaattgactaacacttaacatatnttttgaaattgaaggaacatgtagtaacttgtgaagtttaaatgttatgccaacatcattaggagatataaatgatgcagaaccagtgttagaaatacataaaccttcaccattgcctatgaatatctgatctagtccatcaaagtgggtgaatggtttcatattctgtgagtctccaattaaatgaaagctggctccataatctggaatccaggtggtaccagcttgcccattcccttgagagggtgaactagtgagcatggcactgggttgactatgacttggaccanaattctta

SEQ ID NO: 60080 - DNA, 344 bp, Glycine max
cctctccagcaacatgtacaatcctcgatggaggaatcatcccaaccttagatggtcgaatccttcacaacagcagcaacaacaacaacaaccttattttcaaaatgctgctggcccaagcagaccatacgttcctccaccaatccaacagcaacagccccagatacaacaaacaattgaggcccctccgcaaccttcccttgaagaacttgtgaggcaaatgactatgcataacatgcagtttcaacaagagaccaaagcctccattcagagcttaactaatcagatgagacagttggctacacagttaaatcaacaacagtcccagaaatttgatagaatac

SEQ ID NO: 60081 - DNA, 355 bp, Glycine max
  unsure (1)..(355): unsure at all n locations
cgggcgatgatgcanatcaactatcccatttccacaagtcaggcataagcacaccatccccagttgcccacctttaaattgagctcacgcactcctacgtagcccttattctcgttcctctcagcaccaggtccccatcaacccctccaagcttntacaatatccaaacaattgaatttcctttgtgatgaaaccaccctaaaccaagaaaaatagagtggaggcggaaaactctacacaaaactcattcaaattccacagttttttctactcacatacctcagtaacaggctctttgtttcgaatcggcaaccataggatcgccttgaanaattaactgagagttcctaatata

SEQ ID NO: 60082 - DNA, 299 bp, Glycine max
  unsure (1)..(299): unsure at all n locations
ttccatggtatggatagcttctgatcatctcttgcaacctttgccaaacttcaggtagactctcttactccctttacacagagtttccaatatctctaatgtattgatccgctttaatgggagagaaatgttggatcgagtgcgctcagaataattaagaaagggggggttgaattaattattcctaaacctttactaattaaaaaattactcttctaaggctnttacttatgttgtttgagagaataatgagtngaagagaaacttaaccacaagaaaagcggaaataaatcacagcg

SEQ ID NO: 60083 - DNA, 453 bp, Glycine max
  unsure (1)..(453): unsure at all n locations
ctcagcttcataatatccaagcaattcaattccaactatcatgatctactcctaaaccaagaaaacagggcagaggcagaaaactctgcccaaaacacattcatatattacaactttccttactcaaataccccagtaacattccttttgttccgatttgttaaccgttggatcgacttgaaaatcttactggcgggttctagtacataagtctacattntgaaccgtgggaatttctagaaaatgtccagaacccaatatgtactacctttcccataaccagcaatgcacaagcatttttctgcacatttggaaaattctgctgcacaaatttgacagctttttgctgcacaatttggcagatttcaaaatccatcttacccacattcaattntgctcaaattggatcttacaagtcctaaatcatggtttaatcatatttaaaccaaacgc

SEQ ID NO: 60084 - DNA, 426 bp, Glycine max
  unsure (1)..(426): unsure at all n locations
tgaaagagatgacttccaactnttctttgaaaaaaattactgatcatagctanttttggaagaaatgtgtgtgtacacccaaagggtaaacgctgtgaaatttccccggacgcccgatatggactcggaagaatgcacaaattgataaaagaacatattttggaaacattgggttgactaaaatagaggaaatgaatcctgagccctagcatcacatgaccataaaanattgacacttgagcgtccgcacaagtgcatgcatgaccagttntgcataaaatttccaaatcatcatttctgcatttgtgtcatggaaataatgtggggcatcccttntatccttgagccaaaccaaaccctgacatgtattatgtctagccattctacaagtcttgagccaaaatcttgactcaacataaaccttga

SEQ ID NO: 60085 - DNA, 391 bp, Glycine max
  unsure (1)..(391): unsure at all n locations
gtgctgatgaggatcacatatgctggaatggatattttatttgctgcagntgatccattgcgagaactggttatgaacctgtttgatgtataccaaaagttgggtgagtctccatgggatggggcaaaatctggcatacctaatgtgaaagacagtttcttatcacacacgcagatgtaacagagacaagtttatgtgacatatgttngaacatatccatatgttgaccctcttccataggtccttttttacaaaatttgtaactactcttttctcgaaagtggtttaccgaaagtgcccgggtcgtcaagaaaaattaaatggatgattcgattttaacacagaaactttcatttacaaagtgtgtcaatatcagcatttgtcacaaaat

SEQ ID NO: 60086 - DNA, 322 bp, Glycine max
tgatgcaagctccattggagcttgtatgcctaggattcttcttcatcaatggattccttcgcttcttggaagataaatggcagcggaatggagaataaagagagagaggagacatctcttcaaggagaagatgagtctagaagaagctcaccaccatatgaggccatggataagagctcggaggaagaaggagatgaatgaatggagaaggagagaagagcacgaaattttgtcatcaaaaagatgaaatctggagttcatattccaatgatcgaagttaaaaaaatgcacacacgtgacctctattataggctatgtgcac

SEQ ID NO: 60087 - DNA, 470 bp, Glycine max
ccttgattcctagaaaaccatgatttctttgttagcccagttatgttataagcctaataaagtccttagggatccacattatgcatgtatgatagcattcactgagatgatgtgcaaagttaggaattttactattcaattgttataattcaaacacttaccgagacacttgtgggattgagagaaacattagcctttgaaggactgaagttggtgattattcctcgtgatctgtcattcttgttaaccatttcatttgaagtgcatcttattctgctcatttcatgaacttatgacaattgtgaacttgagaattggtcaatcctactaaaaaaacccttttctacgacatagtatctacgaacagtcgtcaaaaaccattttcgtttgtataatagtggcaataatgtaaataccgtgaacatttcacagacagttttcgtgaaaaccgtcttggaatatagataata

SEQ ID NO: 60088 - DNA, 234 bp, Glycine max
tgagtgattttttcattcaattcaactgcaaagatatttgaaagatatcatccgactgaatttctaaaagcatacaaatgcttttccccttcaaaggaaatgtatacaacgaaatcagtcagttaaatatgccatacttgggtcctgcagacatcgtccgacaattctcaggagtacagaacttctgtaggtaccatatagcagattcacctgtgtgaagaaataacagctgta

SEQ ID NO: 60089 - DNA, 404 bp, Glycine max
  unsure (1)..(404): unsure at all n locations
tatcatgatctaccctaaaccaagaaaacagggcagaggcagaatactctgcccaacacattccaataccacaactttccctactcanataccccagtaacattctcttcgttccgattcgttaaccgttggatcgactcgaatantttactggaggtttctagtacataagtatacatttttaccgttgggatctgctagaaaatgtccagaaccaaatatgtactacctttctcataaccagcgatgcacaagcattttctgcacaagaacaaaaattctgctgcacaattcaacatcaattttctgcataatagggcagatttcgaaatccctcttgccctcatccaatttttctcanattggatcctacaagtcctaaatcatgtataaaacatatttaa

SEQ ID NO: 60090 - DNA, 261 bp, Glycine max
tttttggctttaaatctgaccccatagctatgatgttctgcgaattacattccatgatagtaatgttgactgttgctaagactggaacatggtaaatgccactgtcagtgctcctttagatatctgaattgtggaaatcttggataaacagctcataactataacagagacattcaaaatctttatcttactcctgtacctctgtacatgtaatagttagtggcaatgaaaaataagagctgataaattcttctttaaatt

SEQ ID NO: 60091 - DNA, 497 bp, Glycine max
  unsure (1)..(497): unsure at all n locations
atgcgcatattttcttacaatcgttctcttgcccaagacattctattatctcaaaaanaatgcacccatatacaatcaaggcagctttgttacctagattatttacacgtacttccatggtgtatttgttacttacatcacacacatcttcttggctaaattcacatgcatgcatactccaagcatnttggggtaccaaaaattgcacatgtgcacatcttggtatttctaatacctatacatacacaaacttcatgatgaatcttgactatctacacaataaggtgctacatttcatgcctttnttcaagtatttgctacctaaagaccgcatgcaaatcaagcatatattcctttgctgactaaaattgtattcaaattatatatatatttttttggaatatagtttntttacataacattcaacatatatatatatatttcttgtgaacaatttgactaccaaaaattatatatacatacattccagtattttg

SEQ ID NO: 60092 - DNA, 357 bp, Glycine max
  unsure (1)..(357): unsure at all n locations
gacctataaaactccgcttgataggtgatggaaggcatttgcatgagtgtgtttctagtgtacaacaagttctccattgtgggacaacatgagacaatggacaataatctctttaaaaaatcattatcatatcatacatactaaagatgaaggtagcgaaaagaatcaatattatcttacaaagataaatgatatgtgtaatacatattatatacttgcacaaagccatnttcattgacaagtccaatggagatgggatgagactttgctagcaagggactcttatgtggaaagaagggtgaactctatcacctagataagtggaccaatacaacattatactgacgtagcatgaca

SEQ ID NO: 60093 - DNA, 67 bp, Glycine max
actttgatgaatacgaacacctaggctaatgaacagggtgagaatgaaggagaaacttatgctgtga

SEQ ID NO: 60094 - DNA, 406 bp, Glycine max
  unsure (1)..(406): unsure at all n locations
tctaacagctaanaatatgcttcattgagttaagcatatttgagttcttacaaatttacacatgcttcttggactgccctttctactcangaggccaactcattacataaggacaaataagaggaagacgcattcataacttaagtggttgtgtcttaatagccttaacactttggggataatggattgtcctccctcccttggagggcaacttactaccataaggatggacaagaggaagacacacaaaatgacacgatcctaaggacaacctaacatatagtaagagtcaccttcctaacatcaatacactttgacactagtacaccttgacacgtcaaaggcaaaataactctatagtaccagtgtggcgataggaacaggatgagacaatatcctaacattt

SEQ ID NO: 60095 - DNA, 317 bp, Glycine max
  unsure (1)..(317): unsure at all n locations
ctaagtaaaaaggatcattttcaaggtccaacgccttaaaatgatcacctcttaaagtaaaaaagaatcacttgattagaaagaactacgtangtctgatttcctcatcgcaattgaggaatacgtacgagcaaagggaaacacccttgttgaccactaaaagagaaaaatataaaaagggtataaaggatataaggacttataaaggaacataaaaaatcaaggtcatgtttgcacattcgattaaaggctgccgtcccttgtgacagacctgtggtgtgctaatacccttctccgtgcgtgaatacaactcccga

SEQ ID NO: 60096 - DNA, 399 bp, Glycine max
cacttaaaactcagcttgacaacatcggttttaaaaattaatatacagtgtattttctcttatcatcgggtgcataagccttgaccacatcagttttttaaaaattaatatattgagatctcctcttaacaatgggtttaaaaaataatattgagtataaaaaaatcgatggtctgcttgcttagaaaatatcaaataacaaaactgatattgatgtttttaaatatctatttctcaaatcccctgcctcttgcccctctgaagccctctaacattgcgtttataaattaatattgattttaaaaaaatcgatgttttgcttgcttagactatatcacatataaaaattgatattgagtggtttaaatatgtatctttaaacatctatttcttaatccc

SEQ ID NO: 60097 - DNA, 324 bp, Glycine max
cattacatctcattttacaagcacaacactctagattgggggaacaacatactaaattaaaggagaacatgtaattcatgttaaccttttcagttcaacaaaaagtaatcatcatacaaacaaaatacttctatattaattctaatctaattcttttggtgtaacttatccttcacttttaaaattgcataaaaattatccaaacgatagactaaactggagtggaaccaagaaaatgcttactaaccaacttatttgagaataaaaaacaaaggaagatgtcaaccttatgtcaaaaaaaaaaacaatctgtttttgaaatac

SEQ ID NO: 60098 - DNA, 265 bp, Glycine max
ccaaggttcaccagacccacattgaccaccaggaaatattaatgtgattaatacaaattcatctgcttgcgggagatcattctatcagagcgaatcacaagccgatgaaaatgctaataacaattgggtgggatcagatataaaataatacaatggttcttcaacaataaatcaagttctcatcacatcttactttggcaatccctcctcgagaagtcactttaacaaagaggcgatgcaaatctagttctcttcctccaacaat

SEQ ID NO: 60099 - DNA, 347 bp, Glycine max
  unsure (1)..(347): unsure at all n locations
cttggccctttttccacaactcttgtanatgggagagaaatgttcatctaaagcatacaagtccctaatgttatcaaatcctanaatttgagctcctagggagcaaaacaatgtgtgtctcctagagagggcatcaactaccacatttgttttcccctttttgtatntgataacatatggaaattgctctaggtactctacccattttgcatgccttttgtttaacttgctntgccctctaatgaacttaagtgattgatgatcactatgaatgacaaattccttggaaacaaggtaatgttcccaagttcggagtgctcttattaaggcataaagatctttatcat

SEQ ID NO: 60100 - DNA, 346 bp, Glycine max
  unsure (1)..(346): unsure at all n locations
tattgatattattaaacttatggtgcanagcaggatacaattcttacattcctcttcctgtttcttcttttgtttacttgttttcatttgtggtgaatctctgccctttatatttttgcaatctattctggggtatacctgattctttttttttttgtcaggacccatttttcgatgttatgcagtaaattcctcttttagcatttctaggatctcagatattgattttggctatctcncagcctttttagcaaccttagcatggattatccccttntttgtataattaatgcgttctcttggttttatacctccccaattactcaactgtacagcattattctct

SEQ ID NO: 60101 - DNA, 307 bp, Glycine max
  unsure (1)..(307): unsure at all n locations
attcgaatggccataactngttctcacggatgtctgatnttgggacataatatagtcgagaaggctaaaattgaacaacggaaactctccaaaatatcaatggtcatgactttctattctgaagtccgattcaaggacataacttatctagacgctccaagataaccaacaaaagctctcgagaaattccaatggctaatactatttactcgatgcggggacataatatattgagacgctcgaattgaacaacataagctctctagaaagtcctatgggcataactattcacacagatgtctgattt

SEQ ID NO: 60102 - DNA, 382 bp, Glycine max
  unsure (1)..(382): unsure at all n locations
gcctttcttgagcaagcnaggctngctctggtttcactctcatgaaatgccacattcttcttcaccagctcattgagaggtgatgcacattgtagaagaaattaatgaacgaacacttctatagaagctggctaacccatgcaagctcctaatatctcccacactttttggggtgggccattcttggatggccttgattttctcaaggtccacttcgaccccatttctaccacctgcaaaacctaagaaaactatattatctacacaaaaggtacacttctctatatttgcatagagggtggntttcctaaagaatgaaagaacttttctgagatgtctaagtgaacatctaagctcctactgtacaccaaatatcatcaaa

SEQ ID NO: 60103 - DNA, 368 bp, Glycine max
  unsure (1)..(368): unsure at all n locations
cgattgaatagtgcacttatattattcaggggttgatgtttgaatntggaattcagtgtttgtgaatggttcgaattgatcaattgtatgatgtgagtgaattgaaatgcataaatcatatgctttgaatgagcatgcagtcattataagagaaagaaaatggaattaggatcatgattgaaaatgttagttggtttgtcagggtgattgtgaaggaacacgttaaccacaacctggaaagagtgtgatctttaattgtgagagaatgactaatagtaagtaatgggctttgcatgaatctctaagtatggaattgtccaacctacccttcggcgggagggcgacgcgtgactcgcgggatgcgtgtt

SEQ ID NO: 60104 - DNA, 85 bp, Glycine max
aattatgagcataacggtcattagacgaatattggagggctgatggacacaaagaggtagaccatagaatcctaagcatcggggc

SEQ ID NO: 60105 - DNA, 303 bp, Glycine max
  unsure (1)..(303): unsure at all n locations
tatattattatgagtcatattntcaaantcattcttaatattatagatacgaaattatatatctgtgggtatatgctatctatactcgtggctctaaattcatcactaaaataaatagtgatagaaatgcccaaaaaaaatatatagttagaagataattatatatatagtntatcatatgtctctaagtataagttatctatacccataatttcaaatctaccattgaaacaaatagtgtctaaatcatacatttatgatgatcgtcattaaaagtgtctctacgtatatgataaatgatat

SEQ ID NO: 60106 - DNA, 455 bp, Glycine max
  unsure (1)..(455): unsure at all n locations
tgtatntcctagcccacganagtgagaacacaagctggttatttatagagaaaatagttatgattacctgtaattgattaaatagtcaatgcaatcaattatttcaaagaagtaacaattatattatcatttcaatcgattaaagtgttctttccacaatctggataactttcaagaacaatgtaattgattatgaacaaagtaatcgattatgattatccggtaaccgattaaagcggagactcctgaaaaaccagtcattgtctcgactgaacagactaatcgattaggcttatcttctaatcaattanatcgatatgagagtctctctccaagctacacacacttgcataatcgattacgattagcattggaatcgattaaaatatagagttttatgcacttgagaaaacttctaaatttggaaacaatcttcctacttccacatgatgatg

SEQ ID NO: 60107 - DNA, 181 bp, Glycine max
acttcaccctacttctttctcaccatgactcagggagttttctttcttctgtctccttctttacttttattgcacttgtccaaatttaattgattgctttgattgttcttgatcttatgattgtgctacattgaggacaatgtgtttgttaagtgtgagggggtgggggggacaatactct

SEQ ID NO: 60108 - DNA, 362 bp, Glycine max
  unsure (1)..(362): unsure at all n locations
tgtagagatggaaaggccaacaaaaaataatagaaacanactntcatctacctaagcttctcacatgcacaacaatgtctcaaggaattaatanatctaatcctcatccacagtgtcagccattttttaacaactccgattggactgtgatattaagttgtgaaagtaaacttagttaaactttctaaggtacccataccatgtaatgggtttaccataattttagataaacaatataggaatgaagggcatcaccttttacttcatgagtattcacaactcatgagtattcaaaaaaacaatatatgaataaaggtgatcaactcatgagtattcagaacttttacttcactcatataaaa

SEQ ID NO: 60109 - DNA, 381 bp, Glycine max
  unsure (1)..(381): unsure at all n locations
gaacatggacgctagagtggcaagggcgttagtcatctgattttcctctctaggaatgtgatgaaatgatatgtcatcaaaaagttccatcaatttcctaatgtaagcctggtaaggcatcaatttatggtctctggtctcccattcacccttcaactgatggattaccaatgtcgagtccccgtataccttgagtaaattgaccctgaagtcgatcgctgctcggatcccaagggcacatgcctcatactctgctatgttgtttgtgctgtcgaagcccaacctattcgtgaaaggtatatattgtttgtccggngaaaccaatactaccccaatatcatggtccagtgcattagacgcaccgctaaccacacgatccac

SEQ ID NO: 60110 - DNA, 331 bp, Glycine max
  unsure (1)..(331): unsure at all n locations
tctcattcaaatcattctcaaacactcatttcataccaaacaatccactgcataacattttcaatcaattcactattcanacatgcttttggtacaagcaaacaactcanagtgctgaaattttaaataactgaaatttaaaataactgaaacataaaaactgaaattaaaataattgaacataaatcataaaataactgaaaataaactaaaatgttcaggattcaaaaattcaaatgtcctgctcatcatgtagatgctcctgtgcatgctcattaagggccaacacctgagcagctggtgaatcgtgagagataggctgctttgactc

SEQ ID NO: 60111 - DNA, 467 bp, Glycine max
  unsure (1)..(467): unsure at all n locations
atcactaatagttctcacatacattntgtatttatctctaaaagcttattagtgtcatcggtaatttcattggcattttcctttntattctttgttgcaattgcaactgtaacattccctctttcacgaagaagacaaattaccaccaaacactttattacccattactttttagacttgaaaacattttcttcatgagggaacaactccatatcatgttccctcttttatttatgaaggaacattagaggaggttatcaattgaacacggataatcactttgatatctcattntatttaatgcttcttcatgttagtgaagagacaaaattctgctttcacaacgctatgtttagtgcattctcttctacccttgatccacttgattatcttatgatttggcatcaacaagcagtcttagaagctgtgggtgttatcaattctaatgatcttcatattctacacat

SEQ ID NO: 60112 - DNA, 375 bp, Glycine max
  unsure (1)..(375): unsure at all n locations
ttgtccacaaanttccctactcaaacattctcttacatattctgcaactatgtttcgacttcttaatggcaagatcgagcattggatgataatgaattacttccctcacggtcatcatcctctttccaatccctagttgaatgccaccgaatataatcttcaaaggcaacatctagatttgttgccttagatgctaacatatctagtaacaaagccattattggtctgctagtcttatatattgaagaaactttgcatgcacaattaactacaaagtgaaaaggaaaaaaaaagtccattatatatataattctatttggatcaatgactgaaactaccataaaacaaaattaatgtaacactattcaactactt

SEQ ID NO: 60113 - DNA, 346 bp, Glycine max
  unsure (1)..(346): unsure at all n locations
cgcctaaatacaagataactntgcttagcaaatgattaactatataagcttaaataggtcgcccaatgattcttgcatgcttgagagttattctcgctttctcgtgataatattgggttttctttttgggtagagattgtcttttatagacttcactgaaggatcccttacgagatcagtgttgagtccttgaaataactgttgtctcacaatgagagatgaggctacatggtatttgctgatttgcaaggatatacgcagaagtacatatagaaaggtgcatgtgctcgtcgtactccatgaaagtgacccatgtgagatattatatgtagacccttctttatta

SEQ ID NO: 60114 - DNA, 349 bp, Glycine max
atcctatgctttataagtatcatccattggtcaactataacatgtttttatttatagtttaattcaatgtccaacgcgttgttataaaacaagtgtctattttttttttgtgaaaaccaacacccatgtattgtatactcttacacttccgtattgacataactaacttaacatatatgatttatattctgttagtgaacgtgcactcgattgacttgcacatgatatccatcttgagggtgattctctcgctagaacattctattatttgaatttttcctcttgatggatggattgacatgcacatgataacctttggatttaagatatgtgctcttacagacgaaaa

SEQ ID NO: 60115 - DNA, 429 bp, Glycine max
  unsure (1)..(429): unsure at all n locations
ttgccacccatttcattgtatctttttntattttgaagacctttccacatatgtgctcctccaaaaaaaattgatttgaaagcttattgtaacttcagaccattaacaaaaaatttcccatgagcattcaacttgtttacagtgagctttagctcgaatggtgtcaacttttacccatttcagatctctgccatggaaaatagtatactctctcacggcttcaatacacattttgatggtatcaaacttcatcccaacctccanatgcacttgtccaaaactacttctagaattgtagtgagatacacgactttagaattggagtcacctcatcatcactgctggaaagagaatgaaatttcttcaactggtaactatctaccaatgtagcacttcaaagctatctttctgagacacatatacataatc

SEQ ID NO: 60116 - DNA, 322 bp, Glycine max
  unsure (1)..(322): unsure at all n locations
gacacaagaaactaagcttgcgatctttactaggcggttatttatcgccttgttaggncataaatctcattttgcagagttcagatgcagctatgtttcaattgaaattcttggcccttcgaaatattttcttagcttagaaatagctcaatccagcaaaggtatctcactctgctatagaaaatcactctatcttttaaacatacaatttctgggctgcaccctttctatctccaatggatccaacttgagctcaatcttcatgatggagacatactccttgatccctcagcgtattaaaggctaattggtaattaattta

SEQ ID NO: 60117 - DNA, 457 bp, Glycine max
  unsure (1)..(457): unsure at all n locations
tggttatctccttcttcactacatcaagaatcaccgggtttagtcttctctggggntgncttactggngtagctccatcctctaaatntattcgatgcatacatgtggatgggctaataccaggaatgtccgccagggtccagcctatagccttcttatgcttcttgagaacagacaacaacttctcctcttgctcatcagtaaaggaggcagatataatcactggaaaacttttgctatcatccaagtaagcatattttaaatttgatggcagaggcttcaattctggtgtggttggctgggtagtggtagaaagagatggtttctcaccctgtacctcataaagaaagtcagaggtatgtgtacttcctgaaacatggttagtcctatctgactctatataatcaatctcaagaggttaaacaccaccaccagacatgncaatcatatcactttc

SEQ ID NO: 60118 - DNA, 332 bp, Glycine max
  unsure (1)..(332): unsure at all n locations
ttcaataccagcccattgagggagattcagtacaattagtgaggaaaaaaccatattaattaacagtgctacaccttanactaaactaaccatcactaattatcagtgctatntctttgacaaaacaacgacaatcagcaaaagttaccccaaaagaaaaccaaaataaataaataaaaatttctaaaaacacattatttgcttcagatgatataaactacaacatcgaacatggaaatagagattaagctatgatattgctaccaagtaccaatctgaacactacaaagaacaaatatcttctccaatgttgtgcatattataaatttcac

SEQ ID NO: 60119 - DNA, 199 bp, Glycine max
gaacacgaccaaaacaagttttgaggggctttatagggcagcaatagtgagctcaagctccgaagaggtgaaaggaatcatcacgggtcaaaggcatgatcttgaaggacgagctaaaggcttgccttatgtcgaaaagaaatttgtcccaacagttaagcgagactgaagggaatatgtgggccatcatcgatgagtg

SEQ ID NO: 60120 - DNA, 438 bp, Glycine max
  unsure (1)..(438): unsure at all n locations
ctctcgtgcatgcagaggcttctttaaaagaactttatactcccatggcaaattgatttaggcttaaataggtggccttgttcgtgctcatacgcttagcacacgtatggaccccttagcacatgttagtgatttttcgctcagcacgcttctctcgcttagcagataagctgaagaggtgcgcttcatgacctagagtggtgtgcacagcgaacctaacaactcatcttcttctggattcttcctcgcacttagccacttagtatcacacttagcgaatgctcgctaagccagcatattggcttaacgagaaggtgaaaaaaacactgttgccaatttgcctaattaacctgaaattgagagcaatngattattaaacacacaaaacaaaagtataaattatctattacctagtattaacaaaaaggacttattata

SEQ ID NO: 60121 - DNA, 420 bp, Glycine max
  unsure (1)..(420): unsure at all n locations
tgcattaactcaaagtaatcactttcaatgttctcccacattccagaccccttctagatattatttacttggcagttgatgggtgctgcaatctgggttttctgttcaaaggtctacttttggagttntctgctcaaaggtctatgattttaggtaactctaaatatgttccaatcattatttcagtcacaacattatttttttggaatctttgtgaataattacattgactatatttgtctataattctctataatattaaggattaaaacaaatttagagtcacgatgacaatttatattcttgttatatggtatcaactataaagtgaaacatgttggaaactccaaaagtagacactactctttgtccatattggtttatgattaagaaattggcatgaaatttataaatatatca

SEQ ID NO: 60122 - DNA, 328 bp, Glycine max
actagtcactagagccatgagcaagaggctccaagaggattgggctagagctgttgaagaaggccctatggttttcatgaacctcagggtagatttctgagcccatggaccaaggttgggtccaattatctttgtacatattagattaggatgtcattatatttggtccttgtataagatattagatgagttgagatcccttaagatgtggaacgaaaaaaaagagaaaaaagaataaggaaacaacagagtggaagaaataagtcccgatgatagagagaaaatatgagaggacgacagaagaataattatggaagatatgaataga

SEQ ID NO: 60123 - DNA, 394 bp, Glycine max
tgttctcataacaacgatgtttaagtttcaatttatattgaattcttctctcaatttaaaatcacaaaataatgttgaatgttaaataaagaaagaaataaaatggtagcaaatattaaaatgtcctggatactgttgttgtatatggatctaattttaaaatatgtaatatatatcatgtattactcttttatataccaaaccctccaattaattaatttgtcctgtatttcatataggatgatttgaatgagattcacactcctcccaacataacatgtttaattgaaaagaataacctattactttgatattaaaaagcaaccaatgagtaatattcttacctctacttgggtcatgatataaatattatgagtgcctgacctggtgaatg

SEQ ID NO: 60124 - DNA, 450 bp, Glycine max
  unsure (1)..(450): unsure at all n locations
ccgctcgttccgatcccacttgaagcattcttgcccaaaaaatatttatcattctatagaaagnaattactttcataatttttaacaaaaatatctatttactctgaagtaaaatattgaacagtcttacaaaaaacttatattaataaaggtctctttgaaacataactctccattttcaagttttgaaacatttaanaactagatcaagtctttaataaggtattacagattagaaattgataaagcaagtgaactcactttaagcttgtgccgaacccacttgaagcattcttgccgaaaaacataattacaatatatagaaagtcatttcttacataatttttaagagaattatttatttactttgaagtacaacattgaggagcttattaacacctatattactaaagtctctttgaagaaaatttccattttcaagtttgaact

SEQ ID NO: 60125 - DNA, 391 bp, Glycine max
tgaagtgaggaagtgtggaagggtgagacttcctacttttattcgttgaccatacagtggtacctggagatatgttcgcggggtcaggagaccttgtggacgtcaggtggggtgctattgcccaaaaccaagcttgaccaatcctgacccaacccgggcatagtcagtcagtgagaacctgtgatgtacctaaacaggcgagctcctggcagtctaccgataaaagaacaaagaccacatagcaaggaggtttgtgtggtggctggccagctatggatcttgagtgatatttgggatatggcctctggtaatcgattaccaagggtgggtaatcaattacaacgctctaaagtgaagacagaaagttaagatggtctctggtaatcgatta

SEQ ID NO: 60126 - DNA, 378 bp, Glycine max
  unsure (1)..(378): unsure at all n locations
ngtactcncttgtagaacttgatacattggcttccaatctattcatcttagagaaaagtttcttatatcgttgtgtgctagttaactctggatatttgatgtgaaacattttangtcatctttgcatagcattttacataggatatattgcattntatctatatattttagcttggttttgtttaatttttagtgtttcatactcttaggacttgtcatggcgttttccttgttttcattttagtttagtcattccaagatcaattttcacataaaggatttataaaggaaagtttgagcacaaaagacttgaaaacagataaaaacaatgagggtttgctataccttgtagagaagatcatgggatgtgattaggat

SEQ ID NO: 60127 - DNA, 379 bp, Glycine max
  unsure (1)..(379): unsure at all n locations
gggtcttaattataaanagatagatgcttgtccaaaacattgcatgttgtatttgggagatgatgacaaaagattggatgcttgtaagcattgcggtacatctagatggaaacccaacaagaagaagaaaatagctgcaaaggttttacgttactttccattgaaaccaagattgcanagattgtcacatgtcgtaagactacaaaagatatgagatggcatgttttggaagacaataaagatgggttgttaaggcatccaagagatggagaggcatggaagacatttgatttaatccatcctgagttntcttcagatcctcgaaatggtcacttaggccttgctactgatgggtttaatcctgctanggaccttgagt

SEQ ID NO: 60128 - DNA, 422 bp, Glycine max
  unsure (1)..(422): unsure at all n locations
tgtaggattatggngtacccgccatatgttgtactangtttcgatngggcgatggtgcaaatcaactctcccacatccacaaatcaaacatgagcccaccatccccagttgcccaccttcaactgagctcacgtacccccacgtagcccttatccttgttcctctcagcaccgggtccccatcaacccctccaagtttccacaatatccaagcaattcaatatccaaacatcatgaactaccctaaaccaagaaaacagggcagaggcagaaaactctgcctaanacacattccaataccacagctttctctacttaaataccccaagaacattctctttgttctgattcgtaacccttggatcgactccaaaatattactgggaggtcctagtacataattctacattttgacccgtggga

SEQ ID NO: 60129 - DNA, 394 bp, Glycine max
  unsure (1)..(394): unsure at all n locations
tgcacaacaagtaactaaatctgtttttactaatgattttctaactaaattccactaacatgtagagtgactacttagaaggaagggatgggccttaattaggctcatctaatctatctaattaaactaattacacaaatcagagcccacattcgcagcctaattattcaagtgcagagattctaacttctaagcccaatttgaccctcgaaatggcagaattacccaagattatgtgtgacaaatttgaagatctttttcttagctttccggngactactcacatgctccatttggagttctgtagtgtcatataggccctgcacaaggaagataggtcaagtaagtgcaaaaatccaaaaataagccacaattattaattaagctcaatcat

SEQ ID NO: 60130 - DNA, 216 bp, Glycine max
  unsure (1)..(216): unsure at all n locations
cacaagaataaaaaaatgcatgtgaatgtgtatgcatgagcagtttcaaatgcaataattcttttgcaaaagcccgctgggtttagttttaattaagcgcttggggcatccccatggatcgagcgaanaggctcgggtttttaaaagaataatcatcttttaaggcacaaagcaaggatcacaacaatgaatcatcaatcccgcgttcttaaatga

SEQ ID NO: 60131 - DNA, 364 bp, Glycine max
  unsure (1)..(364): unsure at all n locations
tgagctgccanggctttccacctttaggcgtatcttttgaaagaatacgcccccctttntgcacatgttctataggggcatcttatccgaagacattatactgacactgcctaacgaagggcaccactaggtcctttcaagaatggactcgggaagggttcaagttagtgtaccaggtaacagctaccccagtaagactttcttggaaggaatgtatcatcaattcctcatcttttgcgtatgcgcccatctttcgatagtacatctttagatggttcttggcgcaagtagaccccttgtacttgtcanaggccaacaccttgaacttgtgaggcgtgatgatattgggtaccacgaacaactc

SEQ ID NO: 60132 - DNA, 391 bp, Glycine max
  unsure (1)..(391): unsure at all n locations
taaataaataaaaatctaaaacactaatgtaagagacnactaaaaaaatactaactcatctagtgtgatatgattaacataatgaaactaatataaaagtcgaattgataaaaaaaaaaaaactaatgtaaaatgcatatgaagaactaaggtgaaagtcatatgatatgacaaggctccgttcctataaagataattcaaagttaactccattatatatcataaattaatttatttaataattnttggtgtaatatgaagtatttttattatattatatacataaatgttgttctattgggtctgacatgatntttttataagtttaagtctaacttatttatctttanacaaaatctaacctatttaaataatagtcttttaaaaagct

SEQ ID NO: 60133 - DNA, 258 bp, Glycine max
tagtccattctcatgagaagaccacacaactttttcttgcctaactcatacggaagaattaatggtcatagaatagagcaacttccaaagtcccatatgtagtgtttctctcataaatttaaggaagaatgtttaagctctgaaatgttattatgcatcaaatctcaggctttttttggagctgtatatactgaagaaaaaatataatgtatcttctaggctccaaacggttgttcctcaccttatggaaggaaacat

SEQ ID NO: 60134 - DNA, 330 bp, Glycine max
  unsure (1)..(330): unsure at all n locations
gacacgcgttcgtgtcagtgtccgacaccgacacaacacccgtactacattctatatnttggacattacaggtgtccatgtgtctgtgtcgtgtccagagtccgtgtcggtgcttcataggttccttgttataagacanttttctaattcctagataaattaattattttttcttatattacttaattattctctctccaaacattaaaacattaatcaaaagtaattaagtgcacaaaaaggataattttgacacgatactacaaataattgacactgattaactaaattaactaaatgtaattacatacaatgtaattactgaacaat

SEQ ID NO: 60135 - DNA, 472 bp, Glycine max
  unsure (1)..(472): unsure at all n locations
tactcagcttcaacattggcagcttgaagaatttctggattgtgattcgttgttcagatgttaaaccattgatgaaagtggctgtatacacatgccaggattgtggatntgaaatttaccaagtgattgatgaaatgactgcgtgaactgcacaattttgacactggattttatgccaataaaagaactactgcatgattattgcttggtgtgacttaaanaaaaggtccattacagtttattgaatttctctctgtcaacacgatttgatcgccaggatggtaaactacaatatttaaaggattatgactatctatcaaaccttgttagntcttggtgtggattaatttatttttgctgggatatggctagaccattgtggaatttgcatgccagtangttcttgacattgttattntttcctcttctgacaggaagatactgttcggtttttatgccttgttgaatgcca

SEQ ID NO: 60136 - DNA, 334 bp, Glycine max
  unsure (1)..(334): unsure at all n locations
tcccgacccaacccgggcatagncgntcatttataacctgtgatgtacctaaacaggcgagcttctggcagtcaacagataaaaggaacacagaccacaaagcaaggaggcttgtggtggctggccagctgtgaactttgattgatatgtgggttatggcctctggtaatcgattaccaagggtgggtaatcgattacaaggcttataaatgaagacaggaggctaagatggtctctggtaatcgattaccacggcgtgttattnattaccagacttgacaacgacgtcatgaatccattgaagccattggttacggtgtcacatgagttgttg

SEQ ID NO: 60137 - DNA, 401 bp, Glycine max
  unsure (1)..(401): unsure at all n locations
atttttgctacaagcttctgagctagagttcactcataataaactttcgggtttgtcttcattcttgtgtgaccaaagtgcagctggatacttgggcattntagatttatcatacaatcatataaaggaacaaattccagattgtggaagtgtgtagtagatacactactggttcttgatttaagccacaataaattgtctgggaagattcccatttccttgagcacccttgttaaattgaaagcattggttttaggctacaataatataatgggcggattgccttctactctgaagaattgcagcaatttaattatgcttgatgtgggtgaaaatatgttatccggtccaataccatcatggatctgagatagtatgcaccaactgataatcttgacatg

SEQ ID NO: 60138 - DNA, 379 bp, Glycine max
  unsure (1)..(379): unsure at all n locations
ntaagctccttctcctcttattagggatattatcatgttatngactagagctttctcaagaagggagtgcatagngaattgttgcacaacattttcaacttcatgttcaatagcctacaccctaaagtaagcattgtaataacttggatgcttcattgcctcaaaaatattaaaggtcatcttttggtcctccatgcctagctcaagggtttcattccccgtgtcaatggcacatctagctgtgaacataaatggttgccccaagatcaaagacacctcaggatcctctcttatatccattacaacaaaatccattgaaaatgtaaatattgaacttttacgaggacatcttctacaattgtacacggtcttttgatgg

SEQ ID NO: 60139 - DNA, 327 bp, Glycine max
acctatagaaactcagcttcaacattcaatttgagcgtctcgatatattacgcggactttatcagacatcacagaacaaagttattggctcgttggaatggctcagaacttccacatctcaatttcgagcatctcgatatgttacgggactcaatcagacattcgagataaaaggtattgtctgttgaattagctcataaggtcaacattcaatttcgagcgtctcgatatgttacgggacttaatcatacatccgagtataaacgtattgcagttttgattggcctagagggtcaacatttcatttcgagcgtctcgaattggtac

SEQ ID NO: 60140 - DNA, 422 bp, Glycine max
  unsure (1)..(422): unsure at all n locations
tgagaggatgcttaatggaggaaatatagagaagttggagcacgaaattgaaggaataanagagggagagaagtggaactttgaagtgtatcttataagactttcattcatcanagttacaacaaatgttacacatgcttctatttatagactangtagcttccttgagaagctnttttgagcacacttccttgagaagctagagcttagctacacacacccctctaataattaagctcacctccttgagaagcttccttgagaagattcctaaagaagctagagcttagctacacacancccctataatagctaagctcacccccatgccaaaatacatgaaaatatataaaaaaaaaaagtccctattacagagactactcanaatgccctgaaatacaaggcttaaaccctatactact

SEQ ID NO: 60141 - DNA, 436 bp, Glycine max
  unsure (1)..(436): unsure at all n locations
tactcagcttgaatcctanaatctctaaccattgccaatgagagtctagagggttatccataaactgacagactntattgacggcaaagttgatttcaggtctaattanggcacccaccattgacctttaaagagtgggatcttgaaatggatcaacaccatgcttagataatttgcaattagacaccatgggagaggaaatagaatgggcttcgcccatgtgagttntgtgaattaaatcacaaatatatttgctctgagtcatcacaacagaattattaggcaggtacttgatctctatggccaaaaagtaatccaaatgaccaagttgcttaatagaaaaggcagtgtgtagtttagagattagttgttgaatgagagagtagaactacctgtgattatgatatcatccacataaaccagagaagaatcacat

SEQ ID NO: 60142 - DNA, 428 bp, Glycine max
  unsure (1)..(428): unsure at all n locations
ctcagcttcaccggatgacgccgatcgaacatttnctaaccgacgtcatgcttatnttcgttcacggattgaattgaaaactcgttaggcgacatctgtcgtgaagtaccgaccgatattnttcagccgacattgcacaattctttttagaaaagctcgctggtcgataatggtctttttacggcagagtaagttttcttgttttggtgttgcataaaaaagttacaatgtacttcggctagggttttcgtgcgagttcaaccgacattttgtttcggccaggaaaacattagcccacctctgcaaaaaaaatattngctaaccgtcttcatgcatatttcattcaacgattgaatagaaaactcaatagccgacaacggtcgtgaaatagtcccgactgatatttttcagccggcattgcgcatttc

SEQ ID NO: 60143 - DNA, 225 bp, Glycine max
cttttcacccggatgtccgattcgggcgcataatatgtctagagtctctaaattgaacaacggaagctcttgagaaattcaaatggttataacttttcacacggatgtccgaatcaggctaatcacatatcgagacgctcagaattgaacaacggaagctcttgagaaattcaaatggtcataactcttcacacggatgtccaatttaggcgcaccacatatagt

SEQ ID NO: 60144 - DNA, 325 bp, Glycine max
  unsure (1)..(325): unsure at all n locations
ttcgagcttctcgacatattatgcgctcgaatcggacatccgtgtgaaaagntatgaccatntgaatatctcgagtgcttccgatngttaatttcgagcgtatcgatacattataaacctgaatcggacctcagtgtgaaaagttatgaccatttgatntcacgagagcttccgttgttcaatttcgagtgtcactatatgtgatgcgcctaaattggacattcgagttaaatgttatgaccatttgaatttctcaagagcttccgttggttcaatttgagcgtctcgatatgtgatttgcctgaatcggacatccgtgtgaaaa

SEQ ID NO: 60145 - DNA, 307 bp, Glycine max
  unsure (1)..(307): unsure at all n locations
atttcgagcttgtcgacatattatgcgcgcgaatcggacatccgtgcgaaaagttatgacacattgaatatctcgagtgcttccgatgtttaatttcgagtggttcgatacattataaacctgaatcggaccttagcgtgagnagctatgaccatttgaatttcacgagagcttgcggtgtttaatttcgagtgtcactatatgggatgcgcctaaattggacggtccagtgtatagatatgaccatttgaacttctcaagaactcncgctggtcaactgtcgagcgctcgatatgcgattagcctg

SEQ ID NO: 60146 - DNA, 450 bp, Glycine max
  unsure (1)..(450): unsure at all n locations
atttattgtgcgggagtgaaacaagctacctcatcgtatccatatttgtcacattggagcgaggactatgtgtgacagataaaagaagactacgtgaaagtgaaaaaaaaaagatgaaagaaagtatctaaagagacacagcaatttttgaaaacattaaatcagaactagaagaacattttttgctaacatttgagaaatgagtgagaataatattaaaatcaatctaaaaatcatttcaactccttcctatacaaacattgcaaaatgagttaactcttggtgtactgttagcgacctcatgttacttttttcctatagtattcatatttttttttctttctggattgctcatataggatatgtctttgtggatggaaatcctcctttgcacacanttggaccttaaaattcaagctggggtgtcaatgaattgatattgctttttaa

SEQ ID NO: 60147 - DNA, 488 bp, Glycine max
  unsure (1)..(488): unsure at all n locations
tgtctncagcgttatgcgagacggagaccaacatgctatctatcatcgccaagtaccaagaagagttaggtctagccacgacccacgagcatagaatcgcggacgagtatgctcaagtatatgcagaaaaagaggctagaggaagggtgatcgactctttacaccaagaggcaaccatgtgaatggatcggtttgctcttaccttgaacgggagtcaagaacttccccgcttgttagccaaggccaaggcgatggcagacacctactccgcccccgaagagattcatgggcttctcggctattgtcagcatatgatagacttaatggcccacataattagaaatcgttaggaaacttgtatggtctctcagaccttgactagatacgactttctttttgaaataaaatgagttggtcccatgtttctactccaaaaagcttgtgcaaatcanatcactcctacatttcatctctagcatgcatttttc

SEQ ID NO: 60148 - DNA, 213 bp, Glycine max
  unsure (1)..(213): unsure at all n locations
ttttctgaatacacttaagaacactcatcagtangcataaattcacaaggcttatgatttgtgttaagaaggtttgtcataattaanacaacaagggttttggactgaacaaattgctcatatnatangatgtgaaaaacaattatcaaagagacattagagaacattcactagaccagtatagagagcacatatgaactaatcaaactaaat

SEQ ID NO: 60149 - DNA, 483 bp, Glycine max
  unsure (1)..(483): unsure at all n locations
ttntatganaggatatgacttttcacaattggattttgaattcaacgtttagatacaccggtaatcgattaccaatatcttgtaatcgattacaccattttgaaatcacttggaacgttgtaaattcagttgaaagcttttgaaatcaaactttgccactagtaatcaattataggaaactggtaattgattaccagagagtaaaaactctggtaacttagaaaattttgagagaaactcttttgaaaaacaaaattgtgctatgtttgttttttgaaaaatcttttcaatacttcccttgtgaagtcttcttgatttcttctcttgaatcttgaattcatcttctcttgcatcttgaaatcaaacttctcttgactctntaaacttggtgactcaatcttgaaatcattctcttggacattttgtcatcatctttggtatcatcaaaactacttgaatcaactggattcatcatcatgaagc

SEQ ID NO: 60150 - DNA, 233 bp, Glycine max
  unsure (1)..(233): unsure at all n locations
aaatgatctatcatctatcatatatctttcaatatcttctttcatctctttcaacagatctntttgaattatttctcttcatctttctaaaagattttgttcaacactttctcttccaagaaaagttctttgttcaaaaacttgtgctattcatctttttcattctcttctcccttcgccaaaagaangaaggactaactgtctgaattcttttgtgtctctcttctccctta

SEQ ID NO: 60151 - DNA, 404 bp, Glycine max
  unsure (1)..(404): unsure at all n locations
tttattcgttgaccacagagtggtacctggagatatgtcngcggggttaggagaccttgnggacgtcagggggggtgctattgcccaaaaccaagcttgaccaatcccgacccaacccgggcatagtcagtcagtgagaacctatgatgtacctaagtagacgagctcctgacagtcaacagataaaaggaacaaagaccacaaagcaaggaggcttgtgtggtggctggccagctgtgaactttgagtgatatatgggatatggcctctggtaatcgattaccaagggcgggtaatcgattacaaggcttaaaagtgaagacaagaagctaagatggtctctggtaatcgattaccaagggagtgtaatcgattaccaggcttgaaaacgaggtcaggaagct

SEQ ID NO: 60152 - DNA, 479 bp, Glycine max
  unsure (1)..(479): unsure at all n locations
tgtcaaggatctagcagaaattcattcaaaccaccacctataatctaatcagaattttcccctggaggcgccatcgtgtgccacattgcaaaataaaaacaactcctagtatcagcaaacagccccaatcttcatacaacaatcacagtatcacaccatatgttagcaacccatgtattagctaacacctttatcatacacaccctctactatacattctgaanaagtgtgaatgtcacaagctntgtgaatatcaaatttgaaagataggggatatatttttcgtatagtaccctttgaaaactaaggatcacattataaataaaggatctacatttgataaagtcactgtatacaagactaatcaaatcagaagagcctctcatagtatagtagaaaggattntagtgatgattntgtagattacaagctatnggtctgcggtatgggattntagtaggatgaaattcacaactgta

SEQ ID NO: 60153 - DNA, 237 bp, Glycine max
  unsure (1)..(237): unsure at all n locations
actgagtatcacatggatttttctcacaacatgtttaccaaagagtntttactctttggtaatcgattaccagattgttgtaatcgattaccaatagcaaaatggatttgaaaatagttttacatgaatttacaacgctccaattgatttcaaaaagctgtaatcgattacaatattttggtaataattaccagcgcctgtgaacgttgaaattcatattcagaagtgaagagtcac

SEQ ID NO: 60154 - DNA, 478 bp, Glycine max
  unsure (1)..(478): unsure at all n locations
tgtagaattcactccaattccagtgtcttatgctgacttgctcccatgtctacttgataattcaatggtagccataacctcaaccaaggtttatcaacctccatttctccgagaatacgactcgaacgcaacgtgtgcttgtcacggagaagcctcggngcgttccattaagcattgtagggctctgaagcgtaaggtgcaaggtctaattgatatgggctggctgaaatttgaggagaatcgcgtgtaaatcctgacattgacaatagatgccacacatggggcaattttgaaagctggtgttagatgtctctgatgactcatcaggattttcaactttcaccggaagtgggtgcaagccattggtcagtttgctcaagcgacctatgctcctgagtttgggacttccaagaccgttggtggnggtgccgtaaaacaacgagtaaagttcanaacaaataagtttcataataaaaaa

SEQ ID NO: 60155 - DNA, 466 bp, Glycine max
  unsure (1)..(466): unsure at all n locations
gtgtgtctcacctcagagtgtttggatctattttgtatagacatgtacctgaccaactgagaactaaacttgatgataaaggagaaatgatgatattgattggatatcactcaactggagggtataaatngttgaatccagtgaacaacaaagatagtgataagcanggatgtagtggtggatgaaagcaagggatgggagtggaatgtcacaccagagatagaanaacagaatcaagttgaattgcaacttgaagacagtgacactgtggctgtgcaagaaaatgaaactggagaaggcagtgctgaggggccaagaagatctttgagacagagacaagtcccttaaagattaaatgattntgaattggtgaatgatggtgcaattaatgatgaaggtgactactagctgaatctgagccactcacagtggaagaagcaatgcagaataagaaatggattacagc

SEQ ID NO: 60156 - DNA, 417 bp, Glycine max
  unsure (1)..(417): unsure at all n locations
aaattttatgatctggaccttctctcctagaacactagcatgcaaagcttcnctctcagcccaacttccttacaaatctgattcaggcttaaatagagggccttgttcgtgcacgtgcgcttatcgctattctggaccgcttagtgcacattactgaatttcgacttagcgcgtgtttttctcgcttagcagatggactaaagcagtgtgcttagtgagataaatcggtgcgcttagcaaacctgtacaactcatcttcttccatattgatcctcgcgcttagccaaagagtgttgcacttaatggactgatcgaagccgcacccgaatcaaataaatatgaaaatgcagttactaagaagtgatcctatgtcgtttccaacgagcagtgacaaaccaaatgttcataatatacttg

SEQ ID NO: 60157 - DNA, 369 bp, Glycine max
  unsure (1)..(369): unsure at all n locations
atctacacacccctatataactaagctcaaccctatgacannaaacatgagaatacaacaaaaagtccttactacanagactactcataatgcccccgaaatacaatgctaagaccctatactactagaatgtgcaaaatacaaggcctacgaaggaaatacctattctaatatttacaaagataagcgggctcatacttagcccatgggctcgaaatctaccctaaggctcatgagaaccctacggccttcccttggatctctagcccaatctacttggaagtttgtacccaatgccctcgcggggtaggattgcatcantatatatactaggagnatattctattatcattattaaatcataaatat

SEQ ID NO: 60158 - DNA, 298 bp, Glycine max
  unsure (1)..(298): unsure at all n locations
tatgcatcatgtgcactatatgatttgtgtgttggaagataaatntaatcgaagtacgagaagctcaatccaattaaattttagaccagcctaagggggaggtgagcatttgcttaccaccccccattgtcatatcatatagacacaccttgaacatgtncttctatgtttacatgccttatgacacctaagcacacttaagggagaatcttggatttgatcttggaagggggctgaaccatatctaatatttactaatcataattagtgaaattctgactccaaatttggcttcaca

SEQ ID NO: 60159 - DNA, 509 bp, Glycine max
  unsure (1)..(509): unsure at all n locations
actcagctctttnggacctgaacaacatcaactcctctttcagaaccttgctatgtgctcgctacttgggtcccttgntcccttcgcaactcgagttcattattgctaccccatagagcttcgcgaaatttgttccggccatactctttcttgcgagccctcttgggtctcttgttcaaggggcttttgccggtgatatgcatttttctttctcggtataccggccgcaactccttccgaacgtgtgtagcagccaactaaacttctccttgcgagttttgcctttcctaacttccttttgagagtttggacttctttcgcctcttccggtgccttaaaattctcttcgctgacgatcttttaacattggcgaggcacatctaaaccttgtatgcgaactctcagccattcgtggtacccaccaatgatgccattacgaatgcctctaagctcttgatcttttcttaacagagtngccatgccttatggattctttgtatagtcttgga

SEQ ID NO: 60160 - DNA, 467 bp, Glycine max
  unsure (1)..(467): unsure at all n locations
ctttcgattcattctatgcacccatggtggtccacattgtgtttcgtgcattcttattctcgttgtgtttactttatataccccctgttgacgtgcttaagccattntacttaagtcatttctcgcttaacttaaaaataaaatcaatttccaccgaacgtttgaattgtattatccgttaacttcgattaaaatgaattccgaccgttcggtcgtgccgtaaccacgttggaaatcaaaaagaggtaaaaaataatataataataaaaaaaaacatcttttagtgaaataaagcggaaaattaatcggacgttttctctttgggatttctcattcttaatcgaattgattaataactaaagtgaaactaaggctaatatcaactcgcctagtcaagctcgtccacaaaaataggcttttgaaatttgtcatttcaatttctcactaagtaaaatggatcattttta

SEQ ID NO: 60161 - DNA, 365 bp, Glycine max
cctttcccacggaacgggtcagttgccgaatgcccattattttataaactattatcacgtataaatacaaccctactttctacgtggtttctcatagcaatctcctcaaacactagcaaagggaaggaaaagtaccttccccaataacccttctctccgatttggcttctctcatcggagggaaacaatcaataagagaaaaaaagaacccacaaaaagattataacaaataaagtgtgaaaggaaaagtactaggttccgcagtttctctcatcctattggtgggtgtggtaattggcgtggctgctgtatttcaaagcccaaagggcgtgaacaacaacaacaatggaggagaattgaaaacc

SEQ ID NO: 60162 - DNA, 160 bp, Glycine max
aatctgccttgtaaatgtaaaacttgctcggttgcggccatttttggtcagcctccgtttatgcccgcgggccgtttgaagaacatatgttttaaacctaaatgaacccacgtgttaagtggtttgtatttattgccgcaaagtgtttaactatatgaat

SEQ ID NO: 60163 - DNA, 409 bp, Glycine max
  unsure (1)..(409): unsure at all n locations
ntataagtgcgggttcgggagacataggtcaagcgttcgcgatatgcgaagatgatattccgagtactttggatttggtacgaccatgctctcctgatttccagctgggaaattggcgagtggaggaacgccccggcatttacgcaacaagcataatgtaaacctttacggttttaaaagctctatagttgggcctaggctttagagttttcattttgataaggctctgcgtcttttgtttttgaatttataatacaaggatctttcttcatctgttcctggtctctacccattctcattcatttgcatgtttacttctttttctaaaacggcagaatcgatgacgagtcccccgaacgtactaatacctgtgacccgtctatcacttcgagaagaaatgatcaaactg

SEQ ID NO: 60164 - DNA, 463 bp, Glycine max
  unsure (1)..(463): unsure at all n locations
ntatatactctccatatttatataataggactatgataagtttacctgaaatgttgaacatacaacanaaatatcgcgatatattttacacatatcatgttggccaagcttcatgcgtatgtattgtactattaagtcaatggcaacatcattatcttctccactcgggatgataatatcacgcatacctttttagcttggcacatacaaaaaatctatcaaaactgtgggctttaccaaatctgggaatacttgaacaatcattttgtatttagtcaaggaggactttatacattcttaaacaaaacaactttgaataagttatatgctgataagataaagctacaagaatcaataaaacaatggtcaactaggggatgtttagtacaataaaagctatttctcatgtgtaaaaattatgattnctcattaataatatatttatattgtagggctttatata

SEQ ID NO: 60165 - DNA, 482 bp, Glycine max
  unsure (1)..(482): unsure at all n locations
cgagatgaggaagtgtagaaaggtgaaacttcctgtctttattcgttgaccacagagtggtacctggagatatgtcgcgggggtcaggagaccttggggacgtcaggtggggtgctattgcccaaaaccaagcttgaccaatcccgacccaacccgggcatagtcagtcagtgagaacctgtgaagtacctaaacaggcgagctcctggcagtcaacagataaaaggaacaaagaccacaaagcaaggaggcttgtgtggtggctgaccacctgtgaatcttgtgtgatatatgggatatggcctctggtaatcgattaccaagggtgggtaatcgattacaaggcttaaaaatgaagacaggaggctaagatggtctctggtaatcgattaccaaggagtgtaatcgattaccaggcttgaaaacgaggtcaggaagctatgatggctnttggaatcgattaccagggggtctaatcgata

SEQ ID NO: 60166 - DNA, 433 bp, Glycine max
  unsure (1)..(433): unsure at all n locations
tgagctcgntgttgctgccccatattatcctctctaaacttattcttgctccattcttcctttcaggccctttttgnttcccgctctaatgcttcgatcatagtcatagtgacatctctcagcacatcacactctttcctaaccctagtgactgtcgtctttagctattccttgatcactctcgtttctttgagctccactttcaaagcttgcactttttcgctatcctcacggactttagcttctttcctacttaagccttttagctttgggagccaagttatcccttgtgtcctagacttcaaccacttttgattgccgccgatgactccattgctacttcccctaagctctttatctttcctttccactatattccatgctctaccaattctctaaagaatctttgcagtggtttcattgaaacctcatg

SEQ ID NO: 60167 - DNA, 330 bp, Glycine max
aaatagtaacaagaagtaccttcaaactaattaatgttattaatgaagatagtgaccaaaaatcagaaaatacaactgatgtaggttcagtatcggaaaaatacattaatcatataaattccaaacattggaaaacaccctccaaactgtattatcaacgaccaactgcccctaaccttctactagaagaaagaggtgagagtaatttcaaaagttttagtgcaaataacatctatgagtggaatatagatgcccaaacggagtacaatatcatgaatacactccaacatatgaccatggtagccacgacttaccaaacatctcatgaat

SEQ ID NO: 60168 - DNA, 462 bp, Glycine max
  unsure (1)..(462): unsure at all n locations
cttgtgcagaattagggtaccacttttatgacagctnctatagacggccagggcacataattcagacagcacaggctatttggggaaagagccctagaagcagaaaagaggagcacttgtgcattgaacctangttttgtaattgagagagattatngagtanagagtgagtgtgagatgctgagaagaggaggaggaatcccncttcttgtgtaaggaactatcattctctgcttttaatctcatttattgttagggtttctttgtaatggctgactaaacaccctagttggggatttctaatgaatagcttatgtaaatacctaatatctaattgattatgttntttgtgttcaatgcttccttcaatgcttaatctttgtatgcttttggtctgatcacccatttgtgtgtacagttaagtgactttagcatttggaaatgtattattggcttagaact

SEQ ID NO: 60169 - DNA, 414 bp, Glycine max
cttcctcatgcagcaaaagtggaattcttgccatcctcaattcggaccttacgatcctcaagcttcggtctctggtggcagcacccaaccttgatgactgcaactccaccagacagtttagctatcctctcagcccagttctcaaaatcatatactgagtctgtctgtgacagctccttctttaactgagcaaccctggcttgcagctcatcctttgttgcagcatcagcaatgatagtggtagaatccttggagatggtaattttccgagccaagccaagctgctccactgaagtggtttcaacaagcagacccagatcactagcttggaactcagcacctatgcagtaaacatgcaaagttgtcaacaaactgtctcaagaaagaactaaattatatactacagaatgatac

SEQ ID NO: 60170 - DNA, 343 bp, Glycine max
gaggttctttcgaaacacatatatttcatgatactgatgaactcgcttagcccagcaaactcgcctaacgagttcatcacatttccagaaaaatgcatttggtttcttgcactttttttagcctctaaaaggaaaatcaaacatgcaaaccaaccaaaatggcttctacagtacagacatatataaagttctaatcttttacttcttctaaaaacattaaaaccttaagaatctaaagctaaatttaaggttttctaaccaaaggtttaatggaataaaagagaaaaaaggaaatgggaaacttacttgaatctttaacaatagtcgaagatgcgtgaagatg

SEQ ID NO: 60171 - DNA, 356 bp, Glycine max
gatggaagtatatctgtccatggtcaatttttttttctggagaaagcattaggatgatttatattctaccccttggctttgggagccaaggggaagaaaatgatatttaaaatcagatatatattttcagactaaattaacataattcaaaacaaaggggagaattgagaatagtgacatcactagaaaagggtgatggttctgattcacgtgcatctcaaaagggagattgaaaacagcttattgttctgatgataatcagatgattcagtgtttgtgatacaagatagacaaagccctaaatgattagatgaacagacatcagatcaagaagatcagaaagtcagttcagttca

SEQ ID NO: 60172 - DNA, 168 bp, Glycine max
  unsure (1)..(168): unsure at all n locations
gctatgtgctcgcgactggnccctttcttccttcgcaacttgagttcattattgccaccccatagagctccgcgaaatttgttccggccatcctcttccttgcgagccctctnggtctctcgttcagggctcttgcggtaattgcattctttcccgtaacccgcacac

SEQ ID NO: 60173 - DNA, 386 bp, Glycine max
  unsure (1)..(386): unsure at all n locations
atgctgcananattataatagacctcctcacctttcttgttatattcaccacagcagagcaantatgacctttccagcaacagatacaaccctgcatggaggaatcaccctaacctcagatggtccagccctcagcaacaacaacagcagcctgctccttccttccaaaaagctgctggcccaagcagaccatacatttctccaccaatccaacaacagctacaaccccagaaacaaccaacagttgaggcctctccacaacctttcctcgaagaacttgtgatgcaaatgactatgcacaacatgcagtttcaagcagagaccagagcctccattcacagcttaaccaatcagatgggacaattagctacccaattgaatcaaca

SEQ ID NO: 60174 - DNA, 471 bp, Glycine max
  unsure (1)..(471): unsure at all n locations
tccatttattgaanagcanaagagccatggagggcaataaaatcggcttcaagaatagccaaaatctggtgaggaacatcctccacaatcatgaaaatgaaaagctaattnttctagcttatctgcccctaaatttccactctgtcttgtatgaagcaaagatagttgtcttcctctacgtgtaaggttctcatagtccttcaatagtcctacatggtataagtagtgatgaaccattggctttttccatctcaagtgaagagcctgactntctgtctcacaagttttgtttgtaaaatactactgtgatgaggttttgatgggccatctaanagcaattgtctccgcagccaaaggatcaaaacagctcagttaaaagagggtgctactgcaggatgaattccagcatgatcttaggatattgatagtatatgaataattgactatgaatagtctatatataatgcactc

SEQ ID NO: 60175 - DNA, 481 bp, Glycine max
  unsure (1)..(481): unsure at all n locations
tgagacgcatggtgatctttggcatcatcaaaacatctgcttgatcctttgtctacaaatattngttgggtcatcaattcacgatcctaactgatcactggagttngaaggaattgatgtcacaagtggtgcagacccctgaacaacaactctatttgacaaaactattgggttttgactatcgaatctattgggcaattattgttactaaccactcctaatttcatgttcttccaggacctaaagagtcaattacatattcatccaaaatatgtggcctttcatgcaaaaatagaacatgaccctcacaatcatctagacggtgccattgtccaagacctgattctacacaaaggacgaatttggctcccaaagggattctgtttcattaaaactcacctcgaagaattccactctacaccatcaggagttcacatggggatcacaaagactctagctcgtatcaacgataactttacat

SEQ ID NO: 60176 - DNA, 321 bp, Glycine max
ttgccggacttagcacgcgctgcactagggcctttaacttgtatattttgcatatcggatgccacagttgcgcttgaactgagttatatagctactatatggagccagacagccaattgtccctgtaaaaaatattatcgtgtttacagtttagacccttgtttccagaaggacacttgtatactttgatgttcggcttgacaggaaatgtcaagaaggataccttatcttacagcatgctcatcatttatatcaaagctactacggtgacactatcaagaaaacttggcaagacttggatgactactcctacatatcaca

SEQ ID NO: 60177 - DNA, 451 bp, Glycine max
  unsure (1)..(451): unsure at all n locations
ngtgctcgtatcatagtttcatttcattagcattctataagatacancttgaaaattaatcatatatcattagcaacatgcttcttttctgtactagatactgcgtcatggtgttgagcaacaaccaaagctttagccaaagagttattgttgggacctaaggcactcttccctttaaaatattccaactgcctcgctgcttggttcaatattgaagaacaataagatgccacttgtagaatttaggtaacatgtgaaaatattccagtggaatgtgaggttgtatcaattaaaatgttctcaatcacaactctcaaaaatgaaaatgaggattgcaaaataccccttcctcttagagcatttcaaatataatcaattacttaatttcttcaattaaaaagtagaaggtgtaccaagtagtagtcactcatcattcggacatcacctttga

SEQ ID NO: 60178 - DNA, 462 bp, Glycine max
  unsure (1)..(462): unsure at all n locations
ctcagcttgaggattatggggtacccatcacatgtggtactatgtggttgtcgggcgatggtgcacaacaagttttccacatccacaaatcgcgcataaacccaccatcccctgttgcccacctccaactgagctcacgtactcccacgtagcccatatcctcgtttctctcaacaccgggtccccatcaatcctctcaagcttccccaacatccaagtaaatcaacattcaaacagcacanactatcacagccaagaaaacagggcaaaggcagaaactctgcccaaaacaccaaccaaaatcacagttttttctcactttaaggccccagtaacaattccttcgttccagttcgttaaccggtggatcgactcgaanatnttactggaagtctctagtacataagcctacanttttaaccgtgggatctactagcanacatccagaactcattctgcact

SEQ ID NO: 60179 - DNA, 408 bp, Glycine max
  unsure (1)..(408): unsure at all n locations
gacacttgaaactaagcttacccctctataacagcgaattcaaaatccactcttaagacaaagactatatggtgacagagagcataatatgacggaactcactccaaggaaatatgccacncaagctggagtcatattacatagatgttgtacacccttatccaacaatctgcacccttagcaatggaagcaacttccattcgactattgtgaagcggaacaaccaaaaactgagaaataatacccaattatacaataatctgcaattcacctgactcgattgctaagactttatcatgtgagttgtatcaaataaccgaggagaccaccaccatacatggaaactgaatatggatgagtgtctgctgaaggtcaagagaactatcttgcattgacaaccaggggcac

SEQ ID NO: 60180 - DNA, 465 bp, Glycine max
  unsure (1)..(465): unsure at all n locations
tcagaattcaatttcgagcgtctcgatgtattacgagactctatcagacatccgagtanaaagttattgtcgtttggaattggttagagcttcaacattgaaattcaagcgtcttgatatattacggaactcaatcagacatccaagtaaaaagttattgtcgtttgaattaggtctcagcgtcataattcaatttcgagcgtctcaatagattacgggactgaatcagacatccgagcaaaacattattgtcgtttgaattagctcagaccttcagaattcaatttcgatcatctcgatatattacgggtctcaatcagacatctgaggaaaaaagttattgtcatttgaatttgctgagagcttcaacattcaattttgagcgtctcgatgtattacgggacttaatcagacatctcgagtaaaagttattgtcgtttgaattagctgagagcttcaacattc

SEQ ID NO: 60181 - DNA, 426 bp, Glycine max
  unsure (1)..(426): unsure at all n locations
acatatattcacaacacaccacagtgcctattttcggaaaagctctggaggcagcaagaggagcagcttttgtagagatacctangttttgtaagcttattattgttagggtttcgtctgtaatggctggctaaacaccctttttggggaattctaatgaacagctgatgtaattattttcatatctnaattgatttgtttcatgtgttcaatgcttcttcagtggcttaaatttgtatggtcttggtctgatcaactatttttgtgcctagttaggtgaatttaacattgngaaatgtattgttgccttanaacttgaatgaagcagaattgaaacttagtcttacaagagggatttgcggattaagtttttggtttaagtatgctgntacaataatgttgtttggtttaagtctagtccaatga

SEQ ID NO: 60182 - DNA, 432 bp, Glycine max
  unsure (1)..(432): unsure at all n locations
cacaaggttatattttttaaaataaagggcatgcagaagcttattgacactctgaatgtaacaaccagtctagtagctaattgacacttttcaattctcttcttaccacccagtanaagggaaggtcgatcgcacgttcatcctaaggaatggaaatacttgattggattagttgccaactactgacntctcatctaatcctagaaataagcagtctaaactctcaagtttcaagacaaccaattcaatgaacttgtaattntatctggaaataaaaaataaaataacaaagtccagaaataattaaaaatgaccaaagtcccatcgaaagaaccgtgaaggattgttcataaacaaccaaaatactccactgcacactcacaaaaaagagtgttaacagaaagcactgatgtgatcngaaccaaaacaaac

SEQ ID NO: 60183 - DNA, 324 bp, Glycine max
  unsure (1)..(324): unsure at all n locations
atatccacatattcattctgataacctcccatagataaaaacttactaataagatagatttattggaataagaataaaaaaatagtattggaagggaaaaagttactgactcatgaatgtatatgattaaaattcttatacaaccagatacatcgaaataagtttcatagaagcccttctaaaaattctctaagacctaattaggtatttaaatataaaatgtaaattataatggttctatggattattaattagtataaatatactattcggggttaatntaaatactattaaaagtatattcatttaacaatacaacatatt

SEQ ID NO: 60184 - DNA, 246 bp, Glycine max
  unsure (1)..(246): unsure at all n locations
tgcttagcgagagttgtagcttttctgatctgcaaaccaagctaagcggacttactcgcatgctaagccaagcctatgtgttaaaataaactgatnttaaatttgaaacgtcggctaagcacgaggatccgctaagcgagcctcgttgagaaaccaaacgtctctctggctcgcttagcgcagcggtccgctaagcgaaagtgtcgaanactgcttaagtgagtgtaacagcagttacactcacac

SEQ ID NO: 60185 - DNA, 319 bp, Glycine max
  unsure (1)..(319): unsure at all n locations
ctttgccctgtgcccgatctttggcgtcacgttggtggagaacgtaatcaacttttctctcttcatcaacctcgatctttcccggcaaacaccagatccgcaaagctggacggcatgntacccactagcttctcatagtagaacactggcagagtgtctaccatcatggtgatcatctctctctcaaccatgggaggagctacttgtgccgccaaatccctccatcgctgcgcatattctttaaaggtttcaccctctttcttaaacatattctgcagttgagtacggtcaggagccatatcagaatngtactgatact

SEQ ID NO: 60186 - DNA, 350 bp, Glycine max
  unsure (1)..(350): unsure at all n locations
atcctctgagtcacctgcggctgcagctgctctactatatagattagaagtgtgggtgatatgtatatctattgaagatgtacattgctacttaaagaaagtcctctaagaccacaccacatgccctgactctcatttggtgtcatgacttctatctcaaacctctccaccaataattctagtaaccaattaatggtttcttacctatccttctatctatttattttcaaaaatctcaagagttctcttataccactcgcttcttatatcaataccacaacgggtatttgtntacttggtattatagaggcattattgcagcaaatcaagcattttcaaaagctaatgat

SEQ ID NO: 60187 - DNA, 286 bp, Glycine max
  unsure (1)..(286): unsure at all n locations
caggagtcattaaaattctctaaactttcaataacaaataaacacatcactctattgttaattaattaattaaataatacagnttaaatttaattcatcttgttgttgtgttaatcaaacacttaatatatattatgaanaatctcaatgttacactttttttaaccgaactaaataattgaatattcatattgagttaatttgataaattcattacaaaatatgtcattaataaaatttaaataagttaaaataaaattattgggctcttgttcttatcttttga

SEQ ID NO: 60188 - DNA, 473 bp, Glycine max
  unsure (1)..(473): unsure at all n locations
tgtacttgtacttgctattggcagaatacatgcattacttctttctttccaactcatcaacgtgagtggngcatttattctttttctataattacggngctaataagatgaaacaatagggtgatgaaacgaatagggtgtcctctcactgcttgaagcatccaattnttatttttatttttatggtagaacatattatcatatcttggaagcatcagctgtgactcggctaaaggctaccgcggtctttgagccagatgggcgccccaaatgcttgccgatgaactcaccggctaacatgagctttccgagatcaacgttggttgtcaccccaagtccattcagcatgtacacaacatcttcggtagctacatttcctgaagctcccttggcataaggacagccacctataccagcaactgaagaatcaactgcactgatccccatctgtttagaaaagaaatcaataacgt

SEQ ID NO: 60189 - DNA, 424 bp, Glycine max
  unsure (1)..(424): unsure at all n locations
gtaatcgattacacacatactgtaatcaagtaccttaggagtttttcagataacattctcaacagncacatctttttgtgtgtttcttgaatggctatcaaaggcctatatatatgtgacttgagacacgaatttgctaagagtttttcagaacanaaaggtcttatcctcttataaagcaaaatagttttatcctcttacaaattccttggccaaatctcttgtgattcaataaggaattatttgagtgctcaaattgttcaatctatctctttcaagagagatttcttcttttcttcttcttcattctgaaaagggattaagagaccgagggtctcttgtttgaaagaattctaaacacaaaggaagggttgtccttgtgtggttagaaacttgtaaaggaatttacaagatagtggaactc

SEQ ID NO: 60190 - DNA, 464 bp, Glycine max
  unsure (1)..(464): unsure at all n locations
actcagctatataatcgatacgctcgaaataacatcttttctatctcganattcanatggtcataactnttcacacggatatccgattcgggcacataatatgtcgagaggctcgaaattgaacaacggaagctcttgagaaattcaaatggtcataaattttcacacagaggtccgattcaggcttataatatatcgatacgctcgaaattaaatatcggaaactctcaagaagtcaaatggtcataacgtttcacacggatgtccgattcgatcgcataagatgtcgagaggctcgaatttgaacaacggaagctcttgagaaattcaaatggtcataactnttcacacggatgtccgattcaggcttataatatattgatacgctcgatattaaacatcggaaactctcaagagattcaaatggtcataacttttcacacggatgttcgcttccagcgcat

SEQ ID NO: 60191 - DNA, 355 bp, Glycine max
  unsure (1)..(355): unsure at all n locations
tacacctatactcgccactcctttcacagccaattaacacaaatgtagtcattcctctactacctgtgtttgagtccgaccctaaaatcactggcacaaatcccgtttcatgagccacggatcaagcccaccgcataacattctctcagcactcatacacctacanagaaatccacantaattttnttctactagtattcatgttattaaatctgtgacaaacattaacattataacttgagaagtgttgaacacatccgaacaatcaacatggtggtcattctcaccacatgcttcttctgcattntcataatcccatatccgctcttcaaacattatttcatacatncactca

SEQ ID NO: 60192 - DNA, 381 bp, Glycine max
  unsure (1)..(381): unsure at all n locations
tactcgaatcaagtagggccattttgagtaagagtttttctcttcagtatttgatgntattcaagattcgaattgaagactactaattaaattggaataacttttaccgattgatcttgagatatgtagttgaaaaggtgggaaaanaaaaaaaacagaattttggagtgtgggttgtgattaatttcaaagctgatccgatcagaataaaaaacagaatcggatggcaaagcttgtaaatttggaaggacccatctcannaattgttttgtgtaatcaaaggggagagtggtatatgcatacgtgaaggttatggtgtgtttttgcttttgggggtgtcaacgcgtgtattcagaaactcacaactcacacgtggtgaaa

SEQ ID NO: 60193 - DNA, 415 bp, Glycine max
  unsure (1)..(415): unsure at all n locations
ggtggatcatacgagacaagttgtggagtggntgaagagatttatttctcatactctacgagngatgagtacgatgaatctaaatcatctagtgaggaatctgataatgatgatgatatagatgaagaggaacaaatcatatctgtcgctcagaacgttactactcacactgtctgtgatatctctgaaaatgatctgttgaatgagatgaaagagcttgtactagaggcacaagatgataaccctaaaattaatgctcacgaaaaagaaggagccaagaccaaagacatcactgaagaagagatcaatgatcatgttgttgataccacagacatattggatacacatctttatcctccgggaaggatcatgcatattatcccttcaccttcgtctgaaaataatttaattcatc

SEQ ID NO: 60194 - DNA, 105 bp, Glycine max
accgatccatccacatggttgcctcttggtgaaagagacgatcacccttcctctagccctcttttccgcgtatacttgggcatactcatccgcgattctatgctc

SEQ ID NO: 60195 - DNA, 420 bp, Glycine max
  unsure (1)..(420): unsure at all n locations
gcacactcgaaggcggaggacacatgatcgattattcaantttttgtgctccgacaaaggttgagaatgaggaatgtactaagcaatcactacgcatggctccacactcgaaagtggaggacgcatgaacgataacacaatatatggtgcttcaaaaaaggttgagaatgaagaattgctctaatcaatcactacgcatagctccgaactccaatgtggaggacacatgatcgataacacaattcatggggctccgataaaggggcagagaatggagaattgcactaagcaatcactactcatggctccaaactctaacgttgaggacgcatgaacaataactctatttatggggctcctaataaagtgagaatggagaattgcactaatcaatcactactcatagtcttaaacactaag

SEQ ID NO: 60196 - DNA, 253 bp, Glycine max
  unsure (1)..(253): unsure at all n locations
ggagatatgtcgcangggtcaggagacctttgggacgtcaagtggggtggctattgcccaaaccaagcttgaccaatcccgacccaacccgggcatagtcggtcagtgagaacctgtgatgtacctaagcaggcgagctcctggcagtcaacagataaaaggaaaacaagaccacaaagcaaggaggcttgtggtggctggcccagctgtgaatttgtgtaatatgtggatggtggcctctggtaatcgatta

SEQ ID NO: 60197 - DNA, 430 bp, Glycine max
  unsure (1)..(430): unsure at all n locations
tgtttaaacagacctattggtaaatgtttttaaaatcagtaatttgcccgtgaagtgacatcnatgtggatgatatattgatttaggtcttgatatgggattgaaatattttcttctcttacgaacaatgaaattaatatcaatatttgaattttgtatgagataattgtccttaaattacgtaattgtttaatttgaatacgtgttttgaaattattgcaagactacgtaattgaatcctctttaacaagacattagattgaacaaggaattacatatcattcatctttatatttacagtattgtttaatccaagtttttttgtgtgttaatacgagaatattgtgtaagattcacaattgttagcactaaaattattttactattaaatattaaaaaaattattatttaatattggatagcattaaat

SEQ ID NO: 60198 - DNA, 289 bp, Glycine max
  unsure (1)..(289): unsure at all n locations
acaccccatttctcttcccctttggcaacatanaaaagccaaagtgtatgtgttaaacaacacaatagcattcatttaagtcaatataacatggaaacactaaaaccaaatataatccaaacattcataagggaaataaataatccaaacattcataagtcaaaccacatntaatcctaagcataaaaggctaagtaccaaatattgaaaggtaatgaanatccagataactaanagatatagccaaatacacggcttataatgaacgataataataatctaaaaacta

SEQ ID NO: 60199 - DNA, 328 bp, Glycine max
  unsure (1)..(328): unsure at all n locations
ttcgagagagagagaagtgcctaaggggctgaacccttttcttcttcacttctttccctatntatagcaaaatangggagaagcttgccgcccagctcgcccaggcgagcaaggttgcttcctccagaagcaacagccttctggaggaatcttctggagggcccaagtgggccctggtgctatttgcaccccctttttactaaatgcacccctcctttctattttnttgaattttttttccgtaacgttacgaaactntacgaatttcgtaacgatacttattttccattccgcagggtacgaatccttacggattatgtatttactc

SEQ ID NO: 60200 - DNA, 355 bp, Glycine max
  unsure (1)..(355): unsure at all n locations
ctatgcgcatacttctttacgaacgttcacttgcacaagacattcttataactaagaagaatgcacccatatacaatcaaggcaccttcgttacctagattatttatatgtacttccaaggtgtatttgttacctacatcacacgcatttcctttgctaaatttacatacatgcttactcaaagcactntggctatcaaaaatgcatacgtgcacantttggtatttctatacctgtacatacacaaacttcatgatgaatcttgactatctacacaataaggtgctacatttcatgcttgttttgaagtgctttcactacctatagccgcatgcaaattcaagtataatttctt

SEQ ID NO: 60201 - DNA, 483 bp, Glycine max
  unsure (1)..(483): unsure at all n locations
ctcagctgaatgaacacggagcttcgagaactaaatgtcatatcagatcatatgaacgtccggttcaggcgcataatatatcgagaagctcgacattgaacaacgtatggtctcgagaaattcaaatgttcataacttgtcacacgaaagtccgattcatgcgcataatacatcgagaatctcgaaattgaacatcagaagctctcgacaaattccaatggtcataacttgtcacacggaagttcgattctagcgcatcacatatcgagacgctctaaattgaaaaccggaagctctagagaaattcaaaaggccataacttgtctcacggaagtccgattcatgcgcataatatatcgagacgctcgaaattgaacaacgtatggtctcgagaaattcanatgtgcataacttgtcacacgaaagtccgattcaggcgcataatacatcgagacgctcgaaattgaacatcggaagctctcg

SEQ ID NO: 60202 - DNA, 245 bp, Glycine max
ttggggacgtcaggtggggtgctattgcccaaaaccaagcttgaccaatcccgacccaacccgggcatagtcggtcagtgagaacctgtgatgtacctaaacaggcgagctcctggcagtcaacagataaaaggaacatagaaccacaaagcaggaggcttgtggtggctggccagctgtgaaacttgagtgatatgtgggttgtggctctggtaatcgattaccaagggtgggtaattgattac

SEQ ID NO: 60203 - DNA, 471 bp, Glycine max
  unsure (1)..(471): unsure at all n locations
gaaatacatgcttgcatcatcaaagggggtttatgtgaatgtatgcatacatgattttgatgatgccgaagaagaaccaaacaaggctacttcaaatgagtagcatttgcttcaagaataattcaagattgcttcaaccaacaaagccttgtttcaagattcactaaagaccaagcctttccttaanacanagcgctgtcaagacatggaaggctctggtaatcgattaccacgaagtgttattgattaccagaagacagggttgagaaatagctgttgaaaaatgttttgaatttgaattttcaacatgtaatcgattaccatatgtatgtgattgattagcagcaacggaactctggaaattcatattcaaaagtcataacccttcaaattataactgtgtaatcgattacacaaacattggtatcgattaccagtggaanattttttagaaatctggccacagtcaca

SEQ ID NO: 60204 - DNA, 137 bp, Glycine max
cttagcgggtggaaaactaacaaaatattctaagtcttttctgttcatcttttcacctaggcttagagaagccccttcgtcactactaaacgaactgataaattaatcataatcataagcgactatcctaattacat

SEQ ID NO: 60205 - DNA, 398 bp, Glycine max
  unsure (1)..(398): unsure at all n locations
tactcagcttgaaatggctgacatgatacatgtcgggtttgtttgtttaaggatananggatccccacatatctcatgaacanatgctaaatgatgattggaatttatgcaaactggcatgcatgcacctatgggacctaagtgtaaattttatggcatgtgatgctgggctacgatcatttccttatttagatcaacccatgttccaaaaatgtcttttatcaattggcaacatccgatccattttgggactcggagaatttcacagcattcacccttatgtgtcacacattttttttcacaactacttgatcagcaatttttcaagaaaattggaagcatctctttcgaaagctgtggttttcactaacaactattttctttctttttttttatta

SEQ ID NO: 60206 - DNA, 436 bp, Glycine max
  unsure (1)..(436): unsure at all n locations
ttgagccaattaaacaacaataactnnttactcttatgtctgatngagtcccgtaacatatcgagacgctcngaaatgaatggtgaacttntgagctaattcaaacgacaataacattnntctcggatgtctggttgattcccgtaacatatcgagacgctcgaaattgaatgttgaacctcttagctaattcaaacgacaantaactttttcacggatgtctgatagagtcccgtaacatatcgagacgctcgaaattgaatgttgaagctctgagccaattcaaacaacaataacttttttctcggatgtctgattgagtcccgtaatatattgagacgctcgacattgaatgttgaaactctgagccaattcaaacaacaataactttttactcggatgtctgattgagtcccgtaatatatcgagacgctcg

SEQ ID NO: 60207 - DNA, 296 bp, Glycine max
tctacttatttgaattcagcggttcttctaatgctcctttagaaacgaaatgcacaatgtcttaatctcattggtggttatgagaaattctatatttgtgctttcattcctcattcgtcgcattagttttgaaaaaaatgtgtgttgttctgatcggtttggaggtttgttctttaccacgtgtgttcatatcttagtgaaagtttttagagactttcaattcttcagccttttacatttacaagacttcaatgtcttcagccttttacatttacaagacttcaatgtcttcagtc

SEQ ID NO: 60208 - DNA, 470 bp, Glycine max
  unsure (1)..(470): unsure at all n locations
actcagctttatgtganaagatgtgactcttcacattcgaatttgaatttctacgttcaaaggcactggtgatcgattaccaaaaacatttaatcgattacatctttttgaaattaattggaacgttgtaaatcaatttgaaacttttcaaaacaattttgctactggtaatcgattacaacaatctggtaatcgattaccagagagtaaaaactctttggtanacatgttttgagaaanatcatgtgctacacaatttttgagaaaaacttttcatacttatcttgattaagccttcacttgattcttgaatcttgagtcttgaattgttcttgattcacttgagttgttctttgattgatccttgattcactcgagttgttctttgattgatctttgacctttttgtcatcacctttgtcatcatcttttgttatcatcattggtatcatcaaaacacctttgaatca

SEQ ID NO: 60209 - DNA, 287 bp, Glycine max
actttcttcctgacttgtaatgatcatccctttgggaacaacacctacctgagatcaatatgtgtggtattttgtttcggggaatatcttgaccttcgacacgaactctggattgactaagcctgaagcaagaagatactgttacagtctaccagagtagatgatcagttaaacaattataagatcttccgttaatagaagtgtgcttgatttgttagggaccttcgtagtgacatcttgacatatttacaacttaagatatttgtagattttggctaccacatact

SEQ ID NO: 60210 - DNA, 419 bp, Glycine max
gtgctcgatattgatcgatcttagaattgtatataactattatgagtttttcttacatcctagctagttattatggatatcttggtcgagagtaaaataggaataataataatatcaatgatgatctatattgcgcgtagaaagaacatacgcgtatgtgattatacaaacttcttatttttctcaggagaaccatagacaaacaccaactaagttaatttggatagttcgatgtctgctcgctctacaatttatcggtatattcactactactatttagtggaaaaaaaccatatttaaatagatttgtagataatgaatgtatctaaaactctaagctaatagtgtactgggataatgtatttaaaactgcaagttattgcctattatattagctgcaatatcattatatatatatt

SEQ ID NO: 60211 - DNA, 268 bp, Glycine max
cccctctcttatgtctgcttaacacaataacgacaaacatatattgtgttgatcctacccctcagtgatacacatatggtttcttatgaacatttgctttaccattaatccttagtctagcatcaaaatatgccacaaacattccttggagaagctacagaagtaccaatagctcatgtttagccagagaataatcaattagatcagacatctctcacatttactaaagttttttagctcactgactcgcatttttttattgttcaat

SEQ ID NO: 60212 - DNA, 418 bp, Glycine max
  unsure (1)..(418): unsure at all n locations
ntacagcagaatttagtaatgacccactaacctagaattaatataacttaatgccattaacctagggaattaaaacaaacttaatggctgagtgtaactgaaattgtggcaaccaaaagtcacccccaacagccaacaagtcagccaccatttggtctcccaaaaggctgatgcctatgttgccaattgggcccttattacaacttgaactaaagcccttttagttgattaacccanaacatatttttggccagccaactttacaaggattgggccattatttagacaaactaaacactctaaaaatgaaataaagtggtgtcatttagtcctcctccatttgggccatgatacaactcacaaccttggacttttctncttgaaacttgggcttgtattcaaatagtatggacaacac

SEQ ID NO: 60213 - DNA, 325 bp, Glycine max
  unsure (1)..(325): unsure at all n locations
cgtatctggatgtggctgatttataataaaatttaaaaggattataaataacggataggacacatataagggtgccttataatttcacaatcgtcctttgcttgttttttctgttttattcatatttctcttatttngtacttgtttattatggctttacattggaaatcaataaagtattacatctatttgcttaattctttcatattttatttatgaaaaacaaaattgattgagcgaagggttccttccatgcatacaaaactacaccaaccaaatctcanatcttatctttgtaagggtagaagactaatcatgtgagtta

SEQ ID NO: 60214 - DNA, 332 bp, Glycine max
  unsure (1)..(332): unsure at all n locations
ttctatgtacccgtagtggttacattgtgtttcgtgcatttntattctcngtttgtttactatttatacccncctcttgacgtgcttaagcccatttacttaagtcatttctcgcttaacttataaataaaataaatttccaccgaatgtttgaattgtattatccattaacttcggttaaaatcaattccgaccgttcggtcatgccgtaaccacgttggaaatcagaaagaggtaaaaaataatatattaatcaaaaaaatatctttntagtgaaataaagcggaaaatcaatcggacgttttctctctgggatttctcattcttaatcg

SEQ ID NO: 60215 - DNA, 474 bp, Glycine max
  unsure (1)..(474): unsure at all n locations
nganagtgtgtaaccaaccatcttctcatagtagaacaccggttacgtgtatactatcattgtgatcatctntttctctgtcattgaaggtgccacttgagctgtcaagtccctccacctctgggcgtattccttgaatgactcatgctcttttttacacatgttttgtagttgcgttctatccggagccgtatcataattgtactgatattgcctaacgaaggcaaccattatgtccttccaagaatagactcgggaaggttccaagttagtgtcataccctaatttcgtccggggattattacttgacgacatgcaacctttgattggccgtttcaagatacttggcaccctttgttgcacaatatgtaagtcttgagacgcaccggaagtcaaaaggaagcaaggttatgcgatccgtgaaattccgtaatgtggcggaaaccaaaaagaggtgttgcgcaatccgtgagt

SEQ ID NO: 60216 - DNA, 228 bp, Glycine max
  unsure (1)..(228): unsure at all n locations
ttttccttggtttgaagctcactacaagccttanatgaaaaaccatgatatcactatantccttatggaattttggagctctggaattgttttgggaataagtgttgggggtattttgtttcattggataacttgttttgttggctatgcttcatgatgtattttgggccatacttgatgtacattgtatattggttaaatgttggacatgctgaataaaatgttgtt

SEQ ID NO: 60217 - DNA, 185 bp, Glycine max
ttgccggacaagactagctgctcgactctgactttaagtctgactagtcttccccttaactagactctgagtctgaatcaaactactatcccctttaactgtactctgagaagtagtatcctcttaatactccctgcaactaataaaagctctcaaataatgtaacagtaactttatatgcacag

SEQ ID NO: 60218 - DNA, 322 bp, Glycine max
  unsure (1)..(322): unsure at all n locations
aaagagatagtctccacagggacttgagttacttaattcattcagttaaaggatatcanaattaatatttatatacaaatngaatcgaaatatcatgggtttgtcgaaataaccgaaagataatttatagtaacgaaataacggacataacagaatttagtgcgtcgaaactacgtanagttatggaaacaataacgaatgcaattaattcaagaaaaatgtgggatgaatttcatcgttcatacccttagttntctaataaaattaacatatatgaatcattttctaacatgactggatgcacatattaagttactgatag

SEQ ID NO: 60219 - DNA, 326 bp, Glycine max
  unsure (1)..(326): unsure at all n locations
ctaatcgctgagtttacttacatcaaaataaggagatttttttttaggttcacccatgggctggaatgtttaccacttcaataatcttcctttatcaactccacaattccttangaanaaaagaaaactgattccttccgagccaagactcttagtattaccacaatcctaaattgatttttcacctctctttcttttgaattcaaagaaagcatgataatagcttctctagatatttgttggaaccgcacaccatcaagcttaggtctattccaactctctttcttgaatctattttcaaaaaattccttcacctcatctttttt

SEQ ID NO: 60220 - DNA, 441 bp, Glycine max
  unsure (1)..(441): unsure at all n locations
ctaagctactactgctatacggcattctctctcccaataatctatttttctctgatgcacactacacacattatgtatataataagtgccttatcttaatgaaaggctgaacttnatacatatcttaagacaatatgctggaaatctattatttattgaaattcccaactttttattttacagatataaaatgacataatattgtagaacttaaaacctatataatatttgtcaaattataaattattgcatgttactaaaatatttcatcattattctgccaactgctttggtgtaagattgcaggaatatatgttggtaagggaatggtgatccacttcactagaggatcaagccaagaaactgaaacaagaacaatgttgggtggtttttatctaagatcaccccaccatgcttctcgtgacactccatgcccaaaat

SEQ ID NO: 60221 - DNA, 195 bp, Glycine max
gactgaacatgatgattatattactcgctcttcgttgcttatgattatgtgctttacacttaattactttaatgatatatgactagtgatatgtacttacatttggtattgtgttcatgtattatattcttacttatcatatatgtttatatgaatatgggatgatttctactctgttgatgtatgaatgaagta

SEQ ID NO: 60222 - DNA, 321 bp, Glycine max
tattaagaggtttcctcaagaagtttccccgtggtatcttttatatactttctcaagaggcttctctgagaagatagatctttatctacccacacctttctattaactaaattaacctccttgaaaataattacggataaaataacacaacaaatacaatcaaacatcacacataattattaatatatagttatatatatcagggtgttacaaaaggcgtgtttgaacagtgaattgattgaaaatgatatgcagtgtattgctttgtatgaaatgagtgtttgagaatgatttgaaagagcaattgtatgaattgaatgg

SEQ ID NO: 60223 - DNA, 443 bp, Glycine max
  unsure (1)..(443): unsure at all n locations
ttcttcaatgtactctgccacaaacagagagctgctcatattgttagatatgganaccatctctctagntatggtcaccttagcctcacataatccttgatctgaaanattgaatctacgccaaaaaatatggattgtctctagtggtatggagccaacaacatatttagacaactcacatgcacatggaagaccatgagtagtcctcatgacacatccacaacatgaagggttgttgcctgcataaggtacacactcatactcagcaacaatttcatttaaagcgtactttgataccatgtcaagcagtttttttgacaagggaactttaaacacatgcccaactccgtgcgtacttgtctcaaaagatgctntaatttgggtgagatgaagtgcatcattttgttcattgcgttccaaacactgcatatgtcactggtagt

SEQ ID NO: 60224 - DNA, 377 bp, Glycine max
  unsure (1)..(377): unsure at all n locations
tcaacattcaatatcgagcgtttcgataaattacggtacactatataacatacgagtaanaacttattgtcgtttgaattcgctcagagctttggtattcaatttcgagcgtctggatatattacgtgtctcaatcagacatccgagtaaaaagttattgttgtttgaagttgctcaaagcttcaacattcaatatcgagcgtctcaatatattacgggactcaatcagacattagagtaaaaatttattatcgtttgaacttgcttagagcttcgataatcaatttcgagcgtctcgatatattaccggactcagtcagtcaaccgagtaaaaagttattgtcgnttgaatttgctcacagcttcggtattcaatt

SEQ ID NO: 60225 - DNA, 484 bp, Glycine max
ctcattatcacgtccaagaggagaataattcactccattgttatgtactttctttaactttgagatcttgaaaaatacaagatatataatacttataatcggtactggtaatttgactctactgtttttgataggctctaaagtatcatcttctttttgtcatggagcttatccccatctaacctatattggcttctcttttatgcttaccatatcttcctttctttaatctcttaatattttaatagctcctcctcctccccattcatcatcaattaattaactatcacaaacaaaagtgtaattggggctatatatcagtctggctacatatgtgcagcaaatcaaccagatgccttgtttgaggttccatgtgccactataacatgaaaccaagtctaatggtttactgtagaaatcgatctgattaatctggaagcatttatatatgttttgtacagaacatacctaacctactaaccta

SEQ ID NO: 60226 - DNA, 373 bp, Glycine max
  unsure (1)..(373): unsure at all n locations
gtagaagcctgtgcaacactagctgcaactttgaggaatgagagttttatgagacacaactcggagatcaacttctctgcctctttcttacttcaatatgaagctcacccctgtctgtctctctccgtctttcttgtcctacatcgaagcatgctctacaagctgcttatacaaagctcatcttggcggagaagctccttcttatatggcttattgcctagtggatggngcctcctatcacctcttatcctttgtcatgcgctgcatgaccatggcggagagtcaccattggaggacctcattggagctcaaagatgcagcctccatagaagccccacttgctagcttacatcaagtggaaagcagagcacaa

SEQ ID NO: 60227 - DNA, 449 bp, Glycine max
  unsure (1)..(449): unsure at all n locations
nttcttcgtgagcagaagggtttgtctcgtataaggcatatcactggctggcactgtctcaattagctcagatacttcatccagggcctgcaactntatcttatccgctacaaaagcatctaatagntgctagctgtgcggtctcatcccatctataaacatattcaattgaattggcttggaaaacccatggcggggaggacttgtaatagacctctgaacctctccaatgctacactcagagattcatcaaggaattgatgaaataaagagattgcagctttacctttcgcagtcttggactctgggaagcatttctttaagaacttttcaacaactgttttctatgttcttagactatcaaccttagatgagtgaagccaccttttggcctctcctgccaatgataatgagaatacgttgagtctaatatcttaatctggcacacc

SEQ ID NO: 60228 - DNA, 271 bp, Glycine max
tttttacattctgactaaattctgttaatgtatgtttatgaaatttgtaagggtgtaattacaaggattaagccatatatagtttaagtgcaaggttctaagaccggagtattattctgaaacaataattgttttctcaagacttgcctttaaatagtgtagtaccctatatgtagcctagagatgaaattgtcagaaattatgcacaagattggctgatcacttacactgatcaatgtactatatctggctttatgtgagcaagatatct

SEQ ID NO: 60229 - DNA, 471 bp, Glycine max
  unsure (1)..(471): unsure at all n locations
ctaacagatatagaccatcgcttattctatntttctgagattctggtgaacttgcatgtgctctatgtttatctattgtgcgaggaaagtgatcttgaagcaatggattcaacgaataactgcatcctggaaaacttatttgagaaggcagtgacatctgatctactgtctggcattntagattctgaggtaagagagctggacagtttcatggacactctccaagaagaaattgttgatgctcgtcataaaatattntcatgcaaacatttaactgaggttttctttatgatggacaaaaaattgcatggctctaaagagtctgtgaagcagtttcaacagcagttattggagttgaaaattcagtcatcccagctacagaanaccattgaggcttttcgacatgagaattgtaagtgaaatttttactcagaatatttntgctcaacatatttattctgaggatgcaat

SEQ ID NO: 60230 - DNA, 395 bp, Glycine max
  unsure (1)..(395): unsure at all n locations
tatacgcatataaaaaaattatattttattattataaaaatatgcgtgctaatatgtangtgtgtatcacaaattattaattgatatttaatttttaaattacaattaattgatacagagttagaacacttaaatttatattattgaatcctacaaagtattaagtgaggtaatttgctatagatattagttaaacgaggaatttagtcatagcatacatattgtttgttttatataattaaaatttttaagaatgaaatgtctctgaatatataaactttatttagattaaaattatctatctnttaattatgttagataagaaattacacacgttgatatgcgtatatatttngataaacaattaaatatgtttcattttttgaaaacatgaa

SEQ ID NO: 60231 - DNA, 285 bp, Glycine max
  unsure (1)..(285): unsure at all n locations
cttcagcttactaatggctagtagtaccagtggcaccaatcacatttggcttaaacatatatgaaaaaactcaagtccattcttacacctcaaaaaggcaagaaggaaaagaacgcttatcaaagaaatcttaagttatggtanatttgcttagagaatatcctttataatgcatganactaaaaccagtaattacaggaagagaaaagaacatactgatccataccacagagcatgatagacagttccacaagaacctgcaatttagaataggaaacaagttac

SEQ ID NO: 60232 - DNA, 320 bp, Glycine max
  unsure (1)..(320): unsure at all n locations
atgttatggagaactgaaatgctgtaatcatgttacttcattatttattggcttggtatactgctcttgttcctgttgtgggtgcctataggaatttgaagaggattggtgccatcctttgagaatttgagttaagaagaaagggccaaccaccttaagagctnattgactaagaagcactccannatgagtgaatcaccaaagagagaacaaccaccaaaattgaggactggtttgaattttgtaatttgcaatttacttaccttcattgctttcaagttntgtaacanaaaggcgtttcattggaagtgtgttgggag

SEQ ID NO: 60233 - DNA, 425 bp, Glycine max
  unsure (1)..(425): unsure at all n locations
ctataccaatcttatntagagaacatagcacaacctagattggactaacaaatcttatcctcaaagataaatacaattatgctttagtcagcggtattttggaagatcacaaacttcattttaacaaacttgaaagggctttaattattctaaagcagcagatgcacggggtggaggatcaacaagaaatatatcaagaagctggtcaatggatgttgtaatataatcangatatagctgtgaagctcaaggtcatcttcctctatctcgaacctcacgaggtccnctttaacaaatatactatgaaggatggaaactggaatattgtgtggagagggtaacgctgcagcatcatgaataaataattaccattaggaaagaccaaatatacccatcatctgtatactacatccattattatatat

SEQ ID NO: 60234 - DNA, 496 bp, Glycine max
  unsure (1)..(496): unsure at all n locations
ctcagctatcctgcatgagtgtccaagnttgtctagctcttctatgcgtaaggtgatantngattcagatctccagaaagacacgattgcaatggtaatatattctttttaaaatgatgatntctgtaatatcacataattcatggagttcttttttaaatgttatcatttgttaattcaaataattcactcttcactgcaaacacatcattgacctccatcatttttctatggtggtttcttcttattacactcatatatttcctattatatacttaaaactctttttttaatttctcactacgtatcaaatagatgcatgagagacatgtataaattaaatccataataataattttgttattcttttatnggtatgggtagatgaagatcaaagaaccaccaatgagaatatacgctgagggttgctaatgccttcatacttttaaaaaatatgagtacattaacanatccctacacacacaacatttataca

SEQ ID NO: 60235 - DNA, 257 bp, Glycine max
actttttgttgaacactttagactctatacttacgtttgacgactgagaatttaaccccttactttatattctctgtatttataatatcaatcagctttaataaatattatattttttcattacacttactctccactattacaactaatatactcttactcattagacactctttacatttgcacatgctaatcatggcagatgtatttatgtagattatattagtacgtgtatgtaatgatgttaatgtgatatt

SEQ ID NO: 60236 - DNA, 118 bp, Glycine max
  unsure (1)..(118): unsure at all n locations
gcatgtgcaacactacctgctaccttggggaatgagagttttatgagacaccactcgnagatacaactagtctgactctttcatacttcaatatgaagcttacccctgtttctttctc

SEQ ID NO: 60237 - DNA, 402 bp, Glycine max
  unsure (1)..(402): unsure at all n locations
ctctaggcttggataggaagtgtgaaaggtgaaacttcctgttttattgttaccacagagaggacctggagatatgtcgcggaggtcaagagaccttgangacgtcangtggngtgctattgcccataaccaagcttgaccaatcccgacccaacccgggcatagtcggtcagtgagaacctgngatgtacctacgcatgcgagctcctggcagtcaacggataagaggaaaacaagaccacaaagcaaggatgcttgtggtggctggccagctgtgaattatagagaatatgtggattgtggcctctggtaatcgattaccaagggtgggtaatcgattactaggcttagaattgaagacaggaggctaagatggtctctggccatcgattaccaagggat

SEQ ID NO: 60238 - DNA, 484 bp, Glycine max
  unsure (1)..(484): unsure at all n locations
ttgtgtaatcgattacactaatttggaatcgattacctgtgtttgtttctgaataaatcanaagatgtaactcttcataaggtttttgactttntcaaattggttttaagtttttctaaaagttataactcttctaaatggtccccttggccagacatgaagagtctataaaagcaaggctttgatttgctnttcaatacacttttacacttattcaatcaatcctttacaagccttgaatctctttgaacttcttcttcttctttgtaccaaaagctttctgaagttttctggttttctaaaccttgaaaacttgtgctattcatcctcttcattctcttctccctttgccaaaaagaattcgccaaggactaaccccctgaattctttntgtgtctctctttctccttttccaaaagaacaaagtactaacccgctgaattcttttgtatccccattcacaaagtatcanaggggttaaccg

SEQ ID NO: 60239 - DNA, 182 bp, Glycine max
tctccacctaagagccaagggggagaaggctttcaattctcctttatgccatccatcatactgggatatagccccttcttcccatttccaattgggcaatagcattctgttgttgaactagaccatcctcagcttaataagtaaatgccgtcgcctacacttttttttcataatatattggc

SEQ ID NO: 60240 - DNA, 475 bp, Glycine max
  unsure (1)..(475): unsure at all n locations
tcacccgtaaacgtcaggccctatcgctatccctattacctgtnaacagagattganaggcagatttccgccatgctcgaggccaacctcatccaacccagtcacagtcctttttcctccccaatcctccttgttaagaagaaagatggctcttggaggtgctgcgtggattatcgcgccttgaacgccgtcacgatcaaggatcgtttccctatgccgacgatcgacgagcttttggatgatctgggtcaggcgtcttgtttctccaagctcgatctgcgccagggatttcaccaaatccgcatggccgacggagatatacataaaacagcttttcgaactcacctgngccattatgagtttcgagtcatgccgttcggcctcagtaacgcgccgtcgacgttccaatcggctatgaacgacacactcagaccttttctgcgaanatatgtcgccgtgttcttcgacgacatac

SEQ ID NO: 60241 - DNA, 179 bp, Glycine max
  unsure (1)..(179): unsure at all n locations
agaatgggagaaagaanaagagaaggagaagaagganggaaagcttctgatcaaggatcgaaagaaaacagaagaaatgtgcagaggggatctctggaccagacaatatctaaacaaatacagaattgtcaccaaatgaacaaaagaaagaaaaggaaaccataacctaaaagtggtct

SEQ ID NO: 60242 - DNA, 483 bp, Glycine max
  unsure (1)..(483): unsure at all n locations
cttgctgtcattgtccatgtggacgaacttggttgctcagaatttctnttntaggggaaatgcacttccagatnttttcaggtatgagaaagcacgtgcttgcgtaacttttggcaccgcgtgttcttctgatagtgctaactgctaactaatccaaaacctaccatccaaaatgctttagaggaagattctcctaaataggggtatgggatagcatttgcattccctttaatatatgcggtcaagaaagtgctgataactattataaatatttagtataaattcattttacattgacttttaatgatgttatgagttgacacattgatatttattattttctattagttattaaataataaggccataagaaaatatattagatatgcatatgtcaatataaaatatgttattctaataattaatatttaaattctttaatggctaatataatataatagagtaaatgtttaggtatcattt

SEQ ID NO: 60243 - DNA, 418 bp, Glycine max
  unsure (1)..(418): unsure at all n locations
ncaacaatcaatntcgagcgccgcgatattttcttgactctttcatacatccgagggaaaagctattgggcgttgaattagctcagtgctccaacatacaagatcgagcgactcgatatattacgggtctcaatcaaacatgcgagtaagaagctatcgtcgctagaatattggcaaagcatcgacactcaatttagagcggctcgatatattacaagactcaatcagacatcgcgagtaaaagttattgacgtntgaatatgctcagtgcttcaacaatctattgcgagcgtgtcgagtgtatacaggactcattcagacatccgagtgaaaagtattgccgaatgaatttgctcagagcatcaacactcaattgccagcgcctcgatgtaataccggacataaacagacatccgac

SEQ ID NO: 60244 - DNA, 401 bp, Glycine max
tgactggagagcgttcgaagtacaaccttgcgggtctctatgtatcatgcgccggaatcggacttccagctgagacgatatgaccatttgaagatgcgatagagtttgttttcaacgtcaactgttttgatacactatacgccttcatacgacatgcgagtgaagagctatgaccatttgagattactgagagcttccgattttcaatttcacgacgttcgatttatcatgtccccgaatcggacatccatgtgaaaagctatgacgagttgaagtctctagagcgttcgttgttcaatttctagcgtatatatatactatgttctggaatcgcacatccatgtgataagctatgaacactcgaaagcttgacagctgtccttgttcaatgtcaagcatct

SEQ ID NO: 60245 - DNA, 345 bp, Glycine max
  unsure (1)..(345): unsure at all n locations
tatgggagtttcggtgaaccaacctattcatagcatggtaccctaccgcaaacaagggctttgtgaatgcccttgtagagaggtggcaccacgagatgtcatcctttcaccttgctttttgagtgatgaccattactctggataatgtgtcttggctcctgcatcttcttgcgatgggtaaacctaattgatcatgtccctccacctntgatagagacgtggngagcattttgcttattactcaccttggtattccgacagaggaagaggctatggtgatgaccactataggtggcaggatgaggtcgatgtggntggcatactatatcatcatatgtctagtac

SEQ ID NO: 60246 - DNA, 360 bp, Glycine max
taaacttaagattgggaagccacataaatagggccatatatacctaccatagtagaaagaattacaatagatggtagcacatcaagtgaaagcataacaatagaaaaatctagacatagatggtctgaagaggatagaagatgagttcaatacaatctaaaagccaaaaacataataacatctgccctgggaatggatgaatatttcagggtttcaaattgtaagagtgctaaggaaatgtgggacactctacaattaacacatgaaggaactacagatgttaaaagatctaggataaacacactaacccatgagtatgaactggttaggatgaatggcaatgaaagcattcaagacatg

SEQ ID NO: 60247 - DNA, 188 bp, Glycine max
  unsure (1)..(188): unsure at all n locations
ctatccacaatgagagaaccaattttgtttaacaccttacatctngtatganagatgttctctctctgagttagggttaggttacaagattgactcccaaggagccttctcaccattagaagaataccttcttcataggtgtaaacctcattaatatgctcatcaccctttggcttcacccttacttc

SEQ ID NO: 60248 - DNA, 431 bp, Glycine max
  unsure (1)..(431): unsure at all n locations
agctgttgtgatctcactcctctggaaaccctcgtagcttcttactacaagaaatatatcttcgtgatgaaaaaaagtttcattaaaacttaaaaatcgtcacttagaaatatttgtgacaatattttgattggtattgggtgtcactaatacgcgagtccctgttataacagtgatgatatttttggttgtcacgaaaatactattttattgtgaaaataaatatcgtcactagtattttatttaatcgtcaccaatgtcggataagagcttataatgacaaaacaattaatgaccaaatgttattagtgtcaattntttgtcacaactagttactaattgcaaatagtatgattnttattactattttaaaataaaatattatcttattatcactatattantttttaaatataccaataatgcataga

SEQ ID NO: 60249 - DNA, 417 bp, Glycine max
  unsure (1)..(417): unsure at all n locations
attctcactattattatgttttggttgatacaagaaaaagaaataacaaatactcttaattaagggtattaacatttctagtaacatgacttagntntattctttatatttatatgctntgatttatagtatctaagattcatccgtgagatcctgatcctaanattataatatggcgagggaattggtgaaaaatgtaggaatgggtttcattataaaatataatggattccataaattaaatcataantttattccggtgactatgctaccaaattgaataaatacatacttntaaggtagagcatgaggtctacataactnntaatcggtgattgcgatacaagctaatgtgtgtttcggttcaaggcagacatttaattntcatttttctcttcgtttcttaagtgggtattc

SEQ ID NO: 60250 - DNA, 486 bp, Glycine max
  unsure (1)..(486): unsure at all n locations
tctctcagctcatatgggacttgggcttcaactggactttcttaccaccgaacatgcatcgcgtcgcgtcatcagtctcgtcttgcaacagaatcgcttaacgcgtcctaacgtcttgtttggtctcttgctgcatcatcatgtctcgtctagtctcacatcgagcccgtgatgaatagctccaacttgtcgtgaatgaaaaacaaggagagattgtggacaagtagagtggaacatacgcatcanaattcctaaacgcgaataagcttttttcatgccataatgggcacaaaacgacatcatattgccaaanaaaatttcccaactcagctcgtgtgactcgggccagactcgtgagttntcacaagtctgccatgagtccaccaagtctgctccgagtttgattaannaaccatttgctttcgatttgactcgcagggaccaagtaaactcttaaactcgtaagagtctacgangtgactctag

SEQ ID NO: 60251 - DNA, 384 bp, Glycine max
  unsure (1)..(384): unsure at all n locations
cgtggtgagctatctttatatgttcttcccagagcacgagattcattatggtatatcttggtgaacaggcacctccttccanatatcaggaatgctgaggtatgccctctagttactctgcactgaattaaaggaaacccttttcctgatctggttttctaacatcctccgaaaataattttctagaactctagtgccaccatactntttatgaaatgaacgcagttttatggtgatacctcttagatgctttttagttcaattcatccggcagtagaaatgtgaagtttataaacggaaagacaattctccacctgttctgtgcagatgctgcttgaactattatttgctttcttttatactacctattggaactgtttattt

SEQ ID NO: 60252 - DNA, 420 bp, Glycine max
  unsure (1)..(420): unsure at all n locations
aatctaatatagtataatagcctatatcacatctttgtgaatcgtctattctggtaggcatcacctcttctgtcaagcattngtggagaggggctgatgaaaagtcccacatcaccaatggtctcaatttttggggtgcaacttatatatttgtgngcaacatttcacttaatgccaattggttttaggatgaaatctagcagtagatatgtttatagtgattcattgagtaatcatgccaaattgcattttattatatctcatgttttcttcactcatcaattaaatgcagacaagaagactgaaagattccatatcacaaatatattctaaacttgaggtatgcatttagcanaagcctctactagtgttcctcacttccactgtgttgctcttatttctgtattntgtggatacctg

SEQ ID NO: 60253 - DNA, 459 bp, Glycine max
  unsure (1)..(459): unsure at all n locations
agcttaacatcagaccacttccagtgtgctggttctgcttcacatggacttgatggggcctatgcaagttgaaagccttggaggaaagaggtatgcctatgttgttgtggatgatttctccagattcacctgngtcaactctatcagagaaaaatcagacacctttgaagtatgccaggagttgagtctaagacttcatagagaaaaagactgtgtgatcaagagaatcaggagtgaccatggcagagagtntgaaaacagcaagtttactgaatactgcacatctgaaggcatcactcatgagttctctgcagccattacaccacagcanaatggcatagttgataggaaaaacaggactttgcaagaggctgctagggtcatgcttcatgccanagaacttccctataatctctgtgctgaagccatgaacacagcatggctacatccacacagagt

SEQ ID NO: 60254 - DNA, 59 bp, Glycine max
acaactgacacatgctgctggacgggtacagaaatcacacgagcaaaacaacaccatcc

SEQ ID NO: 60255 - DNA, 482 bp, Glycine max
  unsure (1)..(482): unsure at all n locations
ntgnganaacactgattgtaactagaagtaaagactacagtttatgttntctcccctctgatcttaagattgttgtagaggctttaaantttcttgtatgggaaaaagtgctcaagggattttgttcaattttacgtagttaacaacgggtgctctattgagttcataatatgtgtgtagtgcactatgttcaagcataggaattagtatttacaaaaaaaatgtatgcttgccaaacaggttaggttatgggaattagaaagtgaaaatcgcattggagttggtataggtcacatgggagctgtatgagccattgcctcttaaaaaagaaagcaagatttctttgttagtggtagtaggtgagtattgatgtttcagcattggaatcaatataagaacatttgtgctgagattaatctcgtgtggctttccttatgtgttcattgaaatctacaacgtagctccatttattctttatttta

SEQ ID NO: 60256 - DNA, 352 bp, Glycine max
  unsure (1)..(352): unsure at all n locations
tgcatncaatatcctgaagagggtgttccatatgttctcatgacaagactaatacatctgctgcccaagttacatggactagtaagtgaagatcactatnatcctncttaatgagctccatattgtattgttccaccatgaatccccctgatgtccaagaagagcatattgtttgctaataggcaatgactacatagaagacacagagctctccatttcactagtcctaacaatatcangatcggggagagaatgacgtacttcaatctgaatccaaagctcagtgcccaataatattgacaaaaatctcttcacaaactgtgcagaatcacgaaaatgtgagtgccatcac

SEQ ID NO: 60257 - DNA, 154 bp, Glycine max
  unsure (1)..(154): unsure at all n locations
cttatagagagatcataattatggtttaatcgattaccatatatttgtaattgattacacggttctttngagaccatgtctggttttgtaggtctatggtgaagaacannttttgttcttggnagcttcaaaggaaagtgagntgcaaatacac

SEQ ID NO: 60258 - DNA, 335 bp, Glycine max
  unsure (1)..(335): unsure at all n locations
gagggtgaagctanaacacatttctcactcanagatcttccacacaatcagtggcatagcttcaactaaaattttgggagagccaaaataaaattggctaacatagaagtttggctatttattatattttaggctttagatcggctccttgggcttataaatgttcatcatcgcttatgacacaaaggacattccttatgctacactgagcttgttgccgacttccaacgagacgtccccttgcgcatccaaaccccaccaaaatgttttgctggcgaacctgtagatcacccagtccggtctatgtgcttgcccctactactgatataatggtg

SEQ ID NO: 60259 - DNA, 434 bp, Glycine max
  unsure (1)..(434): unsure at all n locations
cacttaaagttntattacagctaggctatgtaacaagagctactctntctcctaccttgactntntatccatataaaaatatgaaggttnttgccgagaaggttntaatgagacctcatcctacaaatattatcaatgaagaaatatttcaacaatcacacttatgtcattatattactccttttttaatattgttccccctagaataccctctgtggctaaggttaaacttcattaatcataattagtagttccctcctgaataccctgttgaactaaggtttaacttccttaatcataattaatagttccttcctanaaactctcttcggctaaggttaaacttcataataatcataattaacagtttngaatttcaaccaacattntggccaagtgttcttctttgaacaccctttctatcttatcattaa

SEQ ID NO: 60260 - DNA, 403 bp, Glycine max
  unsure (1)..(403): unsure at all n locations
cactttaacatatacttaatacatattagaagagaaagatgggaatcaattgtactggtattaaatattatttggtatgaaaaaatagggaatttcctcccacttttattggcttacagcacttncacaatctacatgccatattttgaaacacagttggcaactaaatttgataaacttaaaattcatgcaggtgacccggatgctattgccatgattcctagaagaatggatgtcaattatctggacgataggactagtcaagacaatnnttcaacttctaaattgttgtanngcttttatgctntagacatgtcatttgtatgaacagcccnccaatatagatagactatattatantttattttttatggcaacgatgatgctctctttagatatgttc

SEQ ID NO: 60261 - DNA, 262 bp, Glycine max
  unsure (1)..(262): unsure at all n locations
gtcacctgcngcatgcaagcttctgcatgtctagagatntctagagagagatttgttatattttagacgagttcgagatnttggtgtgcgaacacctatagagaaccgagcttggaaaggaagtcgtcttgatagcatgagatgagtctgngagtgattgtcatgttctataggtgaaagagacatcctcaccgcttgtattccttcatacctttatgttttgtactctttgcggaaaagaagccttccaattatggacaac

SEQ ID NO: 60262 - DNA, 325 bp, Glycine max
  unsure (1)..(325): unsure at all n locations
tatagacataactaaataaaaaagcttacaagaataatgagtaggagaaatgccttgaataaaacttagtttggttaaggtcaatattttaatcaacacatncaggtgtatatacgtacacaccacanattacacgatcactaatctgcattcaggtaactngatagtgtaagacagtaaacaacagggaggaaatgaaagaatttcanaatttaacttcacaattcaaggcataagcacataatgaacataccaaaagtttagggttatgtgtaatgcaatagttcattagtgggtggatcagctaataattccccgaactcac

SEQ ID NO: 60263 - DNA, 360 bp, Glycine max
  unsure (1)..(360): unsure at all n locations
tatccactacctaaagttgctgagggaacatataagaatcagagctgggatcctgtacaagccacctatngccccacttatctatgtaacatgtanacacttanaccaaaactcaacaacacattacacatgcatnnatgtaagcaagcaaaacaaacaatgtaaaagaacaaaccccagtanaaaaattaatcaataacaaggtcaagaacggatgatattaccatatatcaagcagaaaacaaacatccgaaaacataatgaaatattntatgagatacataaggagccaggacaatttaatcaacaaccaagaaataccaggaaaaggctntggtcaaaagcttaagctttagatag

SEQ ID NO: 60264 - DNA, 516 bp, Glycine max
  unsure (1)..(516): unsure at all n locations
agctntctctgtcatgaccatgatcaagcacttcttctctntacatanatgacatgttattntntataccaaaattacatagnaacttcgttaccactccaattccttgcactgctattgaaatggatctacccaacatttatcctcctcaactgccttttcccaacgttntctaaagatatctaattcttggtaagaaagtctcctcacctgcaccacccacaaaacaatgttagtaacgacagaacaaaaaaaaaagcaatgttactaattgtgtggcagaaatttcccatcatccaagaatctcaaatagaaatttataatgcaagaatctcaaatatactacgccatggacagtgtcattgatcatctgaagctaattggcagagcaattagttatcgtcatttaaggtatcaagcggctggattatgaaacttgaaaagtactagtgccaattcgttggcattgcccaacatctcatngaccccattttttttctttcttataacaactgc

SEQ ID NO: 60265 - DNA, 424 bp, Glycine max
  unsure (1)..(424): unsure at all n locations
actagcttacaaacattgtgaaaaaatatcatactaagtnctttctttgtggcanatattgcaggaaatatngtgatgccatatcatgctacaatgagggccctccgcaatgatcccttggcagctgatgggctagntaatagaggcaataccgataaggagaatggtagagttagtgatgctantcaagattacatacgggcaatggctgtcagacccaccatggctgaagcccatgcntaattggcttcggcttatnaagatanggtatgctaattttagntntgcttcttggtggtgaagtccatggcataatactctcaacttaagaaaataagggaaactacattcttagccagcacaagcttgaaatataggtatnctttagtctgatattgaatttgagcctggaactaacagtctt

SEQ ID NO: 60266 - DNA, 387 bp, Glycine max
  unsure (1)..(387): unsure at all n locations
agctntgatgatatggtcttcaccgacatatggatcatagtgagtctgaanaaaaggaanatttagtcattctgctgggacgaatgagaaaacttgggcaaaataagagggtgagaatgagggacaaggccatgctgtgacttgcatttctatacagncaaagttcccaaccaaccaacaatgtcattactcagccaataacaaaccttctcctaccccaccgccagttatncacataggccatccctaaaatcaaccacatattctacctaccgcacttccaatgacaaacaccatctttagcacaaaccagatacatcaaccaagacatgattttgctgcaagaagcctgtgaattacccaattctgtacctaggcgactgctcc

SEQ ID NO: 60267 - DNA, 113 bp, Glycine max
  unsure (1)..(113): unsure at all n locations
aagcacaaccagagcaaaacctagagagagatgggcggaagagganagacaccgagnacaacacaacnnaaaagacaaaaacacaacagcagggggcccaggaagggacgaac

SEQ ID NO: 60268 - DNA, 175 bp, Glycine max
cagcataatcacatatgacactctttcttatacaggcaagcagaaacctgccaaacacatacaatacaacttctactaaaacccaaaacatcccttcgtctgattgcaaccgtggatcgactgaaatccactgaggccctagtcatacgcatatttgaccgtgggaccgctataa

SEQ ID NO: 60269 - DNA, 230 bp, Glycine max
  unsure (1)..(230): unsure at all n locations
gaaaaaaaaggagaaagaaaggaaggaaaaagcaggaaagggaagaaaggaaggagagnaggaaggggagaaaaggaaagaagagaggggagagaaaagagaaggaaaaaaaaagagagaagagaaggaggagagagagaagaggaaaaggaaggggaaggaaggaaggagagaagaggagaaggaggagaagagggcgagaaagaaggaggggggagaagaaagagaag

SEQ ID NO: 60270 - DNA, 313 bp, Glycine max
  unsure (1)..(313): unsure at all n locations
actagctggctgttattaattcctagactgacactagtgtttctttatactgagaacaaagggatcaataacagcacagattaaaaggtactaggttgcctnctagtagcgcttctttaatgtcttgagctggacgcgtgatgacttgtcggtcacggacctagtacctttgcttatctttggcttttgacttggttgcctgctggtcaccacaggtcatatgcaacgctccacctttgtagatgaactatgggtttggtgtggcgactgacgttattgctgctgcggccatcccaggctctgtgtggttatc

SEQ ID NO: 60271 - DNA, 59 bp, Glycine max
taggctacaacatagaacacaagagcacgattgattagagaaacatacttcccatgcat

SEQ ID NO: 60272 - DNA, 411 bp, Glycine max
  unsure (1)..(411): unsure at all n locations
tatgatctttcacgcaacagatacaatccaggttggaggaatcatccaaatctaagatgggcaagtccttcacaacaacaacagcctgtcccttctttccagaatgttgcttggccaagcaagccatatgttccttcttcaatgcagcaacaacaatagcaacaacagcaaagacaacaagcaaccgaggctcctnctcaaccattctgagaagagttagtgaggtaaatgaccatccagaatatgcaatttcagcaagagacaatagccttcattcagagtcagacaaatcagatggtgcatatggctactcagttgaaccaagctcagtcccaaaattctgacaaattgccttcataaactgtgtagaatccgaataatgcgagcgccatcaccttgaggtctggcagc

SEQ ID NO: 60273 - DNA, 163 bp, Glycine max
  unsure (1)..(163): unsure at all n locations
acataattatgatcactgtagcccactattatttatcagaagatctaactcatttagntaaatatgatgtatgaatacgataaatntctgatattaatgattgnttctccaggtaacaacaaaattaagctacaattattattntagaatgacaagtgattct

SEQ ID NO: 60274 - DNA, 146 bp, Glycine max
agctacttaaacaaaatggatacaactctcataaacaacataatgaattagagcagtatgccatattcctacgaacgtcacttgacaagaatattattactaagaaaatgccccacatacatcaaggcagtctcgtaccagattat

SEQ ID NO: 60275 - DNA, 141 bp, Glycine max
  unsure (1)..(141): unsure at all n locations
tccaaantagtgtaccacactaccgcagctccggccacgcatccngaaagaanggattaacaagctttcaatcttagagtgggcgcccatcttaccgcacgacatnttgagatggtttttgggaccagtccgtcctctata

SEQ ID NO: 60276 - DNA, 462 bp, Glycine max
  unsure (1)..(462): unsure at all n locations
gggtaccgtatttttctttccttatatntgttnttgtgtttgagtgtgatgcgtacacaatgtgtagcttaacattttgttcaatttccatcttctccttcacacaaatgcaacattatgttgtgggtgagttttctttaatttttctctttggggtactagagtatgttggcagcaatgacntaggcagtcaggacagtcatggttaagcaagctctatgggttacctttgggtacctactcatggatttaaatntcttccagttgagcggaaaattaccatgtggaagagactcacacttgacgaggagatngtaaagtacaagtgtgaggtgaagtctcacatcgtataggaattagaanggtcngcaccatatatgtgaagaaaaacccatangtatgaaccttangggtttggataaagtgtagtgtcaagtcatttatgtggtactcatggccttt

SEQ ID NO: 60277 - DNA, 485 bp, Glycine max
  unsure (1)..(485): unsure at all n locations
gctaccctgctatgaccttctcttgacaagatcagcagcaaaatctgcatcagtattctcagtgaggcagcaatctgagtgagatccatagatcaaacctacatctgcagtcccttntagatatctgaaaattctcttcactgctttccaatgttccttctgagggtggtttaagaacctactaaccatgctaactgcataagcaaggtcaggtctggtgcaaaccatggtatacatgagactgccaacaacacttgagtatggaacctttgacatgtagtcctgattagcttgagcatgaacctttatcacagcagacaacttctctttnntctgaaggggagtgctgatatgtttagagtcagccattccacacctcacaagtatcttctgaatgtatcctttcgagaacaaatagcctttctgagtctgccctatgattccattctaaatttcttccagccctaacttcatatcaatcccat

SEQ ID NO: 60278 - DNA, 431 bp, Glycine max
agcttgaaccataattgatgttgtaagttatttattttgttatccatacctcttgctccatatggttcttcccatttagacattcgagtgccatcaaatgctgatgttatatgaaatttaataaaacagggacaactttatggatgctataaggcatacgtatggtaaacacataaaatagccagctataaacaaactcacaattcaagaggcaactccgttgaacttgcaattgctgaaccagaatgtattctatttaactttagaagtggcaactgagacatatatttcccatagatttcacacttgttaagatagctaatcatgtcatccagagcatctaacgcaacatgcaatgctaaagaagttactacagggtcaccaaaccaaacaaattcaactttcccatctgtattcacctttatctctag

SEQ ID NO: 60279 - DNA, 339 bp, Glycine max
  unsure (1)..(339): unsure at all n locations
ccatcatatctcccaaaaccccatacccacgaaaatcaaaggagaaagaagtccacccaaacctgatatttgaagtcccactcgtagacacgcacttcacgactccgaaaatgccctcctttcgcgatttggagcagatatgatggccaaaggttggagacttgttggcaacaatggtggaggaagaatagaataaaatgctgcgtgagagagagggagagcttctgatattcttttgggctgagtgaggagagagagagagatgctccttggttntaaaaaggggtttctctttttctattatnttatntaagctatgccacatgtctccatctgagt

SEQ ID NO: 60280 - DNA, 335 bp, Glycine max
  unsure (1)..(335): unsure at all n locations
ttgataaattactacgacagcttcacatatgcagtatgaatttggttcatgatgcactgaaagatatgtgatgtaacacaatgtaatgtgtatcatgaatatcgtttattgtccgattgnagtatatgtacattgctagaacctcagatgtattntaaacttacttcaagccactatgacccctactcatgatgctctgctatattacanagggaggtagaacatgtcatgccaaaatgagtttgttggttactcgttcacaggagaaaatcccacaaagtgtgacattcccaccggatgtaccatggatgaactgaatgatttgatcaagcaag

SEQ ID NO: 60281 - DNA, 544 bp, Glycine max
  unsure (1)..(544): unsure at all n locations
aggatctatagagtcacctgcggcatgctagcttagaagataatcacatcagagttattctctatctattagtatgagaaaacgggttaaaccaattaagaacgtgaataacccatgatatatgatgtggttcctataanatatgtgatgagggaagttcgccttgtatacacatataatctacctgaaatcgactgataatgttggactcattgtatgaacgtggataaaaacattttatatttagttattttagatcttatagtattaattgttgtttcagatacgatttttatagcgacctttgacatataaaccaactaatcaatactagtattgtctaatctttctgtgcaatatatagctttcctttatattcagtctttacttatattggtcgtattctattacaatcacttcgaataagtattcttgttctcataacttgaagtcacaatatggtcttgaatatttttctctgtcaccattgactgtttatatttatattgaaccatgtaaatagatgtatcaatcctttggttac

SEQ ID NO: 60282 - DNA, 396 bp, Glycine max
  unsure (1)..(396): unsure at all n locations
tggctgctcccggattaccatttttatgtctatgtcaatntcaaagcattaaaaccctanaaaagtgaccacntattcttctacttattcgataagtaatgatacatactgcctttgccgatgataataacgcatcttgtcaaaacgtgtttgggatggaaccatgcttcttggtcacctgttcttaagtgaatcgtatataaatataaaaggaatatcataacttttgaagccaatttttttctcaaaatataatcgatcgatatccattcaataattagtattaaattaaaaacttttgattgaaagataacacttaaaaaaactcaatccgatatggaggaacttatttatatgtccaatacttatttgtaccaataaccaaacgagcagaca

SEQ ID NO: 60283 - DNA, 463 bp, Glycine max
  unsure (1)..(463): unsure at all n locations
acgcgatcttaagcaccgcggctgcaagcttatanagttctggtagcttaatttagttatcttatagtcaagcttatgaataagctcttattaaatatgtgcttaatcaagctgttcacccaaatgttgtctaattagctaatattcatttatttcatgctaccgcttcactcatgataatgtcatattgtatacttagttaanagttttttaaaaaccttctgcaaggaaaaacatagctacagccactccatggtattgtgacactcaatgatgatgaactatggaaagaaaaaagaaaacactgataaaattntcataagctgcgactcatacttttttntgtggtgtatatacctgcaacagcttctttgcaaatngagtccttgtaattaatgacacatgcactcctgatttcctacttgtctcctgctttcactgcttcagatgaaagaccaaactc

SEQ ID NO: 60284 - DNA, 407 bp, Glycine max
  unsure (1)..(407): unsure at all n locations
taagctgaattcatgcttcatcttattnctgaatagtctttttttcttttctttaatgaaaatactctctgtgtgtcgccattctccatctttatatctgaatatgttacagaacatggatgnttaataagcaatcattataatcttttgggtaattaactaattatcaatcttattcacgtgaattgtagcattttgtcctcaaagcaaaatgcaaccgctttttctttaatctccatagattgccccttctttatttatgtatttgcttttgtaatatttctgattggactgtgcttgtttgcgttttctttctattgaggccatcctaaatctggacctgtcctgataaatagttgtccaccactgatctgttggctgtccactaactgactaacatctcttta

SEQ ID NO: 60285 - DNA, 477 bp, Glycine max
  unsure (1)..(477): unsure at all n locations
tcttaagtcacctgcngctgcaagctgcataaattctcattcatgaatacattaaatttcataactccatatcatttagaattgtacaccatttatatagttttcttctacactttcaataaccgaaataatcatcgatgatggaaaggaaataccttgcccctcccaatgatggaactctcgaatgcccccaacagttgaaatgcacatagtccaacatggcctttgttgtgtgcacaacattnggaaacttcatccaatgttgtttcctatagaataaccaaacctttttcactcaggtgacctagatgcagatgccatagagaattatcaaacgaaccattggacacatggagtccttgtccacattgagagaactcataaattcttataagagggaggaagagaggataacanaatcaatgccaaatcttcatcttncatcttaacatcaatgtcacatagctccatcggaat

SEQ ID NO: 60286 - DNA, 479 bp, Glycine max
aaacagaccgttatagagatccttattttctgatttgtgggaaaatgataatctatgtgagtaaagattgctccgctttaaatataatttactatggtattggttgagggtattggctattttaattttaactaacataaattggcgttctatgttgttgcctaatttctcaactaaattgaaccaagctgagaagttgtccgactgggtgtgcactatatgattcttggtgcaagaggaatgagtgttgtgcttaaacctttcttcattattaacgttcctatctcctcccatctctggtgtctggtgggaataagccacaggtacaacatcattagatatatgatctgctctatcagatatcctattgatacattgtcactacgggattaaagcaagatcattatgtgtgtcacaaaagatcttcaagatgaaaacactggtgaatacatgtcctagttccaaacatctttattaca

SEQ ID NO: 60287 - DNA, 454 bp, Glycine max
  unsure (1)..(454): unsure at all n locations
gctaactccacaccgccacaagcagccgattctttttgttaccctataacagcctcatctcgtgtggaccccacaacttcacaagtgctntgtcgacactatcacatagctcaacagaaaaaacgacgctcccaagaccataatgcaactcatgagcatcaatgacactatcagtgaagttgcattcatcgtggatagaaagaaacatacaacaagatggtgtagaggaaagtatgtgtatgatctatatattactatgaaccttaaattaatctaaggattaataagaaattgtgcatcatacacaaaaatgttatttccccattgtaacttgagcctcatcgcactaagtgaaatagtgaatctaacanaagtaaaagtcatagatcctaacaacataaacaaataaactgctcatagtaatagccaattagagaacaacacttggtacaat

SEQ ID NO: 60288 - DNA, 417 bp, Glycine max
  unsure (1)..(417): unsure at all n locations
agatggacatataaatatagatgacaacccaaatttataggcaattatgaccaattccaaggtaaggcagaggaagggattctgaaaagtctatggtggagtgctatatgatgtcanttgtatgaagccanagctctcatcggtgaaatcataaggttgattcatagggtgtttttgatgataacaatgatgataacaaaagatgatgacaaaggtgattgacaaaagctcanagatcaatcaaagaacaactcaagtgaatcaaagatcaatcaaagaacaactcangtgaatcaagaacaattcatgagtaagagtcaagaatcaagaatcaaggttcaagatctctaaaatcaagatcaagattcangactcatgaatcaagaatcaagagaaggctttatcacgataagtatg

SEQ ID NO: 60289 - DNA, 324 bp, Glycine max
  unsure (1)..(324): unsure at all n locations
gctggattaanatnngggttcttacaggggacaagattganacagcgataaacatagcctatggtgagactgtttngaattagaacccatttttttcttctttntatgcttatgttaatctgcccaaaagtgtagcagcagntatctcattntatatcttttttccaccttgctgcagcatgccacttgataaacaatgagatgaagcaatttgttattagttcagaaactgatgcaattagagaagttgaagacagggtactgtcacttttcgctatcatgtattgctcatagttcttaagttttctgactgcaatagttgca

SEQ ID NO: 60290 - DNA, 305 bp, Glycine max
  unsure (1)..(305): unsure at all n locations
gcttagctatagacaagactaaacaaaatggatggtctgactatagatagaaaatgtcatttcagaattntataacatgataataaaataagagattatatgtaaccttccaaccaattcttatttatttttatgaacattctattattctctttatgtgaaaatgagaaattataactgtgctctgttcccctccagacatttccatacaaacataacatgccactaggggcatgtttaatcagacaagggtaagataaaaaaacaatactgaagatagacacaattattaattaacaaatctg

SEQ ID NO: 60291 - DNA, 423 bp, Glycine max
  unsure (1)..(423): unsure at all n locations
gatgttcatgttaatgtgagtcaaatatattgattatttgtgacanaatgaacaagtgctgtaacgatgtttgttttattggacgaagaacactacagcatatttagtgaatcttagctttgctaagttagtgagtntcattgtattcgagcttattgtgtaaacactctttgagtgattaagagatatatttatatcaaacatatattgttcgtgaaagccaggagtgacttagtgacaatgaatacttggatcttaatctcaggggagataatgtgcagtggcaggaggcatagagaggtactcgtgtatccataaatgacatagagaatacttgattataataaaatagattgattagagaaatccttcaatgtttgaaggagaattggatgccacccaataattgtggtgactagtata

SEQ ID NO: 60292 - DNA, 392 bp, Glycine max
  unsure (1)..(392): unsure at all n locations
tttctgtaccttcacactattcatagctttttctaaattattgttaatattgntatatgtacattgtagcttggttgcttctggttccttgagttaaattatcaatccactactatntgttctctttttaagataactttggtagactgcatgatcggagcanagaaacccctatagtaatgaagcaacttggtcgtcttttcccaaacaaagtgacaatacagctgcctcaggtgtgatgttagattaactntattatganatnntattccgtgctatatacagttcaagtatccattntaattcaacttgtacaggacgaggctatactttcttgatggaagcaacaattagaacgtgatattgaaactatganagctcagtccaatatt

SEQ ID NO: 60293 - DNA, 476 bp, Glycine max
  unsure (1)..(476): unsure at all n locations
tgtacgcttagcgcacatgcatgatacaattggcttctatgctggcttctcgngctgagcacgctgctccaattctttcatacatttccatctttctgttgatgtatccaanaactctacaaaataaaaactctgtaaaattactaactctagcattcttaagataaaaactcagaagaatctaaatttctatctttttaagtcaaaagaagcatcataagagaagaaattagataattgtatgtaatttaagtgcacaaactatgtatgcatagcaattatcatcaagatgtacgactgttacattatcaaaaggatcgttagttaaaagaatatattattatgataggggaatatctttgaaccactggttagtttattataacaaatgggaccgtggatatctggtatatggtaagatgaagaggtntgaaagcacggactggtttaatgtacatgatatcatatacttatag

SEQ ID NO: 60294 - DNA, 247 bp, Glycine max
  unsure (1)..(247): unsure at all n locations
agcttcttgaacgtgatcagtatattctttggatatattatatgatgaagacgtggctcgtgatatcttttggtgtcactctgattcattaaagttagtcaatgcatgtaatttggtggttttgatagacaacacctacaaaacaaaccggtacagactcccactgctcgattttgttggggtgacaccgactgngatgacattctctgccggttttgcatatgtggagggtgaacgcgttaataat

SEQ ID NO: 60295 - DNA, 339 bp, Glycine max
  unsure (1)..(339): unsure at all n locations
gacaatagcatcatttctggcactaaattgcttggagtttgaagcccatcttctcaattaaatttctggcttcagcaggggtcatgtctccaagggctccaccactagcagcatctatcatacttctcttcatgttactaagtccttcattaaaatattggagaagaagctgctcaaaaatctggtggtgaaggcaactggcacatagntttttacatctctcccagtattcgtataggctctctccatctgagtgcctaatgcctgaaatatcctttctgatggtcgtggtcttggaagcagggaaaattctttatatgaatactctcttgagtcata

SEQ ID NO: 60296 - DNA, 527 bp, Glycine max
  unsure (1)..(527): unsure at all n locations
tgcaagctngtngttgtctctctgtctgctccttctattccatcttcgcaatngtctatgccactattgtctcgcccttatggctcatgtccttcagaagacacttcccctgttgttcttgcgcctccatatgagcctcaatctgatgtggttcatactgttccagcaggtcactctatggtgactcgtgctaaaactggtatctacaaacctcgtcactttgtagatataactacttatcggccatcttctctttacatgcattactcaccacttatgaacctataggttntaaatctgctgccaagcatcctggctggcttgctgccatgaatgacgaactcatggccttacactccaacaagacttgngaacttgttcctcaaccacctaacactaacattgttggctccaaatangtattccacactaagtatctntctgatggctctattgatcgcttaaaacatngattggtgatanggattactcagactccgatcttgatatgatcatacatcatctat

SEQ ID NO: 60297 - DNA, 351 bp, Glycine max
  unsure (1)..(351): unsure at all n locations
cttgaatcttgaagtgttcttgattctatcttgaacatcttgaactcattctttgattgacctttgaactttttgtcttcaccttngtcatcatcttttggtatcatctttgttatcatcaaaacatctttgaatcactcttgattcaccatgaagcttngcttctacaaatagcaggagagtttcanaggctttccaaatgcatgataacatacaaagtggttgcaattcataaagctgccttcttagtatgtattatgcctatagaaggaaagtgagaaatatggtaaccaaaatatatntctagcagagagttacatgtgagaaatatgagagcataacaaaatcatg

SEQ ID NO: 60298 - DNA, 455 bp, Glycine max
  unsure (1)..(455): unsure at all n locations
gtcacctgcggcatgccaagcttgcggatttggtcttcgccagagaaaggatcgatttgttcctataagaggcannattgatcatcctactangacgactgaganaactggtgcaaatgaagagggtgagaaagatggagaaacccatgctgtgactgccattcctatacggccaagtttcccaccaaacccaacaatgtcattactcagtcaataacanacctgctccttacccaccacccagttatccacaaaggccatccctaaatcaaccacaaagcctgtctaccgcacttccaatgacgaagaccacctttagcacagaccataataaaacaccaacaaataggaattttgcagcaaaaggcctgtatggttcaccccatattccgttgtcatatgctaaacgngatcccatatccactcaataattcaatggtagccataaccccaac

SEQ ID NO: 60299 - DNA, 225 bp, Glycine max
catgatatctgaagcaaaaaaatgaaatccaagcaggatagacgtaaaacattacaaaatgatatgcatatcacaaactcactctctaggagcctcatgtcccgctaaggaaagtaaaacatcctaatgttcatcttctataatccaaagatggatatctgcctatatcggggtcaaatgatggatcagactaaccttgggaaactatgcaacaggaatttgatt

SEQ ID NO: 60300 - DNA, 196 bp, Glycine max
  unsure (1)..(196): unsure at all n locations
gctcagaggttaagaacacttcatgataacacagatgatgatctcaagaatcaaagaatgacgttaagatgttcaagattgaatcaagaacacttcaaggttcaagaggaaatttgatttcaagaatcaagattcaagggtcaagcttccaanaaatcagatcaagagtcaagtatcaagagaagacttattcaag

SEQ ID NO: 60301 - DNA, 381 bp, Glycine max
  unsure (1)..(381): unsure at all n locations
caacagaacaattatgacctctgcaataacaggtacaatctcgggtggaggaatcattataatcttagatggtcgagtccttcacaatagcagcaacaacaacaaccttattttcagaatgctgctggcccaagtagaccatacgttcctncaccaatccaacaacaaccacaacaacaacaacaacagccccagaaacaacaaacagttgagactcctccacaacctttccttgaagaacttgtgaggcaaatgactatgcataacatgcagtttcaacaagagaccagagcctctatntagagcttaactaatcagatgggacaattggctacacagttaaatcaacaacagtcccagattctaacagataccttctca

SEQ ID NO: 60302 - DNA, 365 bp, Glycine max
  unsure (1)..(365): unsure at all n locations
taacacaagagctagatatacactaatatgtgctctatataaaatgagtacaaaaagatctgtggcttataacaagcaagagatntgagactcattaagcacaaactacataggtacaaaatatgtcagacttagaaaggctggcactctaactagacatttacgagaggtctccatanaagaaggagaatttgtggatgacatgtttgagagactggcangtatcctaaacaatctatnatgcttgggacangcctataccaaggctcagatatacttgaaaggtctagacaactcttccaaggtggggaagacatcaagcacccaacatgctagagagctatagacctttcctaggatgaact

SEQ ID NO: 60303 - DNA, 74 bp, Glycine max
atgagaggcatacgactcagtctcaggaatttttgtttaaagatagaaggatggcctttgtccaaatgatagag

SEQ ID NO: 60304 - DNA, 408 bp, Glycine max
  unsure (1)..(408): unsure at all n locations
aagccttactcatgcatgatgaacaagctagctaggtatggacctcttatttttttataataaaataaaaagggcatcacttcaaagatgggtgattaacaccaccatagtaatctatatgtgaataaaggcgatttttataaaacctnctttgtaacatacatgttaaagacggttttataaaaaccgccgttaacgactttatgtagttggcattaattacaaaaataccaccgcgtcatgtattacaccacattttaaataactgatgtagataaacgcgaaagcctactcttctagnaatggattctttaattcttcgcataaaagggcatgagattagctagtcagataggataactttcccctataagtatattcacagaagatatgattattcgccatcta

SEQ ID NO: 60305 - DNA, 384 bp, Glycine max
  unsure (1)..(384): unsure at all n locations
gatcttagagcactgcagctgcagctgaatcatacccaacttttcttaccaaggagatttagaaatatctagcatcacactttcatttggtctttgaatgcgcatcaaagacctatatatatgtgactngagacancgaattgctaagaagtttcagaaccaaaaggtcttatcctctaaaaaagcaaaatcgtttatcctcttaannaatccttggccanacacttgtgattcaataagggaatatttgagtgctcanattgttcaatctatctctttcaagagagantcattcttcttctctttctaattcactnaagggataagagaccgagggtctcttgttgttaaagaatctaaacataaaggaacgattgttcttgt

SEQ ID NO: 60306 - DNA, 205 bp, Glycine max
  unsure (1)..(205): unsure at all n locations
cggggctcccgcgccgccgggggcggtaattatttcgngcgcgcccgggccgcccccccccccgggcnccgcggcccgcccggcgcggcgccgccccgcgcccgcccccccccggcccccccgccccgcccgccgccccccgcgcccgccccccccccgcccgcccgggcccgccccccccgggcgggcccgccccccccccccc

SEQ ID NO: 60307 - DNA, 67 bp, Glycine max
cctgagcaaccgaacaaccccccgcgatgcagagaaccgcatacaaccgagacccgacctcaaggcg

SEQ ID NO: 60308 - DNA, 130 bp, Glycine max
cataaccatgtggacctaattgaacattcttgaactagccaatagacagactctgatttttacaaataagctagagacattgatcatgtacggtaacttgactttagacatatggaacatataaatgctg

SEQ ID NO: 60309 - DNA, 150 bp, Glycine max
  unsure (1)..(150): unsure at all n locations
aacaaggttaaaggaagcttactnggataactgacantggatgcanagaaggaagcanggagagcaagcanagagtgagagcacagtgcagagaaaaagcaccaacgaaatgccaaaatggcagttaaaagcacaaacgaaaatgtaact

SEQ ID NO: 60310 - DNA, 215 bp, Glycine max
  unsure (1)..(215): unsure at all n locations
caaataccacaattggagagttgatcaattacacagtttatcacaanagttagtcgattaccgctaacagcacacggggtgccttgtcttgatggcataattttttattttaacccttttgacatttaatactattggctaattgcattaatcgcagtcatctcttgactctcccattccgttttttctattctatcttatccctagtcttcttg

SEQ ID NO: 60311 - DNA, 181 bp, Glycine max
  unsure (1)..(181): unsure at all n locations
ctattgtggtgggtcattntcctttggtagnacctatgcagctccaacacattaatacgcattaatgtcatatgagaaggagcagctaatcatgaagcaaccatactcccaagtgtcaagagaataagttggtatgaacttaataagtctggtcatccaacaagcggacaaagtgcatttc

SEQ ID NO: 60312 - DNA, 485 bp, Glycine max
  unsure (1)..(485): unsure at all n locations
tcgggcganggngcacaacaagtgtcccacattcacaatgcgcgcataaacccaccatcccctgttgcccacctccaactgagctcacgtactcccacgtagcccatatcctcgtttctctcaacaccgggtccccatcaatcctcccaagatgccacaacatncaagcaaaacaacattcaaacagcataagctatcacagccaagcaaaacagagcaaaggcagaaaactctgctcaacacatcaaccaatatcacagtttttctcacttaaagaccacagtaacaattcctttgatccaatatcgtaaccgttggatcgactccataattgtactggaagtctatagtgcataagcctacagtttgacccgtgtgatctactaacatacatccaaaactcattctgactactctttcacaaccaccacacacaagcatttctgaccaagcagaatctattgccctactttacagcaaattct

SEQ ID NO: 60313 - DNA, 428 bp, Glycine max
  unsure (1)..(428): unsure at all n locations
aagtcacctgccgcatgcangcttcttgcgtagccgctctgggtgctcanaattcttanattcanatccctcttattactagctagtttgaattgtttagttcctgaatgtacaaccttcaaattggtgctcgttcccctctttcttttctacaaaaaagaaaatcaaatgctatcaaaacatggatgaagtcctaagaaaatcaatatcaaagaaaacatggatgaaatcacaattaanaagcacaactacctatctttcanagtcccttgggttaattgtcttgtctccttatgtggtggngttntgtttaataatcttatacttttgctttccaaaaaaaacttatcactaatcctcttttcattaatcccaatttgtatgttattggataaaagatcatgggttctncacctgcctncactact

SEQ ID NO: 60314 - DNA, 309 bp, Glycine max
  unsure (1)..(309): unsure at all n locations
ttaattaatatggtatatctaacttcctacacctatcattttatgctattcattcaaatacgtgggacgcttgatgctctttttggcctactactgcatcttcttctatcaaccaaacagatcgctggagaatatatgacataacttcatagaggaatgtaaatgctaatcacctctattatnaanaatgggattgactaacataaacaatacaatcatagattcatagattatactggaaatacataccgatagcattttataagtgaaaattaaatactatcctttttctgcatttgtttaaactat

SEQ ID NO: 60315 - DNA, 362 bp, Glycine max
  unsure (1)..(362): unsure at all n locations
ccctgaaataacccttttgcccctcccttcggtatctntcgcattgttgatcaaaacattgaatgatcatctgtttcgcattgtaactggcgttcaacaaccgtagtcgactaacaaggatcaaaagatcaacacacgatcgtccccacaagaaattagggtatgacatagaagtttatcttttccctttgtgtatctagaaattcccattggagtgaatcctangaggttggagacatgggaacctataattgctaaattcaagaagaagctcacctcttggaagcaaaaatatatttcttttgccgaaagaattatcctaatcaatntggtactttcttcattaccctctttaattatct

SEQ ID NO: 60316 - DNA, 360 bp, Glycine max
  unsure (1)..(360): unsure at all n locations
tctttataaggctgcaaacattgatcttggattcagaagtcttcattgtttctccttaagaacacattgtttaaacccttttcttttgttgcgttttgatctacaaaatttttcaaagagtattggtggttgtntctttcaaaagcactttagtttaagaaaaaggtttgaatctcggacaaagctatactccaagactacaccatcaaacattanagcgcgtgcgtaaataaataaaaaataaaccatgcgtaattntttttttcaaaataaaacaatcatcacaacagataacataactaaggtctaagagcaataaacaaaattaagactacgttataaatttagaggatcatggtc

SEQ ID NO: 60317 - DNA, 433 bp, Glycine max
  unsure (1)..(433): unsure at all n locations
gtatttggctatattatcatgacatttgaacaatttagcatttctttatttacatggtatgtttgaacaaatatgaatcatgttatttgactatgaggatttatatatatttatctatacatgattttgcttcatgaatggattatattatccatgattggtgtgtgaatgattagatggatatgtatgcttcatacttgttacgcactatgactacttggtgatgccaaagggggagagaaatagggattatatcaagaactcacataagtaattaacttactttcaagtgaagcatacactcaaaaactaatggggagaatggtaattatgtgagtgaacgactangacaaagtgtgtatgtgtctctcttgattctagaagttgtcatcatcacaatgggggagattggagaagctagcttcatgatgaa

SEQ ID NO: 60318 - DNA, 428 bp, Glycine max
  unsure (1)..(428): unsure at all n locations
ctgcagctatttagctgctaaaactgtttgtttgattatccaacanaattcacccatttcatgaattgctgttcagaatactgcactctagttatgttggtcgataaccctttacctgcagaaagtcttggtctaattcccttggtatggcaatgtattctacttgggatttgcacaagaagaactgcanacaagatgaacatgtaatgcaagtttgacattgtaagagatacaacaaagagagacagaaagaaaaaaaagaaagaaatgtggaataagattgttgatgcgacaaagagatggagaanaacaaatgatgttagtaaaaataatgtaacaataacactaatggngaatggtctttggaatntgaagtggcctanannattgttattgctatggcttatatgctagttatggaacttagt

SEQ ID NO: 60319 - DNA, 116 bp, Glycine max
tgaaagaaggggggttaaaaaaaagaaagaggaagaataaaaaagaaggaagaaggagaaggaaaaaaaagaaaaaaaaggagaaagaaagagagaaaagaagagagaaggaggga

SEQ ID NO: 60320 - DNA, 409 bp, Glycine max
  unsure (1)..(409): unsure at all n locations
aatcaangacaangcttacaaagttgatctgcccggtgagtataatgttagttccaccttcaatgtctctgatttatctctttttgatgcagatggagaatccgattngaggacaaatccttctcaagagggagagaatgatgaggacatgaccatgagcaagggaaaggatccactttgaggacttggaggacctattgatgaagacatgaccaagagcaagggcaaggatccacttgaaagacttggaggacctatgacaagggctagagcatggaaagccaaggaagctcttcaacaagtgctgtccatactatttgaatacaagcccaagtntcaatgagaatagtccaatgttgtgagttgtatcatggcccanatggaggactaaatgacaccactttatttc

SEQ ID NO: 60321 - DNA, 385 bp, Glycine max
  unsure (1)..(385): unsure at all n locations
ctcttgggaaaggaatgctgccagtttgtaagccctaaccaaagcatacaattccttatcataagttgaatagttaagggcagcggctcctaacttttcactaaaatatgctatcggatgtccctctttgcataaaacagccccaatgcccacatttgacgcatcacactcaatntcaaatgatnttgcanaattaggcatagcaagaatgggtgcattagttaacctatgtttgagggcagcaaaggcctcttcttgtntcttaccncattngaaacccacattcttcttaacaacttcagttagaggagcagccaatgtactataatccttaacanatctcctatagaaacgtgctaaaccatgaaatcccctcacctcactc

SEQ ID NO: 60322 - DNA, 440 bp, Glycine max
  unsure (1)..(440): unsure at all n locations
cgagagtgaacaatgcactgcattaacgtgagtgaacaatacactactngtctaaagcttgtttttctttggtgcatgaacaatacactacgcatgctatnttcaagggacgcgtgcttttctttgtttctttgctgcacaagtgaactaatggcatgttctaaagcttggttttctttgctgaaaataattaattagttttgcatttttaatatcacttagctattattaatntatggcttagtggtaaattaattctggtaaattattatcctgtgtttagacaatagcgtttagtattataatttacggttacgacataaatattatcatgataaataattttttaaataatatttatgtttagaataaagtgttacgtatattaattacagctagnagataaatattatcatggaaaatactttgtattaatatat

SEQ ID NO: 60323 - DNA, 323 bp, Glycine max
  unsure (1)..(323): unsure at all n locations
ttggactctaaaatacccatagaaaacaaggtatgttaaatgtgcaactaagcagatattaatcagatccttcttaaaccatagataaagacatcttccacagcaagccagggaaggcatttcatggctaaaaatagatgccacttttctgaaaatncatgtcggtaatacacagagttctttcaagagctaggagtggaccacttatgaacaaacatgaattttcaaattatgtatgctactgacatactggagatctatgtacttacatgctactaaatggatagcagtaaataatactgctgctgtctacatgccagcta

SEQ ID NO: 60324 - DNA, 451 bp, Glycine max
  unsure (1)..(451): unsure at all n locations
aacctgaaaattgcaagcaagcagtaatgctcttagttggttgagcagggtgcgtgggtattgtaaatcccttgataccgnctatatatatatatatatatatatatatatatatatatatatatatattactctataataagcacttttcaccgagtaaaagctacatacatctctcagactaagttgctacctcaacccctgcccctgccactgtccctgtccnccaaacattatngngatttcaaaagttctcttgatttattagatcagtaatattttacattttatcactatatatatcaaactacatacatctctcanactaagttgctacttcagaacatcttcccacacaatattgaatntcaaaagtcttttgattattagatcagtacatttacatttatactattatatatatatatatatatcatcagatttaattttt

SEQ ID NO: 60325 - DNA, 418 bp, Glycine max
agcttgcttctacatttgggtcgactaattatctttcattgtcataagtcctgacagagaacaatgattgtataggtttacactcacaatagaacgcaacgtgcaacctcaaaaacttatacattctcgcgatcggaatccaatgactgagctttagagaatggcaagctcaccacgtacttatagcgaagaaccttaggaaacttgtagggcgcaatcatttactactgattgaaagcggacatgttcagtacatatttggtgatgtccctattcggtgaaggactctagtaaaaaggaaaatgagtcgccctctactgagtaaaataaatcaacattgactctactccagggtgcacttggatgaaacgacccttgaaattttgtaggaagtagtgttcggaccaatgaaagccat

SEQ ID NO: 60326 - DNA, 417 bp, Glycine max
  unsure (1)..(417): unsure at all n locations
gcaagctttacaagagaagacacacaccatgtttttggaactcgttcatctgaaccatcttcagcatttccagcaaacttgagggaatccgacgatggtgcatctgaagcacatatcatggcagacgagcaaccacaaagggttactcttgatgattactccagctctaccatgccgcaatttttcacaagcattgcgcggccgttagtccaagctcacaacatcacatatccatattccttgatcaagctgatccaaggaaatttgtttcatggtttgcccaatgaagacccttatgcacaccttgcaacatacatagaaatctacaatacagtgaatattgcaggggtgccgaaagacgcaatgaggcttagcttgttttcattctctntggccagagaagcaaagagatggatg

SEQ ID NO: 60327 - DNA, 406 bp, Glycine max
  unsure (1)..(406): unsure at all n locations
agcttcagcacttgttaagattaanatcattaccagatcacattctagcaaccgaaatctccccaagcaaaaaaataaaatcatcagaatcagcaatgatattgtaaacaaccccatattggagattatctccctggacctcgacaaattgatcgaccattaacatatgtatctactatctagttcagcacaggattatgagttctattttttttctttcatcgcataatacaaccacgcagtgaatacactgaccatgaggacgagttagcgttgggaaaacaaccctttaggaacacgaaacaaattattgagatccaagtttacatggcctttctgaaatgagtcaggagatttatcaggggtgcccttcgatcgtattctagtagcacggatcatccttatt

SEQ ID NO: 60328 - DNA, 347 bp, Glycine max
tatgctatctaacaccacagcaatgcccttacagccatgctatgctgactgtgaaaaatacaattgaaagtgcaggttcctgttgcatacaggtctgacccaacggtgatgctgtgcctgtacagtttcaaagaaagtcaaattttacctgatgtgcaaagcgagagttctgataaccagtcttcatcagctggccccatggctcgtgaaactgtataaagtaaattgcatgaattctagtgtccctgaccagtagaaacagaacttataatattgggaagaggctaaacctcttctaacctttggtgtaatttctttgagcttcttgatgacttaatcgtactctc

SEQ ID NO: 60329 - DNA, 417 bp, Glycine max
agcttgctgcaccattgatagatttacttataaattatgcattcaagtggacaccagaggcagagacaacatttgttcaattgcagaaagtcatgacttcagctccagtgttagctcttcctaatttctagttgcccttcattctggaaaccgatgcttccgcattggtattggagcagcattacatcagaatagccatccaatagcattttttccaagaaacttgaacctagagtgcaaaagaaatctgcctaatttagagagatgttagcaattgctgaagttatagctaagttcagacacaacttgctgggacacaaatttattatcagaattgatcaaaaaagcttgagatcattgatggaacaacccctacagacacctgaacaacaggagtggttacacacgtttttggga

SEQ ID NO: 60330 - DNA, 423 bp, Glycine max
acatcaacactgagctccttcattcgcgtggtatctgccatggcatgatgaaagcaccaattgaaaggaaataccagaaattatagaatgtactcattttgttcccgtactataaatgagaatcaacctctaagaatacagtgtgtacaattagaaggactgagtacaatagtctccaagagaaaaagaagaagaaaaagaaatgttcactcataactaccctcttactacaccacctctcctctctaaataccactattagttggttacataatccaccaacctagagttatggtttctctctctcacactctatctgtacccatagtggatacgtgagatttggcaatattcccctctgtgagctgctcaatgagtcatttttcttcagaagctttcttattgagacatacaactatttct

SEQ ID NO: 60331 - DNA, 421 bp, Glycine max
  unsure (1)..(421): unsure at all n locations
agcttcttatccaaggctcatcttnggggttaagctccttcttccatggcttattccctagtggatggcccctcctctcacctcttctcctttgtcttccgctgcatctccatggtggaaaatcactattaaaggacctcattgaagctcaaagatccagcctccataaaagccccacaagtaagcttccatcaataaggataaattctcgcaacctatgataagagacttgcttgtgaatcaaggggaagcaacatattttaattctgatattttctaattaaattttactcgctgcttaatttacaaaagcaaacacccccccccaatttgttactatttcctactatttgntatgaacatttgggttatcatttctcaatgagaaacgacctaggatcacttcctagatacttcattt

SEQ ID NO: 60332 - DNA, 361 bp, Glycine max
  unsure (1)..(361): unsure at all n locations
ctaagctggaccagttgccctgtaagcaggtgctcctccaattctccgtctttggagaacatctggaaggccaagtggacctggttgctattgcccccctatttactaatacacccccttcctttttatgctattctttttcgtaacggtacgaaactgtacgaatttcgagatgacacttgttntctttctgtaatattacgaaaccttacggatcacataatcatccccttttgggctttcgggatgttacggaactatacagaatgcgcactaagacttcctttcgactttcgacatgtcacggaaccacacgggttgtgcaacaatgctntcttctgacttccaacatgggacagaa

SEQ ID NO: 60333 - DNA, 419 bp, Glycine max
  unsure (1)..(419): unsure at all n locations
cgcatgcaagcttaaatatgcgggatttggtttnctttcttctctcgctnagcgaatgagctgaagcattttgcttgatgacctagagtggtgcgctcagcgaacctgacagcccatctttttctggattcttcctcgcgcttagccgctgagtgtcgcgcttagcgaatgctcgctaagccagtagattggcttagcgagaaggtgaaaacaacacttttgccaatttgcctaattaacctgaaattgagagaaattgattattaaacacacaaaacaaaagtataaattatctattacctatatttaacagaaagtacttataatattacaaaacaactataaattggagaagtttgatacaatatacacaagttttatacacaaaaagtagtcgtattcatcgactaacacatatt

SEQ ID NO: 60334 - DNA, 171 bp, Glycine max
  unsure (1)..(171): unsure at all n locations
acaatggcaggctcattctccaattcatgcaatcttgcagggncaatgactctgcttcatatnagcattanaacaaagcatagacgagttatggcaacccgaactttgtcaggcaagattcccccgaattgctacaggcagtagttgttgctttaatacatgacaatcatg

SEQ ID NO: 60335 - DNA, 413 bp, Glycine max
  unsure (1)..(413): unsure at all n locations
agcttcttgattaatatttatatatgagttttaaataagaaggaaaaaagtttcttcagaaaactaaaattaacttatgcattagttaaaatcaactttttttcaaaaagttcattttaacttatgttaagttaattgtaggttatgggagacaatttatttcatcttttttctttttattttcttttctcataagtgcttatggagaaacttatccaaacatggtcttaatgaatgacatttcgtttgattggaagacaatattagatgtacatgatctgattaaaattgggtagttaataggatggtttgcaatcaatatcctctctctcttatatatgtatgngtgtgtgtgtgtgtgtgtgtgtgtgtgttttgttgttttggatcttgaagaggtgtctacccactac

SEQ ID NO: 60336 - DNA, 418 bp, Glycine max
tttatctttatccttaatcctgaacaactattcaagttgaattcgaactgtaattatcgtttaattcgttcctaaagatagatcgcccaatctgttgctaactgcacattaatctggtaaagatttaacagatttatgtgtccagtattttcgggcaagatgtcctgtacatcgtatccgacatcgtggatcctgcagcttcaattcttcatttgacatttatcttgcctgtgcattgtgcagccaatctgattcctggactaacgtggacatcatgtgagcaactctagctctcttcattgctaaggcttatgtttacaaaatttagccatctttaagctcataagctagcctacaatcccctttgaaatttgtaaacatactaaccttctgagggtcaacgtatgcagggacacac

SEQ ID NO: 60337 - DNA, 409 bp, Glycine max
  unsure (1)..(409): unsure at all n locations
agcttanaacaatatacttggccttcattttattgtctctgggcttggcgaccatgatcaacaaagtacttttggcacctactatatgttgacttgaccaacgatgttattggaatgctgcgacaatctttcaacaccttattcacacattctgataggttggttgtcatgtgaccatatcttcgtccagatgtatcgtaagtcatgctccatttttcctttgaaatgtgatcaatccatgttgctatggctggactcaattgacgaaatttttctaagttttgatcaaacacatgtttgcaaggagtgtacgctgcatcaaatttgttaccatcaaaagttgtaggtagatatgaaactcacattaacttaatgtataaaataaaccttacccaatttcttgaacatc

SEQ ID NO: 60338 - DNA, 440 bp, Glycine max
  unsure (1)..(440): unsure at all n locations
gcctaataaaggccttagtgatccacattgtgcatgtatgatagcattgactaagttgatgtacaaagctaagaaatttactattcagttgttataattgaaacacttttatcgagacacttatgagattgagagaaacactatccttgtgaagactgaagttggtgagtattccttgtgggatttgtcattattgttaaccatttcattngaagtacatattggtctactcctttcaagaacttatgaaagttgtggacttgagaattagccgatgaagacttttagaatatatgcagttatctcatgaattgtgatcggtatactgtgaactttntcttttttcttaaggacaagcanagctctaaatttgggagagtcgatatatgctattatgagtatttttgggatcaattatatacgaatgtggattcttctct

SEQ ID NO: 60339 - DNA, 409 bp, Glycine max
agcttgaaacctcaattcctctaatttatgaagttggagcttcctgtgttcaccagctgcatttagatcaaaattcaaaaacttcaatgcttaataagctttgtgtttcaactcaacaggtaagtgacaagatttgccatagaccaattagaagggagttcctcttataagagctttgtatgttgttctatatgcccacagagcttcatctaatttttgagaccaatccttccttaaatgagcaactgttttcttcaggatcttcttgacttcattgttagaaattccagcttgcccattggtctggggatggtaaggtgaggctaccttgtgtctaacactatagtgttggagaacttgagttagacgttacaaaaatgagatcctccatcacttattagtacccttg

SEQ ID NO: 60340 - DNA, 378 bp, Glycine max
  unsure (1)..(378): unsure at all n locations
atgttcttatttctggactganccatttgcttccaaagtttcatggccttgcaagtgaagacccacacaaacacctaaaagaattccatatattttgctccaccatgaaaccaccagatgtccaggaggatcacatatttctaaagtcctttcctcattatttagagggagtggcaaaggactagttatattaccttgctgcaaggtccatcacgagttgtgatgacctcaagagagtattcttcaaaaaaaatgtccctgcttccaggaccacgaccatcagaaaggatatttcatgtattatacaactcagtggngagagcctatatgaatactgtgagagaattaaaaactatgtgccagttgccctcaccatca

SEQ ID NO: 60341 - DNA, 413 bp, Glycine max
  unsure (1)..(413): unsure at all n locations
agcttcctcgggccatttcctttattttaacatttggaaanttanttttaccaagaaatgctactcttaaaacgaaaatggcatacaacctcctccaataaacacaaacatcaatgtaaatttagagcaaactcatgcacatacttccttacgaacattcactcgcacaagatattcttctaactaagaaaaatgcacccatgctcaatcaaggcaccttcgttacctagatcacttatatgtactcccaaagtgtatttgctacctacatcacatgcattttctttgctaaatttacatacatgcatactcaaagcactttggctaccaaaaagtgcatacgtgcacattctggtatttctaatacctatacatacacaaacttcgtgatgaatcttggctatctacacaat

SEQ ID NO: 60342 - DNA, 285 bp, Glycine max
aatatactactaactgcttgtttttccacctccccgacaaaacagaaagcattccaccagaaagaaaggaattcatcagagagcaaaaagaaaagaaattcctcagaaaagaggaggaatccccaaagggggagacaagagaaatagaaaagctctacagtaaaaaaaaaatatcgaagtttacacaactaacttcgatgcccatgacacaaagaagaactactagtacttctcatacacaaatggctgatgtgctccaacaacaaagaagcaacccaacgcaca

SEQ ID NO: 60343 - DNA, 397 bp, Glycine max
  unsure (1)..(397): unsure at all n locations
agcttgaagtgagatagcgtgtaagagtcagtcttcctactnttgtttgttgaccacagagtggtacctggagatatgtcgtgggggtcatgagaccttggggacgtcaggtggggtgctatagcccaaaaccaagcttgatcaatcccgacccaacctgtgcatagtcagtcagtgagaacctgtgacgtacctaaacaggcgagctcctggcagtcaaccaataaaagaacaaagaccacaaagcanggaggcttgtgtggtggctggccagctatggatcttgagtggnatctggattttggcctctggtaatcggttaccaagggtgtgtaatcgattacaacgcttataaatggagacaggaagttgagatggcctcttgtaatcgattacc

SEQ ID NO: 60344 - DNA, 405 bp, Glycine max
  unsure (1)..(405): unsure at all n locations
agcttggccaaaaatgaaccctactcgatttaaaccacatattaaccctagctgaggtcaaccactaaccctagttgaggtcaagcaaaaatagtctagtcgagtggctaaaaataaccttgattgaggttagctaaaaatagccttggtcgaggtcatttgaaattagtcttactcgagtcgaccgaaaataaccttggtcgactntgtccaaaaatagtcctgaccgaggtcaaccgaaaatagttatggtcaaggacgacccaaaataattctggtcaagctcggtcganaaataactctagttgaggttgatcgaaagaggtcggccgaaaattgaccctaattgagatcaactgaaaattaaccctacctgaggtcaagagaaatcagtttggccgaagt

SEQ ID NO: 60345 - DNA, 411 bp, Glycine max
  unsure (1)..(411): unsure at all n locations
actcagctttaaaccgtaagggttacattatgctcngtgcgtatatgccggtgcgttcctncactcgccaatttcccagctggaaatcaggagggcatggtcgtaccaaatccaatgtactcggaacatcatcttcgtatatcgcgaccacttgaccttcgtctcccagacccgcgcttataaagcttctacttatgtggcagggcgggcttccttcactttcttgtctccaacgcgagctntgaccactgctcttccttctcgtgatgcttcttttcatatccgcctgagtgggcttatagcctanaccatacttcccacgatttcctttggcatttatcaggctagttatgccgccgttgtctttgcctaaacccattccgggttcgtaacccgtccccaacataactc

SEQ ID NO: 60346 - DNA, 413 bp, Glycine max
  unsure (1)..(413): unsure at all n locations
agcttctagccaaatggacttaccatgaattaatttatttgatagcccctttgagcctatgttcccctttctttgttttgaagctcattacaagccttaagtgaaaaaccatgatatcaccttacccttaaggaatattggagctttgaaattgttttgggaataagtgtgtgtgtggtggggggggctatgtttcattggaagatatgatttttggccatgcttaatgttttattttggccatgcttgatgaatatatatattgcctagttcttgctttaatcttcaatttcgtactgttcaatctaaaaaaaacaagtaaaaaaaaattcagtttctgcacattcttcaatttcgtactgttcaataaaaaaagaagaagaanagaagtgaagttgaataaatgaggtctt

SEQ ID NO: 60347 - DNA, 357 bp, Glycine max
ctcagctgggcgaggactacccgtgagacctagacgatgagacaatgataacgtcaagaacggccgaaaccttcgcgagatactcctgaaacgtacggagcgcctcgcttggatttcttcacgggaccaatttttaatgcaattcgaaagagagagaagtgcctcaggggctgaacccttcttcacttcacttctcccctattatagaaaattggggagaagcttgcacccactcgccagcagcaggtgcttctcagaacaacagcctttggagaattttgggggccaatggctggtgtattgaccctatttatagacaccctgctttgttggatctttttcgaaagtacggaacta

SEQ ID NO: 60348 - DNA, 436 bp, Glycine max
cgtcaactgcacgcatgcaagcttactaaggcacctgttctagctcttcctgacttttgtaaaactttcgagctagaatgtgatgcctctggagtgggagttagagctgtattgttacaaggtgggcaccctattgcttattttagtgaaaaacttcatagtgccaccctcaactaccaaacttgggaacattactttgtttccaaggaatttgtcattcatagtgattatcaatcacttaagtacattagagggcaaagcaagtttaaaaaaggcatgcaaaatgggtagagtacctaaatcaatttccatatgttatcaaatacaaaaaaggaaaaacaaatgtggtagatgatgccctctctaggagacacacattgttttgctccctacgagctcaaattctatgatttgataatattagggacttgtatgc

SEQ ID NO: 60349 - DNA, 451 bp, Glycine max
  unsure (1)..(451): unsure at all n locations
actaagctntgaatccagtccaactctctttaaatctgattcaggcttaaatatgtggccctgnttgngctcgtgcgcttagcgcaccaatggaccacttagcgcacgttagtggattttggcttatcgcaccttntttgtttagcgtgcctttctggcttatcggatgaactaaagcagtgcgcttagagagatgaagcagtgtgcttagcgaacctgtacaactgatcttcttctggattctcctcacgcttagcccangaatgttgcgcttagcggatgctcgctaagccagcagattggcttatcaagaaggtgaaaacagccttttccanagctggcctaattaacctaaaatggagagaaaatggatattacctatatacttaacagaaaatacttataacattacangataactattaaatgggagagtttgatacaatttata

SEQ ID NO: 60350 - DNA, 415 bp, Glycine max
  unsure (1)..(415): unsure at all n locations
agcttgagatgaggaagtgttgaagggtgttactttctgctnttattgntgaccacagagtggtacctggagatatgtcgcgggggtcaggagaccttggggacgtcaggtggggtgctattgcccaaaaccaagcttgaccaatcccgacccaacccgggcatagtcggtcagtgagaacctgtgatgtacctaaacaggcgagctcctggcagtcaacaaataaaaggaacaaagaccacaaagcaaggaggcttgtggtggctggccagctgtgaactttgattgatatgtgggttatggcctctggtaattgattaccaagggtaggtaatcgattacaaggcttaaaattgaagacatgaggctaagatggtctctggtaatcgaataccacggggtgttatcgactacc

SEQ ID NO: 60351 - DNA, 381 bp, Glycine max
agcttgcctcaaagagatccgggaaggactaagctgttgaaggaaccagttccgctcccgaatatgacagccatcatttttggagcgctgagcaccagcagcgcttcgaggccatcaaaggatggtcattcctccgggaaagacgcgtccagctcagggacgacgagtatactgacttccaggaagagatagttcgccggcggtgggcatcgctggttacccccatggccaaattcgacccagatatagtcctcgacttttatgccaatgcttggtctacagaggagggtgtgcgagatatgcgatcttgggtaaggggtcagtggatcccttttgatgcggatgccctcaaccagttcctgggatacccattagtgctgg

SEQ ID NO: 60352 - DNA, 185 bp, Glycine max
atgattctgagtcataagccttttcgaaactacttaaagactatgacgactttgtgccctctacatctcgacacctatttgaattacacctatgagccatgccttctttaggatgcgatagctttctcttgatgaaagatgacttctcatctatggccagacttgcctatatgatatgcaactat

SEQ ID NO: 60353 - DNA, 407 bp, Glycine max
agctttattcaagacaaagaaattaaagatattcttatggatgatcaagacagtctctagagtcttagaaagggtatattaaataggaagggaattccaattgaagtagcaaaaggtttggccaagaattttaaattaaaaagtctttttcaacaaatttactctctggtaatcgattaccagaggatgtaatcgattaccagtggccaaaactgatttacaacagctattaaaatttgaattcaaagtttgcactatgtaatcgattacacatatatagtaatcgattaccagtagtttctgaacgtttgaattcaaattttaaagcttgtaatcgattacacatatactgtaatcgattactagaagagagtttcaaaaaacattctcaacagtcaaatcttttt

SEQ ID NO: 60354 - DNA, 415 bp, Glycine max
  unsure (1)..(415): unsure at all n locations
taaaaaattatgtgaattttatatgcattttttatgtccaccaaaaaaagcttttcttccaaatgatgtgtccataacagccctcagttggtgccttccgccaaggatatttatggtctacatcataaaaaaaataaaactaatgtactttatgatattattgaataagtaatttaaaaatattttattataaaatagaactttgctatccacaataattttgagtatgagtgtcttcgtaaatgataatttttggctctatgaaaactaaaattggttaattcatgatattatngtttctaaatngattttttcacacaaaataatctcgagtaggattatcgctcgcgaataaatatttgtaatcttatctataaaaaaataaaacctaattaattacgatattattcataaa

SEQ ID NO: 60355 - DNA, 411 bp, Glycine max
  unsure (1)..(411): unsure at all n locations
agcttgccacccagctcgcccaggcgagctatgttgcttcctccagaagcaaccgccttctggaaggcgcaagtgggcctggttgctatttgaacccccatttttactaagtacacccctacctttttttggtgattctttttccgtaacgttacgaaactttacgaatttcgtaacgatgcttgttttctttccgtaatgttacgaaaccttatggactacgtaaacaacccctttttggttttcgggatgtcacggaactttatggattgcctaacgatgggtgccaagtacctcgaagtggtcaaacgaaagttgcatcccaacaacggatggtccccgaacgaaattagggtatgacagnttcccctctttacttgtcttttattggagataaaagggaagtaaaga

SEQ ID NO: 60356 - DNA, 326 bp, Glycine max
  unsure (1)..(326): unsure at all n locations
tttaacttcccctaacaatgaataaagatgttaacataatatgagcttaagtgaggatacaaaaaagaagacctataaanatacagcatgttgtaaataaaaaataagaaagatagtggagaacagatgaaagatctaaagataataatgaatgctgacaaaagatacgatcagaaaataaaagattaagataaagatagataagataagaacactacnaataagatgaataaaagataagttatcagaatctgataatgtttgaacctagtctacctacgatgtatgtgtaatgacncgccctcgtcgtatgatatcaccactct

SEQ ID NO: 60357 - DNA, 415 bp, Glycine max
agcttctttgagaaaacttcattgagaagttagagcttatctacacatacccctctcataactaagctcacctccttgagaagcttccttaagaagattcctaaagaagctaaagcttagctacacacacctctctaatagctaagttcacctcatttagatgagaagctagagcttagctacacaccccctataatagctaagctcacccatatgccaaaaaacatgaaaatacaaaaaaagtccctactacaaagactactcaaaatgccccgaaatacaaggctaaaaccctatactactagaatggccaaaatacaaggccaaaacaaaggaaaaacctattctaatatttacaaagataagcgagctcatacttagcccatggactcgaaatctaccataaggctcatga

SEQ ID NO: 60358 - DNA, 414 bp, Glycine max
agcttgccacccagctcgcccaggcgagctatgttgcttcctcctgaagcaaccgccttctggaggaattttctaaaaagcccaagtgggtctggttgctatttgcacccccatttttactaaatactccccttgctcttttttggtgattctttttccgtaacgttatgaaactttacgaatttcgtaacgatgattgttttctttccgtaatgtagcaaaaccttacggattacgtaatcatcccctttttaccttccggagcgttacagaactttacggattgcgcactaacacttccttttaatttctggcatgtcacagaacttcacgaattgtgctacaatactttcttttgactttcggcatgtcacagaacttcacgaactgtctagcgatgggtgccaagtacct

SEQ ID NO: 60359 - DNA, 341 bp, Glycine max
  unsure (1)..(341): unsure at all n locations
atcatttctggcgctaaactgctgagaggtggaggccatcttttcaattaaattctggcttcaacaagagtcatgtctccaagggctccaccactggcagcatctatcatacttctctccatattactgagtccttcataaaaatgttggagaagaagctgttctgaaatctgatggtgagggcaactggcacataatttcttaaatcgctcccagtactcatacaggctctctccactgagttgtctaatacctgagatatctttcctgatggctgtggtcctggaagcagggaaaaaaatttctaagaatactctcttaaggtcatcccanctcgtgat

SEQ ID NO: 60360 - DNA, 413 bp, Glycine max
agcttctatagaggtttttgtggattgcttgtctcatcataccagtaataccttcacctacaatattgaatagtaagggagctaggggatccccttgtctcaaaccccttgtagggagaaattccttagaagggctgccattaatcaaaattcatatagatgctgagtggaggcaagctgatatccagaccagatatcacttgtctcaatctatttgctaataacttagctatcaccttgtacatacatccaatcaaggagattggtctgtagtcatcaaatgactgggggtgtttggttttgggaattagagctatgaaagaagcattactgcctctagggaagctgccatgcacatggaattcatctacaaatcttctgaagtcagttttcatcatttcccaaaattcttt

SEQ ID NO: 60361 - DNA, 396 bp, Glycine max
  unsure (1)..(396): unsure at all n locations
attatttatatatatatatgtatatatctgtctatatatttctatgtatgnagagatatacacatatattccttcgccggccaaaataagtaaaaatattttgagccttgtgcgcgagattctagagggtgattgaagaaaagatcattgaaacaggtgtagcatttgttgctagagaaatgattatttggactcaccaggttcactagagcagacttggctgtaactgtttcagacaagctcaaattaagtgcatttttcattatcaacatgatatgaagcacatgatcaaatctttcagttgttattatagtacagagattagtttcacatgagaggatgtctttntaatataaccaatgatgtttattagatatatggtgcacagtttaatta

SEQ ID NO: 60362 - DNA, 412 bp, Glycine max
  unsure (1)..(412): unsure at all n locations
agcttcccactaagagggcaaggttatgattctcgctagagaaggttctagtgcagcccacaggtgaatgtggaatttgatggacatcggttctggagtaaggaacaccagtgccaatttgaggcaattaagggttggtcgttcctcaagtagaggcgggtccagttgagggaaagggagtatgctgaagtctatgaggaaattgccaggaggaaatagactcaacttgcggcacccatggctaagtatgatccaaaaatagtcatggagttctatgctaatgcattgcccacagaggagggagtcagagacaagcgctcctgngtgaggggccaatggatcccctttgatgaggatgccattaatcaattcccggngcatccattggtcttagaggagggccaacgctgcg

SEQ ID NO: 60363 - DNA, 399 bp, Glycine max
  unsure (1)..(399): unsure at all n locations
agctttgaatggcaatgattttatacgatttacagacaactccatgtgctntttgacctttgtgaaagtgaccttccaggggatattccacggaggccttctagtctcttctatattgtacttttcttgaattcaaatgttagctattcaaacgtaatagagacaaatggaatttgaataaaacagtacatgtgcactttccttttctgtgatacccagtccttgagagactagacacatgaatttatcgtatgacagtgtgttatattgttatgaacaagactagatgcttactaaataaagagagctgaacactagattaaaatagagcatactctatctagttgtgggcgatattcctttaacataataatcttgtccactagtcaaaaacacaat

SEQ ID NO: 60364 - DNA, 404 bp, Glycine max
agctttctcaaatacttacataagtatgtatgccataagataagttgtaaataaaatcttccaaatgcactaatttcaatggtttgctgttgtgttttctcagtacattgaaggtccaactttctgacaccacactgggaactataagtcccatgaagtcccatcaggcaccataagtgaaatgtaaactccaatgtgagtttttcagctattccttgacccttgtgtgggattgggattgaatttccactctccttggacatgttgcatggtttatgattctctgtgtgggtatgctcatcacctgactctgcttctatttcaccactctttgcagctttatcacccttaagctctgaacacctttgaacagatagtatatagtgccaaaggaaagcatattg

SEQ ID NO: 60365 - DNA, 388 bp, Glycine max
  unsure (1)..(388): unsure at all n locations
taatgctccgtttcatattatcgntagntctatcattcatagctattgctgcggngaaactaccgccanatattaccattcctgcagtgatagctttcggagattccatcggtgacccgggcaacaacaacaagggtaaaacactggtcaagtgcgaattccctccttacggtaaagattttgagggagggatcccaaccggtcgattttgcaacgggaaaattccatcacatttgctaggtactatcttcccttttgtgttgcatttactaattatctganatgctgttaactaagtctttagttgggaaaaagagattttattttttacattcaaaagaaagagaacgcgttaattctttntctcttttttttgaaattactgcta

SEQ ID NO: 60366 - DNA, 416 bp, Glycine max
agcttgcttatctcttcaggatgatcaacacagtattgcatatgttccctcaactttggcctgtgcaaagagcttaacacattagctaaactaacaatttaaatccactagcttaaactttacaagcttagaacagaaacttagtacccaaattccttgttaaggctgtttgcaggagctgtggcagcctttccaccaccatattttgacacaaattcatctttgacacgctctagaaaagccatgggtaactgtcttccaattgattcatctgcaacaacacaatatgctgcaaatttccaaaagttcgatatttcagaacactaccaaactcaaaaaaaatttacggttcacctctacaaaagcagtatcagttgataaaattataacttaaaagaaaaccaataaatacttag

SEQ ID NO: 60367 - DNA, 312 bp, Glycine max
  unsure (1)..(312): unsure at all n locations
tcaattagacacaaggaatgttatattgaaaagtggaaagtgtacaaccatccctttgttactcaccactaactgctgttcttgcatatatttgaacgaaaatgctcatatatattgaaggatctaatgtgcgtttatattgngactaaactgcacaaccacaataaaaaaagacccactctaagtatctgtggggcttaatctcatctattaaatatttggtaatatatcaaattcttaatggcatattntaccatccaactatcattattntatgatgtgaccacttaattttctacanatttatcactc

SEQ ID NO: 60368 - DNA, 412 bp, Glycine max
  unsure (1)..(412): unsure at all n locations
agcttggacatgttaggccttnngtaaggctcttcttactttttacataattatgatcactttagcccactattatttatcaaaagatttaactcatttagttaaatatgatgtatgaatacgataaatttctgatattatgatttgtttctccaggtaaaaaaaaaattaagctacaattattattttagaatgacaagtgattttgaactcgagttctgaatgtataattatttaaaatatttataataaaaaatttattacctataataataatcttatttaactaattttctcttaaaaaatacatgtaatttgtagtcaaaaaagttaatatctacaatagtttaggaaacaacttctttccaacaacaaatttggaaaagtacataaatttctaatatagcctata

SEQ ID NO: 60369 - DNA, 287 bp, Glycine max
  unsure (1)..(287): unsure at all n locations
gcttgagacactgctcttatanacaatggatgactcacagaagactgatgttatagagaaacgacaaacctggtttaaccaattctactgtattatccttgataccatttcaaagtgtcgaatataatgtataactgagaatagttactgaagtagtaaatcatccatttgtcctaccaactaaacttcacaatagagtgtgtcgttgcctttcctggtgtatcaaatcaactatccttcaccactgacaaattatctgtctcacttctctcccactcatccctata

SEQ ID NO: 60370 - DNA, 414 bp, Glycine max
  unsure (1)..(414): unsure at all n locations
agcttgaggataattagctgcgacaactttgtaaggtattgcatactttgtcgnaggagcccacgtgcggtgcttttggcggttgacgcaaacctcatctcatgaataattctactagtaatttcgatatgtcgcagttttcaaagagatacgttattctttttagacaatgcaatattgaatattagtgtttagtagcactatgttttattctttttagacaatgcaatgtgaagtgaaattgtgattgaatattagtgtttagtagcactacgttttaacacgtttcattttcacgtgtgttctagtaagtgatgttttcttaagattttagtgaagcaagattttccgtcgctaacttttactttatctacatgcataaacaaatgtgagctaacgtcactgagacccgag

SEQ ID NO: 60371 - DNA, 387 bp, Glycine max
agcttgcagacacatttgacgatctaattttttattttttagatatacaagctagaattagagcggaaacgtctagaagaggatgtttttgtttataactcgcttcaacaacagcttaaactgtcaccagcctaccagaaggtatacacttaatttgaagcctttataggaggattaataagcatcttccctttaattttattgcaaaaatatgttgatgttatttaaattacaatgcaaacactacttgctcatacgggtctaggatttcttgtgacttgatctttatctgatcacgaaactatacttgcattgactcacattttctacgacatgcttattttttttacctccctacaaagatgcgtgggactggatcttgaattg

SEQ ID NO: 60372 - DNA, 424 bp, Glycine max
  unsure (1)..(424): unsure at all n locations
ctaagcttgacggctgaatctctttactgcaagcgctaccagacttatatgtattcctcattaaganctctacgngacctcttcctgcgtggttgctcaagactcaggagttttcaggacttcatagaatatgaaagacctaattctaacttccactgctatcaacgaggttgcctcatctaatgggagtctaagagaactagaaacacttgacacttgattcactgcaaagccttagctatctttcaaacaatgttgccaacctaagatcacttcgacagtctcatatctatggctgcacacaccttgatgcatcatatcttcatatcctacataatggtttaaagtcttcggaaacactgaagttggaagaatgccggaactcgttagaaattcacacaacatcaaacctctatcattattg

SEQ ID NO: 60373 - DNA, 359 bp, Glycine max
aaactaaaaaatgctcactacttcatcccaagctacctttttcaactatggcattaaatggggtaaatcaacatattttggcactcaaaaaaaggaaagcataaggaaaaaaaagaaactaatggaggggaattattgcccccaaataaaaaaggacttggtagggaagatattgaccgagcatgatcatcttcaacccttactcaaaaatgtaatttccttagagggtaatcatagttaaatgaaaagtacaattcttataaggtaatcacacacagatgcctgatatattttgtcactgcataatacaagaaaatatgcatttatgtaaagaccaaaattgctcataccatcttcaa

SEQ ID NO: 60374 - DNA, 377 bp, Glycine max
  unsure (1)..(377): unsure at all n locations
agctntataagcgcgggtctggnggacgatatgtaagtggtcgcgatatacgaagatgatgttccgagtacattggatttggtacgaccatgccctcctggtttccagctgggaaattggcgagtggaggaatgccccggcgtttacgcaacgagcataatgtaaacctttacggttttaaaagctctatagttgggcctaggctttagagtttttcttttgttaaggctttgtgtctttttgtttttgaatttataatacaaggatctttcttcatctgttcctacgtctctacccattctcatccatttgcatgtttacttctttatttctgaaacggtagatccgatgacgagtcccccgaaggtactaatacc

SEQ ID NO: 60375 - DNA, 317 bp, Glycine max
  unsure (1)..(317): unsure at all n locations
acttctagctaactgcttgaccagtgatccacttgattctcaaggnttttcaggctgacttaatacttctatggttggacatggtcacttgcatgaattgaagccagagtttcttatagtttggtagtcctctgaaaatatatgccttgtgagcggctgtggaaagccaccctggtcttattgaattgattaccagcggtgtgatttccattgtccttgcagattgtagggaccttgctggaaacctgagaatgctccttggttgtatccttngcctttgtngatttcccatgtaactaactatctgcgtttggtct

SEQ ID NO: 60376 - DNA, 356 bp, Glycine max
  unsure (1)..(356): unsure at all n locations
agcttgaagatagagacttcccaagctatttatcttctctctcaaagaggctctctaactntctaactttctcactccaaggaggggattcactcttgtctcttggatcgactcactctacgggggctcactcaagcttgaggatagagactttccaagctatttatctactctcttaaagaagctctctacttggatggttaggaatgaaggcttctacccttatatatactactccacctccacaatgaagggtggagattacttgtatcttatggtggagattaattctctagaatgctccacacattctaggagtctctacactcttctactccctttcatatccttccata

SEQ ID NO: 60377 - DNA, 348 bp, Glycine max
tgagctgagctgctattcttattactccttacaaacaatgatctttgaacaacgaccttcacttcttggagaactggatcactcatatgcgataactagttgaccctttgtaaatcaaaacaagtctttgctgcatcacaatgctgcttcatctgggatcacctatagaacattctggcctcatccttcgttggtgatgacaactgcatagcaaaaactcggaacattgctgagtatacccattccttgtattttgcacaagtaaacttatggaccttatcacaacctaagtactctcgatcaatatctataatgagggagcttcttatctgctccacttgagacatg

SEQ ID NO: 60378 - DNA, 416 bp, Glycine max
  unsure (1)..(416): unsure at all n locations
agcttgtaggattatggggtacctatcatatgtggtactaggtggcggncgggcgatggtgcacaacaagtttttccacatccacaatgcgcgcataaacccaccatcccctgttgcccacctccagctgagctcacgtactcccacgtagcccatatcctcgtttctctcaacaccgggtccccatcaatcctcccaagcttccacaacatccaagcaaaacaacattcacacagcacaagctatcacagccaagcaaaacagagcaaaggcagaaaactctgccaaaacaccaaccaaaaatcacagcttttcccactcaaagaccccagtaacaatttccttcgatccaattcgttaaccgttggatcgacctccaaattttactggaagtctatagtgcatacgcctacatt

SEQ ID NO: 60379 - DNA, 432 bp, Glycine max
  unsure (1)..(432): unsure at all n locations
cgatggagcaagtcaactctccacatccacagatcacacataaacccaccatccccagttgcccaccttcactgagctcacgtactcccacgtagcccttatcctcgttcctctcaacactgggtccccatcaatctattcaagcttccacaacatccaagcaattcaacaccccaaacatcatgaactctcaaaaccaaggaaaacagggcagaggcagaatactctgcccaacacaaaccaatatcacagcttttctcacttatataccccagtaacattgtctttgctccaattcgttaaccgttggatcgactcgtaaaatntactggaagtctctagcacataagtctacattgtgaccgctgggatctgctagaaaacgttcagaacccaatctgtactactctnttcacaaccagcagatacaca

SEQ ID NO: 60380 - DNA, 408 bp, Glycine max
agcttgttaaagaactgaggaaatatcattatcaagcttgtacgcacatcgttcgcgtgtatgatatccactccacaaggtttgaagtagaggagagctccaaccctataacgcaacgtggcagacaaaagtgggcagttaacttgaatggtcatcattgtcaatgcggaaggtattcagcgcttcactatccatgttcacacattattgcagcttgtggttacgtgagcatgaactactaccaatatatagatgttgtttatacaaacgagcacatcttaaaagcttactccgcacaatggtggcctcttgggaatgaagcggctattcctccttctgatgacgcatggacacttatctctgacccaactacaattcgttcgaaaggtcgaccacaatcaacaagga

SEQ ID NO: 60381 - DNA, 387 bp, Glycine max
  unsure (1)..(387): unsure at all n locations
gtcgccgcgatatgctatgatgactccncgaggagatcggatntggtacggccatgtcctcctggttntcgactaggagaatggcgagtcaaggagcgcccagacgtttacgcgacaagcataatgtaaccctttgtagctttaaaactctacgattgggcctacgctgtagagtttccttttgttaaggcattatgtcttttgttcctaaatttataatataaagatctttcttcatctattcctacgcctctacccattctcattcattttcatgtttatttctttacgcttaanatgccagatccgacgatgagtccctcgaaggtactaatacccaagacccgaccatcaatttcaagcaagaagcgggtcggatggagtgtg

SEQ ID NO: 60382 - DNA, 417 bp, Glycine max
  unsure (1)..(417): unsure at all n locations
agctntttcttaagctnttgctattacctttttctccccctttggcaacatcaaaaagccaaagaactcggaaatcaacacagttataacaatggagtagcaagatataagtatcagagtattaaatgcaataagccaaactcataatcaagaaaataatcagaccagaattcaaataacataaaatgtcaacaatcacaaaatatccaagaccgaaacacaagaaaaataagcaaagtacttagcataataatgtaaattctaagaaactaaaagccaaaatacacggcttataaaagataaataagcagaatctaaaatctaagaagacggaggaggtggtggaagatcaaaactctgacgaatgtatccgacatcctcttcaagctgtgtaagacgaatgtccataccggcaaa

SEQ ID NO: 60383 - DNA, 336 bp, Glycine max
agctttgagccaattctaattattataacttcttaccccggagcgcggaaggagtcccgtttataatcccccgctcgaaaatggatgttgaatctcttgacccacttccaacaacgagaatcttttactccgatgtgcgatttaatgacgtaatatatcgggacgctcataaatgaatgttgaacctctgagccaaatcaaacgacaataactcttactcagatgtatgattgagtccctgaatataacgagacgctcgaaattgattgtgaaactctgagccaattaaagcgccataactttttactccgctgtccgaatgagccccgttttata

SEQ ID NO: 60384 - DNA, 215 bp, Glycine max
tcagaaaagtatgtcttgattggtcaagtcaacttcattctacgctgtatatacgactaatatacatcatataagttgtcgtgaatgctaaggtcacattcaattcgagcgtccgttatacgggctcatcaacatcggaaaagtctgcattgattggctcaagttacattaattcagcgttcgttaaacagactcatggactccagcaaagtatg

SEQ ID NO: 60385 - DNA, 408 bp, Glycine max
  unsure (1)..(408): unsure at all n locations
agctggggcgcttgttcccatccagaggtttaccccccaagctacggctccaaccccaactcgctcggccggcaatgcccactttggcaccggttccaacgtgataaggaactttcccccgaggacaacatttaccctgatcccaatgacatatgatgacctcttggcatccctcattgccaaccagatggttgtgatatctcccggaaagatctactagcctcctttcccaaagtggtacaatcctgacgcaacctgcgtataccttgcgaaaaccccgggccactccaccaaacagtgcctggcctttaaacataatgtccanagtttgatagaagccggatggctgacgcttcaagaggaccagcccaacgtanaaacaaactcgcttgccatcatggagggggg

SEQ ID NO: 60386 - DNA, 469 bp, Glycine max
  unsure (1)..(469): unsure at all n locations
cactttcttgtcctctcgcgagcttngaccactgttcttncttcccgcgatgcttcttttcatgtccgcctgagtgggcttataacctaaaccatacttccacggtttccttgagtatttatcaggctagttatgccggccgtgtctctgcctagacccatcccgggttcataaccgttccccaacataactcgggccatcattaccgctgcatcggacagacaaggctgcccaaagagggagtccacggaggaaatgctgaccacctcanaagactggaaagcagtttctaacgattcttctgcggcnttcacataaggcatggaggatgggaagcttaccaagatgtcttcctcgcctgacacgatgaccaagtgccccttcactacgaatntcaactnttggtggagtgtnaaaggcacaactccactgagtggatccatgngtgccctaacaggcaagctataag

SEQ ID NO: 60387 - DNA, 413 bp, Glycine max
agcttgtaggattatggggtacccatcacatgtggtactaggtggcggtcgggcgatggtgcacaacaagttttccacatccacaaagcgtgcataaacccaccatcccctgttgcccacctccaactgagctcacgtcctcccacgtagcccatatcctcatttctctcaacaccgggtccccatcaatcctcccaagcttccacaacatccaagcaaaacaacattcaaacagcacaagctatcacagccaagcaaaacagggcaaaggcagaaaactctgctcaacacaccaaccaaaatcacagcttttctcacttaaagaccccaataacaattccttcgatccaattcgttaaccggtggatcgactccaaaattttactggaagttgatagtacataagcctacat

SEQ ID NO: 60388 - DNA, 291 bp, Glycine max
  unsure (1)..(291): unsure at all n locations
ttattgcttgcaaaatcgagtcatattcatagttctgatgctttccaatgtaatttccctaatatgggaatgcttcttctgatgatgagatggcttttgatctgaggatgaatcttctccacccccaaaaggatcctgcagtgcaaattgagcaaagtgaccaaanaagcatctgtgccattttttacaaggagacactttntcaacggaacgacttctaggagactgcttccctactacatgtgtgatgatatttaccaaatctattgtaagggtaaattgcatttatct

SEQ ID NO: 60389 - DNA, 417 bp, Glycine max
agcttaggctaaattagactaaactttagttagctacttaagctgagtctagtcttacatgagggatctgcggacaaaactcagtttaagttagtctaaacctaagagggctgtctaaatcaggtgaagtcttaattgagggatctacggacgaagcttggatattcaacatgacgagggatcgagggtttagtaatttgggctacaacatagaacacaagagcatgattgattagagaaatatatttctatgcatcagcttgtttgttagaaagactcaacatatctacctactcttgtcattttatttaccttgcattttatagtttttagcatacaagtttagtttaaattctgtttgaaattatcacttatagatgttctctcaacaatgcttcgattcttaacttaattcag

SEQ ID NO: 60390 - DNA, 416 bp, Glycine max
  unsure (1)..(416): unsure at all n locations
ctcagtatgaaaattagtaatccaatgcttcaaatcaaaatatttcaaatcaccaacaacaaaatattcagaatgctcaaaatgcaccaaatgactaggatgcacactatgccttactaatctatgagaggttctatctatttcaggatcaaggggtgaaatcacttggattgccctagtcatgcactatatatagcaaataatgtgttctcaaacaagcactaaggtanggtttaaactacanactatagtcaacgatatccaatgagctataaatttagtgagcacaccctaaatcatgaaagatagccaaaatttagacaaaatcaagtctacatgaaaatcctagganataannaaatagaacatatctaaaaaataaataaaactaatcatgctgattttcagtaaataca

SEQ ID NO: 60391 - DNA, 421 bp, Glycine max
  unsure (1)..(421): unsure at all n locations
agcttctctttccctttntgcagtttgtttacttcactgacatatatggctaagaaatcaagcccctcagaaaaagaagctgcttttgctctggctgctctaatggagatacccttccaatataaagcagccactgaacttggactacttgggttggttccttatacacaggcttatgtttcattagatgaaaagtgaaaaatgtgacaccatctatcccaacatacatataaataagaaaaatatataaaaatatgaaatttaattaaatcaattttattcaaatcacataaacaaatccacgtggataacatggtcacattcacttcactgttatcaaataaaacttattaaaacatctttggctcaaaataaggtcgtccaagtttacaaaaggaaacaaattaagcagcgaaataaa

SEQ ID NO: 60392 - DNA, 205 bp, Glycine max
cagcgactctggagtcacagataaaggaacaaagaccacaaagcaaggaggcttgtggtggctggccagctgtgaaactagattgatatgtgaggtatggcctctggtaatcgattaccaagggtgggtaatcgattacaaggcttaaaaatgaagacagggggctaacatggtctctggtaatcgattacccagggatgtaatc

SEQ ID NO: 60393 - DNA, 414 bp, Glycine max
agctttaatgtccttggtagttctaaccaatgcattgtgcatttaggttattgacttggcacatttattgttgatgtgattaactagcagtttgttcattaatcattcttgctaaaattcaagggtgtccattatcacttatgtcggaattattaagtttttattgaaattgtattccttgggggcgttaatgatgatgtgaatgggtttgttgatgatggctggtcattgatgggtactgatggagtggaacatgtggctatagccataaactcatcttcaaacaaattgtgaactatgtattccaaataattaatgttttgggttatatgtaaattaatttacgagatttcatggaaaaattatctgtaaaagagattgtgtatattgtatttcaattttcatgattcaatt

SEQ ID NO: 60394 - DNA, 374 bp, Glycine max
  unsure (1)..(374): unsure at all n locations
tcattccacaatcaattcacaacacctattccatatttagatcaagtgtttgcactgcatactcanggaatcaagttaagttattcagtatgcttcaaaaacatgcatactaattatccacaaaacatatgtatataattataactataaaccaaaatcaccaaaaacaatgtactaaaactataataattataataatttccaaaaaggaaaaataaggaatttagaattccagtgactagtcctgtgtgccctgtgtgtcctggtcctgcatatcctcctcatctgtcagatgtaaaactggggtagctagaggagtggatgacagtctcatgactggcgtggtaaggtcttctggcatctctatgatgggt

SEQ ID NO: 60395 - DNA, 377 bp, Glycine max
  unsure (1)..(377): unsure at all n locations
agcttgaccaatcccgacccaacccgggtattttagtcagngataacctgtgatgtacctaagcaggcgagctcctggcagtcaatagataaaaggaactaagaccacaaagcaaggaggcttgtgtgggggctggccagctgtgaactttgagtgttacatgggatatggcctctggtaatcgattaccaagggtgggtaatcgattacaaggcttaaaagtgaagacaggaagctaagatggtctcttgtaatcgaataccaagggagtgtaatcgaataccacgcttgaaaacgaagtcaggaagctaagagggcttctagtaatcgattaccaaggggtggtatccaataccacgcttagaaatgggactaga

SEQ ID NO: 60396 - DNA, 403 bp, Glycine max
  unsure (1)..(403): unsure at all n locations
agctttgattaactccttaacagttgtctatacantttggacttggaaggccaagtgctccattagttttagagttgaaaggctgaatactaaatgacatcaatgagtgttaatggctactaaatgcattcttgatggtagaatgcctatatatagtacatgtatttggtccctaagctcatatatttcattttcgtttgatacaccatctatagaaagagagtgagagcttggaagaataaaaaacaaagcagctctttcatgacaatggctggaggtatattctgaatttgttttctacattttttaatgacctgtgtttcgttttgttggttgtaacattataggtttgatattttagtcttacatttatgtcttcattcccaagcaattggttaacctt

SEQ ID NO: 60397 - DNA, 422 bp, Glycine max
  unsure (1)..(422): unsure at all n locations
ttcccgtgtcctctagcatgaagttcttcatagtcatccacctattcatctgctcccctgaacgacagttcaagatcatcacaggatccatacacaacaacacacagggagtgagttatcacattcttagctaatagagagacaagacaattaagtatacatatgatataaatgagataccactcgcttaaacatagctcacgtaacttcaccacttcgtcattcacaattcaattgtcaatcatcaatcacattacacaagagtcccacacttcgatcaagatataataacacatcaattagcaatcatatgcaacagttatgctaagactcaatcctatatgcaatgtggtaccatgtcagtgaaaaaccactctcgtgcngctatgagtacataacaagacacaccacacaactggatt

SEQ ID NO: 60398 - DNA, 414 bp, Glycine max
agcttttcatatgagtaaaaggctcacattctctttcttctacatcatattcaaacttgtccaaataaataataaagtcatctcgactcaaagaaagtcatataagtctcatacaattaatatagaacctatatcctaatgtcacatcttatcagagcgtggtgttcccgtgtcctctagaatgaggttcttcatagtcatccacctattcatctgctcccccgaacacaaagttcaagatcatcacaagatccaaacacaaacagcaaaccgggagtgagttatcacattgctaactactagagagaaacaacacaacgtatagtagccaaatacaatttacttagcatatctcacattatttcatcactgtgtcattcatcaatcacacttttcatccatcaatcacacctt

SEQ ID NO: 60399 - DNA, 347 bp, Glycine max
  unsure (1)..(347): unsure at all n locations
actccatcccttcttccacaatctcaaccacccaagcctttcatgcctcttttccagcactcatgccttttagttgtttaagtctctattggctttgcacgccactcatccaactacatctttgcttctatgcagttgtcttgtccttctcgcctctgcatatttaaaacatagaacactatgaacttgcttaagatgagaacctcctacaccattccccactgttcttccagctccgcttgcccacccatatcctttcttaaaatgtggcatattngcatgtaactntgtgtccctaaacataatcgagtccaattgtgtttctagtaacctatcattcttcaatc

SEQ ID NO: 60400 - DNA, 414 bp, Glycine max
  unsure (1)..(414): unsure at all n locations
agcttgccttgtgccagggtagaatgggctttaaggataaaaggtgttgaatatgagtacttaaaagaagacttagcaaataagagttctttgcttcttcaatctaaccctgtccacaagaaagttccagtgctcctacataataacaagcctatagctgaatcacttgtcatcctggagtacatagatgagacatggaagaagaaccctntgctaccacttgatccatatgagagagcacaggctcgcttctgggctaggtttattgatgagaaggtaccgacaacacaatatgatccttttattacccttctccatttacttgtttctttgtagcaattcttatgtgagggcttgtagccacaactaatcaaaggcataagattatatgttaaggaaatttcagcacagaat

SEQ ID NO: 60401 - DNA, 398 bp, Glycine max
  unsure (1)..(398): unsure at all n locations
atgtgctacccacanagctcctcggaatttccctcggtcatgttcctccttgcgggccctattggtttcttgttcaagggctctcgcagtggtcgcgttttcctctcgtaactcggtgcactccctccggatatgtgtagcagcttgacttgaattttctttggcgagtcttgccttccctagctctagntttagagcttggacttcttcatcttcctccggagcttcgaagttctcctcatcgataactctccatttagagagccaatctaaccctcgcatgtgaactcttagccatccatgataaccaccaatgacgccattacggatgcctctaagctctttgtctttcctcaacggacttctccatgcctggtggactctttgtatcaccttga

SEQ ID NO: 60402 - DNA, 394 bp, Glycine max
  unsure (1)..(394): unsure at all n locations
agctnngagctattcattttttcattctctcttctcgcttttccaaaagaacgaaagactaaccacctaaattcttttgcgtctctcttctccttttgccaaaaagaaatcgacaaggactaactgcctgaattctttntgggtctctcttttcccttctccaaaagaacgaaggactaaccgcctgaattcttttgtgtctctcttctccctttggcaaaaagaattcgacaaggattaaccgcctgaattcttattgtgtctctcttatcccttttccaaaagaacgaaagactaaccgctngaattcttttgtgtctcccttctcccttgtcaaagaattcaaaacgacacaatctgagaattcttttgattcttccctttcccctataca

SEQ ID NO: 60403 - DNA, 452 bp, Glycine max
  unsure (1)..(452): unsure at all n locations
tgtcgctggagccgacccatcaatggccctaactttntcagactgtgtgattnctaggctcttgaccttgacttgatagaacctctttttaagtgaaggcgcctgactcgatcccatgntttactaaagtgaaacacaacccagtgtgaatcaaaactctgacatctatcatgggtggaatggatgaatgcatgaagaaatgcatatgacacanatgcatcttatgaatacgggagcccggcgaatngtctccttcttagatacaacattcggacagcatggtgcccgacgtatgcatttaagaaggcaacatggacccaccatcggtttgacaaagtgagaggatcaagacgcaatccgtgcatgatgcagatgcaaaaggcacaacacggggatgtacatagtacgacaatatccgtaaataattataacanagggcgacatgacattta

SEQ ID NO: 60404 - DNA, 409 bp, Glycine max
agcttgggagcatccagatctgagttcttggttcatccaagcattttcatgcaagcttcatcaaggtagaggggtctttccacttcttgaaccctaaccttgttgtctttggaagctagccttcattgcctgttgttttgatgatcaaatattcgtagctattgtcttggctggaactggaggatacattactttttatttttatttttttgaaattttaaggttaaaaatgatttctttgggcgtcaaaacttagggttagccttaaatttcacttaaatcggagtttaaggatattttgtaggattgaatctgtcacgaaattaaaatggcggctatgactatatggaatttttccttaaagatttgacttaaaaatgagtttgctaggtgtgaaaatataaggtag

SEQ ID NO: 60405 - DNA, 211 bp, Glycine max
gatggtggtgttatgcgcgccttgtggatgtggaacactttgtgtgcaccatcgcccgaccgccacctagtaccacatgtgatgggtaccccataatcctacaagcttgagatgaggaagtgtagaagggcgaaactttcttgctttattcgttgaccacaaaatggtacctggagatatgtcgcgggggtcaagagaccttggggacgtc

SEQ ID NO: 60406 - DNA, 413 bp, Glycine max
  unsure (1)..(413): unsure at all n locations
agctntatcgcataaggtcaataatattatttactttttcaaacaaaacaaatccttctggaaaattccacctgagtcgtgcaaaattaggaatagtaactttctttgaatgatcaataagaaattattgatatgttgaaaaataaagcagatgtaattgaaaaaaatacgaagttttttaactggattttgtacttgtagcactcaatcatgcttcagtaggtttcttcttttgtatctttatgctttggacagtttcttttgaaacaatgctatttaaagtattagtagagtataatcaatgtaaccctacaaatattattccctctactcctatccatatacccagaagaattacacatctattaatattttttgaaaaataatttaaacaagtagtatactataacaag

SEQ ID NO: 60407 - DNA, 375 bp, Glycine max
ctaagcttgtgctcaccatcaccatccacagattacaatgtctattatccaatctaataccttaaatagcacacgattttatttcttgtgcaaaactatagttgtttggatgtaaaagctaaatgccttggtcatgtagtcaaagtatttaaataaccccacattatattgcagtacctgacccctatatgctataatggtacaacaaagcaactgctacaccaaagcaaatagtttctatataacatgctcaaaactaaagtactcaaatcaaaactggagaaacagtgttgggcttggttggaaaaggatgaaagagaggctgatggacatgataatgcatatggtacagagaccaacaaagcatgaacacga

SEQ ID NO: 60408 - DNA, 416 bp, Glycine max
  unsure (1)..(416): unsure at all n locations
agcttcatcttcaatccaagaagaaagtgataaagaagacttaattgatttgaatgaagatgatgatcttagcctttntgtaaaaaggttcaacaagttcctgaaattcagaggaaatcaaaggagaccaaattttaaaccgaaaagaaggatagaagattcatcctctactccaaaatgctttgtatgcaatcaacctggacatctgagggtcaattgcctaatcttcaagaaaagaatggagaaatttgaaaaagaaaaattttagtaaaaagaagatgaagaaggcctacatcacatgggatgacaatgatatggaatcatctgaggattcagaaaatgaagagataaacctatgtctgatggctaaaagttatgaaagcgatgaagaggtaacatcttcaaataacaattta

SEQ ID NO: 60409 - DNA, 200 bp, Glycine max
ccttttggaaccaaaagatggcccaccattgaaaaagtattttttttctacgggataagcaactgtaagttgcgcgaaagttgattctatgactgtactaagcaaaaaaggtgaagctcaatatagagctcacacgtgcccgtcaaggtcaatatgcgcgctttcagcaacgaaaacttgctgctaaagtaacccagtct

SEQ ID NO: 60410 - DNA, 419 bp, Glycine max
agcttcagctcatgcaagtgcactcccaattctactatacatttatttcaagataagttgaataaaaaaaacacattcttagagtagctaaagaagggatagaaagaaatattagttctactgaaaatactcgcgcaaaataaatattagagttatcattttaagggctacacttcactcattcgtatatgtaagggtcttaaagctggttaagtaaatggagttgctgaaatgtcatgcaatggatggtaagaaaaatcaaatgaaactaccatctcaacttatccccgtttccgttcaccacgatgtatttacaaatttacaatcaaacactatttcttggtctggaaaacaacgaattgcacttgtgatacaattattgcagaaaagatctttacatctttcgaacaagggaagca

SEQ ID NO: 60411 - DNA, 415 bp, Glycine max
  unsure (1)..(415): unsure at all n locations
acaatgctaattgtgtcacctctctgagactctcattagcaacttcaccacatttggaatgatatttggacattccttcaaagccattctttcctctggagtgttgcaacaccttaagaatgtagagtgctntctccaagcactcattgttcaaactaagcaaaagctcaaccaatagagaaattgctcctatgcttatcaaagagctcttaactgattcatgggaacatgttatagctttaagtaatatgagaccaatcgagaccattcttattgggtgtttcttatccctcactagccctaataaaccaaccanaagactcaaacttgaaactacctcattggtcccttccatcaacaacatctcaatcaacttggcacagatcattttggtctcatggttccctcattcatg

SEQ ID NO: 60412 - DNA, 412 bp, Glycine max
agcttctctctgagttcctcgttgaaccaatctcttacttatcaagtttgaacccttatggcgtctacccttaacttatcttccatctctggaagtggcgtcatccaaattctatgacctgtaccaagcgatccactcctataaggatcacgtcattaggtgtatcaaaaagagatatcattgactcaatcatgtggttgaagtctggtcttttggtggattctccttttcaaggctttaagtgtgatccctcgctttgacgtaaagaacactaggttggagcattcaaatgtatccccttcatttgatttgattatttgaccattgtagtgcactaactaatggacaaatgaggaaaacatgtcatgtattatatttgtagagttagaaataattaattgagaaagaaagt

SEQ ID NO: 60413 - DNA, 398 bp, Glycine max
  unsure (1)..(398): unsure at all n locations
tcggaagaaaacacaaaaagaagggaacttcccaatcaaaagagtggaagaaaacanaaagagaanattcccaatcgaagagtgggagaaagcaaanaaaaggaaagaaaattcccaatcaaagatcgggggaaaacagaagaaatatacagaaaggtctttggaccagacaatatctgaacaatacagaattgtcaccaagaaaatatgataagaaaggaaaccacgacctaaagtggtcctctccctttgattaccaaccaaaatcctgtgcgtcggtgacttgtttgcctcgcgctaaacanaaatagaaaataataaggccaaaaacactcatagccaaatttcccaccaagaanaaccccattcccaagaaaagtcctactgatccatgatca

SEQ ID NO: 60414 - DNA, 358 bp, Glycine max
ctgcacgcgtgcgcgcgcgagctcatgaagaaagtgatgtggttctcatcctaacagcataactgcgaacgacctcggggacaaggagaatttcacttccttaaccctcaccttgttgtatgaggaagactaaccttcgtagcctgatgttgtcacgcgctgatcttcggaactatagacctggatggcactggaggaatacatccttcttatctttattttgatgggctttatagggctaaaaatgagatctttggccgtcaacacgtgagaggaatcataactgtcacttagcatgaacttgaaggatatctagaggattgcatatgtcaaaagaaatagggcggcatgactatag

SEQ ID NO: 60415 - DNA, 215 bp, Glycine max
cttctcaaacacaactttggagaactctgaggccaggggctggtgctattgaccccatttttatgatcacccctgccttttttgggatctttttcgtaagtacggaactactaattccgaactacacttgatttctttccgtaatgatacagaaacttgcggatacataaacatacccttgttgactcacggaatgttacggaacctcactaatt

SEQ ID NO: 60416 - DNA, 411 bp, Glycine max
agcttggagaggatgcttcaatggaggattagaaagagggagagaaagagagaggggggagcatgaaattgaaggaagaaaaaaaaggagagaagttgaactttgagttgtgtctcacaagaatctcattcatcaaagttacaacaagtgttacgcatgcttctatttatagactaggtagcttccttgagaagctttctaaagaaaacttccttgagaagcttctttgagaaaacttccttgagaagctagagcttagctacacacacccatctaaaaactaagctcacctccttgagaagcttccttgagaagctagagcttaactacacacacccatctaaaaactaagctcacctccttgacaaaattcatgaaaatacaaaaaaagtccctactacaaagactacc

SEQ ID NO: 60417 - DNA, 426 bp, Glycine max
  unsure (1)..(426): unsure at all n locations
agatcatgantcaagactcaagattcgagaatcaagatatgaatntaatcagataagtattaatgttttttcagaaactgagtagcacatggaattttctcaaaacatgtgtaccaaagagnttttactctctggtaatcgattactagattgttgtaatcgattaccagtaagcaaaaatgggtttcaaaaaggtncaactgaanttacaacgttccaattgatttcaaaaagttgtaatcgattacaatattttggtaattgattaccagtgtgcttgaancgtgaaatttaaattcaaaagtgaagagtcacattctttcacaagaaanagctntgtgttatcggttacactgatttggaatcgattaccaatgatagtttctgaacacatcaaaagatgtcactcttcaaatgggttttgac

SEQ ID NO: 60418 - DNA, 400 bp, Glycine max
agcttccgttgtacaatttcgagtctctttatatattatgtccccgaatcggacatctgtgtgaaaacttatggccattcgattttcttgagaggtttcgttgttcaatttcgagcggctagatgagttatgtcctcgaatcgatcattcgtgtgaaaagttatgaccattctaatttgtaacaacttccgttgttctatttcgagcgtctcgatatattatgtccccgaatcgaacatccgagtgaaattgtatgaccattccaatttctcgagagcttgcgttgtcaattttgagcgtctcgattattatgtccccgaatcctacatctgggggaaaagctatgacacttcggaatttctcgagagcattccttgttcaattacccagcgtttagatg

SEQ ID NO: 60419 - DNA, 376 bp, Glycine max
cacacggatgtccgattctggaaaataatatatcgagaccctcgaaattgaacaacggaagctctcgagaaattccaatggtcattacatgttactcggatgcccgattcgggaacataatatatcgagacgcctcgaattgaactacgtgaagctctcgagcaattcgaatggttataagttctcacacggatgtccgattctgtgacataactcatctagacgctcgaaaatgaacaacggaagctttttagaaattcgaatgggcataacttttacacggatgtccgattcgggaaataatatatctagaccctcgatattgacaacggaggcttcgaaaattcgatgggcatatcttcaacggatgtcgatc

SEQ ID NO: 60420 - DNA, 377 bp, Glycine max
  unsure (1)..(377): unsure at all n locations
ggcatgcannagcttgatataantgcatagangaagtcgtctctactatatacatggtgtagtcatatacaagaggacatagagcattgtttgcctagtagtagaacattgcatataccgcatcactattcccacacaaacataccagccagaatcttattgtgtaaaagacgctgggcctcacgagcgcacctactgaccttaatggcattgctctcactgccaacttgccagatgagggaccggttcggccaaccgtattaacgagtgcttcgacgcgaaccaaaataggtcgtactaggcgccaaacccataatataggtggcatgatgaatgtgatgagtggtgcaacactcttttgttaaatcacatttgcg

SEQ ID NO: 60421 - DNA, 414 bp, Glycine max
agcttctaaacaatgggggggctttttctttctaccctattcaccattggttaagggtgttccttagtcattctactagtgtatgtagatgacatcatcctgtcaggaccaaattttgcctctatgcaagctattcagacccaattgcaatctatgtttcaattgaagatccttggcactttgaaatattttcttggcttagaaatagctaaatccaacagtggtatctcactctcccagagaaaatacactctatctcttttagaagatgcatgtttcttggcatgcaaacctttcaatgaatcccaacctgaagctcaatcttcatgatagagacttactacctgatccctcagtgtataaaaggttaattggtagattgatttatctgaccatttcacgtcctaatataac

SEQ ID NO: 60422 - DNA, 402 bp, Glycine max
  unsure (1)..(402): unsure at all n locations
agcttcataaaaagttcaattaatgggtttttctattggagtaaaatgaaatgtgacacactggaactcactttcaaacccagttaagaatctaaagaggattgcttaaatgaatactattggagatgctcttactgaatccatatgctctgttgccatatcagatccaattcattaagtagtctgaatattattttaaaattgcgtttcagtctcaaggtctaataggcatagnttttatttaattctttattttacatggtatttaatagagtttgttatgcgatattcttcgaaatacaatacggcatcatactataattgaaatgtttaaaataggaatgttacattaccgatttgatcatattcttcttttaaagtataatttagtaggaaaaagtt

SEQ ID NO: 60423 - DNA, 378 bp, Glycine max
  unsure (1)..(378): unsure at all n locations
atatagctcattggtgaatttgtatgaatttatatctatgcttcattttgttaatatcagacattatacatgtcgtttacatatttaattgtgagtagaagaatttgttataacgcacattataattaacataacacgtacgatggtgagattttattagtatgtcaaaaaatctaaatgacatataatataccttagatttatcgagtaagagaaaaaattaagcacatttacaattattactgtcatttattgtcatttgtatttatttattacgccggtgaatttataagtggtcatggactatatatgtgattgnactaaaatggaaacttagtgtgagtctggtttgcgttgttaaatcggttgatctggata

SEQ ID NO: 60424 - DNA, 398 bp, Glycine max
  unsure (1)..(398): unsure at all n locations
agcttggttcagggtacttacccgttgaagatcaaagaacgatgaagaacgaatgaagaacgtcgaagaacggttgaaacctttgcgaaattcttcacggaaaacgttacggaaacgtttcggaagcgcctcggcttagattttcttcacggaaacaatttttccaagcaaattcgaaagagagagaagtgcctaaggggctgaacccttttcttcttcacttcctcccctatttatagcaaaataggggaggtggttgccgcccagctcgcccaggcgagccaggttgcttcctccagaagcaacagccttctggaggaatattctggagggcccaagtgggcctgggtgctatttgcacccccattnttactaagtacacctccctctgctttttt

SEQ ID NO: 60425 - DNA, 285 bp, Glycine max
gaaatgcatcaataacttctcgttcctggaatacgcacccatcttgtgacaatacatttttaggtgattcttggggcaagtcgtccctttgtacctatcgaagtcgggtactttgaacttctgagggatgacgacgtccagtactagacatatgttggtcatgtctacgaacggataatcaccgaacccttcaatagccctcaatctttcttcaatgagatcgagtttccccttttctttcactgcccagggtggcccttccacgggcagaaacatcgactgtat

SEQ ID NO: 60426 - DNA, 415 bp, Glycine max
agcttccatcaatgagggtgttccatatgttcttattactggttttatacatgtgctgcccaagtttcatggccttgcaggtgaagctccttataagcatcttaaggagttccatattgtctgctctaccatgaaaccaccagatgtctaggaggatcacatatttctaaaggcctttcgtcattctttagaaggagtggctaaggactggttatattaccttgctccaaggtccatcacgagctgggatgacttcaagagagtattcttagaaaaacatttccctgcttctaggaccacgaccatcagaaaagatatttcaggaattatgcaactcagtggagagagcttatatgaatactgggagagattcaataaactatgtgccagttgtccttaccaccagatttctgag

SEQ ID NO: 60427 - DNA, 389 bp, Glycine max
  unsure (1)..(389): unsure at all n locations
ctaagcttgtctagcatttatgcgagacggagaccaacatgctagctatcatcgccttgtatcaagaagagttaggtctagccacgggccacgagcatagaatcgcggatgagtatgctcaagtatatgcggaaaaagaggctagaggaagggtgatcgactctttacaccaagaggcaaccatgtggatggaccggtttgctcttaccttgaacgggagtcaagaacttcccctcttgttagccaaggccaaggcgatggcagacacctactccacccncgatgagattcacgggcttctcggctattgtcagcatatgatagacttaatggcccacataattagaaatcgttaggaaacttgtatggtctctcagaccttgactgga

SEQ ID NO: 60428 - DNA, 414 bp, Glycine max
  unsure (1)..(414): unsure at all n locations
agctcggtcatcgtntcatggaaccactgtttttttattgaatcaatgttggggggtggcgatagatgcacaagaacttaggtttgattgtcgtttcttccactatgagattgaatgtatgatttgagtggatgcaagtcttgttcttcatcccactaataatctcaagttgcagaacacgaaagcaccgtgtacctgtgttctgcctgagacaattgttagtcgatgaatacgactagcttttgtgtataaaacttgtgtaaattgaatcaaacttccccaatttatggttgttttagactattataaatactttctgttaagtataggtaatagacacttaatacttccattttgtgtatttaataatcaacttctctcaatttcaggtgaattatgcgatttggcaaagtg

SEQ ID NO: 60429 - DNA, 484 bp, Glycine max
  unsure (1)..(484): unsure at all n locations
ttgtagaggaaaacgtttgatgttctaacatgaaaacaaatggtatgcaattntgcagatcaaaaagtttgttgaacgcatatgcatgatgatgccatgactcatgcaaaatgtgaggctggaatatgataacggacaaatgcaggatatgtccattatgatgttatgaagagatgcttatgcgatgcatgatatgaatgcattttacggacacgagagcccggaaaattatctcttcttacttgcgcatttgggggcgcagtgccccatgtgtacaattaagaaggtgatatggaccttccggcttcccgtgacanaggacgagaccaacatacaatgcatgctagagataaaatgcgggagtgacttgattcgcactgatntttggagtataaacgtgcgatanactcattntattcanaaaagtataactagtcaagatctgagcgacaatacagactttctagcgggttctaatcatatg

SEQ ID NO: 60430 - DNA, 414 bp, Glycine max
agcttggttcaaatcaaatttgtcccaaatttgggggagtaattatcaaggtagatttgttccaaatttgggggagatactgggtaagaattgaaatggtcaaagtaaacagcataaacacactgatttatgtacatacacataatgtttctgtatatttgtgttaaaaaaattgtaaatatggatcaatctaataagtgtatatgttgtaattccatgaatgaaagctgagtgcctaaatcaaggcaagtatagggtaggaatgaaaaaaaaaattaaaggtttatctatggatgaatgctctcctagaacctaaccttttgaatcctagaaaaaccatgatttgttggcagcctaacttcattgcaagcctagaaagtccttcggattcattttgtgtgtttatttttgtat

SEQ ID NO: 60431 - DNA, 417 bp, Glycine max
  unsure (1)..(417): unsure at all n locations
agctntgtccgcanaaatcactaaaaacatttntatggtccaatgccttaaacggtcctctttgcttttatcagttaacatggaccattcaaaagcatgaaatcaacatgtaactttaccgcttttgcaagaactacgtaggtctgatttcctcatcgcagttgaggatacgtaggagcaaaagtcccgcttttgtcgaccaccccaagagatcgttaatggtccaacgccttaacgtttctctcctttcaaaaaataagagatcgttaattgtccaatgccttaacgtttctctcctttcaaaatcaaaagatcgtttaatggtccaacgccttaaatgaccttttgttcggttaaaatatatcttgccaaaaaagataaaaacaacttaatcaatggttagttctcaaagaacta

SEQ ID NO: 60432 - DNA, 175 bp, Glycine max
agagcatacctgccgaccatagtaatcaagagcaatactttgacctagaacactaccaatagttcgaatgccgtcgatgttcaagtattgtaacattatgtaatctagtccaccttgcatccatgtgcttaaagctggtttttctcttacttcatactctcacatctcataattc

SEQ ID NO: 60433 - DNA, 416 bp, Glycine max
agcttgttaagtgtcttcttgttgattattgcaatgtatgatgtgtctgcatcaaccagtagatatctgatggtgaagctcctagagagcttgccttgaccgaaagtggtcatcaagtccacgtagtctctggtctcgactttctcgcctgcaaagctgaggagtggaccgacgtgaggttggacagtgttgggtgagacctcgagtctttggaagattttctagtataagatatcagtagaattgtcctggtcgatgaggatcttggacactatgaaattcgctatgatgatggagacaaccatggggttgtcttggttgacggagttgatgcccttgaagtccctatccgtaaaggtgatctgagggagacttcactataagggtgcatcgacaagattaatgtcgatgtccta

SEQ ID NO: 60434 - DNA, 346 bp, Glycine max
  unsure (1)..(346): unsure at all n locations
gatgacaaaaagctcaaaggtcaagaacacttcatcataacaaagatgatgatctcaagaatcaaagaatgagttctagatgttcaagatagaatcaagaacacttctagattcaaaagggaagttgatttccagaatcaagagtcaagaatcaaggatcaagctctcaagaatcaagctcaagattcatgactcaagattcaagaatcaagagaaggcttaatcaagataagtatgaagagggtttttcaaaaagtgagtagcacagggatgtttctcanaacatcgttaccaacagagttttactctctggtaatcgattaccacaatggtgtaatcgaatact

SEQ ID NO: 60435 - DNA, 411 bp, Glycine max
  unsure (1)..(411): unsure at all n locations
agcttgttcttgattnttcctcagttctttaacaagctttgaacaatatagttggccttcatttaactgtctttgggcttggcggccacgctcaacaaagtactttcgacacctactgtacgttgatttcaccaatgctgttatgggaatgttgcgacaatcctttaaaaccttattgatacattctgagaggttcgttgtcatgtggccatatcgacgtccttccctatcgtaagccatcgtccatttttcctttgagatgcgatctatccatgttgctatggctggactcagttcacgaaatttttctaaattttgatcaaaaatgtgcttgcatggagtgtangctgcataaaattagttatgaataacaattttaagtataaatganagtaaaataaacgtgaccat

SEQ ID NO: 60436 - DNA, 327 bp, Glycine max
  unsure (1)..(327): unsure at all n locations
tatcaacataaagagggaaaggtaatattgtagccgatgctctttctcngcatcatgcattactttctatgctngaaacaaanatgagtggtcttgaatggttgaacagcatttatgaaaatgatgaaacttttggtgaaatttttaacaattgtgaaattatttcagaanatggtttctttagacatgaaggctgtcttttcaaagaanacaaattgtgtgtgcctaaatgttctacaagaaacttgcttgtttgtgaagcacatgaaggaggtttaatgtggccatttggggtccaaaagactctagaaacattacaagaacatt

SEQ ID NO: 60437 - DNA, 412 bp, Glycine max
agcttgtaggattatggggtacccatcacatgtggtactaggtggcggtcgggcgatggtgtacaacaagttttccacatccacaatgcgcgcataaacccaccatcccctgttgcccacctccaactgagctcacgtactcccacgtagcccatatcctcgtttctctcaacaccgggtccccatcaatcctcccaagcttccacaacatccaagcaaaacaacattcaaacagcacaagctatcacagccaagcaaaacagagcaaaggcagaaaactctgctcaacacatcaaccaaaatcacaggttttctcacttaaagaccacagtaaaaattccttcgatccaattcgttaaccggtggatcgactccaaaattttactggaagtctatagtgcataagcctaca

SEQ ID NO: 60438 - DNA, 239 bp, Glycine max
caatcattcatttgcatattcatgttctggtggcatactcacctttgtttatttctttaggattttcatcataactaagaaaacaccaagggacccctataacactcgatccagaaaaatggataatgaagagggcgtgcaagaacagatgaaggccgatctatcggcctttaaagatcaaatggctttcatctcggaggtcatgttaaaactccagaaaactatagaggataaagcca

SEQ ID NO: 60439 - DNA, 414 bp, Glycine max
agcttgtgcaaatcaagtcactctcgcattttatctctagcatgcattgtatgttggtctcatcctttgtcacgggaagccggaaggtccatatcaccttcttaattgtacacatggggcactgcgcccccaaatgcgcaagtaagaagagataattttccgggctctcgtgtccgtaaaatgcattcatatcatgcatcgcataagcatctcttcataacatcataatggacatatcctgcatttgtccgttatcatattccggcctcacattttgcatgagtcatggcatcatcatgcatatgcgttcaacaaactgtttgatctgcaaaattgcataccatttggtttcatgtttgctcatctttgtgttttcctctacaaaacaaaaacaaaaaaaggggaagcgtgaaa

SEQ ID NO: 60440 - DNA, 350 bp, Glycine max
  unsure (1)..(350): unsure at all n locations
atcctgactcaccatanacctcgacccacggtgattaatgtaatccttaccctcggaagcggaaagaatagaagggaaatttcccatcaaagaaaacgaaagaatgaagatttcctttctcagagaaagcaaaaaaagaaaagaaggaaaatttctcaatcaaagagtgggagaaagctttaagaaatgaaagaatattcccaatcaaagaatgggagaaagtctaacatgaagaagaagaaggatagatagctcctgatcagggatcgaaggaaaacagaagaaatgtgcagaaaggtcgttgaaccggcaatatctgacaatacagaattgtcaccaatgacaaaaag

SEQ ID NO: 60441 - DNA, 411 bp, Glycine max
agcttcttatccaaggctcatcttggtggtgaagctccttcttccatggcttattccctagtggatggcgcctcctctcacctcttctcctttgtcttccgctgcatctccatggtggaaaatcaccattaaaggacctcattgaagctcaaagatccagcctccataaaagccccacaagcaagcttccatcagcaaccataataaaaagctttctgttttccctcccgcggatgtagccttactcaaggtgaaccacgtaaatctgtttgggtgttctttctctcttttcttctctttcaccttgctgcaaaactctgtgtgtatgacatagctttctgttgcatcttccgctgctgttcttgcttgttcttcatcacttccataacaaactggtatcaagagctctag

SEQ ID NO: 60442 - DNA, 416 bp, Glycine max
  unsure (1)..(416): unsure at all n locations
gacgtgtgcgcactcaatcttattatgatgtagagaggttttgtgtttcttgctgcttntatcggagaccacagagtggtacctggagatatgtcgcgggggtcaagagaccttggggacgtcatgtggggtgctattgcccaaaaccaagcttgaccaatccctaaccaacccgggcatattcggtcaatgagaacctgtgatgtacctaaacaggcgagctcctggccgtcaacagataaaaggaacaaagaccaccaaacatagaggctcggggtggctggccacctgtgaactttggatgatatgtgaaatatggtctctggtaatcgattaccacaggtgggtaatcgattacaccgcttaaaaatgaagacaggagggctagatggtctcttgtaatccattaccacggg

SEQ ID NO: 60443 - DNA, 443 bp, Glycine max
  unsure (1)..(443): unsure at all n locations
tcttttatggatttcaaggtttgagaagtgaaaatgagaatggggtaaatatggagcaaactcttacctcacacaagtctataaccttaatctaaactcgctcaaactgggtgtacgcctaaaattccaccgaatcaaaatttgactcctcaacatccaattntaccctagaaatggctcttgttgtcactttggtcactcatattcctcattggcacagtctaagctttctcataagtcctaaatgacatctcatactatgattaactccctttaacccccanataccactaaatccagagttggccttccactctcaaagctactctttttcactcataacacacattctactgttaaccctaggtaactctaccctcatctctagagttttcataagcaattcagcacataacatcacagcatcatctaaaacctaaaca

SEQ ID NO: 60444 - DNA, 406 bp, Glycine max
  unsure (1)..(406): unsure at all n locations
agcttggagacgatgcttcaatggaggattagaaagagggagagaaagagagaggggggagcacaaaattgaaggaagaaaaaggtagagaagttgaactttgagttgtgtctcataagactntcattcatcaaagttacaacaagtgttacacatgcttctatttataaacaaagtagcttccttgagaagcttccttaagaaaacttccttgagaagcttctttgagaaaacttccttgagatgctagagcttagctacacacacccatctaaaaactaagctcacctccttgagaagcttccttgagaagctagagcttatctacacacccatataaaaactaagctcacctccttgacaaaatacatgataatacaaaaaaaaaagtccctactacaaaaac

SEQ ID NO: 60445 - DNA, 349 bp, Glycine max
  unsure (1)..(349): unsure at all n locations
ntgagacgcatgtgatcttttggcatcatcaaaacatcggctttatctctttgtctacaaaacatcaccaaacatgttatcaatatcaaattcagattcactctcagcatcnaatccagacatatgatcaagtgcaaattcagattcaatgcatgaagagtgacgggcatgcagattataatgaagatcagtcatgtattcatcaacaatatggtcaattatttctacacganatacagaaagatcttcagatgggtgtttcatagcatcaagaatattaaaatgaacagttatatcaccacactccatagatagtgtgtctgcatacacatctatcttaggtatagca

SEQ ID NO: 60446 - DNA, 406 bp, Glycine max
  unsure (1)..(406): unsure at all n locations
agctntgagcatctgaatatgttaggcatgggactggcttgagttctgcatactgcaaaaaacatggcccaatgacaaaatatgaagaatacaaaaaagatgtggcccacaggagcctccattaaaacaccaatgcacaaataaaaaccatgaagcaactgcatggacattaggaaggggaacttgtaacatgactctgcacaatttgtaaagatgaacctccatcttataaatttattcacattagtagaactttcttcaccttgagtgccattccaataattgcaagagggaagccataagttaacattatagctgaccattcagatccagggagaatattataatatgccccaaaaccgtagctgcatgaaacaaaaagatcaacataagtaacagaagcact

SEQ ID NO: 60447 - DNA, 392 bp, Glycine max
agcttattatatttctccttcgtatactcttctcttattagcgtttgtggaaattcttatccaagcatgcccttatatacctttcgaagaagttgaatgaaaagagtttttatagaagtgcataagttgattttagcttatgcggaatatcaactcattttaccttatcatcttctcctgtaagtacttatagagaagtttatctagagaggacctcgtacactttctaatgcgtaatataatcctttctttttgttctaagaaaataataacagggtcttgcagcggaaaaaggtgacatcgcaagaggcacagatttcactgcgacattgcctctgcctcacacaacagctattgatttcaggcaaacttccatatgacatttctattta

SEQ ID NO: 60448 - DNA, 324 bp, Glycine max
  unsure (1)..(324): unsure at all n locations
tcgttgcaacttgcaagctcgcacatcaccttcgcatctcgcatatcggtgtcacattaaccacagcatccatgccataccatatttctagttgtggctctaatttgctctccatattggccttgtcatttcaaccctctctctctctctgttcaggttatgtttattgttatagtgtctgcccacattttggtctgctcgtggcatactaatttttgacctccattagtaggctcatgaaanaagcaagctacatgttatttccacctaacatttttgctttttccaccccacatcttctttgtaattttggtttctaaatac

SEQ ID NO: 60449 - DNA, 418 bp, Glycine max
agcttatcgtaatcgattacatagatctttttgatttttgattgagttttttaggaatctctgctttaatcagttaccatgtgatataatcgattacttctcttataaaaagtgtgtcagaagtaatcaagaacactttaatcgattacgttgaggatctaaccgattacattgttcttgaaagctttctagtttctgggaaaaatactttaatcgattgaaatgataatataattggttactttgttgaaataattgatgacattgtatatttaattgattacaggtgattataattgtcttctctataaatagccaccttgtgttctcacttcatagtacaagttcatgaagagcgaaattatgagctaaaatatctgaaagaagagaagaaaagcgcttttaatatagaactcct

SEQ ID NO: 60450 - DNA, 164 bp, Glycine max
  unsure (1)..(164): unsure at all n locations
ctttaattcatcatgatagaggaactcacataaaagataaaggaatggttgagattgattcaccatctacattgctagctcanaacaaaattctcactcaataaattgaagcttttaaaaaacagctttcacaggttcctcaacanattcaagccatgcacaat

SEQ ID NO: 60451 - DNA, 412 bp, Glycine max
agcttacaattggttgtttgcatttttctttttggaacttgataacatggaaacaaaggtaaggggaagttcatttaaccttggaacccacacttttgattgaaatggatgaaccctaaattttggtgatgtgaaaatatgatttattttcattttttcctctatttgacctactgggaatgatggatgtattattttctttttttgagtacaaaaatggattcattgatcccaaaaacttggtaaaacatttaaaattcgctgaatttggctttgtataactctagatattgcaagttgaagttcaatatcaattatacccttaaggtatctgaatatacgtttcataactttccaatgttccttactaggattacccacacacctactcacaacactaactggctttact

SEQ ID NO: 60452 - DNA, 415 bp, Glycine max
agcttgttcagcggtagggcatctattacaacaaatgatagatcaaggccgacttgaagtcaatagcgaggagaaagaggaacagcatatctgcatgcagtcggcagataaggaaagtcctaggaaacctaaacccttggtgatacacttcaccaggggcactgctccccaaaggccccgagtcccctcggcggtatcgggcgttagacttgttcctctcacttacaaaaatagcaacacagtcccatggaagtacgcccctccaggcgataggaagggagaagctaccaacatcggctcactgtcagccaaagtaaccaacatctctggcttaagtggcataacctgcagcggtcgtgtgttcgcaccctccgacctaccagcgcaacccatgaacgctagaaggaaaacaaag

SEQ ID NO: 60453 - DNA, 392 bp, Glycine max
  unsure (1)..(392): unsure at all n locations
cctcatttaatggattntcaggggttgagaagtgaaattgagaatggaataaatttgaagcaaactctcacctcacaccagtctataacatcaatttaaacttgntcaaactggatttacacctaaaatttcgccggatcaaaattggactcctcaacacctaaatttaccctagaaatggctcttggtcactttggtcatttatttntctctctagcacagcccaaactttctcataagtcctaaatggcatttcaagctaggatcaactcactctaacctccaaataccactaaatccagatttgacccttcaactctcaaagtctcactcttttttcactcacaacaccatactctcaccttctaaccctangttaactctacccttca

SEQ ID NO: 60454 - DNA, 418 bp, Glycine max
  unsure (1)..(418): unsure at all n locations
agctcaattcaattaaattttagagagggttatgatcatttgtttgctacacctcattgtcacatcatatagtcatattttgtgcatcttcttcatgttttacatgtctcatgacacctaagcacacttagtggagaatcttggacttggacttgatcttggattagtggattgaaccatagctaaaattcactaatcataattagtaaaattttggctccacaaattcaatttcaaatttaagtgaatcccttcaattttgtgtgacacttangctataaatagaggtcatgtgtgtgcattttttgaactttgatcatttgagaattacacttcaaagttcaaacctcttttgagacacaaaatttcatgctccttctctccttctccctccactcatcttctcccaccttcaagc

SEQ ID NO: 60455 - DNA, 415 bp, Glycine max
  unsure (1)..(415): unsure at all n locations
agcttttgcctcanaacaaagtgtttcctagagatcaaggctttggtaatcgattatcaggcaatgtaattgattactagaagaaaattttgaaaaacaacttttaaaaagggttttgaatttgaattttgaatcatgtaatcaattaccagatgtttgtaatcgattactagcaacgacacttcagaaaacactttgaaaaagtcatgacccttcaaaatataattgtgtaatcgattaccagaaacctataatcgattaccagtgaagaatttcagaaaaagctttttgaaaagacatatctcttcaaaccattttgaaaagtcacgaagggcaatttgaaaaggcacgaagggcatatatatatgttagtctgacttcgaaaggcaagagagagatattctaagagaacttc

SEQ ID NO: 60456 - DNA, 404 bp, Glycine max
  unsure (1)..(404): unsure at all n locations
actagacactctctctagatttatgcaataacatggcttttgtatctatgaatgatacctanaaatgtaaatgaggccataatagatgaaaagtggataatagctatactagaagaactaaaccaatttgaaagaaataatgtttgtggagtagttgagaaacctgaaaactacccaatcattggaacaaaatgggtggttagaaataatatagatgaaaatggcatagttattagaaataaggctaggttagtcgccaaaggatataatctagaagaggggatagattatgaggagacatatgctccagttgctagattanaagccatcagaatgttatagcctatgcgtcataatgaactttaagcttcttcaatggatgtaaaagtgcttcttaatggttt

SEQ ID NO: 60457 - DNA, 413 bp, Glycine max
agcttatgatcccacctctcatcaataattttcccaataggctcatagctacatagtacatacatatcaaatatgctatattagaaatagttaaaacttaaaataacacacaagtaaattttaaatgtgagaaagtttagaaattttaccttttcttgatgttattaaagtttcattttatcttctcttttgcattttccatctcctcatatatgaaacccatggggggttttacatctgaatccaccaattgaaggatcaccataagaggggcagcaactttgaggcacatggttacgttcttccaaaatcgactatccaaagccgcattctgtacttttctcccctcttgtgaagttccaaacttgcttgttttccactctttagagctaaacatgctcattagtgatgct

SEQ ID NO: 60458 - DNA, 362 bp, Glycine max
  unsure (1)..(362): unsure at all n locations
attatatctatttgtgagaaaatactttgacaatgatatacttcatcgcataacatgcaaatcgaatgtttggtgcttgtctggataaattccacaattcgattacatctatatatgggaacacaagctaaacaatattagcgatggagatcattatcttaagctcatcagtaataatttgtaactccaccaccctatgttgtggcttacaaatgaaacaagttttgaagtgaatgagcattgtccttcatggtgcataacacgtcagatcgtggaccacatctgcagatnttgtggaccggaatgaaaaaaaatgcagtttaaatgaacatcattctatggactagtgaaaattaacacct

SEQ ID NO: 60459 - DNA, 410 bp, Glycine max
  unsure (1)..(410): unsure at all n locations
agcttgcctgtccgatgtancattaatgatggcccgagttatgttggggaacggttacgaacccggaatgggtttatgcaaagacaacggcggcataactagcctgataaatgccaaaggaaatcgtgggaagtagggtttaggctataagcccactcacgcggatatgaagagaagcaccgcgggaaggaaaagcagtggccaaagctcgcagttgagacaagaaagtgaaggaagcccgccctgccacataagcagaagctttataagcgcaggtttgggagacgaaggtcaagtggtcgcgatatacgaagatgatgtttcgagtacattggatttggtacgaccatgccctcctgatttccagctgggaaattggcgagtggaggaacgcccatcatttacgcaac

SEQ ID NO: 60460 - DNA, 405 bp, Glycine max
  unsure (1)..(405): unsure at all n locations
gagaatgaaatgaaatgggtaatttaagtaactctcactccacagttatacataatctaacttctcaactgatttacgcctcanattcacccgaatcaagaattgacctctcaacacccaacttaccctaggaatggctcttgccgtcactctggtcattcgtttttctctctcgcacagatcaagctttctcattaggtctaaatgacatttgaaactaggaattactcactntaacctccatttaccactgaatgccgttttagccttccaactctcaaagccttactctttttctactcataacactacattctcaccttctaaccctaggttactctacgctcatcctagcaatttcctcagaattcagccttagcatccagcatatcttaaaccctaaca

SEQ ID NO: 60461 - DNA, 388 bp, Glycine max
agctttgatacgctaattcatgttaaaacataccaagttaaaggaataaaaagtgaagctactagataaatttcaaatcacctaatttagaatagctccatccgatgggaaggataactaccaatagcagttttccccgtcccaaagtgcctatactagataatcataaattacaatcatagctctaagcatctaacttatatactaagcctctcacagtctcactaatataactgtaagtaacaaagttgttctcttaaagcatggcttgacaacaaaaaacaaatggtaatacatccattatcggtgtatgacaactaactatcgagtagaaagtttgggtttagcctcaacgaaaaaataaaaaatggatcattatagctcacca

SEQ ID NO: 60462 - DNA, 422 bp, Glycine max
gatcttaagcacctgcggctgcagctgcccaagttgaattccggatgtaatgcttaccacctcgaaagactgaaaagcggtttctaatgactcctatgtggcctccacataaggcatagaggacgggaagctcaccaagatgtcttcctcgcctgatacgatgaccagatgcccttccactatgaatttcaacttttggtggagtgtagagggaacaactcccactgattggatccacagacagctgtaggggggttaatatccattatttggaaggtaacttgacaggtgtgagggcctatctgtactgtgagatcgatctctcccctaacctctcggcgggtgtcgtcgaaggcacgaaccaccattgaactcggctttaggtgggaagcattgaatggtaatttctccaaagtgctctt

SEQ ID NO: 60463 - DNA, 287 bp, Glycine max
tttttccataagcttagagaagggcgtaaacaacttcaatgttcctccacgaaggcccagaactgctaaaagtcataagacagggtcaagacaaatcgcccgagacacgtaccgttagacgtgtcccacaccttcagcttagggatgagttttcgggcaccatcactctgcacagtgactgttcccgaaaattggcccgcgggcccctggtctccatgcgattacctaacatcttattatgcatctgtcacaagaggtgctactaaacttgttgagaggttcttaat

SEQ ID NO: 60464 - DNA, 405 bp, Glycine max
  unsure (1)..(405): unsure at all n locations
agctngattatgaattgattttagctntggtttcacttggttattntgcaactccttaaaagagaacattcatggtaaatgaccggttgaaacttatctttttgatgattaaccgaggttatagcacaaacgatcgtttgaattttattttaacggtgattaaatgagattacaacacaaacgatctgttgaaattcattttaacattgattaagtgagattacgacacacacgatagattaaaattcattttaacattgattaagtgagatgacgacttaaacgatcagtcgaaactcgcttaaaacaaagaaaaagatcaccgatggttgaagaatgaagatgaagacatgcacagcaaggatggacccctaagggtgcataaaatgaattcaaagcttcaaa

SEQ ID NO: 60465 - DNA, 355 bp, Glycine max
gacactataaaactcagcttagcccttagtgtcaaactgctagtataagttgtaattccttagatgctagctggtgaaatcagctaacgagggatatagaaaatatagaggaaaaagtttaaatataaattctattaaacttttaaattatacaaagatatctaagagtttaataaaattacaaagaatagcagctatttaatgtattagttgcacataccttgtttaaacaaatgtgtgatttgtcttggcacaaaaatgcgtgagttgcaccttatataagtatttcattccatatatggctatatgctagaggttttgaccaacccttctaacatatctcatatatattcag

SEQ ID NO: 60466 - DNA, 403 bp, Glycine max
agcttgtacttggtttagacatgattgattcatgatttgggacttgtaggattcaatttgggcagaattggatgagggaaagtgtgatttcgaaaatctgcactttatgcagaattttgctgtcaaataagtgcagccgaattttggctttgtgcataaaatgttgtgtatttgctggttgtggaaagagtagtacagattgggttctggacgttttctagtagatcccaacggtcataatgtagatttatgtgctagagactttcagtaaaagtttcgagtcgatccaacggttaacgaattggaacaaagaggaatgttgaaggggtgtaatcgattaccaaggggtgtaatcgattaccaggcttataaatggaactggaatgttgaaggggcctctggt

SEQ ID NO: 60467 - DNA, 374 bp, Glycine max
ggagagaagttgaactttgagttgtttctcacaagacctctcattcatcatagttacaacaagtgttacacatgcttctatttatagactaagtaagcttcttgagaagacttcttgagataactttcttgagaagctagagcatagcttcacacacccctctcataactaagctcacctccttgagaagcttccttaagaagattcctcaagaagctagagcttagctacacatacctctctaatagcttagctcacctgcttgagatgagaagctagaacttagctcgcaccccgtatgatagcttagctacacccatgacaaaaaacatgaaaaacaaagaaaagccttactacacaactactaaaatgcc

SEQ ID NO: 60468 - DNA, 419 bp, Glycine max
agcttgttcagcggtagggcatctattacaacaaatgatagatcaaggccgacttgaagtcaatagcgaggagaaagaggaacagcatatctgcatgcagtcggcagataaggaaagtcctaggaaacctaaacccttggtgatacacttcaccaggggcactgctccccaaaggccccgagtcccctcggcggtatcgggcgttagacttgttcctctcacttacaaaaatagcaacacagtcccatggaagtacgcccctccaggcgataggaagggagaagctaccaacatcggctcactgtcagccaaagtaaccaacatctctggcttaagtggcataacctgcagcggtcgtgtgttctcaccccccgacctaccagcgcaacccatgaacgctagaaagaaaacaaatgtga

SEQ ID NO: 60469 - DNA, 406 bp, Glycine max
agcttcttcaccggcttctcgagccaacgtagtgttgtttaagatggctctggaaggttcacaacattgagtgcatctataaatgcagctccaaagagtagtagtggaaggtatgtgatatatgtgaagggtggggtgtacgatgaacaagttgaggtgaaagcaaagaatataatgttggttggagatggtattggaaagactataatcacaggtagcaaaagtgttggaggaggcaccacaacctttcgttcagccactgttggtaagctttttatatttttttattattgttaattaattctaatcatttcttaggttttatgtttgactgtgttacatataaataatttaaagaatattaccaaaatttatttatattgtctataagaatcatatcttatga

SEQ ID NO: 60470 - DNA, 422 bp, Glycine max
  unsure (1)..(422): unsure at all n locations
agctnttacatgcatgttcaaaccatatttatctatacttcgatcaactgatgcaatctatttgattgaaaagataatttatattacacttctaatgtagtcgacaactaaaaaaaaatataacagaaagtaatgcttaagccaatcaaatcaaatcatttagaatctcatcattactatcatgcatctcaaagagaaggagaatcaggcatcataatgtatagcacaacaaaacattaaaagaaaacatgccttctaaagccaaccaaggtaaaaatgtatttatatttgtgaactttttcaaaattataacacatatataaccatatataaaaacatggttgaacaatctgaccacatgcacaacgcattccacacattatttntgaaaatgagtggtaagggaatataataaagcattg

SEQ ID NO: 60471 - DNA, 366 bp, Glycine max
  unsure (1)..(366): unsure at all n locations
ttgattgaaaagataatttatactactcttataatgtagnggtcaactcacaaaataatataatagaaaatagtgctttagccattcaagtcaagtcattttgaatctcatcattagtatcatacatctatatgtgtcaaagagaacgagaaacatgcatgggtatgcctaacacaacangacattataagaaaacatgttttctaaacccaaccatggtagaaaaggtttcatantttatgaaatagcatggcttcctatggcggaacaatgatattaatatggtgagtgagtcttgagaatgtttagttgattgtgtctctgaatttgaaatattactcgaaatacacacatggtctcatgaat

SEQ ID NO: 60472 - DNA, 381 bp, Glycine max
tgctctggcatattgccctaaccattgctctattttaaaacttattccccaaatggggtccttttggaactaattctgacatggtgttcttttttacgttatttgcatgcatttttcatgcaaaccgtcattgccaataacgatttggctgcagcacgacatgtgtctgggcaaaccgccaacactgtgggcgacttcatgtggaagggcatcttgtcacttgcactggcgagttcatcactgctgctgaaacccgcagtttgactggcgagtttcggaaatggcaggcctaaggtgcatgacgtgcaggtgcaagttgctttttgacttcttgagcttaaggggagatgccacttgctctggcaacttatgttaagggaa

SEQ ID NO: 60473 - DNA, 248 bp, Glycine max
  unsure (1)..(248): unsure at all n locations
gtgacgttactttgttggaattgtgacaagagaggcacttttacatcagtgcaggcaccacatatgatcaagtcgcacaataacaagaagcgcgatgatgatgaatccgcaaatgcagcacctgatgaacttgatgatgcattaatttgcagtttggatagtcctcgtgattcatgaatcatggactcangtgcgtcgttccacactactnncttaaaaattattgctactatgttctggaaattgga

SEQ ID NO: 60474 - DNA, 412 bp, Glycine max
agctttgagcaaattcaaacgacaataactttttactcttatgtctgattgagtcccgtaatatatcgagacgctcgaaatggaataccgaagccctgagcaaattcaaaagacaataaattttaactcggatgtctgattgagtcctgtaatatatcgagacactctaaatggattactgaagctctgagcaaattcaaacgacaataactttttactcggatgtctgattgagtcccgtaatatatcggaaagctcgaaattgaatgtagaagctctgagcaaattcaaacgacaataactttttactcggatgtctgattgagtcccgtaatatatcggaacgctcgaaattgaatgttgtagctctgagcaaattcaaacgacaataaatttttactcggatgtctga

SEQ ID NO: 60475 - DNA, 215 bp, Glycine max
  unsure (1)..(215): unsure at all n locations
ctggaaagagtgattctttccttcctttcatcatcacccttgttctttcaaaccacaattccagaaaatccacctctgcccagaattatctcgtggccataactcccantttacgccactcaaataagtgattcttgagcctaaatngaatttcanaacgagacctttcacctcgttttggaatcacctcanttggagccctgtagcttcagtta

SEQ ID NO: 60476 - DNA, 410 bp, Glycine max
agcttgacgttatccaagctgctattctttctttatttccttttatcttttcgctgattgaactacgtaaacatactaattaagtacgtttgataaagctggaatgagacttatagaagaagcatgctcatacatattgcaaaatacttgagttttgattccaagtgaaaatatgcatcccataaaactaacagaaccatacatgataacatgtaggaaaaacacactcgttacaaaccatgaaaccacactactactactactctttctttttttttataaccccacactagtactactacgtaccactactattcttttcaggcgacaaagcctagatttcttagaagacaataacacctcacgccataattattttcttgaactaaacactagaagacacactatat

SEQ ID NO: 60477 - DNA, 354 bp, Glycine max
  unsure (1)..(354): unsure at all n locations
gaaaatactcatataaatgttcaagataattggatggactatggatcaataaattacatgatctaacatttgttagatataagcatcatcttagcaactaaaattgaatattaaattgcaattattattattttgacaagaaaaggaaacagacttgtttcttttggaagacaaagtgtaatatagctgacaacggcattattataagagtaaaacttaatacttatcaggcaatttcttgctacaaaaatctactgctagtgtttgatggaanaacatgtgaatctaatcaaaggatcgaatgtattctactatcctttcattcttgagcattttattntattatgtggacat

SEQ ID NO: 60478 - DNA, 396 bp, Glycine max
agcttgtaagaactatagcaacattatatgagattgtttttggttgattgataaggacttagattttaatcatgggttaaggagttgtacaactgatgaagatatattacacttagtgagggatgcttttgaaaatgagaatgagataaatgtttattttcatcatgaagtagatccaattttagtagaagtcccacagatgttgtacttggaatgtgatccaattccagaagctgttgagagagaggatgatttatatgatgtacctgttactggccatgaggagggtaagttttaattcatctgtacttggtccaacatggttaccataattaattaatatgattaatttttacttgatcaccattgatgcatatgttggtggtggagagagag

SEQ ID NO: 60479 - DNA, 209 bp, Glycine max
atcttcacaaacgcctcgctatacctcatgatggaagcacaaacgtggctctggttaaggaattctatgctaatttatacaccatagaggaccaagctccatagcaagccagagtaggtgacacctgatcaatatatatgcagataggctgaaatgaatttcttcatactccagtggtgttagaggagggggaatctttacccatctac

SEQ ID NO: 60480 - DNA, 382 bp, Glycine max
agctttagtagatattggttgtttttattcttccatatgcaaaagggttgtacctcaacataattgttttagaatgagcataatagcccaaattaaaaccatgtctggagacataataagcaatgatataggaaccagaaatttctctatccagggatctacatcatgtgacatttttggcgactggattgtgatgaatatagcagacgtagtatatttgcaaccaaccaaagaaaaaatgatcttacgacttgattttattatacatgatgatagatcagtcgctattacgagagattatctattaatctctacaaactcacgaatgccgcccataatagatgaactcgcatcatagttacgaacaaagcatggtgatgcc

SEQ ID NO: 60481 - DNA, 392 bp, Glycine max
  unsure (1)..(392): unsure at all n locations
aagnctatgctgcanacatntacaatagacctcctctatctcagcagttttatcaaccacaacagaacaattacgacctctncagcaacagatacaaccctggatggaggaatcaccctaatctcatatggtctagccctcaacaacaacaacaacagcctgttccttccttccaaaatgttgttggcctaaacagaccatacatttcttcaccaatcccacaacagcaatagcccagaaacagccaacagttgaggctccttcacaaccttccctctaagaacttgtgaggcaaatgactatgcagaacatgcagtttcaacaagagaccagagcctctattcagagcttaactaatcaaatgggacgaatggctacacaattgaatcaac

SEQ ID NO: 60482 - DNA, 399 bp, Glycine max
  unsure (1)..(399): unsure at all n locations
agcttgattatgaattgattttagctntgttttcacttggttattttgcaactccttaaaagagaacattcagggtaaatgaccggttgaaacttatctttttgatgattaaccgaggttatagcacaaacgatcgtttgaattttattttaacggtgattaaatgagattacaacacanacgatctgttgaaattcattttaacattgattaagtgagattacgacacanacgatagattaaaattcattttaacattgattaagtgagatgacgacttaaacgatcagtcgaaactcgcttaaaacaaagaanaagatcaccgatggtagaagaatgaagatgaagacatgcaaagcaaggatggacccctaagggtgcatagaatgaatttcaagc

SEQ ID NO: 60483 - DNA, 192 bp, Glycine max
gatatttaaaaagttaataaaattacacagaatagcaactatttagatgtattagttgcacatacttgtatatacaaatgtgtgattagtcttggcaaagaaatgcgtgagctgcaccttatataagaatttcattccatatatggctatatgctataggatctgaccaacccttctaacatatgtcatata

SEQ ID NO: 60484 - DNA, 376 bp, Glycine max
agctattccacctttctgcttcatccctatggtggcaaaccctcatatcttactcaaatattgaccagaacacgttccgtgaagcccaattgtactgtgtttcactcctctgtggcttccaccgagtgaaattcactaaaacgtcatcaggtgacagaagcatcgaagaatagaagggacatcctcaccgcgtgtgttggcatcgtgcacagaccacccgaagccccaccgacctattgatcccttgtgcatcggcaaacatgcacttgtttcatcgagagcatgcgacgggccttgctcatatgttctttaggatcatcttagaccctaagtacctaaacgtagatttgtttaatgatgaaacggtcgatcgcta

SEQ ID NO: 60485 - DNA, 351 bp, Glycine max
  unsure (1)..(351): unsure at all n locations
gcacaacacgtttttcacattcacaatgtgcgcataaacccaccattcccatgtggccaccttcaactgagctcacgtactcgcacgtagcccatatcctacgttatctcaacaccgggtgcccatcaattcatccaagctttcacaacatccaagccaaacaacattctgacagcacaagctatcacagccaagcaaaacagagcataggcagaaaactctgtcaaaacaccaaccaaatcacagcttttctacttatagaccgcagtaacaaatctcttcgatccaattcattaacccgttggatcgactnnncaaatatactggaagtctatagtacataagcctaca

SEQ ID NO: 60486 - DNA, 467 bp, Glycine max
  unsure (1)..(467): unsure at all n locations
gcatgcaagcttgaagtgtaatgtacaagcatgtaatgttcttctcctaatcaatccatgataatgagtgaaataaaacaagatagtataataacacagcagaatacaagttactcaccaattttcaagttgtaaaaatatgtgttaaaacataatcctccttttgcttaattggagagtgttttcacaaatactaattgcttgggaaggtcagcttactatttaaaaactttagcccattgttgtttattaaggtttggtatcnaagtcacctcatctagcacttctcgaagataattttcctcaaccttttcatcatatgcttgtgtcaattgatcaaaagactcaaccactactttcatcagagtagctattccatctttttctccaatcttcctcctttgtgattatacgctagctgaacttcaagattgtccccttctttatgaactacagtgtaattccta

SEQ ID NO: 60487 - DNA, 442 bp, Glycine max
  unsure (1)..(442): unsure at all n locations
gcttatgagtccaaacatggcanagaacgtttcctactatctaattctcatgctaatctactaaatcttgtccaaaatagaaatgaattatacagaaatatttctcacaacatacggagtaaaaccccttaaacaatttcacataattatatcaaaatcaaaggaatcaaaatcataggttcaaaaacatgaaaacaccaagagcactcaattttttaaccaattcgcattagggaatctattggcctgtcaaacataacaatctcatgattataatcataaaggcaaaattacaatacaataaacatctcaaaataaatcctaatttgatcctctaaggatccctactcatgttcattctaaccctaattgcaataaactcatgtcttacctctaagcgggctcacatgtgtagtctggccatgatagcggtgtctctagt

SEQ ID NO: 60488 - DNA, 234 bp, Glycine max
gaaacttgacgaccatccccttatgcattggcgctgacacattgagccggggatgaacacgcacaaccttacgcaactagcggaatatacacctgttccgctgtgttacctctctgaatagcactacgctgttgatctagctattcgataatgtgatacctgtgacgttcaagaacatacactacaatgatcggtcaccatctgcacctggacagtacccattgtcaagaattc

SEQ ID NO: 60489 - DNA, 334 bp, Glycine max
agataaagagttttcagagctttcagaacctattttttatgtgaagcatgagaaaaagaaggagaataaaaaaacacctggtgaaaggagaagaagaggaaatgtaataaaaaattagagacaggaaagaagaaactaaacgttgtgttaaaatataaaaatatatttttatgggtatttaataatatcatgatataaaacaattattacattttaacatttcaatagcacaaaaaattggtttaaaatattaacgcaaaaaaataattaaattttatcctggatgtaaaaaaaagataataagtaaactcgtaccaaattgttatggaagaaa

SEQ ID NO: 60490 - DNA, 460 bp, Glycine max
  unsure (1)..(460): unsure at all n locations
cagctgcagctatgcanataagacactcccgcattatatttctttcttgcattggatgttggtctcgtcctttgtcacgggaagccggaacgtccatatcaccttcttaattgtacacatggggcactgcgcccccaaatgcacaagtaataagagataatttttccggctctcgtgtccgtagaatgcattcatatcatgcatcgtataagcatctcttcataacatcataatggacatatcctgtattagtccgctatcatattccagcctcacattttgaatgagacatggcatcatcatgcatatgcgttcaacaaactttttgatctgcaaaaacgcataccagtgtgttgtcatgtttgctcatccttgcgtattgctctacaaaacaagaacagaacaaggggatgcgtganacttcacactacattcttagtttcatgtgttaggcaccacc

SEQ ID NO: 60491 - DNA, 435 bp, Glycine max
  unsure (1)..(435): unsure at all n locations
gcttatgatgatcttcattattgacctttcaactctcatattntctatttccatggtgattgcgatctactttttcgttcgcaagggagacatactggatgaaactgatgaatatgttcaccttcaaaacaagtgagtaaaattacattgaattttaattggtactgtgttcatattttgccccaaataaattgatagcgaatgacaaattccatgcatcattgttcttatttttagcattagaattaacctttaaagtctctctgtttaagatattgtttctcccagtcaactatgatacttatctttgaggaaaccccattccagctagatagttatatgcttattatcatactgtaacccacggtccattctattggcttattactaattgtgatgcgagaaacagacatatctatttagataatatgcatt

SEQ ID NO: 60492 - DNA, 307 bp, Glycine max
gcacatcgatcgcgtgtatgatatccactccacaggtttgaagaagaggagagcttcaaccctataacgcaacgtggcggacaaaagggggcagtaaacatgaatgatcgccattgtcaacgcggaaggtattctgcgcttcactattcatgtacacaaattattgcagcttgtggttacgtgagcatgaactactaccaatatatagatgttgtttatacaaacgagcacatcttataagcttactccgcacaatggtggcctcttgggaatgaagctgttattactccttctgatgacgcatgga

SEQ ID NO: 60493 - DNA, 353 bp, Glycine max
aaacaacatgcaaatgagaagttgatttcaaactctgttttcatagcaagtatcctcatacgtaatcgcatatgtgtcattttggtcaaacgttgctttatcttgtgtataagaagtttgggccaatacatctgccaatgcttaaagttcaagcacacaaccaatcctgacaatgactaacatgtaaaacatcgaatacttaaatatgtttaaagactagacttcatgatccaccagtccttatgtttaattatgatttcacgtgccttcttcggatttctaggaagctttactcttatccacaaatcttccgtgtctgatctcttcggtaatttcatgtaaaggaaaacgtc

SEQ ID NO: 60494 - DNA, 473 bp, Glycine max
  unsure (1)..(473): unsure at all n locations
gtcacctgcggcatgcaagctngtacgcacatcgttcacgtatatgatatctcactccacaaggtttgaagtagaggagaccttcaaccctataacgcaacgtggtggacaaaagtgggcagttaacttgaatggtcatcattgtcaatgcggaaagtattatgtgcttcactatccatgtccacacattattgcagcttcgtgagcatgaactactaccaatatatagatgttgtttacacaaatgagcacatcttataagcttacttcgcacaatggtggtctcttgggaatgaagcggctattcctccttctgatgacgcatggacacttatccctaacccaactacaattcgtgcgaaaggtcggccaaaatcaacaaggataatgaacgacatggattggctcgaaccatctgagcaccgacaaaaatgtagtatatgtggagcagaagggcacaatatgcgccgatg

SEQ ID NO: 60495 - DNA, 309 bp, Glycine max
agcttcgtccgcagatccctcttgtatgaccaggcttaacttaaacagcattatcgtaacaacatatttaaaaccaaaacttaatccgcaaatccctcatttaagactaagtttcaatcctgcttctatcaagttctaaggtaacagtatatttcccaatgctaaagtcacctaactgtacacacaaatgggtgatcagaccaagagcatgctaaaattaagcattgaaagaagcattgaacatggaaaaaacaatcaattagatattaaagtaattacataagttgttccttataaaatcccaaaagg

SEQ ID NO: 60496 - DNA, 461 bp, Glycine max
gcttgaagacaagactatacgaggtatctttcttgtgtatatcaatatctctaagggctaccgtgtctacaacttacaaactaagaaactcgtcatcagtcgagatgttgaagttgatgagtacacttcttggaattgggatgaagaaaaagtggagaagaaagttcttatacccgctcaactacctcaagaagaagctaaggaagaagacccaggtgaaccaccttcacctccaccacaacaacaagatcaagaactatcatcaccagagtctactccaagacgagtaagatctttggtggacatatatgaaacctataacttggccatacttgaacctggtaagcttgaagaagcatcaaagcaagaagtatgggtcaaggcaatggaagaagagatacaaatgatcgagaaaaacaacacatgggagttagtaaattatccccatggaaaagatatca

SEQ ID NO: 60497 - DNA, 455 bp, Glycine max
  unsure (1)..(455): unsure at all n locations
ataggtcttcttcaacaaatgtatgttgtctctaaatgggtagatatcttcattgaatgtttgcatttgaagaagtatttgttggggcatttaatgcttgcattaaatgcacatgttcttcatgttgagaaaccaccctctttagttntctggaagcatactccaacagaaaaccatgtgcttttggttagaccaggtctttcacaaataaacatgtcttttgataaagtttgaacttgaaaccactaatagttctattatgcttcttaagatttcaatagatccagggaagaatgtttctaagacaattcctgaaaaaatgaatcttaggcacaaagtattaaatgaaaccataaatgatgcatcagatcataacatatgtttgcttccgtttgaaactttagacgcaaaaacaatatttttcatctaagtgtgcataagacgcaacttttaac

SEQ ID NO: 60498 - DNA, 395 bp, Glycine max
  unsure (1)..(395): unsure at all n locations
catatatatcnggcggataaggaaagaaaagaaaactagaggagcatatgcagaacaagcacttctctaaattgtaataagatcaaagcatactgtaacttttaaataaaagaaatatttgttcgttcttcaccagaaaaagaataatatatacgctgaatnttggagagctaaaatgttatctaaacctaaaaattccagtcctcattatactaatcatttgctttgatattattgaaattataatatagctagaaatatcctttagattcttctcccaccgaatttctttctgaaaaattaccaaatcttacctctccgntatactaattaatcttcttgaatgaacaacacttgtatagggacacaacatatcaccactttttttaatccct

SEQ ID NO: 60499 - DNA, 452 bp, Glycine max
  unsure (1)..(452): unsure at all n locations
agcttagaacaatanactnggccttctcttattttgttttgggcttggcgaccacgatcaataaagtacttttggcacctacaatatgttgacttcaccaacgctgttattggaatgctgcgacaatctttcaacaccttattcacacattctgataagttggttgtcatgtgaccatatcgccgtccagatgtatcgtaagccatgctccatttttcctttgagattcgatcaatccatcttgctatagctggactcaattgacgaaatttttctaagttttgatcaaacacatgcttgcaaggagtgtacgctgcatcaaatatgttatcattcaacagtgtacgtagacatgaaactcaaattaaattaatgtataaaataaaccttacccaatttcttgaacatctctttttgttcgcgttgtgaatttgcaatgaattgctgctatg

SEQ ID NO: 60500 - DNA, 401 bp, Glycine max
  unsure (1)..(401): unsure at all n locations
agcttaacaaaaggcatgcgaagtgggtgtaatttctatagcaattcccttatgttatcaaacataaaaagggacaaggtaatattgtagccgatgctctttctcggcgtcatgcattactttctatgcttgaaacaaaattgattgggcttgaatgtttgaaaagcatgtgtgaaaatgatgaaacttctggataaattattaaaaattgtgaaaanttttcacaaaatgattattttagacatgagggctttcttttcaaagaaaacaaattgtgtgtgcctaaatgctctactggaaattttcttgatggtgaagcacatgaaggaggtttaatggggcattttggggtccaaaagactctataaacattacaagaacatttctattgtcctcatatg

SEQ ID NO: 60501 - DNA, 154 bp, Glycine max
agaaacactttcaaaccagggaaaggaactgccgtaccctatggaaccttccaagacagatgaggaatgccacttggcgagagtcctagacaatgtatgaaactgcacataactatgccgcttcgagaaacgatgcaacagatgccactctact

SEQ ID NO: 60502 - DNA, 396 bp, Glycine max
agcttatgcatggaaaatgtgattatgtatattatatgcccgacaaaacaccacttcctagttaaccatgcattaggtaccatgttcaattattttgtttttaagtgaaacgggtttatgatcccaacatggttggctcgtggtgcctaacacatgaaactaacaatgtagtgtgaagtttcacgcttcccatgacataggacgagaccaacatacaatgcatgctagagataaaatgcgggagtgacttgatttgcacaagcattttggagtagaaacatgggaccaactcattttatttcaaaaggaagtcgtatctagtcaggtctgagagaccatcaagtttcctacgatttttattatgtggccaattagtctatatatgctgacataatc

SEQ ID NO: 60503 - DNA, 445 bp, Glycine max
  unsure (1)..(445): unsure at all n locations
agctagctggaggngcaangattgatgctttatctttgagctacacagaggtcctttaatggtgattttccaccatggagatgcaacgaaagacaaaagagaagatgagaaaggaggtgccatccactttgtaattagccatggaaaaaggtgcttcaccaccatgatgagccttggacaagaagctcggaatgatgcttccatggagaaaaagaaaaacggagagaaagtgagaggggggagcacgacattgtttgaataaaacagggagagaagcggaactttgaagtttgtctcacaagactctcatcatcaaagctcaatagatgtccacacgcttctattatagacacgcacttccttgtgaagcttatttataaaacttcttgaaaagctttttgacaaactttcttgggaaggaagaccttgctataccacccctctt

SEQ ID NO: 60504 - DNA, 324 bp, Glycine max
agctttgttctgtgtcaaaatgttatatattatatttttgcatccagatgggtctatcatgacgctttgactatactaagtcaatttattcaaaaacaaattatttaataaagttgcacaattgcctgcgtaaatgtgagctcctaattaaggcattataaaaacgattttagccctccacaaaaaatttcattatatctagctgctaagatgttcaaaaatcgcctcttagacccttatttaattttgttaatgtattcctattaaaatcttactacaatagttttctaacagggacattgttatttccagcattaacatttt

SEQ ID NO: 60505 - DNA, 78 bp, Glycine max
cagcacttaagatcaagaggggcctatttttatgacatatggataactatgttcacctcacccacgcaatggcatttg

SEQ ID NO: 60506 - DNA, 458 bp, Glycine max
  unsure (1)..(458): unsure at all n locations
gcttgacttgagtcatcaagagattatatttatatgaccatggcacgaatttcataaataatctatctttcaatcttctctcaacatcattcaatatctttcaaccctttctacaaaattttctgattcatttctcttcatctttctcaaagattttgttcaacaattttctcttccaagaagagttctttgttcaaaaacttgtgcctattattttttttcattctcttctcccttggccaaaagaatagaaggactaaccacctgaattcttttgtgtctctcttctcccttacaaaagattcaaaggactaaccgcctgaattcttttgtatctctcttctcccttacaaaagattcaaaggactaaccgcctgagaattcttttgattcttcccttccccttaagcaaaagaattcanaggactaaccgcctgagatatcttttgtttccctta

SEQ ID NO: 60507 - DNA, 443 bp, Glycine max
agcttcctccacgttttcctccatacctagaacttcaaaccttcgattctcactcaattcttcaccaaatcacgtcccgtaaagcccaatcttcctctttttcactcctctttcacttccaccgatcaaaatccagaaaaacttcatcaaatggcagagccatcaaagaagagaaagggatcatcctccactgctaccgctgctgcccatcgccgtcacggcccatccggagcacccacagcacctattcctccttctttgtcatctccaagatcatcaacattgttttcatccgatgatcaacgtctacggtacctttcttagttttcttctagaataatcttagaccctaaatacctagacgtagagttctttaatgatgaaacgtttgattgctatcaagtgtatcaaaattctggtcttattgatttcatgtcatttaa

SEQ ID NO: 60508 - DNA, 381 bp, Glycine max
  unsure (1)..(381): unsure at all n locations
agtcactgccgctgcagcttggaggatngatggggacccggcgtttatatgaactacgataatggctacgagtgagtacgtgatctcacttagaggtgggcaacacgggatggtgggttatacgtgatttgtggatgtggagaatcattttgcaccatcgaccgactgtcacctagtaccacatgtgatgggtaccccattatccgactagcttgaaatgatgaagtgtataatggcgatacattctgcttttattctttgaccacagattggaacctgcagatatgtcttgggggtcaagagaccttggggacgtcatgtggtgtgctattgcccaaaaccaatcttgtatcatcttgaccatcccgggcatattattta

SEQ ID NO: 60509 - DNA, 392 bp, Glycine max
gatattgcattctcttgagtggaaaccctcttgtgaggagaaaattgtctttgtgcaatccaaacatacaaaccctttgttgttgaaagatcattcaatggctcgcacaggttataaccagtggtgttgctgtgccaacaatggctaacttgtgaaaatcaatggggttgctggcaagatgttgaaatccagtggttggctgatctaataacgactagttgtgttagtgaaatattcttttgaacgatatgaactaaacatcccacgcttagggtgaactagcataaaaattattatgcatcatcttccctttttctctttacactatgttttttactctagctgctattgtattaactatcctaaactgaaacttctatgaaaacacactt

SEQ ID NO: 60510 - DNA, 339 bp, Glycine max
gcatgcacactcattatattacaatcaattgttgttgtatattttactgacttacaaaacaaactattttctgaagtatctagtacttttaagaaaatatgccaaccatttgcttgaagggaaaaaaattacaagtttaattgtgctatttgaaaaatgttgaagtgttaaaggaatactttaaagttcgatagtcaagaaactgaattatccaatctagtcaatctgcttttaatcggactggatagtagaatgatcaatcttcttcaaatcagtgtgcagttcaaattcttattataggattcactatgttatcacattgttgtgaacacttgatac

SEQ ID NO: 60511 - DNA, 365 bp, Glycine max
tttctgaatacgtatacttctgtttttgtgtctatgaacactcgttatgtgatgcttgattaagtaattatgttttcttacaataatttgaatgattaaagggtattggtttttctatgaatgaaatgctatgatcttttccttctttcacatcatatatttatatgtctactctatgagtagttgtgactttttggccttgttatgccaaacggtggagaaacattgcattatgaagaagtagtgcattgcatacttacattcttatacaaatctattttatgatgatgatgatatgatttgacacttctcttagtgttcataaactcttccaatgcactcaaatggaaattcatgtttggtat

SEQ ID NO: 60512 - DNA, 236 bp, Glycine max
aaagcatgaagatggagacgtgatgatgcttccactggaccctccatttcataatagttattataagatggtcacattcatggagaaacacatgcggtgaacttaatcaacacttaccatttttttcacacctccatgagccatttatcaatcaaaacagagcttctccttccgacccctctcttatgcaaacgcccagtccaactcacccttccgtgtgtgaagccccacatgaa

SEQ ID NO: 60513 - DNA, 376 bp, Glycine max
gcaagcttacaacaggcacacaatttgtctgggtttcacagatatacaacaggcacatgttctggcttgacaaggagtattctgacacatgcacaccaaacggactggaaagtaacccgtcttgcggaaattgacattgctaactaaaccctaagattttgagagattaaaggaagtccattcaggaagaataaggataaaagtggtacctctacagttcttcgagaaattatatgctttgtgggtcaccaaaataacctgcccagcaatgtggctataacactaaaagactggaagctcacaatgcgagtgttttgctttatgccacatgcacattaaccccggtcaaatcggaagagtggaagctcaaattata

SEQ ID NO: 60514 - DNA, 434 bp, Glycine max
gcttgaagtctatataaagcttcaagatgttatgtatctccttgtagagcttgtacgcctcggatcttcttcatcaatggagtcctttgcttcttgaagattaatggcagtggaatggagatggaagaatgatgattggagatgccacttcaaggagaagattagtcaagaagaagctcaccaccataggaagccattgataagagcttgaaagtaatagaaaaggagtggagggaaagggagagaaggagcacgaaattttatgcgtcaaaagtagtctgaactttgaagtttaattctcaaatgatcaaagttgaaaaaatgcacacacatgaccactatttatagcctaagcgtcacacaaaattcgagggagatttgaattttattcaaatttacttgagtcgaaattgcattggcccccactttggtac

SEQ ID NO: 60515 - DNA, 378 bp, Glycine max
  unsure (1)..(378): unsure at all n locations
ctctcgnggatgtaaccttactcaaggtgaaccacgtaaatctggttgggtgttctttctctcttttctctccctttcaattctgcttcaatctgtgtgtatgatatttctgttctgctgcatctactgctgctgttcttgtttgttcttcatcacttccacaacaaactagtatccagagctcaagttgcgatcaagggaattcaagattctcgtctgaatataaagatcaagttgtgggagtcttgtttctggttctttcgctacttctttgtgatcaagaacattcaagaaatcatgtcaaacacaatcaggattgagaaattcaatggaaagaacaacttcaatctgtggcgcatcaagatgcgttctttgttg

SEQ ID NO: 60516 - DNA, 470 bp, Glycine max
  unsure (1)..(470): unsure at all n locations
tcttaagcaccgaggctgcagcttacatganagctacatcaaaggtgtttctatagcataataaaagtttcataaattgttttaaagaaaaaagtcttacttctgaaacattgagatttttagctattgggccaaagctaaatgtctccacataaaagggatatgatatcaacaatttttccttctacacaaagtcacaggatgataagggtacactgcaaaatagtgggataaatatggatgttggttccttacacttttgtagtgcaccagataacaaccccattcacgcatccacaccttactttggagtcattgaagaaatctgggagcttgattatagtaaattcagagtacttcattttaagtgtaagtggattaatggaaatatcagcgtgcgacaaaatgaaataggatttactttggtagaccttgataaggtcgtttataatgatgagcctttcatcatg

SEQ ID NO: 60517 - DNA, 428 bp, Glycine max
  unsure (1)..(428): unsure at all n locations
gcatgcaagcttctatntcccatttcgagagtctcgattattattggactcaatcgaacattcgaagaagacgttattgttgtttgaatctgctaccagcttccgttatcaacatctgatgcgtctgcgatgtattatacgactcaatcggacatctgagtaaaacgatatcgtcgatagaaattactctgagcttctattctgaatctcgagcatcttaatatatttcgggactcaatccggcatccgggtaaaaagttattgtcgttagaattttctcagagcttctgttttcaatgttgagcatctcgatatattacgggactcaattggacatccgagttaaaacttattgtcgtctgaatttgctacgagctttcattttcaatatcgagcgcttcgaatattatgggactcaatcggacatc

SEQ ID NO: 60518 - DNA, 283 bp, Glycine max
agactggaaagcggcttctaatgactactctgcggcttccacataaggcatagaggatgggcagctcaccaagatgtcttcctcgcctgatacgatgaccagatgcccttccactatgaatttcaacttttgtgggagtgtggagggaacaactcccactgagtggatccacgggcgccccaacagacaactgtagggggggttgatattcattattgggaaagtaacttgacaggtgtgagggcctatctgcgctgggagaacgatctcttccctaacctct

SEQ ID NO: 60519 - DNA, 431 bp, Glycine max
  unsure (1)..(431): unsure at all n locations
agcttcttatttcatcagatgaagatttatttgtggccacatcatggactcctctaaggacaatagcatcatttcttgcattgaattgttgggagttggaagacatcttctcaatcagattcctagccttaacaggagtcatatcaccaagagctccaccactagcagcatcaatcatactcctctccatgttgctatgtccctcatagaaatattgtagaaggagttgctcaaaaatctggtggtgaggacagcttgcacacaacttcttgaatctttcccaatactcatacaagctctctccactaagtttcccgatgcctgaaatgtcttttctgatggcagtggtcctagatgcagggaagaatttctccaagaacaccctcttaaggtcatcccagctggtaatggacctgngagcaaggtagtac

SEQ ID NO: 60520 - DNA, 408 bp, Glycine max
  unsure (1)..(408): unsure at all n locations
tgcaagcttgtnaattcaccccaattccagtgttttattctgacttgctcccatatctacttgataattcaatggtagccataaccctagcccaggttcatcaaccttcatttctccgagaatacgactttaacgcaacgtgtgcttgtcacggagaagccccggggcgttccattgatcattggatggctctgaagcgtaaggagcaaggtctaattgatgcgggctggctgaaatttgaggagaattgcgtgtaaatcctgacattgacaagagatgcctcacatggggcaattttgaaagctgttgttaggcgtccctaatgactcatcatggtttccaaggttatgccattattggaaaccacagctactatgttaaatgaaatggataaagttgataattttg

SEQ ID NO: 60521 - DNA, 424 bp, Glycine max
agcttataagaataggccaatgtacataacatttatgttcaataatattcatcatggaatgctcttgaatgtattggcctacatattctacatgttatgcatcttaggagagtacgtaggcgtgtctattttcattcctatttgaaaaccacaacaacaatagccttatctcgttagggaggttggctatatggattacaacaataggctgagcgcatcacttgaccaaacaccacccctttatgatactactgaaccttagttgtcttcttcttcttatccttctctgtctctcctaagaccatcctcttcttctctctttatatatcactttggaacttggaagctctatttggattatacccagaggaacgtggaacttataactaaaaggttttgtttaaggatggcaactctatagtga

SEQ ID NO: 60522 - DNA, 460 bp, Glycine max
  unsure (1)..(460): unsure at all n locations
atcctataagtcacccgcggcatgcaagcttaacaacacgannttagagtttgtctttgaccttgctanctaaaacaacttgttaggaagcttgagcttgactcttatagtaaacaagtcaagccgagccgagccttaaataaacctttgacgagcggttcgactcattctcatacctaccttcatgtaaacacgttttcttaccagggatgtcaatgcataaaaaatagtaattaaaactaaactgaatagacatattaagaacaaaagtggtgggcatacgcttttatagttgctatatttcaagcagcaaagaaaaaaactctaaggcggagacttatgaactcttatgtcatatgaacgaatataatattagcgatgcatcacactatattgattcatgttctgcgtccgtctcccatgagtagcgggattctgctagattcgcttncagaacaat

SEQ ID NO: 60523 - DNA, 463 bp, Glycine max
agcttgaggaactttaaacaacaataactttttactcggatatcggattgagacctgatgcaatcctaccctgcaagggcattggatagaaaactccaagtagattgggccagagatgcaagagaaggccctagggttcttatgagccttagggtagattttgggcccatgggctaagtacgagcccacttatctttgtaaatattagattaaggtttcattatttttgggccttgtatttagggctccataatgtaggtagggtacccttgaaatataggatttttcagcccttgtattttagggcacctagactagtttttgtattaggggtagttttgtaatttcacatgcactaagtggatatttgatgtgtgtggttggaaataaatttaattgaattggtagaagcccaatccaattaaattttagagggggaggtgaacatttgcttactacaccc

SEQ ID NO: 60524 - DNA, 401 bp, Glycine max
tgcagcttgagcaattaaacgacataactttttactcggatgtctaattcagtcccgcaatatatcgagacgcttcaaattgattatcgaagctctgagaaaattcaaacgacaataactttttactcggatgtctgattgagtcccgtaatatatcataacgctcgaaattgaataccgaagctctgagcaaattcaaacgataataaccttttactccgatgtctgattcagtcccgcaatatatcgagacgctcgaaaatgaataccgaagctctgagcaaaatctaacgacaataactctttattcgactgtccgaatgagtcccgtattatatcggaacgctcgaaattgaatattgaagctctgaacaaattgaaacgacaataactttttactc

SEQ ID NO: 60525 - DNA, 446 bp, Glycine max
  unsure (1)..(446): unsure at all n locations
ctgcagcttgacagagttcacgccgagcaaagttttatccgtgccggtgatggttntcacaacttgaaggtaaatttttattatattggtttgtgtttgattgggatgattatgcttaattatttggtgttgactntgggaacatttttatgagattaagaccgtggaactcgtgaagccaactgggtgggttgatctatccttgtctggagctgatcctaggtaagtatagtgttctttctgtatccagtttttgttggtttaagtttgtatccagtttttgttgtttggaagcctggatttttgttttcaaccaaattttgtgtgcatgttttggtagatttctagcatagagtgaaaatgaattagtatacttttcttcatttttttctataaaaaattagtgatgttcatattaattgaatgatttgctctcattggaaaag

SEQ ID NO: 60526 - DNA, 443 bp, Glycine max
ttaagtcacctgccgcatgcatgctagaaagttctgttgttggatgagctttctttattttagatgaagctgaccacgatatccccaagaattgtgaagatatatgctatacatgtcatacttgtcgataagctataaaaattgaaaacctgaaaaacacggaaactggaaactagggactttcatcatctacaaaatattcactgacagagatttttctatgttgcttcataatatcttttatctgcatttgacacattcatgctgacaacaatgctgcttgggcagtctctatttaagctttcttacatatgaatatgcggaccttcttattataaacatgctgttaacttataacacggctacactttttgtgcttattgttgaaattgctcatgttaatacatgcgacaagtttgatttaataccaacacttgctgata

SEQ ID NO: 60527 - DNA, 429 bp, Glycine max
  unsure (1)..(429): unsure at all n locations
gagcagaactcanaattctatttgacttgctgaagcaagcaatctcccgcttaatcaccaaagctcgacaagcctaaaatcaatataaagttttagaaggagaaattgtgaaaattgaagataaaagctaggaaaatcaagagcacgatatttttcaaggataaatcagctaaagaagacgataattacttgaattaattagagatattatttgtttgtaatttcttgtgattttttccttaattaaatctagcaacaattctataaataggaggctacacattcattgtaacagtgtagaagtcccgggcaattcttacaattatattttagacttccactaactagacgcctacactattccattagacattctacgtttcattgtatgagtacaattccttccacctaggagaggaaaaaatgaac

SEQ ID NO: 60528 - DNA, 352 bp, Glycine max
ttgaacgagaaagccatgaaatgaatgttgctatgacatactacattagctatcgagtcagagagacatccatcatatgttatgaagttaaatgttgcatataagaactcatcgtttaagaaagagtgacttacttgacccataatggtaaactcaattctagaactaagtggataattgtgtatattaaatcgggtaacaacacataaaaactacgtagaattcatactttgagaaagtcaggatggagagaatagaccgtgttaattctcaacaataaatgttggaaagaacttatataaaagaatatccaagcatagtcccctttcgcataacatggaaacattgaatt

SEQ ID NO: 60529 - DNA, 367 bp, Glycine max
  unsure (1)..(367): unsure at all n locations
aagtctacctgctgcatgctagcttcaccgcagcatctaacttanaatattattctttcttatgcttcagctcatgttccaagtttggagcatttaatttatatgctccagcttgagggggagtgttaaatatatattgttgacagctgctttgcgtacacagctgtgtaagtaaaaggctgtttttagtgtgtgcgacgtggagtgtgtatcaatccttatgtgttgccatgttgagtgtgtgggaagctgagtatctaatccttatccaaaggcagccccctctctctctttctctgtactatatatatgtataagcaatgactgagaaaaaaacttagcacttctctattgtcgttgttatctc

SEQ ID NO: 60530 - DNA, 442 bp, Glycine max
  unsure (1)..(442): unsure at all n locations
agctngtccttggtttagacatgatttatatatgatttatgacttgtaggattcaatttgggcaaaattggatgaaggcaagagtggtttttgaaatctgcactttatgcagaattttgctgtggaaatgtgcagcagaattttgcataagtgcacaaaaatgcttatgtatggttggctgtggaaagggtagtgcacatggggttctggacattttttagtagatcccaacggtcaaaaggtaggcttatgtactagagacttccagtaaaattttcgagtcgatccaacggttaacgacttgcaaagaagaaaagttactgggatatttgtatgtgacaagctgtgattttggtttgtgttataagcagagtattctgcctttgccctgttttgcttggttattgtagtatgtgatgatgggatgatgaatttcttggat

SEQ ID NO: 60531 - DNA, 447 bp, Glycine max
  unsure (1)..(447): unsure at all n locations
agcttgagataagagactgccctattggcgacatgtttcttctgacggacgnagggaagtatgaaacaatgcgatccctttggatgtcgtcctgtgaagtgactgtctgagcctgcatgttgctatccaagaagatgccaaggatgaatgtggagatcttcaatgataacgagcaagaagattgtagtctggaagatgggcagaaggtagagaagatgtatttgtatcttacattggctgggaaaaggaaagatgcaccaaaatatgtatggactctgtaggngcattttttaggtcatataatttcttggtattcanaagtttgtacttgtttttaggctgactgaattaatgcaattttagccgggtgtagtgatttgaacttccttgattagctagtttatacatatgttagattgtctttcttctaatattattattcctaat

SEQ ID NO: 60532 - DNA, 448 bp, Glycine max
  unsure (1)..(448): unsure at all n locations
agctntactggtacaccacatggagatgtcttctgttgtagaatgagattagaccacatgacaactaaacaggtaataaataaactatgggttacataaaaataatattgagttttgtgtttttaataattaactaattattccttttgtattatttcagttcttgtggaattcatatctccactttttggatgctttggagtcgacaactttcgtaggctcctccatatggacagccagcacccctctaatttgtttctcaataatagaatgacaccaagcagatagagttaaacttcaattccgcctccgataagacataccagatcccccaagaaacatggacaaatatcacaaaatcgtcatgcgaggtcgaactgacacaaattatgctgaanaacatgcaaaatggataatgtattggcaacaagtcaatcaatggttttac

SEQ ID NO: 60533 - DNA, 380 bp, Glycine max
  unsure (1)..(380): unsure at all n locations
agctntgacaatgtcaagtgttttcttttatatcaacttgatgcaactttttattatatattaatatggagtacatgtaagagccactatgttgggcacatgctgatcctacatggacttctcaacaaatctaggctctagcttgcaaaaactcaagacatggaggtacttaataatttcatctgttaatgtttaaactcaaacaacaggttcttatcttggattgaaacagaagcttcagaagctagacactatcaacaggtttattaaaaagatcattataatgaanactcaaaatattctatgcagtaccacttttatttgccttntcctctcttccatggcttctagatgccactccttgaacacattcacttttc

SEQ ID NO: 60534 - DNA, 463 bp, Glycine max
  unsure (1)..(463): unsure at all n locations
ctgcagctactccgacaatggtggcctcttgttaattaagcgactattcctccttctaatgacgcatggacacttattcctgacccaacagcaattcgtgcgaaaggtcggtctatatcaacaaggataatgaatgagatggattgggtcgaaccctctgagcaccgacaaaaatgcagtatatgtggagccgaagcgcataacaggcgtcgatgtccaatgcaatctgagcgtgggagttgttcaactcgttgatttatgtatgttagttgagtgacttgtatttgtttaagttctcttcaatgtattgaattcgtggcgttgaataaatttgttagttaaaaacataacttattttgcgttgtgtacattagctatttttggggttcaatgacattcttagttaaatacataatcataaaccgtaaccctaaatcctactcgtnaaccctaagccctaaac

SEQ ID NO: 60535 - DNA, 455 bp, Glycine max
  unsure (1)..(455): unsure at all n locations
agctatanaagtgtttacatactgaatatgcatattctatgtgaaacaaattccctgtggatacgatactcggtcttattgttttatactacttgtgcaaattggtacactttccgtacacgtttaacagttacccatctttgattatgtcacttcaaaatcctctttacccctctcctcacccccaccaacatagtatattgcctgcatgatttacaattgcaaaaaagagccactcaacttataactaccccacatcctacaacaaatttctctaataatcaactctttttttgtttctttcacacataataattgtaacttttcttttattactacctctctaataatactcctcttaactgccatcttggcccccttatgttcacatataacattctcatttataaccaaacttgttcccatcccctttgcataatgatagctcgttaacc

SEQ ID NO: 60536 - DNA, 459 bp, Glycine max
  unsure (1)..(459): unsure at all n locations
agcttcangcatctaacatccaacccaacttatatacctaagataaccaactccaactccaactccaactcaagatcattagaatgcttcaaacactaaaactcacacctgcccaaaacttgcttccttggagagattccgcaaacgatatttcaagcacaataggtggtgcaagaaaaatgagtaactgagtgagcgcatggcatgaggctacagaaagaaattactttacactcaaaccaccacagcttgaccagtaatttcatcatgaagctgaagcgagccatctttcatcaaatttaggctcaaactcttgaatctctcccttgaatattgcctagatgctttcctccagtcagttccagttttcatcatcgccacaaactcctcataactgatgcgaccatcctgtgaagtgaaaacagaaaatcgaataagattggaatgacaggtaaagaa

SEQ ID NO: 60537 - DNA, 418 bp, Glycine max
  unsure (1)..(418): unsure at all n locations
gtcacctgcggcatgcaagctntcatcactcatacatctacgtgatcattgtataggcatggtagaatgaagttctgatagcatagtgaacactcaaaatatcattaaatagataaaaagatatttacatcaagtacctagaaggaagatccaacagaggatttagctttccataactgggaagctttatttacaacaaagaaaagagaaagatgaaagattgcagaaatacaagtggtggtgatgtctccttcacctctaggacctctcaatcactcatatactcagctcacgctctcaggacgactttcttttccactactgatcttcacacaacataatctctcagactctctagaaattggacctctctcttcctctttttagaactggagacatgcaagagctccttataaaa

SEQ ID NO: 60538 - DNA, 440 bp, Glycine max
  unsure (1)..(440): unsure at all n locations
agctntgcttctacaatctccccctgtttgatgatgacaacttctgaaatcaagaaacacacacacattttttcctagtcgatcactcacataaattctccccctttgtttttgaatttgtgcatatcttaaaattaaattgattactcatacgagttcttgactttaatgtcatttctctccccctttggcatcaacaaaaagccaaagtgtgtaacaaatgtgaaataactaaacatccatacaatactcattgagaaactaacaaccaaaccatgaagcatgaatcatgaagcaacaatctattaaaactcatatagtcaaataacatacttaatgtttgttcaagcataccatgcagatagggaaatagtaaattggtcaaataccataataatattgttgagactttggcangtgcaccaaatcgctctcaagta

SEQ ID NO: 60539 - DNA, 452 bp, Glycine max
  unsure (1)..(452): unsure at all n locations
agcttagagatagaatacttacttgttgtttatgaacaanagcgcacaacggaatcaaaaaatgcaaaaaatgatgaccctagggctgcaaactcgtaaatcccgtgtgtatggcttttgaaagggggaaaagaagtttttgaatggaaaaacgtcccccctctcgtcattcttatattttggtgcaggggtggctcgcccaggcgagctaacctgcattttttttttttgagaggaacattaaccatgtcccctccttccttatggtttagcgctttgcctaacttgaacttacttaagttagaattaggcgttgattacttatttttaaaacaaacaaatagtaagacaacggcgaatacaaaagatacggggctgccttgcagcgactgtctctacttgtctagcgcatagaaagggcaacgatcagtctgtcgtgaccccatccccac

SEQ ID NO: 60540 - DNA, 315 bp, Glycine max
  unsure (1)..(315): unsure at all n locations
tgctngacacaagaatgcactcacacctttgtatatagtatctccggctcaccgtccatgtagaagtttttattcttcttctgcgttgtagactccaacgaaatcaagaccttggtgtgatgacactcacaagtctgacaaaagaatggagcacccatacatgcgtgctctcacaactatttctattacttccgtaatataaggagagtgtccacagaagagcctttccttcttatccactgttattgaccaacaacatatacggcgctaaaatggtggctgattaatgcacatatgacatcaattgtgttggct

SEQ ID NO: 60541 - DNA, 422 bp, Glycine max
  unsure (1)..(422): unsure at all n locations
cttgagccanaatcctgactcaccatattctttgacccagggtgagaatgccaatccttaccctcggaagcaaaaaagagaaggaaaatttccaatgaaagcaaaaaagaatagaaggaaaattccccgatcaaagagtgggagaaagcaaaaagaaaagaaaggaaattcccaatcaaagaatgggagaaagtaaaaaagggaaggaaagaaagttcttgaaggaaaaaacagaatgaatatgcagagaggtctttggaccagacaatatctgaacaatacagaattgtcaccaaatgaacgaaaaaagaaggaaagggaaccacgacctaaaatagtcttctccctttgattaccaaccaaaatcccgtgcgctagcgacttttatttctcgccccgcactatacaaaaacagaaaaaga

SEQ ID NO: 60542 - DNA, 53 bp, Glycine max
ggacacgcgaaaaaaagagcatcgcgaatggtgactgcaaaggcgggaaaaaa

SEQ ID NO: 60543 - DNA, 355 bp, Glycine max
atgcaagctagtcgcacatcgtacgtgtctattatatctactcgacaaggtttgaagtagaggagatcttttattctataacgcaacgtggcggacaaaagtgagcagttaacttgaatgaccattattgtcaatgcataaagtattttgcactttactatccatgttcacacattattgctacttgtggttacatgagcatgaactacttccaatatgttgatgttgtttacacatatgagcacatcttaaaagcttacttcgcacaatggtggcctcttgggaatgaaacgacaattccttcttctgaggactcatggacacttattcctgatccaactacaaatcgtgcaaa

SEQ ID NO: 60544 - DNA, 417 bp, Glycine max
aacttgggaagctgattagcatgataaaaatcacattttaatccgcactaattgctttggtttttaaaataatagtttgatgttgaagtccatgacatttttataacttgatgcaaagttgatgaatccataatattttagcaattcaatattgttacttccaagcatatcttatataaagattaaatgtctatatatcacactatatatcacattagagaagcttccttttttcctttgtatgaccaagaaactatctttgttcctgacttgatgaggatgttgtatagcaaaaagttgtcgcgtggaaatataattataagttcccttgtttggcctatgttcgcaacttgctacaagtagatgtttacaaggagtgatttaaatggatattaaacttgtgaacctcctatctat

SEQ ID NO: 60545 - DNA, 460 bp, Glycine max
  unsure (1)..(460): unsure at all n locations
gcttngaggtgaaaggaagaggacatgatgtatgttgagttgagacaatatattcattacaatatggaagtgggacatgtaccacaaattgatgatatcccaattccccaaagcaatagaaaggtggttgaattcaacattgagaacaagatgaataatttgtgaaacattgttgacaacaaggaaagaagtccattgttagtcgccttatactactaacttttgtatagaaatcattttccaaaacttgtatagttccccaatttatagttattttgtagtgatttttgtaaataaattttgttttatggataaagctgtctctagaatatgtccattggatttaatgattaaatatgtgtaattttaggtgaaaaagaggctaagtcattgtcataccctaatttcatccgaggaccatcccgttgttgggatgcgaccctcgtttgaccacttctag

SEQ ID NO: 60546 - DNA, 427 bp, Glycine max
  unsure (1)..(427): unsure at all n locations
gctgatgatatggggtacccatcacatgtgttatctangtggcggacgggcgatggtgcacaacatgttttacacatacacaatgcgcgcataaacccaccatcccctgtagcccacctccaactgagctcacgtactcccacgtagtccatatactcgtttctctcaacaccgggtgcccatcaatcctcccaagctgtcccaacatcgaagtaatgcaacattcaaacagcacatactatcgcagctcagaaaacagagcaaaggcagaaaactctgccaaaacaccaaccaaaatcacagcttttctcacttaaagaccccagtaacaattccttcgttccaattcgctaaccgttggatcgactccaaatttttactgtaggtttctagtacataagcctacgttttgaccttgggatctact

SEQ ID NO: 60547 - DNA, 366 bp, Glycine max
gcaagctatgatgatatggtctacaccgattatatgttctatggatgtctaaaaagaggcagatctgatcattatgctttgatacatgccaaaaaaaacaagggcaaatgaagatggtcataatgatggagaagcccatgctgtgactgccattcctatacaacaaggattctccccaacccaacatggtcattactcatccagtaacgaaccttcttcttaccccccccccacatatccatataggcaatacgtatatcaaccacaaagtctgtgtaccgtactttcaatgacgaacaccacctttagctaagccataaacacccacccagaaatgaattttgcccgagaaaacctgtataaatc

SEQ ID NO: 60548 - DNA, 437 bp, Glycine max
  unsure (1)..(437): unsure at all n locations
gcttgtaaagtttaagctagtggatttaatttgttagtttagctaatgtgttaagctatttgcacacgccaaagttgagggaacatatgcagtattgtgttgatcatcctgaagagataaccaagcttgcaaaggtgaaacctcaagtttctgaacttaagggtgtcatgatggagttttttaagaaaaggtacagatgcactacttagttgcactaatttaagaggataataccatagaaattgaagagatcaattggtactagaatcatttttgccaataaataaatatgattgtcactgtttgggaaaaaaagaaggccaaggcaggggagtatgaatcanaatcagaaaccaataagttctccattcccattttcatattcaacacagttcccatgtttggtgtctactgtctaggttttaagaatctatgat

SEQ ID NO: 60549 - DNA, 454 bp, Glycine max
gcttatagtcattacttgttgagaaccatatttcttatttgaatgttcctttgatataggaaataatttgttttgtggcctcgacatgagtagtggttggagtctccatgtattgactgatgagtcgagtaccatatagaatgtctggtcttgtggacgtcaaatatcacaaactacccaccaaactcttgaaatttgtagcacccatcttttttgcttcgtcaaactttgataacttcattttgcactccaccggtattccaattggcttgcataagtttgctatgaaatgaagattcaatcttccttttgctttacctcaataccaagatagtatgacattagtccaatatcggtcatcttgaactccttgaccattgctttcttgaacttttcaaacatacttgtgatacttcccatgaagatcaagttatccacatatatgaacatgatc

SEQ ID NO: 60550 - DNA, 421 bp, Glycine max
  unsure (1)..(421): unsure at all n locations
gtcacctgcgngcatgcaagctataaagaagtggcttgacttgatacatcacccctacccgtatgtaacctgtctttgttggtcaccattgatcttatcctaaacaaactttcaacaaattcaacggttgatagtagaggttccaattgtggtccctctttcacgagattcaccataaaagcccaaaaacttccttctcaattacgtcacacacacatgttctatggtacctattattattacattacgcctctaaggatttttcttccatcatcttcattgtcaccaattatgcgtgcaatgtgttaaaggacaaatgtggataattgccacaaggttttaagctggtcaacatcaccgccagcgatctcgtccaaaaaggtccacgcgatgcctaataaaatatcaagattcctttata

SEQ ID NO: 60551 - DNA, 395 bp, Glycine max
cctttaaagtcctactgaattagtacaaagtaacttctagcaatttggtgagtaattcaacactgtatataataagaacctttgtctgtaaaaattttaaaaacatatacatatctaacatgaacttaatcttaatttcaggatgcactgagttctatgtactcatttatgaaagatgcaaaattcaccaatgtttatttggaagggactacaaaggcaacattgttgacaataattggaggaagtatgcaaattcacaaaatttggaagttggccaggaaattatatttgagttcccagatccaaaaattaactttgttctattctaaatttggttgtaaattaactacactatactctaccaatctctaaaaactttcggttataacacttct

SEQ ID NO: 60552 - DNA, 365 bp, Glycine max
  unsure (1)..(365): unsure at all n locations
catgcaagcttatgcgcatacttctttttctatacgtttttttgcacaagacattcttataactaagaanaatgcacccatgtacaatcaacgcaccttcgttacctaaattatttatatgtgcttccaaagtgtatttgttacctacatctcatgcacttccttggctaaatttacatacatgcgtactcaaagcatttggggtaccaaaaattgcacatgtgcacattccagtatttctaatacttatgcatatacaaactttgtgatgaatcttggctatctacacaacaaggtgatacatttcatgctttactcaagtttttgctacctaaagccgcatgcaaattcaagtatattttctt

SEQ ID NO: 60553 - DNA, 234 bp, Glycine max
ctgcatctgacaccttgctttttttttgtaagaaacagagcgctatgtgatatgaccgccgcgaatctcaaggtggtcttattgtcacccgcattgtctattaaagaacctttgtctttcatcaaggagaactaacaaaaccacgccatatcttttatcccgacaaaacagagcagtttttcacatgcgtcgttcgaatttaatcgaatgatgtcaaactttcactggacccca

SEQ ID NO: 60554 - DNA, 364 bp, Glycine max
caatgcctataggttgtacctcccagaagagtatggagtcagcaccacttttaacatttctgatttaactccttttgcaggtggagctgatattgaggaggaggaactaacagatttgaggtcaaatcctcttcaaggggaatgtgatgatgcaatcctccctaggaatggaccaatcactagaaccatgatcaataggctccaaaaagattgtgctagagctgctgaagaatgccctacggtttcatcaacatcagggttacatgtcgatcaaggacccaggacaggtagaactcatctttttacttggtattggagaacaccattggtcgtaaaccctaattcttctctattgatccaccat

SEQ ID NO: 60555 - DNA, 409 bp, Glycine max
  unsure (1)..(409): unsure at all n locations
catgcagcttgtgacttttacataaaacgttatatgttatattaacataatttatgattcaatgtcaatgtgaatttttnttacaatgtcattacatgatcgatcattaaactcttcttataacaacatggtgttatctttgtttaagaaaatttctccaagttacaagttaattaaaatatcgatgactaagctttcgacaagattaaagtgacgttgtttctatcaaaatattgtctttcgataaaagatggtttcttgacaaaattattatgcacatggaagaatagagtgctcgcaggaggagttngaatttgaatttgaaataaaagttacaaaagctagtcgaaagggttacttgaagacattagacgtcgttagatacaattcattatgaacttgtcgctct

SEQ ID NO: 60556 - DNA, 430 bp, Glycine max
gcatgcaagcttagcgcacatctgttgcagcaatcattatgttattatgcagatgccagctaagccgattctgcataagcagaatattctgcaacatctgctaagcggccccacatgtcgctaatcggtagtgtgtattttgtgaaggcaagataagcggaccatgtctcgataagccgccaatgcctttttcagttttatttttcattttttgaatttgaataacttgtgttctgattaactgtttggtccctctatttgcagatggcctctaggaaacacaagagtatcggttcaagacccacaactcaatatgatacaaggagatttcactccttagatgcacagaaccagtacatggataatgtattgcggagaaacatcttgctagagaggaaggcggagcgctaccacatctcgttcgatgatt

SEQ ID NO: 60557 - DNA, 457 bp, Glycine max
  unsure (1)..(457): unsure at all n locations
gcaagctanagtatgcccgagcattcattcctatgatatgttgntgaagtattggcgatcagaattcccattccttggattatagggttgaaccaagctcatgcttttataaaaatgttcatcaagtcaagttgaaatatggaagtaaccgtctagcaaaattggggcataagatgaatcgagtcacatcactgcttcgtctactgccaaacatatttaggattgttgatgtccttgttacttccagattcaccttgaacaagatgtcatggaccatgttgaaaatttaaattgattcaaccccatatactgcgtagaaattcgcaatacttcaactgtacatcattcgcatacatacatgcttttcattgggtgcattggtcattgcattctttccttcgannaaaaaataaaataaattaaaatgaacttattcattgtgataaaaaaaaaacat

SEQ ID NO: 60558 - DNA, 403 bp, Glycine max
gcttatcaaggttgcttaatatctccttcttatttactgcaattaatccataatatttataattagctgacagtcggatcatgctgatatatatcaataagttaaatttgatagtgatactggtgtatatattaaactacattgagatttggcaaaagcaaaaagctattaaacattgtcttgtgttgcattctcattcaggaaacaggtttcaacttctgtacaaaacagaaaattcttacaataaaagaagacggcttctgttcaaatttgcctcatctgatctgtctgtgtctccattagcatgatttacaggtcattcaagtgacacgtgacagttaggaactcatccttcttacatggtattgtgagaccacccattgggtgctcatacccgaattct

SEQ ID NO: 60559 - DNA, 457 bp, Glycine max
  unsure (1)..(457): unsure at all n locations
agcttcanatacggtaatgaggttcacaagtattcttcatatggttaactacttcaaataaggtaataaggttcacaatcaatggccactgataattcaacctagttttgatcaccaatgtgggtggagctgctgttgtcaattcagtgtccatcaaaaggtccgaaactggctgccaacccatgtaaggaattggtggcaaaattggctgagaaaatcatacatgtgatggcagaacattggcaacctttaatgtggcagcaggaaattcacaattaaaagtgagggcacctgacagttatgtgagggcgaccatgatcaacacaatcatagaaattactagctaatactataatttaaagtgctttcttgtagtaagtggttacacagcatgactatctatggagtgtactattatcaatagtttccattctctttagctaagttcatgtatggg

SEQ ID NO: 60560 - DNA, 437 bp, Glycine max
catgcaagcttatctggtttgaagttaattgctgtgttatttgattggagtcatgatgcctaggcttgtgaactttccttgcttgcaaaatgtgtagatttgttgttagtgcattatttgtggatttcagattcatttttagtaagtttttggattgaagggcacattgcttcttggttgaataacctgtttgtacatagctgaaataaaatattcaatactagcactactggtccttttttttgcaattctattaccagcttttggttttttgatgtgtcaatttcttggcttattttacctaagattttgaattaatttaagacatgtttcttcggagataattaggcaccaaacgtaaatacctcttacagcatacattcagacctttttttgtcgccttgtgagagataaatacctcttcatatattattaaa

SEQ ID NO: 60561 - DNA, 451 bp, Glycine max
  unsure (1)..(451): unsure at all n locations
agcttgtcaagtacatgcaataacacaatgattatttttaaaagaaaattacttgaccttgttcaacaccttccttaaatggatcaccaacaacacatctcaaagcccatttctttgatttctccaagaactcatcatagacacgctcatgtacaaaggtacgtgacccgacacaacaacattgcccctataaagcatccaacattaggcataagcttcttcttaacgcatgcatattgaggtacaatgaagtgattgaataatcttgattaaagaacagagcanagtgcataagttcaatagccttgtgaacatcaacatcctcacatactatgaaaggtgatttccttccaagttccaatgtcattggcttaagattgcttcttgcagctagttcaagtacaatttttccagtatctggtgagccaatgaatgctagttgcaaaaatat

SEQ ID NO: 60562 - DNA, 253 bp, Glycine max
caactttgtcatcgttcaaaacactcacttaaccaactggaacaaatgcaatagaattatattaagactaggacactgtgccattgatccattgaatgaagcaacgacaacccgtattgtgaggcgtggttcgtgtgtgaacaaaacacggaacgtgatggcaggagaggaataccacggatatgattatgccatgagcggaaccaacggattggtgtggattttgcgatctatttatcctgtattcttcctt

SEQ ID NO: 60563 - DNA, 440 bp, Glycine max
  unsure (1)..(440): unsure at all n locations
agctntctctcttgtaaaactggattatttttgacaaatgcctagtatagtattgtgggatatccagttaggggtgtcttccactctatccaatattcaccacttgaaaaccgttttaaaccataaactataaatgtcataaaaccaagtgaacaatcaataagtcttatggtcttgttgaatataaagcaactacaaactatatggcggataaagaagcaatgagactctaaaaataagtgttccaaaatacttgccataagcacaanaagcaatctattcctgtaaatccgtacccaacgagaacgatctttgaaaggtctatgcagtggcagctgctcccttcttccttggtgcagcttcggtaccttgaacaaaatccccaaagaacattatattaatataacgatggccgaacacacaatcagcatattcctaac

SEQ ID NO: 60564 - DNA, 448 bp, Glycine max
  unsure (1)..(448): unsure at all n locations
agcttncatcagtctatctttctgagattgtagatagtttcatgttgaatggtaggaagacttancaagcgtntgatgatagagtagctgtcagcatccttggtgaggcacgaatagacatcatcaaagtgatacatcctgactaaatgcaacacttgaatgaagtcatggtgatcagtgttgccacttccatcataaccagatgatgaagctttcaaggtgtcagcccatacaatctaatttcagaaggttttggtgtcgtatgcatctagagcatgaacaagcttcttcccactaaacaaggaactccagttccttgaatagttcaacacttcaactttcatccgtcttgagggaattntttcattatagtacaagtttgttgcccttcttaacaacatcccanatgggagacgagggcacaccttatctgaacaatttgatctca

SEQ ID NO: 60565 - DNA, 434 bp, Glycine max
atctgggaatcattcgcgaactcatattaacttggaaattcagaagacagcaaggtgcttagttgacacatggaaaaaacgtgtagaagctgagatgattataaatgatgctaggtctggttcagttcatactgtcccctggccagccagacaacggctttctgaagttgctcaaggtgggaataaacattcgagtgggtcagctgatgttgccatgaagagctcagttacacagctttctgcatccaaaactgcctctgcaaagattgtcccaggagagaatacaagatctacatctgcatctccagggtctacgaaatcagtgccttcacctgcacccgcaactgcaaacttgaaagatggacagccctgtgttgccactgctagtggttctttgatcttcctgtggcaaatgcaagggatgagaaaagtag

SEQ ID NO: 60566 - DNA, 337 bp, Glycine max
  unsure (1)..(337): unsure at all n locations
tcaagcatagaaagaacagttcacttgttctcaagtgacaaagacagtggccaatcaaaagaaaatggtgtttgattcatcaaggacatcaaccatatgaactgaatatcatggaatgcttaaatcaattacttctcacaagcatgaagcttttcanagataggagcacaagtattagagtcacagctgagataagctagtaagcatgaacgaaatccaggaaggctcataaaccaaaacctcacaatcattgnttcactcaaactcaagtgtttaggcttattccatcataaaaaccaacacaagttccaacctttgcatttcatctcctatcata

SEQ ID NO: 60567 - DNA, 435 bp, Glycine max
  unsure (1)..(435): unsure at all n locations
gcttgagctcactgttgctgccccacaacgctccacggaatntgtcactatcatgttcttccttgcgagccctcttggtttcttgttcaaggtcttttgcaatagctgcattttcttctcgtaacccgacacactctttccggacgtctgtagcgaccaacttgaatttttctttggcaagtctcgcttttcctagttcggttttcagagctcggacttcttcatcctcttccggagcttcgaagttctcttcngtgataatctttaacttggcgagccaatctaaacctcgtgtacgaacttttagccattcatgataaccaccaatgatgccattacgaatgcccctaagttctttatctttccttaacgggctttcccacgccttatggactctntgtataccttgaaattttgcgcgccaaaatctctcac

SEQ ID NO: 60568 - DNA, 281 bp, Glycine max
gattctagtttacatacaatgaaagcttctagtctttaggtttctattggttatggtgaatactgtcttcggaaaatactttcacattctgacgtcaatctttttctgagatatcctgtatcttcattaaatttaagtccattccattggtgtgttggggtgtcctggtctggtttctgtccatttgtcctacccttttctggtacaatagatgcatgtaagtgtgtaggataattataatcatcttgcccctatcgcctgtgttggtctttttcttcatg

SEQ ID NO: 60569 - DNA, 424 bp, Glycine max
  unsure (1)..(424): unsure at all n locations
cagactataccttcgaccaaacacggccgtgtttctgtctctgnccggatttaaagcgggttgcaacaccggctccgcttccctaactgtactggaggcggnntgccgggctttgtcctctatggttttctggagntttaacatgacctccgagatggaagccatttgatcttttaaggccgatagatcgaccttcatctgttcctgctcgccctcttcattatccattnttctggattgagtgttataggggtgccttggtgttttcttagttatgatgaaattcctaaagaaataaacaacggtgagtatgccaccaaaacatgagtatgcaaatggatgatcggagcacttggatccacccgaaggtttttagataatgtgatgagtccagaactttcattttataaaaagaacaaagctt

SEQ ID NO: 60570 - DNA, 187 bp, Glycine max
  unsure (1)..(187): unsure at all n locations
tgagttccaccccctacaaccacaattccagcatgaatggtggaccttgcatgtggacaactcctctaatcancatggaagtggagctaggataattctgaagggacccaaccacataactttatgataatcactacactttgaatttcaaagccagatgtaatcaggtcaaatacaaagctcacct

SEQ ID NO: 60571 - DNA, 474 bp, Glycine max
  unsure (1)..(474): unsure at all n locations
agtcacctgcggcatgcaagcttcgaacgaacttttacaactcataaacttcagttntcatttcttgtatatatctatagcatagnttctctaaaggttatgtgattaggaagttgtaaacacacttgagatcaagataggttcgttcaatcgtcttttgttcttgcatttgaatgtaaaggttgtatctctccctgactttgtttcatatggtttttacacattgttactgcatgtgccagatttttactgcatgctagaataagtgtttctagtttaaagctaagagtaggtttctcttaggcttagattcactaaggaccctaggattgggtgcctaagtttcattttctaggtagaatttgaaatttcttgtgattgcttgtaaaactcacattgcatagtaaaaatctaattggattgattacgtaactagattgtcttttctagaaatagagagtgaacttgtataaa

SEQ ID NO: 60572 - DNA, 340 bp, Glycine max
  unsure (1)..(340): unsure at all n locations
gtgtatatacattttcgtgatggtgtgctactaaatttgaccgtgtgcacatgatgtatatagaccttattgaagctnttgatatgcaagagattactgaatttgaccgttgcatgttagaagttgtagtcaaaaagctagttattgcctcattgcttcaattctaaaattatagaggttttttgtgaacattgactttggattcttgcatttgatactggatattntaacaggacaaatatttgtggacaaaatgctagttaatgcctagaaagaaagtaaaaaaagattaaaacaattggtgtgaaaaagcttcaattttgaaattgctttcaaagac

SEQ ID NO: 60573 - DNA, 379 bp, Glycine max
  unsure (1)..(379): unsure at all n locations
agctagcttgtggagcttctatgtgaggcgggatctttgtatcttcaatgaggtccttcaatggtgattttccaccatggagatgcagcggatgacaaaggagaagaggagagaggaggcgccatccactatggaataagccatggaagaaggagcttcaccaccaagataagccttggattataagcttggagaggatgtcttcatggacgacaagaaatagggagagaaagagagaagggggagcacgaaattgaaggaagacaaagggagagaagttgaactttgagttgtgtctcacaagactctcattcatcanagttacaacangtgttacacatgcttctcgttatagactangtagcttccttgagaagat

SEQ ID NO: 60574 - DNA, 332 bp, Glycine max
  unsure (1)..(332): unsure at all n locations
agcatatctctntcaaaaactacgtcaccttctgcttatcaacatcgtgaaatgcaaaaccatgacttataaaatacagttcaacttattcctagtctgataagcatgcagaaatccaattattatacagaaacttctagtagcttcatacaaacgtttactccctgtctatgtgatggttaatttcacgttgagtctaccacccaacaattttagataaatgttacatgattaatctcatgttaaataattgattctaagttcaaaactgattttaactagaagcaactntaggaaacttttgtattagaatagaacttagttcacccttt

SEQ ID NO: 60575 - DNA, 396 bp, Glycine max
  unsure (1)..(396): unsure at all n locations
atggtctatcacaagtcttttagcaatcaattgagagctctactgaagcgaaccaaaataacaactctatacttgaagaaaatgcacaattngaaggaggtataaagaatttattaacttaatttctttattctatattaaantatntataacacaattgtttattaactaaatcaacaatcacaaacagaataacacatacaagaagaaagtcatgttcagtctcatacttctcttgaagtacaagtgaaagttcaactaaaggtaattatacacatatgctagatgtgtgggacttaaagtaactccaaaataaataagcccacgaatgtgtgtgtgtacaaccaacgaaactaatcatatgaatacatctcaactctgtgtgtgtgtatgtgt

SEQ ID NO: 60576 - DNA, 447 bp, Glycine max
  unsure (1)..(447): unsure at all n locations
agctatgctatgatgcaggtgttactgttaatgcgtgtggcgactgttaaggatagcaatatagttgatacacttccatttagcatattgtcatctcattgaaagttgcatccccgacaacaaagatttccttactatcatcgttcaaggtatgtatgtgattctcacacttatgtgcttaagtattatangcaatggttgacatgttactattctttagtagtacattgtaattcattgagtgagccatagttccccgtttaatattgaatacaacgattaatacggacagtttggattaattgttgtattcaatcttgaattgtccgtttggacagtttgngaagacaaattgtttttacttcattttgacttataagttaagtatgttgtgtatttttgactaaatttcgagcaatgcatcttgctttgttctctgggtgcata

SEQ ID NO: 60577 - DNA, 420 bp, Glycine max
  unsure (1)..(420): unsure at all n locations
aaagaaaacatgaaggcgacacccatttcccccttttttatatatattaaaaaatagggtttggtatgtgtcgtatatcgggaatggggacanggacgtgaaaagctaatccttgatattattnntaataattatataataatcatgctgcattaaaaataattaatttataaacaagttaaaatgttattacttaataattatataataatatgctgattaaaagaataattataaacagttacatgtactccgtcacatcgtagtcctgcactctgatgcagtgaatgtatgtgaccgtatgcacttactcgctaactgcttcactcacttttcgttttaatattttggaggattaaaaaaaatcccaatttaataaaatttaactattgttttatcatttaaaaataattttaaaaa

SEQ ID NO: 60578 - DNA, 365 bp, Glycine max
  unsure (1)..(365): unsure at all n locations
catacacacactntttcctagtcgatcactcataaattctccccctgtgtttttgaatttatgtctaactttaaataagttgattactcatgtgaattcttgatttaatcccatttctctccccctttggcatcaacaaaaagccatagtgcgtatcaaacaaatttaatttatacatccaaacagttgcatanaaaatatcaaccaaatcatgaagcangaaacaagaaccatgaaatcatgaagcaaacaaccatgcatcagataaatataaacttcacatagccaaataacatacttaatattggtctaaacatactatgcanataaggaaatagtaaaatgttcatataccatactaatat

SEQ ID NO: 60579 - DNA, 374 bp, Glycine max
  unsure (1)..(374): unsure at all n locations
agctngaaanngaatctgaagttctattaaatgtcanacgacaatgacgtttgactcggatgttcgatatagtatcgtaatatatcgagacgctcgtaattgaaaacagaagctctgagcaaatttaaacgacaataacatttgactcggatgtccgattgtgtcccataggatatcgagacgctcgtaattgaaaacggaagctctgagaaaaatcaaacgacaataactnttaactcggatgtccgattgagccttgtaatatatcgagacgcttgtaattgtaaacggaagttctaagaaaagtcacacgacaataacttttgactcggatgtccgatngagtcctgtaatatattgagacgctcgtaatt

SEQ ID NO: 60580 - DNA, 243 bp, Glycine max
  unsure (1)..(243): unsure at all n locations
tattttgcaaagatcttgcaagtgaggggcatgcatataatataatattttctttgctaaaatcctataatcccatttaaacttangcgaacttacgatataactccatggaaatgaacccgtctgaaacaggagattaanaagccaaagtagagagactaggctgcctcctacgagcgcttgcttacatctttagtcggacgccgggtgaccattgatcgatcctaggtctatcacctattc

SEQ ID NO: 60581 - DNA, 412 bp, Glycine max
  unsure (1)..(412): unsure at all n locations
agcttgccacccagctcgcccaggcgagttatgttgcttcctccagaaggcaccgccttctggagaacttcctggaaggtccaagtgggcctgattggtatttgcacccccctttttactaaacacacccccttgcctttntttgctgattccttttccgtaacgttacgaatacttacgaattacgtaatgatacttgtttccttaccgtaatggtatggaaccttacggaatgcataatcatcccttcttttgccttccggaatgttacggaactttacggattgcgcactataacttccttttaacttccggcatgtcacagaacttcacgaattgtgctacaatgctntcttatgacttccggcatgtctcaaaacttcacgaatttgctaaaacgctctcttttgac

SEQ ID NO: 60582 - DNA, 224 bp, Glycine max
acgcgattgctccttttagcacttcgagatattagactgttttgacctgaaattgaacaaatttcatcattaaatcacatatgagatactctagagacagctataacaatcgaacaagaaatatttacagatccctacgaaataactataaattggggatagtatacaagttttggaaaatgtttctataataaagttaagtgtataagacgactaacaaactc

SEQ ID NO: 60583 - DNA, 473 bp, Glycine max
  unsure (1)..(473): unsure at all n locations
cctgcggcatgaagctcactgtaactntnttccgggtattggtctttgacacaacttgtatnaacatataatagataaaaggaataagcatttcacaagtggtatagaagattaaacacataaacattaattgtacaatcatgcagtacctgtgctagatccctcttatagttaccaccttttattcgagcccacatgcnctcagaaatttcaggggttctacttctaaccgagaacagatgataaacctcactatttggtacaggtgccactcgagtaacatagatcccgggaatcccttggcatgcctgaaaccgtgcattagaaaatgctatcaacacagtgttagaaaatggttgtggatccacaattcaaccacagcatcacagttggcgtcaacaaaaccatcctagactgcagcattcaaaacattgggtatcaatacaataaaccaaatataaatacccagtact

SEQ ID NO: 60584 - DNA, 391 bp, Glycine max
aagttcaatgcttaaaaatcatgttgtaccacacaagatccttaagcgtgttcggtacaactttccagttggtatgtactataggaatcttttcttttgtacgaccactagatagctgtggaactcctctttatgtgcgccccgatgctcgcccagttgtatcttaaaatgtcacaactggtttgggctgatccaaggtccgtcatgtcaaccgcttgagtcatgtggattggctactctttttagacataccttcagactgaacattggactaccgtggtgatggtggtggtgtgcccatgatcctgtcaaaatataacaaatatgttgacaataagtattttgtatttgatatagttagataaaaggaaatatgagcatgaataaatta

SEQ ID NO: 60585 - DNA, 451 bp, Glycine max
  unsure (1)..(451): unsure at all n locations
agctngcagtgaagcagccaagacatggatgactttgagtttttttgtttttaaaaaaagaacatntttttaatactttatttgggggggttatttcttgtgttttagttacatggtagagttggtagatagtactgcatctatgtgttattggaagctaattgaaactaattgaggatgtgattgtaatgttattgcagaatccggcaccgaagagaggtgagattgtgagacagattggtgaagcattgagggccaagttggatcctttgggtagactggtgtctcttgagatgggaaaaattctcccagaaggaattggggaagttcaggtatcacaattataactgttctgcaactctttttgacatattatcaggtttgacagcatagaaatcagagtttaattgtgtataatactataacacttctttgatggaaactaaatcaa

SEQ ID NO: 60586 - DNA, 348 bp, Glycine max
  unsure (1)..(348): unsure at all n locations
agctngcctcanagaggtccaggaaggacaaggctttcaaggaactagttccgctccggagtatgacagtcaccgctttatgagtgctgtacaccagcagcgcttcgaggccatcaagggatggtcgtttctccgggagcgacgcgtctagctcaaggacgacgagtatactgatttccaggaggaaatagggcaccggcggtgggcaccactggttactcctatggccaagtttgatccagaaatagtccttgagttttatgccaatgcttggccaacagaggagggtgtgcgtgacatgagatcctgtgtaaggggtcagtggatcccgtttgatgccgacgctat

SEQ ID NO: 60587 - DNA, 390 bp, Glycine max
  unsure (1)..(390): unsure at all n locations
atcttttctaatagtctatcttaanacctatcttaattcttttcttgagacctttgcctttgcttgaaatcttgctttcttcattcttgaatgatctttataattccttggcatcatcaaaataactcttgaagctttgcttctacacctttgaccttctctacttcaaatntcatcttatgttatctcttaatcatcatagctcttattgctcttatcttatctttctctatcttctatcttctttcatcgttatcatcgtttaatattgcactcttgtatcttcgacttntatctttaaaaaatgatcttttcttctagatctgtgtactatactctatctattaattccttatctcttgcttttaaatngaatttgcatcaatctaa

SEQ ID NO: 60588 - DNA, 282 bp, Glycine max
  unsure (1)..(282): unsure at all n locations
tgctttgctcaaagaaaagcttactaaggcacctgttctagctcttcctgacttttctaaaacttttgagctagaatgtgatacctctggagtgggaagtggagctgtattgtacaaagtgggcaccctacngcttattntagtgaaaaacttcatagtgccaccctcaactaccccacctatgataaagagctntatgccttaataagagccctncaaacttgngaacattnaccttgttccaaggaagttgtcattcatagtgatcatcaatcacttaag

SEQ ID NO: 60589 - DNA, 414 bp, Glycine max
  unsure (1)..(414): unsure at all n locations
tcacatgtgttactatgtggcggtccggcgatggtgcacaacaaggtttccacatccacaatgcgcgcataaacccaccattcccttgtggccaccttcaactgaactcacgtactcccacgtagcccatatnctcgtttctctccacccgggtccccatcaatccttccaaggcttcacaacatncaatcaaaacaacattcaaacagcacaagctatcacagccaagcaaaacagagcaaaggcagaaaactctgctcaacacatcaaccaaaatcacagcttttctctcttaaggaccacagtaacaattccttcgatccaattcgttaaccgttggatcgactccaaaattntactggaagtctatagtgcatagcctacattgtgacgcgtgggatcgactagcaaaca

SEQ ID NO: 60590 - DNA, 450 bp, Glycine max
  unsure (1)..(450): unsure at all n locations
agctagcaatgttagntcaatatattcatatattgttctttgnggactctccttcaacctctcaagttcaatacagtcatatattngtgaattccgcctcattggggcgttacttcatttagtaatcatcttattcaaattttccatattctaatgataaaaaaaatacaaacatactatataaaacaagaaataatgttgctatattctgtctagctaattagatcatactaagtggagttcattttcatgttcttcaactntaatattggtagcattcataataaagagattaggccaaggttttaattacaaaagaaaaggctaacgtgatgttttggaagtccattcattcaaaataactctgatcttgttagtcatggagaaaatttaagacatgttgaagaaattttgagaaagtattttgattnttgaaatcaaaaggaacat

SEQ ID NO: 60591 - DNA, 289 bp, Glycine max
  unsure (1)..(289): unsure at all n locations
agaagtggaactttgaagtgtatctcataagactttcattcatcaaagntacaacaagtgttacacatgcttctatttatagactaggtcgcttccttgagaagctttcttaagaanacttccttgagaagcttcttaaaaaacttcttgagaagctttcttaagaaaacttccttgagaagtttctttgagaagctagagcttagctacacacccctataatggctaagctcacccccatgancaaaaaacatgaaaatacaaaaacaatcctactacaaagactact

SEQ ID NO: 60592 - DNA, 417 bp, Glycine max
  unsure (1)..(417): unsure at all n locations
agcttcatcaagggaactttctctgagttctttaggngctccttaaacctccattacatttttgctttgcctactcttccattgttctttcttcattttttctccatgtatctcctcaaatgtcttgtgctaaatgttgttaacatgattctttaaagttctcactgattaaacttgctataaaagctagattttatatctatggttcaaatttcttgatcttgttcttgaaccatgaattgtgttgagtctacgttcctttgagtcttgtcttgatattttttgtggctgaaacctaatccataaaattcttacaaaaatattaaagtagaagaaaacctcaaaaatctacagtgacttgttcacctattgtagttttgtataaagtcatgtcctagtctgaaacttgtcacataa

SEQ ID NO: 60593 - DNA, 447 bp, Glycine max
agctgtaacctcattgtctctcacagtctttattattgggagccaatccaatccttgtgtccggactctcatccacttatgatagcgaccgatgatcccattactgcttcccctaagctctctgtcctttcttcatgccgcatcccgtgccttgcgaactccttggagtacctttgcattggggtcactgaaaccccgtgtaatgaaaggcgtgatgctttcgtctaatggcgctcctctcatggggtagccaagctgtcttatggcgaggacgggattataattaatacaaccccatgttcccatccagggaacatttggatatccttcgcatgaagatacaatcctgattcttccttccttctagcgagggaaccaattaacagacgtccctcctgctagccaagagttggtcccaattcgcctttcctttttcgacgcacgagc

SEQ ID NO: 60594 - DNA, 304 bp, Glycine max
  unsure (1)..(304): unsure at all n locations
tgagcatgcaagctatgtngtangattcctgagtgattacatgattataatctttctcattaaagttttcacagtgcatggngaatggataatggtacacagctacctattcttgtatgtttcttttacgtgaattgaatttgtactacattacacacgattcacaaaatatttataattcagtgatatttcatcttaatagagaaattaaagaacgaggaattcattaatttttttcaccgatgaattgaaggtgatcataaaagaacataaaaataggtanatttattctctatttatatat

SEQ ID NO: 60595 - DNA, 343 bp, Glycine max
  unsure (1)..(343): unsure at all n locations
atcttcagaaacaagtcacatgaagaattgtgacttttagatatgtatttttcgaaatcagtcactggtaatcgattaccattaaggtgtaatcgattacacatcaatagatgtgactctctcatttgaattntgagaatcttaatggtttaaaacactggtaatcgattactaccttctggtaatcgattaccagagagtaaaactctntggtaatgattntgtgaaaacttcttgtgctactcaatgttntgaaaaacttttttgatacttatctttgatgagtcttctcttgattcttgaatcttgngtcttgaatcttgatcttaattattcttgaatc

SEQ ID NO: 60596 - DNA, 177 bp, Glycine max
agcttagtgcatctctcaacaaatgctttttctttctcttgtttcttgcttcactacttttgattttttttttaattcttttcttgttcctcaatccttgatgtcatatttacaggaagagagaaaggctcataattggataattaactacacaaatatagactattgaaatacaat

SEQ ID NO: 60597 - DNA, 353 bp, Glycine max
atagatatacagatatttacatccagtacctacaaggaagaaccaatagaggatttagctctccataactgggaagcttcctttacatcaaagagaagagaaagatgaaggattgaagaaataaaaaggtggggatgtctcctccacctctaggacctcacaatcactcacaaactcatctcaagctctcaggacggcttcctctttaagctcggtcctctgcaggtcttcacacagcaaaatctctcacactctctagaactttgacctttctctctctagaaatctatagacatgcagaagcttcaagaaaaggccaaactcccttccaaaatctgatttcaagcttaaat

SEQ ID NO: 60598 - DNA, 456 bp, Glycine max
  unsure (1)..(456): unsure at all n locations
agcttagtgtttctatntctctctatatctatttgactcgnattctcttgtgctgattgtgacactttgtcacacaagactgcatttgaaaacctttgcgaaaactgtgtttcactagcattggataacaagccacaattggttttaaacaaagttgggttttccctttattagacaatacatttagaattttttttacacattttgttgtgaaaatcgtatccattgcaaaaagctttcatctttatctaacactattcaaccatcccttntagtgtgatatttgttatttcagttggcatcagagctcagcctcttgggttgaagtctttataatacagaggtnaagatctagacaaagaaagaaaaggaagaaggataatctaccaataaaccacctttgtcaaaggagtcaaatacaactactcgaaggaaatgatgattgtacactttgag

SEQ ID NO: 60599 - DNA, 462 bp, Glycine max
  unsure (1)..(462): unsure at all n locations
agcttggagaggatgcnttaatggaggaaaagaatgagggagagtaagagtggaagaaatatgtcaagacgaaagaaagaatattagagaggaagaaagatgaataatcatgaaagagatgaaaagagaanaacatgcctcctatagtagtcataactcttgcaaaagccttagtgaagaacttcgtgactattacgaaggaaggcataagtcacatcttagacctcactcccatagaagagaaaaggaaagaaagcctcaagaggctaacattaaactctcatacttccatgggaaggacaatgtagaggctaacttagaatgggaaataagggtagagcaacaacttaaaaagaagtctacttcaaaatcttatgactctcactcttatccaaagaaagaccaaggtaactgcatcttatgggtgacaccttctaagcccaaagatgataaggggaagac

SEQ ID NO: 60600 - DNA, 389 bp, Glycine max
  unsure (1)..(389): unsure at all n locations
agctaggagaggatgcttcaatggaggaaaagaaagagggagataagagtggaaganataagtcaagacgaaagaaagaaaatatgagaggaagaaagaagaaaaataatgaaagaaatgaaaagagaaaaacatgcctcctatagtagtcataactcttgcgaacgccttagtgaagaacttcgtgactattacgaaggaaggcataggtcacatcttagacctcactcccatagaagagaagaggaaagaaagcctcaagaggctaacattaaactctcatactttcatgggaaggacaatgtagaggctaacttagattgggaaataagggtagagcaacaactttaaaagaagtctacttcaaaatcttatgactctcactctta

SEQ ID NO: 60601 - DNA, 96 bp, Glycine max
tcaatgccttcacatgtatcaagaaaggtggttgctcctcatgaaaaaatcaagaaggcttgtctgtgccgatctgggatgttgaataacctaaac

SEQ ID NO: 60602 - DNA, 456 bp, Glycine max
  unsure (1)..(456): unsure at all n locations
agctagtcttagcgnnnatgttatattgagatttacatgcgagctatcatcgccaagtaccaagaagagttatgtctagccacggcccacgagcatagaatcgcggatgagtatgctcaagtatatgcggaaaaagaggctagaggaagggtgatcgactctttacaccaagaggaaaccatgtggatggaccgggttgctcttatcttaaacgggagtcaagaacttccccacttgttagccaaggccaaggcgatggcagacacctactccacccccgaagagagtcatgggcttctcggctattgtcagcatatgatagacttaatggcccacataattagaaatcgttaggaaacttgtatggtctctcagaccttgactggatacgacttccttttgaaataaaatgagttgttctcatggtttctactccaaaagcttgtgcgaatcaag

SEQ ID NO: 60603 - DNA, 436 bp, Glycine max
  unsure (1)..(436): unsure at all n locations
agcntatgngaanggatnctatcttgccttttaccactcgngnncactcttaagttcctggatgcaccaaattagacacacaaggtgatataaaataaaatgaaagacaatataaatataattatcatagactgagtaacaaatttgatttgggataacaacttggatttgatttggataaaagatcatatttgatttggataacatattagaattaatttggataacagataagataacaaataagataaaagatatgacaagtaaacttcaaatgctcatgacttttgttacggttgtccgtntgaggcccactatatatcaaaatgctcanaattcagaggagaatctggggattcggtacacgattttctgtcaaaaaaaaaggctctaactgctcaatttcgtgttaaagaatcaaacacccacttttttt

SEQ ID NO: 60604 - DNA, 282 bp, Glycine max
  unsure (1)..(282): unsure at all n locations
cctctacttttctgaatgtttccaagatctctttctctgcctcttccattntttttggtggaaactgctcttggagggaatggaagaggaaggatgtgctgcttctgcaaatcagaattaccagtggaagattcacctgcacagaaatggttanggtaaattttgtcattacctttntctgggttagagtgaagttggacaggttcatttgcagatgaggaaggtgctacgggttgaggtccttgacactgctttcccgacctcaatgaaatggcactgaca

SEQ ID NO: 60605 - DNA, 391 bp, Glycine max
agctaatcgatgaacaccttattgatagaaatgtttttcattacatgacgagtatcatgagtagtgtgatgaagcaccgatcgtagttggcgtgcctttgttcgagtctgatgatgaacataagcctgaattttgtcctatactcgatacaaatgagttgatctcggaacactagcaatgatcaaactccacagtggggattgaagccataccagcataaattaatcttgcttctgccacatcaaaaccagaggatcgacatgatcaagatcatgattcgcatcagatagatatcgtggcgggatatgaggattatctacttagacattgagtccaagcacagtgattgttgctctgaattttgcggccgtatcagagaattctataatat

SEQ ID NO: 60606 - DNA, 260 bp, Glycine max
  unsure (1)..(260): unsure at all n locations
atgaaatgaagggaacactacatgtgatctctgaaaggtaggtagaaaatggcaagggaaaagctagctaggaccaaacagtgtgttcacatgagaacaaagatatgcacttgtgagaattcactgacctctatattcgggtatggtcactactaattataaagcttgaccttangcctcggctatattatttgcctaaattctcacattgtataaagttagtgatgaagataaataacaaaaattttcaagacataatt

SEQ ID NO: 60607 - DNA, 427 bp, Glycine max
agctaggatagtatattatcatttcacactttttcatttttatataaaatatcctctctatataacattagcatttcaagagtccattaacaatttgattctgaaaagcaagacttggttgagtttacaaacaggctttactggaagtacaaaatatacaatcaagaccaaataagcgcctcaaatcaattaatgaaagaaaattatccatcactgggaaaagaaggattatggtgcccctactcatcataaaaaacagctatagaacaattatgtcttatgttaaagtgaatataaacgaaatttatctataattatagaaagagtataagtataaaatgtcatccatatgcaacatcagccatgaaaaaattggaacattttattttattgagtaagctaaccccacgcctaaacttgtataaac

SEQ ID NO: 60608 - DNA, 282 bp, Glycine max
  unsure (1)..(282): unsure at all n locations
gaagagatggagaaattaagattgagaatgagaatgaggaattgtgtgggaatggtgaagatcaatgatacaatntataggattctttatggccaatatttagaatttnttagtatgaaanatagtgaacataacatttatgagttgcaactagtagcanacagtcaatntttttatttgtaaatcgtaaaattttgtagataacgttcaattattcaactactctgatcacctattacaaacaacgacaacattntcaattggcacaatggtaataacttt

SEQ ID NO: 60609 - DNA, 442 bp, Glycine max
  unsure (1)..(442): unsure at all n locations
agctaggctctggtntaaacatgtntgatacatgtattgtgacttgnaggatttgatttgagcaagataggatgaggggaagtgtgattttcgaaatctgcacttatgcagaattttgctgtcaaaatatgtgcagcagaattttagcttggtgcacaaaatgcttgtgtgtggttggctgtggaaagagtagtacagaatgagttctggatgttagctagtcgatcccaacggtcacaatgtaggcttatgcactatagacttccagtaaaattttggagtcgatccaacggttaacgaattggatcgaaggaattgttactggggtctttaagtgagaaaagctgtgattttggttgatgtgttgagcagagattctgcctttgctctgntttcttcggctgtgatagcttgtgctgtttgaaagttgtttgcttggatg

SEQ ID NO: 60610 - DNA, 419 bp, Glycine max
  unsure (1)..(419): unsure at all n locations
gcaattataaattaactctgcatggaaaatcagtgctctacagaaataaaaacatggtgatggatgcagccagaaaacatgcaagggaggggcaactaagaataatcaaattttaacatacataattatattaatcaattaataaaccatatcattacataattcttacataaaaaattaaagagatatatgtgtttgtgtgtgtgtgcacaaagaagttttcatggagggggaacaggcccacccttgtgcccattgactcgttgattcttctttatgaatacatacaatgctactcacacatacaaaaaataatggntttcactctatgatcattnttctctatatataaatgtcacatgtatatgtatcaatcttagtgaataaaaacgaaactcatccatatctatacattatgc

SEQ ID NO: 60611 - DNA, 424 bp, Glycine max
  unsure (1)..(424): unsure at all n locations
agtcacctgcggcatgcaagcttctagaggttgngcttatctaccccatttccnacagtgcttatgtaagcctagtccaggtggtaccaaataaagggggtatggcaatcattcggaatgacaagaatgacctaatcccaacgaagactatcactngtgttggagaaaaatatgcgtcaattacncgcaaagctcacattgaagccacaagggaaaagatcatttttccttttgcctttcatggaccanatgttggagaggcttgcgggacaagcttattactacttcttggatggatattctggatacattcagattgctgtggaccccaaggatcaagagaagacaaccttcacatgcccttttagtgtcttttcctacagatggatgccatttcggttatgtaatgcacctaccacatttc

SEQ ID NO: 60612 - DNA, 287 bp, Glycine max
  unsure (1)..(287): unsure at all n locations
ccctggctgtataaaggactntacaacctttgtgtgttgccctcgctggaaagagtgattctttccttcctatcatctccacccttggtctttcaaccacaattccagaaaatccacctctgcccaaaatatctcggaccataactcccattttacacactcaataagtgatcttgatcctaaatgaatttcaaacgagactttcacctcggttggatcacctcatttgagccctgagcttccgtattgcatttctatattttgtcagccaccattaacctacgttt

SEQ ID NO: 60613 - DNA, 436 bp, Glycine max
  unsure (1)..(436): unsure at all n locations
agcttgatagtaagtttaattgaataaattatactcactatcacaaanatggtcttctacgacgcaggttatacgacggttgtacaaaaaccgatgtcataagtaaagtagtgacatttttgtaaataacttaaaattnttaaagatggtttttatcaaaccagtctttgaaaaggaattacgacatcagttcttctagaaccgacgtagaatgcgagcttcaaaaatgcgaacgggctctctctcactctttattttatcttctttttaatctctctctccctaaattttagaaaaccctaattctcctcctcgctctctctctgttcgcacgtgcatcgccgtggagatccccacagagccgataaagatatatatagaagcacaaatgtttgttgctcacaagatgacttggattcttcaccgccggaagcta

SEQ ID NO: 60614 - DNA, 310 bp, Glycine max
  unsure (1)..(310): unsure at all n locations
tactcggatgtctgattgagtcccgtaatatatcgagacctgtcgaaatgaaagtttaagctntgagccaattcaaacgacaataactttttactcggatgtctgattcagtcccgtaatatatcgagacgctcgaaattgaatgttgaacctctgagcaaatgcaaacgacaataacttttttctggatggctttttgagtcccggaatatatcgagacgctcgaaattgaatgttgaagctctaagcaaattcaaacgacaataactgtttactcggatgtctgattgagtgccgtaatatatcgaga

SEQ ID NO: 60615 - DNA, 390 bp, Glycine max
  unsure (1)..(390): unsure at all n locations
agcttatgccataactaggaaaggaagngataaattgctgcttcaatcctgcatttaccactcactttcggtaacataaaaagagcattcttagatggggaattgtgaaattaaatgactagaaacacaaatgtgtcacagaaagtctacaatctacgtagctgcactaagtaaaatcagatgtcctaatctaaactaaaggaagactcatttaatttctaatcctaggtagaaagtaccaccaaatctttagatgaaatacgagactacagtcatccataaggccacaaaataactaanatagcatcgcaaaagtcatggggcactagggcaatggtgttacatttatgcagcttacacaacggtatgacaaatgttgaagtgttcact

SEQ ID NO: 60616 - DNA, 217 bp, Glycine max
  unsure (1)..(217): unsure at all n locations
agtattgtaagtatcaatcaatgatagcattaaatataatttaaagatatgatatttacttgctgtaattaatgttttatattntttgctatcatgattgagtgtaaatttagcagtaacatatccttccccattatttgatgtctagtatttttttaataaatccatgactcgattattgcaaagaatccctattgtacaaatgattaattaaaat

SEQ ID NO: 60617 - DNA, 454 bp, Glycine max
  unsure (1)..(454): unsure at all n locations
gaatcccagtccanactctcttcacaatatctgatttcatgcataaataggtagccttgttcgtgctcgtgtgcttagcgcacttatggaccgcttagcgcacattagtgaattttggtttagcgcgtgccttttcttcttagtggatgaattgaagcggtgcgcttagtgagatgaagcggtgcgcttagtgagataaagtagtgcgcttagcgaacttgtacagctcatcttcttccagagtcttcctcgtgcttagcccatgagtgttgcgcttagcggacgctcgctaagccagcagattggcttagcgagaaggtgaanaacaacactttccaaagcttgccaaattatcttgaaattgagataaaatgattattaaacacacaaaaatgaaaaactaagtatttattgcagaagcaaatcttcatggtgaatcaaaggtgattcaaag

SEQ ID NO: 60618 - DNA, 142 bp, Glycine max
ttctttattcaatcacttcattaaatcacacttcattacgagaatgagaacaatgggtttttgcctttctgcacatgcagccaggaaggggagagcttaattagaacttgaaactaatacaaacgaatttgcactacaagac

SEQ ID NO: 60619 - DNA, 254 bp, Glycine max
  unsure (1)..(254): unsure at all n locations
gcttcntgtttcaatttcgagcgtctcgatatattacgggtctcaatcggatattggagntaaaagttcttgtggtttgcaattgctacgagcttctgttttcaatttcgagcatctcgatatattacgggactcaatcggacattcgagtaaaaatttattgtcctttgaatttgctaaaagcctctgttctgaattttgagcgtctcgaaatacttcaagacttaattggacatccgagaaaaagtttttat

SEQ ID NO: 60620 - DNA, 333 bp, Glycine max
  unsure (1)..(333): unsure at all n locations
gaacgtcgaagaacggttgaaatctttgcgaaattcctcacggaaaacgttacggaaacgtttcggaagcgcctcggcttagattntcttcacggaaacaatttttccaagcaaattcgaaagagagagaagtgcctaaggggctccaccccttccttcttgccttcctcccctattatagcanaaaggggaggtggtgccgcccactcgcccaggcgagctcagctcgccaggcagcagggtgcttcctcagaacaaccgcttctggaggaatattcggagggccaagtggcctgggtgctattgaccccattttactaagtcaccccctct

SEQ ID NO: 60621 - DNA, 383 bp, Glycine max
gattgcggctcgtaatatatcgagacgctctacattgtaaacggatgctcgtagcaaatgcaaaccgcaataactcttaactcggatgtatgattgagtaccataatagatcgagacgctcgaaattgaaaaaagaagttctgagcaaattcaaacgactataactttttactcggatgtctgattgagttccgtaatatattgaggagcacgatattgagaacagaagctctgaccataatcaaaccaaaataactttatactcggatttgcgattgagtcccgtaatatatgaagacgctctcaattgaaaacagaagctcttgaacaattataacgacagttacctttacccgatgtccgattgagtcccgaatatatca

SEQ ID NO: 60622 - DNA, 482 bp, Glycine max
  unsure (1)..(482): unsure at all n locations
tgtagagttgtgaccatggatcacatcctccatcatttctcctgctgatcttgtgctctacacaatgatcggctagtgtcttcaaaagattggatgtaatctttgtacccttgtgtgtctcttttgatattttatatatgtatgaatcttttctactcattactggtgacttcattntgttcgtaatgcttgattttanttgatcactagtttcatgaatntagattttaagtttgaatggaaagtacttttagaatttgaattgaatgaatttattctttacattatgttgctaggaatatatcataacattntgattgcaaatagcatgagattatgatngaaatgctgggatatntatttcacatgtgagggatcgatattcgataaatattcttatgattctcgagtgcgaaggatcgattcngggtaatttaatgtgtgcattanngaatgtagaanatgattcatatatgttaatc

SEQ ID NO: 60623 - DNA, 343 bp, Glycine max
agcttgaatggagaagacacctttttgaatggagaagccagtttctgtgtgtgtgtgtgtgtgcggaaccttgaatcaagaatctgtctaagtttaatgcagcatccctaggctgcattaaatcacattacaggagcatcactacatccaacagatgggaagtcacaaagacaatgggtgggagtggagctttatttggagaacgccattgttttgacaattgaaatgatatggctggtgtttttctcaatgaggttcaggatatggccattcaacaacatggacctgatgtgtgggaatggactgctgaccctacaggtcagtatacagcaaacaatgcata

SEQ ID NO: 60624 - DNA, 361 bp, Glycine max
  unsure (1)..(361): unsure at all n locations
cagccccttatgcacttctctctctttctgaattgcttagaaaaattgtttccgtgaagaaaatccatgccgaggcgcttccgtaacgtttccgtaacgtttccgtgaggaatttcgcgatggttttcgaccgttcttcgacgntcttcattcgttcttcatcgttcttcagtcttcaacgggtaagtacctcanaccaagcttttcaattcattctatgtacccgtggtggtccacactnggtttcatgtatttttattctcgtttcattcactttntacaccccctnttgacgttgcttaagccatttatntaagtcatttctcgcttaacctaanaataaaataagtttccaccgatc

SEQ ID NO: 60625 - DNA, 442 bp, Glycine max
  unsure (1)..(442): unsure at all n locations
agctattaagaggccaatcttgtgacttggtatcttggattgatgctattaaacttcacttgtattggtgctctattntttttcttcatccctgtttttgtgtgttttcgcattcctttatagtcgcataaaaactattcaaaaaaaatttccccatttctatttataagcgaatgaacataggaatgatattgaatcatatntctaagttcaacctaagttaatcccatgcggcggaatttccaagttttacttgcttttgaacgattcgaaagtcattttcaattaatttnttttatcgacatcaatcgagactattttgatcggatgtcagttggggcaattttttggcaaacgccggcttggactttnttggacgacataggcaggtgatttttttaccttgacatcagttaaaaagtagcacctactatatgtgatg

SEQ ID NO: 60626 - DNA, 448 bp, Glycine max
  unsure (1)..(448): unsure at all n locations
agctantgtcaggtctgtgtgctgtcaaacgatgtccatataaatgcaagttggtcgaacaaagaaactcttgggagtttgttagaacttcttagttccatttccgttgtttatactctactcgcgtcaatttgatgaaaagcaggatatcatatgattgtttagagtataaaaaagtaatgcctgcccaatagaattgaaatctgttaatgttgcagagagcattagccaatgaatcatatacatttctttatataggttaatccaattcttacttgttcttcggtgatatttatgtttattcaagttcttctggaaaactttggatttttaaataaccaaagataatctgcattgcagctntggaacaccaatgagcacgaggacttacaggtgcttgtcataatatctcgtcctccagttaaagtgtatgtgcttctcttcatgt

SEQ ID NO: 60627 - DNA, 161 bp, Glycine max
attcattggattgatgtaaaacgcagaacacagccctgctattatagactcttcctgtctggtcaagagggccatttacaagagttatgacttttttaaaaacttaaaaccactttgtataattccacacccatttgaagagatacatcgtttgatatatt

SEQ ID NO: 60628 - DNA, 353 bp, Glycine max
  unsure (1)..(353): unsure at all n locations
cctttacaacaacaatgcttagaattatattttctggattatatatgtcatatattgtttttcgcactcataagacagaggaaaagaaagagtgacataaatcaagtaatagaaaaaatagtatcgtaaaaagtgctatataanaaaattattattatatatatataactgaataactaataacaattgattaacaacttttgtctatggcgtttgtcaaacctatcatactccttaaaacaagacccgtgtatctatggaggtagttaatggtanggacagaggcaagggaagtgagaatggcgttttggttcaaaattgaaattcatgagtatgaaaaatattatcatgat

SEQ ID NO: 60629 - DNA, 320 bp, Glycine max
  unsure (1)..(320): unsure at all n locations
agcttctcaaggaagctacctagtctataaatataaacatgtgtaacacttgctgtaactttgatgaatgagagtctcgtgagacacaactcanagttcaacttctctccctttttcttccttcaatttcgtgctccccactctctctttctctccctctttcttttactccattgaagcatcctctccaagcttcttatccaaagctcatcttggtggtgaagctccttcttccatggcttattccctagtggatggcgcctcctctcacctcttctcctttgtcttctgctgcatctccatggtggaaaatcaccatt

SEQ ID NO: 60630 - DNA, 423 bp, Glycine max
  unsure (1)..(423): unsure at all n locations
agcttanagggacaaccacatttcctagtgcctgcatctcttctaacaaattctttcttcttacacttgtactgaccgctcctttcacacgcaattaacataaatgaagttcttcctctactaccagtatatgtatcagacctcataattactacaacaaaaccggtttcatgggcaaccgttcgagtccactgcaacacagcatctcgggttgcaaagacctacaatgcaaccccagcatattaatttttacacaaatcatacattanaccaaacgactaaaacttatcaacatgattacctgagaagtattaaaagcgtctgaacaatcaacatgtccttcattcacaccacaatgttgttcatcttcaaaatccatatcaacttcttcaacaccgtattgtcatacgcccattgatcttc

SEQ ID NO: 60631 - DNA, 404 bp, Glycine max
  unsure (1)..(404): unsure at all n locations
agccttcacctttggtcctcctcatagttgttgcatgagaaaacatgctctattttcatctcccactccaagtaggccttcggatcattctttcctttaaagggaggaatgttgagtttaataccatcaattcggttttgtgtaggaataccatcattccctcttctcctcctttcttcttcattatgatctctgttctccattngatccaacctctcatggagcgcatcatctcgttgtttcattaacctctccatatgttgcatcaaagcttgcatttggaattgcgaaagcccccctccatcattaggatttgtgcctgccatctcaaacaaacaaatcaaacgtaacaagacaattatagttgttgtttgaatacctcacccactcaagtgtatcacaca

SEQ ID NO: 60632 - DNA, 422 bp, Glycine max
  unsure (1)..(422): unsure at all n locations
agcttgtgtgatatcgtcgattngatggttacctccacatagttgtgaggggggagaattgttgggttntttgagctcccttcttatgcggagtaaatgcccaaatgagaatgtccattntgtctcacttatttaagtgaagagggtcagattagagagagagactcatttgagagggaaaaacattataattttcgcatacccacgagagagtgtttttcatattgcaactggggattcgttcactgatggatcaggctgatttttggacaacatgttctacatatgtgatactttaaattttttggttggatcgtcaaaaagatatctcgggagaaagataagtgnttcacattctctactctctactntggggnttcatcttcttgtctctattagatcaatgagggtctgttttgatt

SEQ ID NO: 60633 - DNA, 335 bp, Glycine max
cacgtggatcaacattttcttcttgcggatcaacgtgatccgcaagttcaacacaacatatacacaacctacggatcatctgccctatgtgcggatcacctagaacacaacatatacacaacctacggatcatctaccctatttgcagatcacctaggtcctaacttgtctctactgcggatgacctaaatacttaagcaatcaccaatggaagcaataacaaacaacaaaagtcacatagaccttacctcgatgaagaacaaaagagcaacacctcgcgggagaatggaagaagaagcgcacttgaaggagggagatgcaacagcttgcacgga

SEQ ID NO: 60634 - DNA, 258 bp, Glycine max
  unsure (1)..(258): unsure at all n locations
acattgataatatcataaaatgtcccacgataaanaaaattaatcaaattagcattgtctgcaatttgtgtgatccaagaacattgtttataagtaaccattgttttctcagcatcattagctgcacanatatttttcaatgccaggttcaaggtcataatgagtccaatagatggcaagaaactcattctttatgatcatacctactgccttacatatagttgcattatcatttataatttgtacccatattgatta

SEQ ID NO: 60635 - DNA, 376 bp, Glycine max
  unsure (1)..(376): unsure at all n locations
ggctcaatggtggaataaatagagcttcataatattttggaatcaggagaacaattattataagataaaacagaagaaagggagtaagcaacattactttgaaactgattggtacagctagatatgacattgcagtgatagtcctgtaaataaccaggaggtcgttttggacgagttgacactctggtagataagggtggctctaaagtaacaggaacattagtaatgtgggatgatgtttgatctattgaattttgatcaagatcagaagtangatgagtaggatgagctgtagcagcaggggtaggtaaggaactaaagtccanagtgtgatctatgggtggaatggatgcanggctggtgcttgtactgtcta

SEQ ID NO: 60636 - DNA, 271 bp, Glycine max
  unsure (1)..(271): unsure at all n locations
cctacgtatcaagcaagcttccattattgactaaatagaaacagaattccttcaaacccgtctaagcacaatctatatatctggtcaagtcgttgtatgaaaaatgacacattaaatacatctctttttccccctagctcanatagtagtaaaaaagaagggtgtntccatgattgactatatattaattaaacattcgacgtattggttaagtttctttctctctcactctgtggcacacatggttggtgggtgcagtacacattcacat

SEQ ID NO: 60637 - DNA, 452 bp, Glycine max
  unsure (1)..(452): unsure at all n locations
agctngctatatgtttacactttctcaaattattaaatagattaggaatttacacttactctatactcaatagttaatatttggcatttataaaaaaacatttatagtaagagttctgataaaagcattaaatgcattaagtttttttacaaattaaatgccttatgctaaaacattgtttttaatttctatacagaanacctttttttatttatttggagttcttgttctcttagtattaaatgcattaaaaaaaatatatggctaagattttaaagttttgccaagggttacgtacctgcctactcctantttatttaaaggaaaatgaaggcattgaactcttggatcagcccattgattgttccagaattggcaatttggtatagattcccacactctatacactctgttatccaatccctgccaatccaattattaaaattacttcg

SEQ ID NO: 60638 - DNA, 305 bp, Glycine max
atagaactaggcttaagaagataactaagcctctaataaggcttatttacatcaagctcaagccgattacacaaatcaagaaaaattaggaattttcataaattcacactgaaggtgtgcgctaagccccggcgctaagccagacaacttgtgctaagtccagtttctcctcaggttggaattgggctaagcagatagctcacgctaagtccgacagcttgtgctaagccccaacgctaagctaaacaacttgcgctaagcccaagcgtgctattcaacaatcttcaacctgctccaattcagct

SEQ ID NO: 60639 - DNA, 442 bp, Glycine max
agcttcttccacgtccatgtctatcttcaaatcttagttgttttcaccacattgtcattgtgaatttagatcgcaagcaatgggtacattctgctgtgttgtgagcgagttttggggttgtgttgggttttgtgttgtggccaatcatgaaacgcgccatgttattttttcagtattaaatttttttaagacttcaattttttcatttgtatcaaatacagaaaatcaaaattgaaaaatgtaaacgtgtaattagaggaactaaaaataacaaaaaatttataggaatcaaatttaaaaaatcataaatttatgagaactaagaaaaattataagaaacaaatttttttaaaaaaacactaacttacaatgattaattcatatttaagccttaattgtttaaggcttaattaattactttattaatttggttattttattc

SEQ ID NO: 60640 - DNA, 291 bp, Glycine max
  unsure (1)..(291): unsure at all n locations
taacagcttttcgttcgtagaatatgcccccatccttcggcagtacatccaaagatgactttntggacacgtcgtccctttatatttatcanaatctgatactttaaacttgggagggataatgatgtcaggtaccagacatagatccgccaaatccgagaacggataattgccaaggccttctaccgctctcagcctctcttcaagtagatcaatctttcccttgtcttttgcanagggaacgagttccttaacaggtgcggaaggagacgggacgtggcggactatgtt

SEQ ID NO: 60641 - DNA, 439 bp, Glycine max
  unsure (1)..(439): unsure at all n locations
agcttgtangattatggggtacctatcacatgtggtactangtggcggccgggcgatggtgcacaacaagtttttccacatccacaatgcgcgcataaacccaccatcccctgtagcccacctccaactgagctcacgtactcccacgtagcccatatcctcgtttctctcaacaccgggtccccatcaatcctgccaagcttccccaacatcaaagtaatacaacattcaaacagcacaaactatcacagccaagaaaacagagcagaggcagaaaactctgccaaaacaccaaccaaaatcacagcttttctcacttaaagaccccagtaacaattccttcgttccaattcagtaaccgttggatcgactccaaacttttactggaagtctctagacataagcctacattctgaccgttgggatctactagcaaaca

SEQ ID NO: 60642 - DNA, 203 bp, Glycine max
  unsure (1)..(203): unsure at all n locations
tcccctaatttcatttggccagagatcatagatttgtgcttggatcgcatccgaaaactcgcagacaactgcactagtctccagactcacttncttaagggttgatggcactatcaatgtagatattactgagttccacaccaaccttgtgccataccccagggtccacttcatcatttctttgtatacttcagttatctcta

SEQ ID NO: 60643 - DNA, 445 bp, Glycine max
agctatagctaagtgcttcttatttattctgatttctatagtttctgattattatgctggagattgaaaaagatgcacatcttcccttatagtttgttgagaagggccgtgctttattaagcaaaattccttgggagtatctttatcataattaattcttcaaagttcaaatacattaattttacaatgggttctgaaatttggttacacatttacgtttcagtattttgaaatgtgtattataattatatgtaacaccaactttacatggccacaccctataaagctcaaagtagagaaggggtatcatggaaaagcactagatttataccaatgtgtgttacatagaattatttatattatatatcttttatacttttaaatacatttttaaagattttacgctccgttatttctatttcagtagtttatttttctcttctat

SEQ ID NO: 60644 - DNA, 351 bp, Glycine max
  unsure (1)..(351): unsure at all n locations
aagctatagcttagctacacacacctctctataactaagctcacctccttgagaagcttccttaagaagattcctaaagaagctagagcttagctacacacacctctctaatagctaagctcacctccttgagatgagaagctagagcttagctacacacccnctataatagctaagctcacccncatgacaaaatacatgaaaatacaaaagaatttcctactacaaagactactcanaatgcctcgaaattcaaggctaaaaccctatactactagaatggccaanatacaaggccctaacgaaggagaaacctattctaatanttacaaagataagcgggctcatact

SEQ ID NO: 60645 - DNA, 427 bp, Glycine max
caaagaagcctcactagatagcttcttattgaagctgcctgaagctgtctcggtaaaagcaccctcctgcatttgttaaccgccggatcttctctaaatttggtctgggggttcatacgacagatatccacgatctgaccgatgcgatctatgatgtgtcatatggttggtgagaaacgcttcttttcccgagagtagaaacacttgagtgtttcaagtcttaatttttgtgcagccttggaaaacagccattcctttctccttctttcttccaaaacccttccccaacgtcccaagcttcttcttcaccacctacaaccaccagtatccaccacgagccggcgtaagtctccattgaaaccccacaccgagaggaacccttcaattgagcggaatcttctaaacttatctcgcagtttcgttagag

SEQ ID NO: 60646 - DNA, 196 bp, Glycine max
  unsure (1)..(196): unsure at all n locations
gctacttttatagccctgatcctcaatagaatttatcatctgcaaatgacatacatctagggatgatctattgagctaactntcttaatagtaattttgtgaacttaagttattagttatatatgtctaacaaatttcatttaggtggattaacttcactatccacttatatgaaaagagaatggggtaaattata

SEQ ID NO: 60647 - DNA, 436 bp, Glycine max
  unsure (1)..(436): unsure at all n locations
agcttatcatggtagatgttgatcatgctaagtttttagacaaaatcatgaaatttgggtggtgccaatgctttggtgagaaaatctgccacttgatcacttgttgaaactggtagtagctntagagtgcccttcaaaagcttctctcgcacaagatggcaatcaatttccaagtgttttgtgcgttcgtgaaaaaccggatttgaggcaatgtggactgcgctttggttgtcacagtaaagagttggagttctggtaagctgaactctcanatctgcaaaaagatacaacagccattgcaactcacaagcagctgaagacagagccctgtactctgcttctgaagatgatctggacacagttgcttgctttttagcacgccatgacactaaaatttgcctatgaagaaaaatatccagatatggatttttagaat

SEQ ID NO: 60648 - DNA, 445 bp, Glycine max
  unsure (1)..(445): unsure at all n locations
agctngtatgcagacaactgccgctgcgactctagcttcatatccaaacaaagaacaagctgatcactgaaattaatcccagtaacagattcaatagaccgcataactgactcaactagtgtgttctcattgcaatccaactcaaaggagtgtccattctcagcaatatgaacaagcaactggccctgatggactaaacttncagtcacacaggaattcatcttatccaccaatcaacacaagaatcacaaccccttcttccaccccaaaaggaaacaaatcaatagcaaacagagttcanatcaaaccctaaccaatagctgcaacacaaaacaccaccaaagcaaatgcaacacccttactttcaccacacaatctttcacacttcaccgggaaaatatatagaacaagaacaaggacgcgattctcgattaggaacctaata

SEQ ID NO: 60649 - DNA, 416 bp, Glycine max
  unsure (1)..(416): unsure at all n locations
agcttataatatatttattacgctcgaaattaaactatcagaagctcttctatattattcaaatggggcataacttttcancctcgaatgtctcgattatggcgacatcaccatatcgtagacgcttcannaaattgaaccagtcggaagccctttgagagaattctaatgggtcatatacttttaacatcggatgtctcgattcagggcgcatcacatnatcgagacgctcgaaaaggaacaacggaagctctcgagaaattcaaatggtcataacttatcacactgaggtccgattaaggattataatatatcaagacgctcgaaattaaacatcgaaagctctcaagaaattcaaatggtcatcacttttcacacggatgtacgattcgggcgcataatatattgatacgctc

SEQ ID NO: 60650 - DNA, 215 bp, Glycine max
cccaggcatagtcagtcagtgagaacctgtgatgtacctaaacaggcgagctcctggcagttaaccgataaaagaacaaagaccacaaagcaaggaggcttgtgtggtggctggccaactgtgaatcttgagtgatatatgggatatggcctctggtaatcgattaccaagggtaggtaatcgattacaaggcttataaacgagatcaggaaact

SEQ ID NO: 60651 - DNA, 461 bp, Glycine max
  unsure (1)..(461): unsure at all n locations
agctataaccaaggggagatggaccatttctagtgcttgaaagatataatgacaatgcttacaaagttgagctgctcggtgagtataatgttagttccatctttaatgtctctgatttatctctttttgatgcagatggagaatccgatttgaggacaaatccttctcaagagggagagaatgatgaagacatgaccaagagcaaaggcaaggatccacttgaaggacttggagggcctatgacaagggctagagcaaggaaagccaaggaagctcttcaacaagtgttgtccatactatttgaatacaagcccaagtttcaaggagaaaagtccaaggttgtgagttgtatcatggcccaaatggaggaggactaaatggcaccactttgtctcaattntagagtgttagtttgtctaaataatagcccaatccttgtaaagttggctgaccaaaaatat

SEQ ID NO: 60652 - DNA, 454 bp, Glycine max
  unsure (1)..(454): unsure at all n locations
agnncttgtgctttgataatgcanagcatcggtttatgtggattgaaggaaaaacctttgtgacccttgtgcaaggcaacggcaatatattttactttatatgttatgcttaaatgactcttcaactatggtaaccagatattacttgcttgcctaggatgctctttcggtcttttcggttagcatgtctaatcttttacaaaaatgaaaatagaattntatgtataaaagcttaaggttttaaataatattttggtccctataatttctacccattcagattttggtccctaatcaattaatccccatattgatctttattttgatgaagtactagtcccctatagtttccatttattagggagcaagacacacaaaaatgaaaatatagccccattgatatcaaaaaaagtgaatcatagaaatcaaaacctaaatgagtacaaactataat

SEQ ID NO: 60653 - DNA, 397 bp, Glycine max
  unsure (1)..(397): unsure at all n locations
ttttgtttggatacacagnaatttgaccttatcaagaatnttaagcaacatatagttactttttagttgattgtactatcattttgcactccgattattggcaagacatcatcattttggttttccatcatttttctctcgtccatatgccaactcagttcttttccttaagaaagaagaactccacacaagagagggtgcatatgagacaagtataccccctatgatagaaggtcgtgttatgcaagccttaaagtatactgacctaatcatgctgattacttttattttgtggaaatggacacagatatataattcggcgcacccaccgtgcccacatgacatctctgacgggtttattgctccatgcgcatgatgactgcacctctctctttca

SEQ ID NO: 60654 - DNA, 319 bp, Glycine max
  unsure (1)..(319): unsure at all n locations
tttgtctacatcannataataatggtacaaatgggtgagntttacctacattagtcagttgtaggtaaaagtatntttgagatttacctatactaattcatgtctataggaaaagagcnngttgtagcatagaatatttttctttagtgacaccaatggactgtaggtacaagtttcataggaatttaccaacatcaagtaattgtagggtataaatttttgaaatttaccaacactaagcatctgtagtagaaagtatttgactttacctacaccaaaaataataagacatattttgaattttcctatgacaaacaac

SEQ ID NO: 60655 - DNA, 436 bp, Glycine max
agcttctacttatgtggcagggcgggtttccttcactttcttgtttccaacgcgagctctgaccactgttcttccttctcgcgatgcttcttttcatgtccgcctgagtgggcttatagcctaaaccatacttcccacgattcccttgggtttttatcaggctagttatgccgccattgtctttgcctaaacccatcctcggttcatacccgttccccaacataactcgggccatcattaccgccgcatcggacagacaaggttgcccaaagagggagtccacggaggaaatgctgaccacctcaaaagactggaaagcggtttctaacgattcttctgcggctttcacataaggcatggaggatgggcagcttaccaagatatcttcctcgcctgacacgatgacaagtgcccctccactacgaatttcaacttt

SEQ ID NO: 60656 - DNA, 385 bp, Glycine max
  unsure (1)..(385): unsure at all n locations
cactcgcctcaaggatacaaaaccactacttatagtcttgcatgcaaactcaataagtccttgtatggcctttaagcaatgtgtttgcaagattttatctacactattacaatanggtgtcattcaatccaaaatgatgattatttttcacttatgggttggatttcattagaagaatccttgatatgtgatgaattatacttgtgccaagttttatgtgtgttaagtgcaacaagtacaatcatgtcaaatgaaggtttgggtcttaaatattttaggcttgaatgccaattaataaagatttacttttaattaagaccactattattgttgataacatatacatgtatatgtanaanttntacgaccccccccccccccccct

SEQ ID NO: 60657 - DNA, 297 bp, Glycine max
  unsure (1)..(297): unsure at all n locations
gttatctctgttatcttagggagagtgattctcctaaattcttgagtgattcaagaacaccctggctgtatcaaaggactttcacaacctttgtgtgttgccctcgctggaaagagtgattctttccttcctatcatctccacccttgttcttttcaaaccacaatccagaaaatccacctctgcccaaaattatctcgtgaccataactcccattntacacactcaaantaagtgattcttgatcctaaatngaatttaaaacgagatctttcacctcgttttggaatcacctcat

SEQ ID NO: 60658 - DNA, 449 bp, Glycine max
  unsure (1)..(449): unsure at all n locations
agcttcggcataatgggagagttctatagagagtaatgtccaagttccaaagagtttgagagaatntgttgtgtgaagatccgcagagaccagagctggaagaggaagtcatcctgagagcttgagatgagtttgtgagtgattatgaggtcctagaggtgaaggagacatccccactacttgtatntctgcaatatttcattctcttctcttttgtgaaaggaagcttcccagttatggaaagctaaatcctctgttggatcttccttgtaagtacttgatgtaaatatctttttatctatttaatgatgttttgtgtgttcactgtgctatcagaacttcattctaccatgcttttgccttgatcacgtagatgcatgtgtttttaggatcattcatagtggaaactggtctgattcttataacttgataggacaaggctagtttgt

SEQ ID NO: 60659 - DNA, 312 bp, Glycine max
  unsure (1)..(312): unsure at all n locations
agcttaatctactttatattgaaagtgtagtagaagtactagtataactgaaaagtgttcatcattcagccaagctatttggccctcgttttatacatcaattcctgtacanttttggatgaaaaagagaaaagcctcaatgaagccctaaatcacatacaacttcttaagagggagttagcaggaaaggatgcagaggtaggatttttaaaacattgctaatcatgtctcttggattgaagtttgtcgtaacataaatattaatctttntggttggctgtctgacagattcgacaaatgaaagctcatatt

SEQ ID NO: 60660 - DNA, 448 bp, Glycine max
  unsure (1)..(448): unsure at all n locations
agcttaacgaacacaagccctatagtttttatctttaggcaaagaaccgggtcccttaacgaacacaagccctcaaagtttttaactntaggcaaagaaaaattatctgagattaattgaaagctacagccacactcagattgtacaataagtgaatcagctcacaagcaatccaagttgagcccacaacaacaattatatatactgcaactacaagttagtctctgtatatagaacatgattcattcagtatattagcatatatcattgtttgtgtgagttttcacaacttaaaattcaatatatcccccatttgattgatttgaactgataaccaacgggttcaagttcaactctgtacatccaagttaccatgttcataagctgctactagacagccagggacatgattcattccaatgtcactcaagtcacaattagaatatca

SEQ ID NO: 60661 - DNA, 432 bp, Glycine max
agctatagttcactgcttcaagtagtgcacgatatgtcttcagaggaaaacacgttgcctaaaagttattatcaggccaagaagatactgtgtctgatgggtttggagtatcagaagattcatgcatgccctaatgattgcatactatacaaacatgagtttcaagacatgcacaaatgccctaggtatggggtatcatgatacaaagtgaaggatgatgacgagtgtagtagtgatgaaaactcgaagaagggcccccagcgaaggtgttgttgtatcttcccatcattccaaggtttaggcgtctatttgctgatggagacgaagcaaaagaccctacacgacatgtaaatgggagaaactatgatgaaatgctccatcatccggctgatttgtgcagtggaagaagattgatcattatatccgcatttc

SEQ ID NO: 60662 - DNA, 229 bp, Glycine max
atgagtcaaatcaaagagatcaacaacaaggcttatgactggttgacaaaagaatttcccaaaaaggcatggtgtaagcatgtatttactacttactccaagtgtgatgttgtaatgaataacttgtgtgggtcttttaatagtgtaattatgcctgctagagataaaccaataatagctatgctagactggattagaacttatttgatgactagatttaatgttatga

SEQ ID NO: 60663 - DNA, 344 bp, Glycine max
  unsure (1)..(344): unsure at all n locations
agctantaaantctatatntgaatgattctctgttgccgcaagctaggccagtggtcccatcatgtctatgaagaggggggcgtataatgatcttccacactacttccccgaatcatagagtgtattcgcttgctgttcacgatataaaagccattaccaatgaactgcctaaagcctaatgcccagtgtaccatgtgactatggtgggacgccttcattctagaagagattaacgcacgacaaagggcgcactccgacttatactgggtcggccacacctttgtgcctactgtcagtcctcatgctatccgcttgagagatccactactcttggcagcctttt

SEQ ID NO: 60664 - DNA, 210 bp, Glycine max
ttctcaacagtcacatctttttgtgtggctcttgaatggctatcacaggcctatatatatgtgacttgagacacgaattcgacaagagtttttcataacacaaaggtcttatcctcttataaagcaaaataatcttatcctcttaaaatatcttgtgcaaactcttggattcataaggaatattgagcgccacattgtcactcttctctt

SEQ ID NO: 60665 - DNA, 457 bp, Glycine max
  unsure (1)..(457): unsure at all n locations
agcttaagctccttcaactgcacaaggctcttattattngaagtgtatccttatggaaccttcacccgacgaagacactgacaaaaacttatcttctccttcttggacaaagtatggcaggctgggggcaagtaaattttcttcccatcagaccttggatgcaactatgatcgtttacccatatcagctagatcttgacgggtattcaagccatccttcgtcttgccttgaatgttaaggagcgtcccaatcacactgtcacaaacatttttctccacatgcataacatcaatacaatgtctaacgtcaacatcagaccagtacggaagatcaaagaaaatggacctcttcttccatatgcaactctgactnttatccnttctttgggtcttcccaaatacagtattaggtgttgaacctactgatatacctgctcaccagtcaatggtatcgacgc

SEQ ID NO: 60666 - DNA, 323 bp, Glycine max
tcattatttgtattaactggatgctggcgcataacttttataatacaattatatgaatctctcgttcaatatgctagactatgctatatactatgtgtcatcctgtttataataaacaaggtgacatgtattgtacactacaactttgttcttatgaatagaactcagaagtacatatgactttggttaagtaaacggaacttgatgagattgaaaaccaaatcaaccatctaatgacttttgttggattgaattatcggattaatcgattccactacttgaagaaaattaacctatgatataccctcgagccgaatttcaat

SEQ ID NO: 60667 - DNA, 235 bp, Glycine max
gctctccaggctacctgataatctgaaccttacctgttccttctgttgactaccacctaggaaactattacttctagattgacttgaatgttggaaaggtggggtttgttatggacactgtttgtgactatctcatgagattggcctactgatgacatgatatgttaatgtggacatctaataaatgtgttttcaaggccaaaaaaaaaaaaaaaattcaaaaaaaaaaaaaaac

SEQ ID NO: 60668 - DNA, 476 bp, Glycine max
  unsure (1)..(476): unsure at all n locations
cttacagcgactgcggctgcagcttgatanattcaacgacantaagttntttctcggatgtcccataagagtcccgaatatatcgagacgctccaaaatgaaaatggaagctcgtatcaaattccaacgacattaacttttgacttggatgtccgactgagctcccgaatatatcgcgacgctccaaattgaaaacagaagctcctatgaccaattcaaacgagcaataactnttttattcggatgttcgattggagcccgtaatatatcgagatgctccatattgaaaacggaagctctgatcaaaagcacaccacaataacttnttactcggatgtccgattgagtcccattatatatcgagacgctccatattgaaaacggatgcttcgtacaaaatgaaaaccagcataactttaacttggagggtgaatgagtccccgtatatattgagacgctcaaattgacaacggagc

SEQ ID NO: 60669 - DNA, 370 bp, Glycine max
cgataaatttgattctggatggtctggatatacaaagcgactagaaaacgacttgcctttggtgccaacaaagctccattatatatgtgacatgtgctgtaagatgactgagtgctcacccgttattaaaccatggggaattgtagacctaagaacacaacttttagtattttcaattccggctaggtatgcgcccaaataggtattgccttcttttctgaaaaacataagaagcttatgaaggttactttcacacggttgttattactataactaatgtgtgcactcgcactgcaagcctctgttatttatctcgtatccaatcacgcaaagaatgatttttgattgttgttaatataaaaaaaaatac

SEQ ID NO: 60670 - DNA, 239 bp, Glycine max
tgatacgagcttccattttcaatttggagcgtctcgacatattacgggactaaatccgacattcgagttaacatgctatggcgtgtgaaattgatacgagcttccaatttcaatttggagcgtctcgatatattacgggactctattggacatcccagacaaaagcattgacgtttgatttgatcaagactgcatttacaattggagcgtctcgatatttacaggactcatccggacga

SEQ ID NO: 60671 - DNA, 453 bp, Glycine max
  unsure (1)..(453): unsure at all n locations
agcttgtangattatggagtatctatcacatgttgactatgtggcggncgggcgatggtgcaaaacaattctccacatccacaaatcacatataaacccaccatcctctgttgcccaccttcaactgagctcacgtactcccacgtagcccttatcctcgtttctctcaacaccgggtccccatcaattctcccaagattccacaacatccaagtaattcaacattcaatcatcacaaactaacacagccaagagaacagggcaaaggcagaaaactctgcccanaacacaaaccaatatcacagctnttcacattcaaataccccagtaacattctcttcgttccagttcgttaaccgttggatcgactcgaaaatattactggacgtttctagtactaagtctacattttgaccgttgggatctgctagaaaatgtccagaaccccatatg

SEQ ID NO: 60672 - DNA, 260 bp, Glycine max
  unsure (1)..(260): unsure at all n locations
cactggttatgtgtctactaatcatggtatcatttctttctccgncattgaaggaaccactngggctgccatatcccttcacctttgggcgtattctttgaaagatccgtgcccncctctntgcacatggttttgtagttgcatcctattcggagccatattatgaatgtattgacactgcctaacgaaggcaaccattaggtccttccaagaatggactcgggaagggttcaagttagtgtaccaagtaacagctaccc

SEQ ID NO: 60673 - DNA, 447 bp, Glycine max
  unsure (1)..(447): unsure at all n locations
agcttgatcaaccaatgagaatgttngaggccttatctttttcttgatcttgtttgctttgaccttgaattattcttgaagtaatgcttaacctttgaatgtttgttggaacaaccttattgtttgattctactttagcttcatcaaaaccctgtattcatacattcacattctcccccttttttatgatgacaatcattatcaagcanactctttttagcatcatcgaaacctgtatgattcacattctgccccttttttattatgagaatcattatcaagcaaattcttttcggcatcatcaaaacctgaaacctatttttccaactccaaaaattttacctttgttgttgtctccatagatcacatgttcactatttttgggaaaaatataaataaactttgatgcatctcccgccatgtgtttagagcaactgctatcaatgt

SEQ ID NO: 60674 - DNA, 362 bp, Glycine max
  unsure (1)..(362): unsure at all n locations
cttctctattgaatttctcaaggaagcttctcaagaaagtttctcaaggaagcttctcgaggaggtgagcttagttattagaggggtgtgtgtagttaagctctagcttctcaaggaagcttctcaaagaagcttctcaaggaagtttctcaagaaagcttctcaaggaagcttctcanagaagcttctcaacggaagttctcanggaagccttctangctataaatagaagcatgtgtaacactngttgtaactntgatgaatgagagtcttgtgagacacaactcanagttcaacttctctccctttcttcttccttcaatttcggtctcccccctctctctttctctccctatntcttt

SEQ ID NO: 60675 - DNA, 336 bp, Glycine max
  unsure (1)..(336): unsure at all n locations
tcttataccaatgtcacaagaagtgtggtggtcagattcataaagagggaactgatttgtcgatacggactccctatgaagatcattactgacaatggcaccaatctgaacaacaaaatgatgcanganatgtgcggggatttcaagaatcagcatcataactctaccccttatcggccaaagatgaatggngctgtagaggctgcacataanaatattaagaagatgacggtgtcatacaaagaatggcatgagatgctgcctttcgccctacatgaatatagaacctcggtacgaacttctactgtggcaacaccatattccttggttatggga

SEQ ID NO: 60676 - DNA, 443 bp, Glycine max
agctataacctcattgtctctcacagtctttattattgggagccaatccaatccttgtgtccggactctcagccacttatgatagccaccgatgatcccattactgcttcccctaagctctctgtcctttcttcacgccgcatcccatgccttgcgaactccttggagtaccctcgcgttgtggttactaaaactccgtgcgatgaaaggcgtgatgctttcgtctaatggcgctcctctcatggggtagccaagctgtcttatggcgagaacgggattataattaatacaaccccttgttcccatcaagggaacatttggacatccttcgcatgaagatagaatcttatttcttccttccttctagcgagggaaccaattaacagatgccccccatgctagccaagagttggtcccaattcgcctttcttttttcgacgcac

SEQ ID NO: 60677 - DNA, 438 bp, Glycine max
  unsure (1)..(438): unsure at all n locations
agcttgacaggttatgtgcangtgctgctacttatcgaggcacttcaattggcttgccagacctcaagatgatgacactcacattttttggattctgcacagtttgtgaaggaaatttgtcagaattttgggattgagcttggttcaactaagtagccatctgccccatcttgattgtagactctgaatggaggctcttgtctcgctgaaattgcatattctggatagtcattttcctcactaacttctctaaggaaggttgagaaggggccttagttgcttgttgtctttgttgttggtgttgttggtgctgctgcattggaggaggaacatatggcttgctnggaccagcaacattctggaaaggagggatagtctgttgttgttgtgaggacttgcccatctcagatttagatgattcctccaagctggattgta

SEQ ID NO: 60678 - DNA, 195 bp, Glycine max
  unsure (1)..(195): unsure at all n locations
agctntattcccgcgtgactcaattattntaagctttatatcgngagtcagaaaaagaaacagtcaatattgcactggctaaatggctggtttagatggcaccaaaaatagttattattcacacgtcagtcaatcattataagccttggcacaagcgtaaaggggtctagatcacatcgattcatatgccagcat

SEQ ID NO: 60679 - DNA, 452 bp, Glycine max
  unsure (1)..(452): unsure at all n locations
catgcaagctntgatagtaagtntaattgaataaattatactcactatcacaanaatggtcttctacgacgcaggttttacgacgggtgtacaaaaaccgatgtcataagtaaagtagtgacatttttggtaataacttaaaatttttaaagatgggttttatcaaaccagtctttgaaaaggaattacgacatcagttcttctagaaccgacgtagaatgcgagcttcaaaaatgcgaacgggctctctctcactctttattntatcttctttntaatctctctctccctaaattntagaaaaccctaattctcctcctcgctctctctctgttcgcacgtgcatcgccgtggagatccccacagagccgataaagatatatatagaagcacaaatgtttggtgctcacaagatgacttggattcttcaccgccggaagctatcctctttc

SEQ ID NO: 60680 - DNA, 231 bp, Glycine max
  unsure (1)..(231): unsure at all n locations
taatatgtcgagatgctcgaaattaaacaacgaaagctcttgagaaattcaaatggtcataacttttgacacggatgtcctattcaggcaaatcacatatcgagacgctcataatngaacaacggaagctcctgagaaatcaaatgctataacatatatgacactcgaaatgccgatcaggctttaatatatcatacgctcaaataaacatcgaagctctccgaaattaat

SEQ ID NO: 60681 - DNA, 466 bp, Glycine max
  unsure (1)..(466): unsure at all n locations
cttaagcgacgcggctgcagcttaatgaaaacctgatctcacctatcttaggaatttggagtttggaattgtttgggaataagtctggggggttttgttggataacatatttcgttggctatgtttcatgatgtattttgggccatacttgatgtacattgtatactggttaaatgttggacatgctgaatgatatgctatttctcanatgctacagttcanaaaaaaattagttgaatcaattcgaaaaaaaaagaaaaagaaaagaaataaagttgagtgaataagatcttaaatggaaaaagaatgatgagactcttggctntactctttgcgtttaaattttatctttagggtttcttattttttcttaatatgcacttattccccattactcctctattcctttgggattagctatttattccatatttttccctaccttgtccttggccccattacaacc

SEQ ID NO: 60682 - DNA, 485 bp, Glycine max
  unsure (1)..(485): unsure at all n locations
tccttcagtcacctgcggcatgcaagctngaacatacgaacttgcaaaaattatggtgaattggccactacgacttttgagctgaaagttttattaaattttctaaacatctggaaaaaaagtagaaaaaaagaaccaagtgatttggataaaaggaaaaaataataaaaatcatacaagttggaaagaaaattagtgtccaagaaacaaaaaagtgaaagggaagtgtgcttgttatttggctcanaaattgttctataattggtacctattttataccaatcttagttntgaaatttcaattgaaaattagtgtgaaagaaagtgtcaaaactagaggtttcttaagtcttttttttagttttttttactctactctagagccattctaggtttctcgttgagtcctagcttgcttttgtgtgcttttcatgctttaattgttgaataatcctttaaaattngtcttggtaaaaatctattgg

SEQ ID NO: 60683 - DNA, 359 bp, Glycine max
  unsure (1)..(359): unsure at all n locations
tcttctcanagatcccaacggncagtatatggaanattgtcttatgaatctgtagaccanatttcgagaagatccaacggttaaagaaggctggaaagcatttttaccgaggaagctcatgtagcttcctcaagaagcttcattaagaggcttcctcaagaagcttcctagtggcttctttgagaagctntctcaagatgcttctttgagaagctagatccttatctacccacacccctttattaaataaattaacctccttgaaaataattatggataaaataacacaacaaataatcaaacatcaaacataactactaataatatatagatatatatcagggtgttacatacccaat

SEQ ID NO: 60684 - DNA, 365 bp, Glycine max
  unsure (1)..(365): unsure at all n locations
tcgattaccatatatgtgtgatcgattacacacggcaaaatttgaattgaaattttaatagctgtttgtaaatcagttttggccactggtaatcgattacatcctctggtaatcgattaccacagagaaaatttcttgtaaaagactttntaacttaaaattcttggccaaaccttttgctacttcaattggaattcccttcctatttaatataccctttctaagactctatagacaggcttgatcatccatcttgaatatctttaatttctttgtcttgaataaagctttgagacacatgtgatcttttggcatcatcaaaacatcggcttgatactttgtctacatctccccctttttgatga

SEQ ID NO: 60685 - DNA, 406 bp, Glycine max
  unsure (1)..(406): unsure at all n locations
gtactagaaatatttggagcagatttcctactatagactangtcatcctttacatggntagttaattatcctaaataattgttgttgctaatcttataaaanaaaacataatctcgcatagctcataggtctaatatgttattgaaggaattatgatatgctttttttctcagaaggttgtaangaatgcatgctttgcataatttagatatactcaaacatctatttaattaatatttgattctgttatgaatttttagagttttacaatgtgatgtatntatattttagttagtggcaaggtagggttctaagatgatagtatttgtcttgattgaacaatgacttccttcaatntagttgtctcctctcacanaattactcttctctanttgagctaatatct

SEQ ID NO: 60686 - DNA, 275 bp, Glycine max
  unsure (1)..(275): unsure at all n locations
ttacttggagtattgtaagtatcaatcaatgatagcattaaatattaattaaagatatgatatntacttgctgtaattaatgttttatattttttggtatcatgaatgagtgtaaatntagcagtaacatatcccttcccattatttgtatgtctagtattttttttaattaaatccattgactcgatatatngcaaaagtaatccctattggttaaaatgatttaataaaattgcataaatttgaatgaaattattatgcgaattgtgtcgccc

SEQ ID NO: 60687 - DNA, 420 bp, Glycine max
agcttgacgcacatcgttcgcgtgtatgatattcacttccaaggtttgaagtagaggagagcttcaaccctataacacaacgtggcggacaaaagtgggcagttaacttgaatgatcatcattgtcaatgcggaaggtattatgcgcttcactatccatgttcacacattattgtagcttatggttatgtgagcatgaactactaccaatatatatatgttgtttatacaaacgagcacatcttaaaagcttactccgcacaatggtggcctcttgggaatgaagcggctattcctccttttgatgacgcatggacacttatccctgacccaactacaattcgtgcgaaaagtcggcccaaatcaacaaggataagaaatgagatggattgggcaaaccatctaagcaccgacaaaaatg

SEQ ID NO: 60688 - DNA, 225 bp, Glycine max
  unsure (1)..(225): unsure at all n locations
tatggnancatatacttcagatcatctttcttcaagtgaagttgaaccccaaccgtangaaaggcagtaaggcacatgttgtgagtctagaccactcacaagtattttagtcatgtgatgagcaatttatgtagtaacataataacatgcgagtcttcaactagtaagttttcaagctattgataatgaaattgcactcttcctttcttgttaatgctttctaat

SEQ ID NO: 60689 - DNA, 451 bp, Glycine max
agctatgaggaattggtctttgttttgaaattatctatgtgggtctgaaaaaaggcaaatttagtcatcctgcttggacgaatgagaaaactggggcaaatgaagagggtgagaaagagggagaaacccatgctgtgactgccattcctatacggccaagttttccaccaacccaacaatgtcattactcagccaataacaaacctcctccttacacaccaaccagttatccataaaggtcatccctaaatcaaccacaaagtctgtctaccgcacttccaatgacgaacaccacctttagcaaaaccaaaaacaccaaccaaaaatgaattttgcagcgagaaagcctgtagaattcaccccaattccagtgtcctatgctgacttgctcccatatcactagataattcaatggtagccataaccctagccaaggttcatcaacctccat

SEQ ID NO: 60690 - DNA, 417 bp, Glycine max
  unsure (1)..(417): unsure at all n locations
catggcaatggatggcagatgatatcatattcaatcatataanacaaggtgagtttatatattctaaataaatattggttactcataatcattatgtttattattttgctaatcacaggtattcgccttactgaaaaggaaacaattcatttatgcttaactgagaatgagaaatatgctacagcgaacagaagaagcttgcgagattttccatccatgtcatacccaataggataagcacgacaccaacatcataataatctgatccataatgaaatggcatatgacaaaagaaatgtagcagaacaatacaacacggcataccaantgctcacaagtactcacaaattatgacacanttgatatangaagttcttaatcacaatagtatatattactatttgttatatgtgatat

SEQ ID NO: 60691 - DNA, 448 bp, Glycine max
  unsure (1)..(448): unsure at all n locations
gcaagcttgagcaaattcaaacgacaataactntttactctgatgtctgatagagtcccgtaatatatcgacacgctcgaaattgaatgcttatgctctgagcaaattcaaacgacaataactttttactcggatgtctgattgagtcccgtaatatatcgagaccctcgaaattgaatgttgatgctctgagcaaattcaaacgacaataactttntacacggatgtctgattgagtcccgtaatatttcgagacgcttgaaattgaatgctgaagctctgagcaaattcaaacgacaataactttttactcggatgtctgattgagtcccataatatatcgacacgctcgaaatagaatgttgatgctctgagcanattcaaacgaccgtaacttttactcggatgtctgattgagtcctgtaatatatcgagacgcttgaaattg

SEQ ID NO: 60692 - DNA, 379 bp, Glycine max
  unsure (1)..(379): unsure at all n locations
ctaagctatgctgaacattacaatagaccttctaacctcagcagtataatcaaccacaacagaacaattatgacctctccagcaacagatacaatcccggatggaggaatcaccctaatctcagattgtctagccctcaacaacaacaatagcagcttgctccttccttccaaaatgctgctggcccaagcagaccatacgttccttcaccaatccagtaatcgcaacagccccagaaacaacanacagttgaggctcctccacaaccttcccttgaagaacttgtgaggcaaatgactatgcaaaacatgcagtttcaacaagagaccagagcctccattcagagcttaactaatcaaatgggacaattggctacaca

SEQ ID NO: 60693 - DNA, 437 bp, Glycine max
  unsure (1)..(437): unsure at all n locations
agctagncangaatcactcatttcccatgcatctatctttntaaccaaccattgctctttgccctcatcagcgctcatgatgttacacatgatgccactntcatacatggtcatgataggattactagataagaaaataacacatgacttttcttgtaaaattcattctcagtcttttatatttctttattagattgaaaaacattagatttatcataaatttttataaaagttacgctgttggaatagaacaacgtctgtggcgttaacgtttctcttgggacggaatgagatgacagccatgagacaactttcatacatggtcatagcaagaaggatcagttaatataaaggactcttcttatagtaattcctaatcttctacataattttgttattagttcgatatcaatgttagatttatcctacatttcaac

SEQ ID NO: 60694 - DNA, 289 bp, Glycine max
  unsure (1)..(289): unsure at all n locations
atgttatcaaacataanaagggaaaaggtaatattgtagccgatgctctttctcggcgtcatgcattactttctatgcttgaaacaaaatagattggtcttgaatgttngaaaagcatgtatgaaaatgatgaaactcttggagaaatttttaaaaattgtgaanaaatttcagaaaataggttctttagacatgaaggctgtcttttcanagaaaacaaattgtgtgtgcctaaatgttctactagaaattntcttgtttgtgaagcacatgaaggaggtttaatggg

SEQ ID NO: 60695 - DNA, 355 bp, Glycine max
  unsure (1)..(355): unsure at all n locations
tgcaagcttagctattgtaatgaggactttggctatatcatggtccatgcacttgaaggagacgtgtagagccctattgtgcccccgcccttcggcaggaatctcctcctccgtgaaggtaagatagttattggcggtaatgttgctaactatcccctcgaaaccttccacggagatgtcttgggccacctgggccttatttagcactttgaccaacaatgcccggtgaggctcagagctcatgagcaattgtaagagggagaccctagctggggtattggtaagntgntatattatcttgtattctctttggtggattatacgaaggaattcgctggcctccttcgtcgacacc

SEQ ID NO: 60696 - DNA, 61 bp, Glycine max
gccttgaactagctataatcaatatttttctgattctgcgtgggatgaaaataaacttttg

SEQ ID NO: 60697 - DNA, 340 bp, Glycine max
  unsure (1)..(340): unsure at all n locations
agctntgcagcagatgccactctactctatattcttgaaagatatgntaacaaggaagcataaatatattcattatgaaaacatcatagtggaaggaaactgcaatgctgtgatccaaaagatccttccacccaagcataaagatcctggaagtgtaactattccttgttcaattggagaagtcaatgtgggaaaagctcttattgacctgntagccagtatcaattggatgccactctccatgtgcaaaagattgggagagttggaaataatgcccattcgaatgactntacaattagctgactgctccattaccaagccatatggagtaattgaagat

SEQ ID NO: 60698 - DNA, 67 bp, Glycine max
tcccttccttagaaaaataataaacttttggttttttttcgagggggttaatttatgcactcccacc

SEQ ID NO: 60699 - DNA, 177 bp, Glycine max
  unsure (1)..(177): unsure at all n locations
attaacataacccatcctattactattcttagtgtgaattgagccccagtctcgattccacctttntttttttttaaccttttggtaccttccttcagaattatagaacctaaaccccgaatttaaatgagtttttttttttgcttctggtgacccatttactattacatttttact

SEQ ID NO: 60700 - DNA, 322 bp, Glycine max
gctatacacctaagcataattagtcctaaagaatttatttatgtgttatatacttaaagacaaatatttaagtgtaagaataaaacactacttaaatattaatttataaaagatcttttcaacgcattatataaatatcattaatattatttcattggacttagtgaaaaaagtttacaataaataataatctggtgtttctaatggctaaaaaatgatattatttgtataatgaaaattttattaaccgaatcaattaaactatctactcaaaatacaagaataattaaatattattatctatcactattataaagctaat

SEQ ID NO: 60701 - DNA, 126 bp, Glycine max
  unsure (1)..(126): unsure at all n locations
attgtgcaagcaatcaatgacgctatacacaccanaagattatgatgatggatggctcacattctcacgaaggtaaacttatcactttgaagttgagctctctaaactatcatgacatgtagagga

SEQ ID NO: 60702 - DNA, 322 bp, Glycine max
acctaaactcatagttcttgaaggaccaaataaatcaatgaaagtggtcaacggtttgaagtaaaacaacatttttaattgaaaggaatttaacttgcttccttttgacaagttacacaattattttctccacttgagtttgaagaccaatactaattttctactaatgattaaatatgatgtaatctgacagcctacttccgaacatgaatattatctactcacaagcactactatgaaagtgctgctaacattacaatagagtactatcttatcattgacacttacgaatgctcctacaacacatttgtgactttctgaa

SEQ ID NO: 60703 - DNA, 361 bp, Glycine max
  unsure (1)..(361): unsure at all n locations
ctactacagccttaatgaaaacctgattaccattcttaagaatttgacttggaatgttttggaaaagtgtggggggttttgttcattggataacttgtntgtggctatacttcatgatgtattttgngtcatacttgatgtacatctgtatattaggttaaatgttggacatgctgaatgaaatgttngttctcaaaggatatagagttaaaaaaaaatctgaataaatagcaatatagttgagtgaataacatctaaatggcaaagaatgatgagactntggggtctactcttatgttaaaaatttatctctacttctttctattttcgtattcttttttcttaatatgcacttatccca

SEQ ID NO: 60704 - DNA, 139 bp, Glycine max
cccttttgcctgtctgtgtgctctttgaacatatcgcctgcacagccccagtctcaatggctgagtcagtagccgacctccgaatttgagagtacatctattgtgcctttgacattagttggaggctgctgcaccctat

SEQ ID NO: 60705 - DNA, 179 bp, Glycine max
tttaataacctttactcttgaaactatcttacactgatcaatattgtatcatatttgattgcatctatcaatatagttttataattcagtaaatatacaacttacactaaagtggcacactatacacactaaacaacgatacacactcatacacataccgactgtgtgtatccccctgg

SEQ ID NO: 60706 - DNA, 170 bp, Glycine max
gactacttaacaaaaaattatttatgtctcgaccattatctaaagacaagtgtatttataaatgcacttaaacctgctttgacccacaaagccgcgaagaaatgaaccataaaatgctgtcctctaagatactcgaatcctactggcacgatatatgggagtaagtactg

SEQ ID NO: 60707 - DNA, 85 bp, Glycine max
  unsure (1)..(85): unsure at all n locations
gctcataaagtgtatcttccatgtttgatgtgtttaagtgactctggggtngggatgggtggttctatataactactataagagt

SEQ ID NO: 60708 - DNA, 215 bp, Glycine max
agtatatctaatatatgtatatctatatcataatgacaatagtgatcaaaattaagaatagtctatgcaataattgttaataacaacttaccagtaactactgacataaaattattttttaataaattatagactgactccgcttattgttttctaagtgcattctgcagatgttatatagcatattctgcgaataaaggtctatgactatgaca

SEQ ID NO: 60709 - DNA, 166 bp, Glycine max
  unsure (1)..(166): unsure at all n locations
tacacaccaacacattagaanataaataaaanatacataacctaattggtgcctttgaaacaccgtaatttctctatcattaagtgcctgcaatggtacacaacaatgacactagtatcttcattaacagaagaagaatggcagaataaaataagtattattataa

SEQ ID NO: 60710 - DNA, 186 bp, Glycine max
  unsure (1)..(186): unsure at all n locations
caatgagaggtgagatagganaaccctctggaacatctgacgcagttcacaccacagatataccttcactatgcatatccagctctaataccaacactcgctcagaaacactactacaaccacaaagattccaaacggatacatcaacatggctgtcaatatgatatgactactgtgtctactatt

SEQ ID NO: 60711 - DNA, 185 bp, Glycine max
atctgtagagggggatcatgtgtatggatgatattgacggaattaagacaaggggaaattggagtatgttagtagcgatctatttagaatgaatcagtgctgtcttatagtagaaggaactcctcccgggtgttggttgatctggagactgacttggtcgggacaagacatgatgttaagactgc

SEQ ID NO: 60712 - DNA, 266 bp, Glycine max
acttctgaaactaactacaccgcaccttattattatctacctctgaaagctcttaaaaattctaagagctaaagctactaccatcctctctatagttagctacctcctgagagagaactagagcttactcacacccctatatagctagctacgccatgagaaaactgaaatacaaacaagtctatacaaacactcgatgccgaaacaggtaaaccttctataaaggcaatcatgaaactatctaattcaaatacgctatctagcat

SEQ ID NO: 60713 - DNA, 458 bp, Glycine max
  unsure (1)..(458): unsure at all n locations
cactccatcattagggatagtacctgacatctcattcnactaatcanacgtaacaagacaattatagttgctggttgaatacctcacccactcaagtgtatacacaattatggcttttctctaatgaaacactctcgccttttaccactctaattccccttgagttcttaggtaattcaagagaatatggccacaacaaagaacaattcaccaatatgtgtaaggtaggctagagagacacggaaanggtaaccaagaataagctaacaatgttttatgcacaaatgaggaaataaatcagaattaggaatcaagtaacatcttctgcacaatatatacctaaagagatnnttttaagtttcaacatgaccatcagccaattttattattattattttattttgctaacaatctctctnnttttttttttatacaagaacaaggctactttgatgtca

SEQ ID NO: 60714 - DNA, 294 bp, Glycine max
  unsure (1)..(294): unsure at all n locations
atcacctctcaatgagctggttaataagaatgtggtantatcctgggtgaaaaacaagagcangcctttgctttgctcaaagaaaagcttacttaggcacctgttctagctcttcctgacttttctaaaacttttgagctagaatgtgatgcctctcgagtgnggagtggagcctgattgtacaaggtgggcaccctattgcttattttagttgaaaacttcatagtgccaccctcaactaccccacctatgatatagagctttatgccttaataagagccctccaaacttggg

SEQ ID NO: 60715 - DNA, 248 bp, Glycine max
tcactctatcggtatctgtggagctctttctggtattctattgtgcctcttacttttcttgcttcactgattcatgggaatacttaagaccttgaactcaaatcacctcataaagccacaacagcttcttattgactcttaactggccatcttagtggtgtaaaatgctttaatgtgacaaagaatatgcatgctaacctaggttaggaccgacatctatatgtggttttaaaacgtgatgggtaaca

SEQ ID NO: 60716 - DNA, 378 bp, Glycine max
tcagctagtcaccttctgatccgcatgctgctactattattgtgtgctaatggactttatatcttaaaactgctatcttggaaggtgtggtgaaatgcagcgcttatctgtaatgaactttgaacaacacatttggctaccatgtgatttatcctgagacagtaatatattcttgctgagacagtaactgaatttggagagtgtagtgaattatagtagttgcttgaaatgcagatacactgctcattatgtcttgagatgactaattttatgggatatagagaaactctttggatatgtgatcactattcagcaaaaaaagtagagcgtaccctacagaattctacaagctcgtacagctcatgtacgtgaacttaa

SEQ ID NO: 60717 - DNA, 284 bp, Glycine max
  unsure (1)..(284): unsure at all n locations
tactaagtcttttcgttactaaaaaaataatttcccgacgtngaatggttatcattacttcggtaaataatccgaccgtcgcgtgcgtaccacgtggaataaaaaagtaatatataatatcaattctgaaatatataatataaattcttgataatataaaaacacgacgttttgagttctgatgatgtatacaaggaactaataatactcaatagttttcaaatataaacgttaggcacctaacgctttgtttcgtacggctgcaactatactgattcgttgaa

SEQ ID NO: 60718 - DNA, 259 bp, Glycine max
tttgttcttacatgaaagagggaaagtctatcctttttcagcgcacaagaccattttccataaagtcattcttccattgtgatttgaactaagctggtaaaccaatctataaatttctgaacctctactctcatgaaggtgttacagcctggcaggtgacacattctacgaatacttgagcactcaagattagcttatattctgtttgaaacgtacaacttctgtgacagttatcactgttgttctagaattatacatc

SEQ ID NO: 60719 - DNA, 275 bp, Glycine max
  unsure (1)..(275): unsure at all n locations
atgaccttgatagagctggaagatgttcatggagaaagaagaggaagaagaagagtggagccaaatgaggagaaaaagaanagtgacttgatggctacaacttatctaagtcacacgtcctcttatatacagactttgactttgaactctggactcttgaaactctgagacttttgaaaatcttgaactaactactccaccctcttactactactcttagagctctagactaactactcccactttatctactactctaatgaactactactccc

SEQ ID NO: 60720 - DNA, 341 bp, Glycine max
  unsure (1)..(341): unsure at all n locations
tcagctacaaacctngttctctgnaagctgtccttgctcctcaagctttccgaaagctaggggtgagatctggcgggcatataccctaattgacaaacagcttaatagcttgattacacgtgacttacgcagtatgattgagcttacgcagtcggcgtgacatgctaaacactgtgactagccactgactccgctagcgctgatatgatgccaccagatctttgtctgctaccctgactgctacgtgtccctaccatatactactatgattgcactatacttttactaatgcatttatatatcatgctattagcacttctaacaatttcaattcatactat

SEQ ID NO: 60721 - DNA, 117 bp, Glycine max
  unsure (1)..(117): unsure at all n locations
ataattcttaaataatatcaaacaaatgtaaataanatagcaactcaatatttaaaatacaataattacatgctcatgcatcgcatggatactagtatatatattaaaaagtctatg

SEQ ID NO: 60722 - DNA, 211 bp, Glycine max
  unsure (1)..(211): unsure at all n locations
cttgaccatctacaaaaactttactcgatgtcgatgagtcccgatatatcgctctctcgnaatgatgtgaacttgaccaatcaacacataatttatcgtgtcgataggcgaaatatggacccaatgagtgacttaacactaacacatactttctcgagcgatgagccgaattcaacctcaatgagtgacttagcattaacacacactttct

SEQ ID NO: 60723 - DNA, 330 bp, Glycine max
  unsure (1)..(330): unsure at all n locations
cactaagctggctatcctaggaacctcttctagtattcctcttgctggactattatctatcttcttctttacctctgagtgtaagcctctatggctatgaaggctaaacccctagtggagctaacaagcaaagtccttgtatgaactgctttcttactattatgcaattcatttctgtgtcttttttatttcaatgtaatgggggttggcatcatgcatatgtttagggtattcttangaatgtatgctaagactggaatgctctaacttgatgctggataaggattgtagctatgatactctatctatgtgtataatcacttgaaggat

SEQ ID NO: 60724 - DNA, 153 bp, Glycine max
ctatctacttctaaatttcctagaattgatgatcatactcccatctggcatgaatcttatgttacctatctccaacccttagtaactgattttggtttattcagactactgactctctatctcttgtgatcagtgaattataacatattccat

SEQ ID NO: 60725 - DNA, 180 bp, Glycine max
  unsure (1)..(180): unsure at all n locations
tcagctgaacaagagtatagatgctttatanatctataattatagtttgtaattgcagtatgtattattgaactcatcacctcacgaacgaattctattaattattntaatacgggtaattctttggacataaaacataataacttgcatttgaaggatcaaatcagtataaaagtaaat

SEQ ID NO: 60726 - DNA, 294 bp, Glycine max
  unsure (1)..(294): unsure at all n locations
atcaacaaaaagccagaatgtgtatagagacataaaatcatacattcactctaatcatcaaacaagaagacaattatgcatacataaactaagccaggattgatataattcattcataaactataatatatgtcatataatntagagattcattcaagataaccacaataaaaccactaaattagaaagtaacatactaataagtgtntcanaaaacagtcataagacatcaaaacattaaatagatcatttttctaagtcactagcatctagaagtcttaattctcttctaat

SEQ ID NO: 60727 - DNA, 122 bp, Glycine max
  unsure (1)..(122): unsure at all n locations
ctctatcagccatctggggaagctcttttcagctattcctgtgtttgggctncctctctcttctctttgctttcgtgatctccatggggaaataccattgaggacctcattgaagcttaaag

SEQ ID NO: 60728 - DNA, 246 bp, Glycine max
cttgaactagcttactaggcggcggcttcttacctctgttaacgcagttgatacgtctcttccgcgagctttttacattgctgagtggctatagctaccctactccacattcttggctttatcagtaatatcacgtgcttgctaaccaatcggtcgaccgtcccactactagcatatatgtgatcgtagcactgccaagagatccgagaagctacactaagatgagcgtttatgtcttcgctccta

SEQ ID NO: 60729 - DNA, 327 bp, Glycine max
  unsure (1)..(327): unsure at all n locations
tcgctacagtctggtgtgcagttatatattcgatctacacttatatattatatttacatatgctatgcattattatgagaatttagatcatctagaattcgcataatagactacgacggatatatcatatgggataagatcattcttttaaagactacacaaagtcacaaatatatgccattcagagtgatctctgacttttttgatgttgctgttcctatacccaccaatttaatcgaaactaataggagattcatcttatatcttcatcttcttanaaggactaacgtatgtacagaacaatgtcattctaacttttatgcacat

SEQ ID NO: 60730 - DNA, 169 bp, Glycine max
  unsure (1)..(169): unsure at all n locations
tgtaatttggaatagggatgggctctgaatcatacangggggatcatacatgtaaaataaacggagctaaggcttgtatcatacacggtgatcataccgctgaaacagcgaactagacctctgatcatccaggggatcatcagctaaagactgatgtgaccttgattat

SEQ ID NO: 60731 - DNA, 181 bp, Glycine max
  unsure (1)..(181): unsure at all n locations
tctattgntggctgacatgttcactaagtccttcataggcttgtgttatctactttataatanngctggcttatatggcatatatcctccaacttgacgagtgttagatatcatatttaacacatgttaatcatgaacatagttgntagcttgtcactagaaattangggcttttatatta

SEQ ID NO: 60732 - DNA, 191 bp, Glycine max
aagaattcatagagaaaaaaagaatctcaaggggagaagaagagaatccacaaatggaaagaaaggagactcgcaaacaaagctgacaaatatacgcaatgccatacaagagagaccactaagcttctatcacaacggctcacttttgcgctaaaacaagaacgaataccaccacggaaccaaactcagac

SEQ ID NO: 60733 - DNA, 269 bp, Glycine max
tatgctttgacctatgctaccttctgcttttgtttggaaggaagacgttaacaatcaaacgccatcaaaaataatagagggacgggccatgtgcatgcttcgttagactggacgccaaggtgagcctacaaatctgcctgcactcgcatcaaacctatggagagcagatcttaatctactatatgtgcgttcttaatatgacgagccactactaggtcagacaacccttaaaccgcttttaaaaaggagtatcctgcacccctcaagta

SEQ ID NO: 60734 - DNA, 82 bp, Glycine max
tgacccgaactagaataaggctactttctcgagtcatcgcctgatataacccaatgaccgacttcaaataagactaattccc

SEQ ID NO: 60735 - DNA, 409 bp, Glycine max
  unsure (1)..(409): unsure at all n locations
ctttgtatatttgtatgaagtgaatagctatagaaattgtatttttttacagcttgtacttatgagtgtgatttggtctatctaaataaggagtatttgtaatcgaaatctcttgtaattgaaagtttgcacgatgcttatgtgtgaattcttgcaatgcttaggttgtcctccgaacatggaccanattatctgtaatttanattcntgcttcatcaanggtgggtagtgagttttgtgctgcttttangagtgngtctgtgctgccttntgagaactctacgagttacgattnattctacgagtcaagtaccgaacctcacgatctacataaatccgagttaacaacctgtgtgatgtagacataaatatatatatttttatcatgactcaagataaaattaatgat

SEQ ID NO: 60736 - DNA, 131 bp, Glycine max
tgttccgaagggactacgcacttccttgggatctaaacggcttttccagttgatgctcttcaaattcgcctgctcagcaccagtctcaaagatggagtcaaatgtcgacctcccaaatttgagatgatgat

SEQ ID NO: 60737 - DNA, 237 bp, Glycine max
  unsure (1)..(237): unsure at all n locations
tgccttatccttaagagacattattttgtagccataccaatggtaacatatcatatatgctacattgataataatacantcacacttatttatctttttttctctctatttggcatatatagcatgaatctaactataggaaccacacaagctttttatccttatganatttctacaataagaatctacatcataactaactgtgcatatgtacaagtcactgtgtatgatacacat

SEQ ID NO: 60738 - DNA, 213 bp, Glycine max
ctatctctcctcttgacaaagatgcagctggggcagtaaattctccatcgaccctgatccactggatctataccatataatgatctgacggtattcaccatctctctctgcctgatgtaagacgtccatacctgcacacatttctccatctaacatcaacaagctactcaacacccgtcgagacaaaaatgacttctcaatcacttacttatc

SEQ ID NO: 60739 - DNA, 278 bp, Glycine max
  unsure (1)..(278): unsure at all n locations
gtattaaatatccagtcttggctagatntccattcagtgttcagtatttggtaacttaaaatatctatccactcagcangagtaatgtatgtgttatctaaatcttaaggatccctgtgattcagcanaaaaatgcatacattactgagcattttanggagaaaatgcangatttagtgatcagcaacaactctgccataagtcacataattaccacctgtgcgtctgacatcatttccagctatggtatactttaatagtgacaaagtaaatcttta

SEQ ID NO: 60740 - DNA, 212 bp, Glycine max
gaataatacacatatttctggcaactacagaaatgtgaaaaagacagatgtctttcactgcaattcacatcattataaaactaactaagatgaagtaaatataatgttgatgaaatttcgcgccagaggtattaaaaatgcgataacagcgtctatgctacccaggaatgcacttacaaaggttgtgaggaacatcagagcgattgtttaca

SEQ ID NO: 60741 - DNA, 342 bp, Glycine max
tcatctcatgccgaggcatggtcggctttattttttgtcttgaaccctgtgcggctaccattactaagcattctcgctaataaaaataaataatttcccgacgttgaatgattatcatacttcgtaaaaagtcgacgtcggcggccgaccctggaataaaagagtaaaatattatatcaaaacttttataaataacgaaacatcggcgttctttggatttatctatcatgtatacaaggaactagtaacatcgcagcactcgcataaagttgagtgattatttactaaagaatctagcacctaagaacttagaaaatatgtaaaacacagtgtttatcatgg

SEQ ID NO: 60742 - DNA, 250 bp, Glycine max
  unsure (1)..(250): unsure at all n locations
aagagaaaaagaaacaaanaagtgctattttgcagctatatatgtataaatanaattattatataccattatattgtaatatataaatgaagagatttttactaataccccttctctttatttatattgtgaagtaatatttacaatataccttttacatatatttttaaattattacaccgtagaattctctaaacaaggtgacgataaatattattgtcgtataactaaaattgatttaagttatgac

SEQ ID NO: 60743 - DNA, 230 bp, Glycine max
  unsure (1)..(230): unsure at all n locations
tcactctttttccactcataacatcacattctcactttctaaccctagggtagttctaactttcatctctaacagntttccatcagcaatttcagtatataaacattacaaacatcatcaccaaaaaccctaaacagaatgggtatgttaactcatccacatggcaattaacagctttaacaagagcttacaataccatatgagcgaaactacaaactccctctattcca

SEQ ID NO: 60744 - DNA, 420 bp, Glycine max
  unsure (1)..(420): unsure at all n locations
agctntatgtgtggttntaggtctttaaaatccacgtttgaccaataaaagcgaaaggaccatttcaggcgttggaccttaaaaatggttttttaggtgatgacaaaagcttggtttatgaattgattntaaccttagtttcacttcggttattagtcaattcgattaagaaagaaaatcccanagaanaacgtccgattgattttttttttattatttatttaaagatatttatggattatttatatanntatttgcctctttttggtntaaacgtggtacagcatgaaagatcgaccggatttattctaacagaaattaaagatgtacaactcaatgatcggtaaaattatttattttttatatgcgagnagcacttaataatgataaacatgtcaaaggggtcggaagcaatgaata

SEQ ID NO: 60745 - DNA, 423 bp, Glycine max
  unsure (1)..(423): unsure at all n locations
tgcacttatattattcagtggttgatgtttcattntggaaagcagtggttgttgattgattggaatggatcgattgtatgatgtgagtgaattggaatgcgcaaatcatatgctttgaatgagcatgcagtcattataagagaaagaacatggaattaggatcaggcctgaatatgttatttggtttgtcaggttgattgtgaaagaacacgttagccacaacccggtgacagtgtgatctttaattgtgagagaacgactagcagtaagtaatggtttttgcatgaatctctgaatatggaatgaatgcatgagtntgaagatgatgaaggccatgttgtaatagaaagtagccacttagccaaaaagcttaccttgtgtatgaatgaattatgccttgcacccagtttgagctgaaagtat

SEQ ID NO: 60746 - DNA, 243 bp, Glycine max
  unsure (1)..(243): unsure at all n locations
gagctatcgggcgtaccctgagggaatgatctctaatatgctgagttatcggacctcccacaaattgagaagttgtgagattctgcgggtattctttggcaacgagatttttgctttgtatgagggtggagttctgttcctggaatgatggagactgttgccgcccacgtgactgccaagaaggggactctagttccccacaatcaaattgttgtnccacaagagtgaccctgtctactaccg

SEQ ID NO: 60747 - DNA, 243 bp, Glycine max
tgcttcatcttcctccgggttagaccctcctcctcgagtggcaaaactttgaacatctttgtgctccgcggcgatttcttcattctttttctcaagctcacaaattctcacatcactgtctgaaccggattcatgtatcacagctgtgatttgttctctttgagtaacgagcttttctcacaaagctgtgagtcactaatggcaatgtgctgcttctgatgctcattgttggaattttatcat

SEQ ID NO: 60748 - DNA, 390 bp, Glycine max
  unsure (1)..(390): unsure at all n locations
ntctttgagaatggtcgaccgaatttaacaactatagtatttataattggtaaactactgaattgaacgaagtaaaaccacatcaatcctaaactcctttccttatccactatataactatagaaatattatcttcgaccggttagatgaggtgttcattattttcttttagtaagtagtatgataaatatcatggcaccttttttctcctgcgtaaatcaattacttcacagcgttggtcctgtacttactcttgtctgacctatgttttctcagctttcaattttagaggccatttataaagtcatcctaatctaatgaaaggggaaaatctagagcagctgtgtggatgacaatatggttggtagtcacatggtgtgtttggatcac

SEQ ID NO: 60749 - DNA, 453 bp, Glycine max
  unsure (1)..(453): unsure at all n locations
gcttgcggaaggaagaacggaggtcaaggctcgcgattgggacatgatgtcgaaggaggcccgccctgccacatcagtaggagctttataagcgcgggtctaggacacgaaggccaagtcgttgcgatatgcaaagatgattcgccgagtgggtcggatttcgtacgaccatgccctcctagttttcgactaggaaattggcgagtggaggagcgcccggacatttacgcaacaagcataatgtaaccctttgtggcttttaaactctacagttgggcctaggctttagagtttccttttgttaaggctttatgtcttttgttcctaaatntataatacaaagatctttcttcatctgctcctacgtctctacccattctcatccatttgcatggttatttctntacgtntaanacgccaaatccaacgacgagtccctcgaatgtactaata

SEQ ID NO: 60750 - DNA, 443 bp, Glycine max
  unsure (1)..(443): unsure at all n locations
gatcctctgagtcacctgaggctgcagcttcagagcattaagatagaaatttatatcgctntattnttggttaanaaaaaggaatggaatgtttcagcaatgatttataacttacatggaaccagaccaaagtacaatagatatgtagaagtttctttgttcctcctgataaagcactgtattggagaatcacgcggacccggctattcatacatatacagaagacaaacacaagaaacattataagttaaaaccacaatggaaaaggagaacattataccacaagaagagttaagagtttattacctgcttcaatgaaatgggaaatgtgatccttccacattgttcaggagtcttgacaatctctcttgtaatggacctccatgatttacatactgaagcacaaaagacaacaacagcacgggcaggccaagatgtctcac

SEQ ID NO: 60751 - DNA, 470 bp, Glycine max
ccgaaagaagtctcgcagtattatcatgtaccacccaattcttttgtgtggaaaatggacaatgggggcgacaaaagcatcaataattagtcaacattacaatttagtcatgaaaagttgtgacatatattagattaagtaaaaattaattaataattacctctacagtcttcacataacattatcttacccgtcactttacacgtcttcctcaaccgtatcatgtgtggttaatgaagccattgccaaactctctttatgtaggaaaaaaataggaaaacattctcaaattcatttgttttaatattccaaacacactcttcttttaggtttaatttttaaatgagattaactataatagattatgtgtaataaatctaacttatgagatagatgacaacttatcagctacaaattagagacggaatattgtaaatactctctattattgattgttatgataattaatt

SEQ ID NO: 60752 - DNA, 462 bp, Glycine max
  unsure (1)..(462): unsure at all n locations
tataaaactcaagcttctcagaaacttctctagaggggagcttagntnttatattggtgtgtgtagcttagctctagcttctcaaagaagcttctcaaggaggagagcttattttatagatgggtgtgtgtagctaaactctagcttctcaaggaaagtttctcaaagaaactattcaaggaaatgttcttaatagagcttctcaaggaagctacctagtctattaatagaagcatgtgtaacactcgttgtaactttgatgaatgaaagtcttatgagatacacttcaaagttccacttctttccctcttttattccttcaattacgtgctccccccttctctctatcttttcctccattagagcatcctcttcaagcttcttatccaaagcaattcttggtggagaaggctcttcnttcttgcttattccctagaggatgtgccgtccctctctcttctc

SEQ ID NO: 60753 - DNA, 353 bp, Glycine max
actaagcttgtcgcttcttctgaataactggctaacatacattctataatgctgaagtactattagaaaggggtagccctgatacagctctcatggttttgaggtgggctgggcgggatggtggacctcacgtgacttcactcaaagatgctgtcactgcaatgcgggtgagggttgagtgtgggcttcttactgaagcatttatgcatcagagaatgctctgcaccacagtgaaggaaaagaatttcaataaaacagcatctgggaatacttctgagaagcaaaaaggtcaatgtaataagtgggtggagtggatggaggtcctggtgactgagatatgttgcctctgtatt

SEQ ID NO: 60754 - DNA, 430 bp, Glycine max
  unsure (1)..(430): unsure at all n locations
tctccctctnnttcctataaataaggggaggagggaagaactttatcgtcaaccctcctggtatctgaggatcacttgaaattagtgagaaaaatcgttttcgtgaagaaaatccaagccgaggcgcttccgtaactcgtccgagacatttccatgggtgatttcgtgaagattttccgccatccttcgttcgttcttcgtcgttcttcggtcctcaaccggtaagttcccgaaatcgaacttttcaattcattctatacacccttggtggtccccatttgtttcgcggtaatttattttcatttcatttactttctgtacccctttttgacgtgctttatccatttctttaagtcattttctcgcctaatcaaaanatataataaatttccaccgatcattcgaattgtaacatctattagtttctgat

SEQ ID NO: 60755 - DNA, 421 bp, Glycine max
cttatctctatcctcttaattctgtgctttcatatagaaaattgtctccttcttatcacaatattggtgtatccattacacagagtcttgaacctcgatcatataatgaagcttctaatgatcctgtctgggttgaggcaatgaatgctaagattaaggctttagaacttaatgatacttggagtgtaattgatatgcctcaacataacaatggtattgagagtaagtgggtgtataagatcacgctcagatcagatgggtcagaggagagacataaagccgggttagtggccaatggctactctcaagtggaagggcatgattacctatacaccttttctccagttgccgagctaaccacagtgagacttctattgaccttaactgctatcaataaatggtgtatcaagcaattagatgt

SEQ ID NO: 60756 - DNA, 429 bp, Glycine max
  unsure (1)..(429): unsure at all n locations
ctcagcttactagannaatgtgngaagagttcactaaaaatgttattcataatgtgtgctcaaaatgcttgctaaaaaaatgttgtgataacagttaagctaaaatggaaccaataaagcctttgtaaaacatgcaaagcttatgcatgaaaatagatttaagcattaaagttgctgagaagaattttgaacaaaacttttccaagtgcgtacatgatcttccacaactttttgaccttttggagagtataaaaccatgtatgtccaacttaagccatgaatcactagtagattcttcccttcaaaggttaatctttaatgatcttaagttgtcaacaaggaattttatactcaagaattttcttggtgagggcatgtttggaactacgttggaatgttggatcaatctagatgagaaccctgcaacaa

SEQ ID NO: 60757 - DNA, 317 bp, Glycine max
  unsure (1)..(317): unsure at all n locations
tcacctccttgagaagcttccttgagaagctagagcttatctacacacacccatatgaaaactaagctgacctccttgacaaaatacatgaaaatacataataaaagacctgactatgaagactactcaaaatgccccgaaatacaaggctaagaccctatactactaatatgaccaagatacaaggccctgacgaaggaaaaacctattctaatatttacaaagataagcgggctcatacttaacccatgggctcgaaatctagcctaaggctgatgagaaccctanggccttccctcggatctcttgcacaatct

SEQ ID NO: 60758 - DNA, 430 bp, Glycine max
  unsure (1)..(430): unsure at all n locations
cttggatgatgagtggtgctcttatcattaatggctttcctctctntaattatttcaattacctgcttgcaaaattgttcatcataccatataaatacgtgatcttccgtaaatccaaacggaggatcgagacatgacaagatattttcttgtacaaagaaacttgatatattcttcctttcatcccggctagtctccaagtagcattcacatccaatactttcatagcaaccaatgttgcatgattggacttgagaaacaacaaagtagaaaataaaacccagcaaattagggggaagttcaacagtgaccaaagcttgtgtaaagtggcaatggaaccaatctcgaactttgccacttctagctggtaaacagtagcaaatcttaccatntcttgctaattgaaaataataaaaatcaccattctcat

SEQ ID NO: 60759 - DNA, 371 bp, Glycine max
  unsure (1)..(371): unsure at all n locations
agctngcttgtgtggcttctattgatgctgtatctttgagcttcaatgggggcctttaatggtgattctccaccatggagatgtagcggaagaaaaaggaaaataggtgagaggaggcgccatccatttaagaataatccttggaggagggagctccaccaccaagatgagccttggataagatgctgggagaggatgcttcattggaggataagaaagagggagagaaagagagaggggggaccacgaatttgaaggaataaaagaggtatcgaagtggatctttgaagtttgtctcacaagactctcattcatcatagttacaacaggtgttacacatgcttctatttatagactaggtagcttccttg

SEQ ID NO: 60760 - DNA, 368 bp, Glycine max
  unsure (1)..(368): unsure at all n locations
tcaaccggggtagtttcaatttcgaagctttcaattcattctatgcacccttagtgggccattcttgcttggtatgctttcatcttcgtctaatttactttcgggatacttttcttccgcttttaatgagcttcgaccgaatgtttaagccgttatctctccaaataaataataaaatgaatttcaacaaatcatttgtggtggaatctcgttaatcgctgttaaaatagaattcaaccgatcgttcacactgtaacctcagttgataaaaaaagggaaaattttctccaatcagacattttactttgaaagttcttttaaataagttgataagtaaccaagtgaaattaacgctaanatcaacttac

SEQ ID NO: 60761 - DNA, 405 bp, Glycine max
  unsure (1)..(405): unsure at all n locations
attagtacctgacatctcataccaacaaatcaaacgttacaagacaattatagttgttgtttgaatacctcacccactcaagtgtatcacacaattatggcttttctctaatgaaaaaactctttccttttaccactctaattccccttgagttcttaggcaattcaagagattatggccacagaaaagaacaattcaccaatatgtgtaatgtaaggctaaacagacaaggaataggttaaccaataacaaggctaacaatgtttctatgcacaatcgaaggaaataaaatccacacattacgaattcaagttacaatccttcatacaaccaatatattaccttaaagagattntnttttaaaaaaaaagttttctagcctgaccattcagccatttttatttt

SEQ ID NO: 60762 - DNA, 422 bp, Glycine max
tctataaatagaagcatgtgtaacacttgttgtaactctgatgaatgagagtcttgtgagacatacttcaaaggtccacttctctccctcttttattccttcaaatctgtgctcccccctctctctttctctccctctatctttccctccattgaagcttactctccaagcttcttattcaaggctcatcttggtggagaagctccttcttctatggcttattccctatgggatggcgcctcctctacctcttcttctttgctttcgctgcatctccatggtggagaatcaccattaatagacctcattgaagctcaaagatccacccttcatataagccctacaagcgagctcacatcactctgcttctctactttactcattatctcttatttacctaaacttcattttttgctcctttc

SEQ ID NO: 60763 - DNA, 472 bp, Glycine max
  unsure (1)..(472): unsure at all n locations
agctngcctcanagaggtccaggaaagataatgcggctgaagggactaattccgctcctgagtatgacagtcaccgctntatgagcactgtacaccagcagcgcttcgaggccatcaagggatggtcgtttctccgggagcgacacaaaatataagcaaaaaaacacttcacaaaatatatatatgtatgtttaggtagtgaaaataccttatatatgcatgtatgtaagcaaaanaacacttcacaaaatatatatatgtatgtttaggtagaaagataccttagatatgcatgtatgtaaacaaaaaaatacttcacaaaatatatatatgtatgtttaggtagaaataaccttggatatgcatgtatatagcaaaaataccttacaaaacatatatatgtatgtttaggtagcaagataccttggatatgcgtgtatatagcaaaaatacctcacaaaaatatacacat

SEQ ID NO: 60764 - DNA, 440 bp, Glycine max
  unsure (1)..(440): unsure at all n locations
agaatgagtccacggagganatgcttaccacctcataagactggatagcgngttctaatgactcctctgcggcttccacataaggcatagaggacgggcagctcaccaagaggtcttcctcgcctgacacgatgaccaaatgcccctccactacgaatttcaacttttggtggagtgtagagggaacaactcccactgagctgatccacgggcgccccaacagacagctgtagggggggttaatatccattatttggaaggtgacttgacaggtgtgagggcctatttgtactgggagatcgatctctcccctaacctctctgcgggtgccgtcaaaggcatgaaccaccattgaactcggctttaagtgggaagcattgaatggtaatttctccacagtgctcttaggcatcatgttgtaaactggaaccattatcgat

SEQ ID NO: 60765 - DNA, 476 bp, Glycine max
  unsure (1)..(476): unsure at all n locations
agctttaaagacagaggtcgtgtcaccaggaagtttctcagctcgtctcttacgtanaatttcctctcttatgcccacgattttatctttataacccttaataataaattaaaaagataataacattgaagtcaatcacgtgggaagagattcaaaatgatgggacttttaaaagctattagtaacatttaatctctaacctgtttcaatatgtgcttcaattcatgtcttacacattccatgagggacctctcattctctgtgggaataagaanaaaattcagtgtatatgttggaataagctacaaataaatgaatctcccaactctagcaaattcttatgtgtacattagtgagaaacatacaaaacatgtgtttgaacaaattagtaatgacaaagctttgtaccaattatttgaatattaatttgaccgaccaaaganatggtcttcatgattcagatcatggtagaacac

SEQ ID NO: 60766 - DNA, 478 bp, Glycine max
  unsure (1)..(478): unsure at all n locations
ggggactcttggcaatttctttanaactagttacttaaaaagttattactnttgaanaaatcttcagaaacaagtcacttgaagaatttcgacttttggaaatgtatttttcgaaatcagtcactactaatcgattaccattaaggtgtaatcgattacacatcaacaaatgtgactcttcattctgaattntgaacattaacatgtttagaaactttggtaattgattacaagtattgtgtgatcgattacacaagtttaaaatactttaaaactgtttaaacataagttataattcttgaaatttgaaatcttaatgttctaaaacactggtaactgattactaccttctggtaatcaattaccagagagtaaaactcttatatatgagtttgtgagaacttctcgtgctacgtcaatatttgaaaaaacatttagtacttatcttgactgagtcttctcttgattctcgaatctt

SEQ ID NO: 60767 - DNA, 337 bp, Glycine max
  unsure (1)..(337): unsure at all n locations
actcaagctnnagtccaaactctctacaacgggttcgccggaactctgcattgtgttcgcttatcctcgaaccagactcaacattgttaacaccctcaggttcttattaaagaaacaagttattttaaaattaactttaaaaaaagttattcttcataggtacttaacgtaggtgtggcatgaattattgacggttattaattttttacttgggtggcagggaagttcgaatccaatgcatgggcaaaatattggggcggtgccagctggtggtggtagcgcgacgaatcacgctccatcgagtggcgctgccggtggtggcgcgccggctcaaccg

SEQ ID NO: 60768 - DNA, 404 bp, Glycine max
gttgcagaaatctctggtaaaggtcaacagaatgcttgatcaaaatcatggatatctagtcatttaaaggatacagcatagagtcatagacctcatgaaaaatgaagggcgaagaagcaaactaccttagattcattaattatgatctttaatgtttaatttgtaagtaaagctttagtttccaaactatgaatattaaaaattccctggccacttgctcctatagatcacaaaagcagtgctcccagtgattgtagtggcgctgtaaaatcacatgaaggaaaaaaaatacagatttggattaaaatatgtttctcacattactcacaaaaacagaatataccagattgaactaaaaaatacagaatatacaaatgctactaccactgctccccctcccccac

SEQ ID NO: 60769 - DNA, 405 bp, Glycine max
tattttctgccaagtaaaccagccccttatcttttccaaatccataacaccacaagcattcatcatatccgccatgagacaagcacgagaagagttgaattgccctcctgaaacttttgaggggagaataatatcatcaaaatccctaatcagtagccacgaacctctaatttgattccttatatctcccaagtgatcccataagtgatgacggttggaaggtacaagtgaaacataaactgtagtgcaataccaaacaatatattccttcttttgattgaaaaggttattgcttggttcatggaatgaatcaacgaacatgtaatattcactgtaaaggacaagacccatatgcccagagtggcccacaacttcttgaacaaacaaaggaatgtatcctaacct

SEQ ID NO: 60770 - DNA, 422 bp, Glycine max
agcttcttagtttcagatgatgcagatgggtttgtatctacctcatgcactcctctaatgactatggcatcatttctggcgctaaactgctgggagttggaagccatcatctcaattaaatttctagcttcagtaggagtcatgtctccaagggctccaccactggcagcatctatcatacttctctccatattactgagtccttcataaaaatattggagaagaagctgttctgaaatctgatggtgggggcaactggcacatagtttcttaaatctctcccaatactcatacaggctctctccactgagttgtctaatacctgagatatccttcctgatggctgtggtcctggaagcacggaaatttttttctaagaatactctcttaaagtcatcccagctcgtgatggaccttggagc

SEQ ID NO: 60771 - DNA, 406 bp, Glycine max
  unsure (1)..(406): unsure at all n locations
gctgacttggttagacatgattgatacatganttgngtcttgtatgattcaatntgggcaaaattggatgaaggtaagagtggttttcgaaatctgcactttatgcaaaattttgttgttgaaatgtgcagcagaattttgtatatgtgcagaaaaatgcttgtgtatggctggttgtggaaagggtagtacatatggggttctcgacattttctagcagatcccaacggtcaaaatgtagacttatgtactagagacgtccagtaaaattttcgagtcgatccaacggttaacgaactataacaaagagaatgttactgggatatttgaatgtgaaaagatgtgatattggtttgtgttttgggcagagttttctgcctttgccctgttttcttggatgtgttag

SEQ ID NO: 60772 - DNA, 354 bp, Glycine max
  unsure (1)..(354): unsure at all n locations
ttttattcaaactcgganattcaagaagattccntgatttctgaagtctatgggattaagacggtcataaaccagtcccttttctttgatctcactcaattatcaagtgacggngtaccatttgagggttcacttgatgatgagtggaagatgatttctctgtgtctgatgcccgccggatggtttgcaccaaccaagcggatatgaccggaatgcttcttgttggttcattggcatttgaatggcgcatcatgcactacttgattgtgcgcatgcttctccctagatcttccaaccttgcacagatgtctgagcaagaattgataatcatgtgggttgtcttaaccgggcgtc

SEQ ID NO: 60773 - DNA, 387 bp, Glycine max
  unsure (1)..(387): unsure at all n locations
taaggatcacattataatttaaataaattgaaaagaaattaatctataattaaaacttgggctcctaattagaatgaaacccatttattacatacccatgttggtgcactattatgcttgaccatgaaatgtgttgataacctctaaattctcctttggtctctttactcttgcactctttggtatttccagcccaacctttgggttgtcccttagagatcttcctttcacaagttctttcagtccaattaagggattatttctcttacgttnttcttctcttcttggagaccttcacggatctctatcattccattaatctttagggaagattttcctcaaatataagcctcgaatacctacattaaaagatactagattaacttc

SEQ ID NO: 60774 - DNA, 361 bp, Glycine max
  unsure (1)..(361): unsure at all n locations
agcttatgcttctcgagcaaacattccaaacattatgcactcatgagataccattacccatgtggtctcaccgacattatttatctcctttctttatgaagatagtcaacagaagaagaaagaaaacgggtaattccttcttttaattcctacctaataaagaagagaaagccatttggaccatgagcatgcttttgattctttcttatgtctttngacattatagacttatgaccgcgaacatgcttttgattctttccttttcctgttctaccaagaatatagagcagagtgttgaacctactgccacaggttcatcgggagcataactctatgacaaagcaataatctatgattcaat

SEQ ID NO: 60775 - DNA, 437 bp, Glycine max
  unsure (1)..(437): unsure at all n locations
aagcttgttactnnttttggtttataacgtatatagattaatattccttcgcttgcatacactnttcagcacattccatggaagaagcagaagtcctatgtgatcgattatgaatatttgtagacggnggcttgcagtgcatatgcaatccaaaggaggtaacattgcttaattaatatatatgctttatcaacttcatttgcaattaatgggcttgaccctatagataccgggctcaacctataactttggggttattctttctacacccaacaaatttcttctatacccaacatattctaaaaaattataactgtatccttttttacttcttcttcttcttcggtcctatctttttttcttgtcttcgcatagcttatagaaattntagtgttatatatagtgacattaattatnntttaacatgattggtctat

SEQ ID NO: 60776 - DNA, 428 bp, Glycine max
  unsure (1)..(428): unsure at all n locations
acactatnatactcagcttggcatattcaaaagatatatcttcttattgtggaaagtttaggcactacttntatgcctttactctaattatattttttaattggaatacttatggtattattctgtaacttatgctattattctaatttaatttatctttaaaattatattaatattatgcatagaaatatttgacatggcttatgctatttatgttgtaaattggtctctctttgatacacttctatttgctttttttaatcagtcgtggcctacacacaatatttggccaattggtcactaacttgatatggttgggatagttcacaaagtctaaatgatgaaattaaatgaaactacaatgcctaactaattgcttaaagacttanagtgcattgaagttgcaattaccattttgcatgtaattc

SEQ ID NO: 60777 - DNA, 449 bp, Glycine max
  unsure (1)..(449): unsure at all n locations
taatcgactgagcatgcactgtaaatacttcgtttggtctaaatttttattctgggaaaatttattttaccaaaatgtgtaggcttttattggttcttttattacaaattataggtatgcaatctttgttttgtaaagccatgagtccactcgtatgttcttcagttaattttgggattatgcttttttcaaaattatcataaagaaaatctacagttttttctatttggttcaatctgattttcaaagaggaaatcctatcgttcataattctatcttcataatcattttctttcttaaagtctggaaattctgttttcaaaatagtttgtacacaaattttgcagaagttnttgtagcatacactacactgagctcttagtgtttcgtgggatatctttacagaaaaacattcttgtgactggtctatgtggaatgatttatgtcac

SEQ ID NO: 60778 - DNA, 350 bp, Glycine max
  unsure (1)..(350): unsure at all n locations
tatgcctctctttctctctctctatacaagccttatttaataatatacttgctntactttcctcactcatattcttacttgagtgtcggagtcctttcttttgcaagtctcccctcttgtcaaaggcacattttcaggatgacgtgtgaagtttgtgaccccactcaactgcgttcatcctaacatgtcacgtttccaaaatttggtaaaacaattactaatagttaaataataacaattcatacatatatttcacataccgatcattnattattttaaataatattctagaattaaaaatatttaaaacagtaaaatagaaatagtaattcaaacctattgactaccca

SEQ ID NO: 60779 - DNA, 485 bp, Glycine max
  unsure (1)..(485): unsure at all n locations
gatcttaagtcacctgcggcatgcaagctttatcatataactttaaacggagattgtgttttgtccaaccacgggtagagggtgcctcagctgccatccacataaactctttcatgtgtgctcccggatacttcttcttccaattaccatacaaatgtttgacacatagtctatgttctacgttatcgccaagctccttgattacctcaaccaacccctacaaataacagcgaataaattaaattatagtaacaaatagatgcccaacataattntaatatttaccttttgttggttagaaatgaaagccgaacatccttcctgaatactattntagtcagctatcaagagatcaacacaccacttctaagatgaataatntttcagattccactatagcataaacaataggaaacatttgattgtttcatcttaccactatnacaacattggcaccatatttctttcaaaacaccatccatcta

SEQ ID NO: 60780 - DNA, 382 bp, Glycine max
  unsure (1)..(382): unsure at all n locations
tgcatgtgaattaggaagcatcaacaagaatcaagcccaggctattgtgcaagcaatcaatggggcgaaacacaccaaaagattatgatgatggatggctcanattctcacacaggtaaacttatcactttcaaattgagctctcaaactatcatgacatgtagaggaaaaacagggatttcacatcacaaaatgtcaagagacttttattttcagaacaattacccatttcttgaacatatcctataattcaaagaanaatatgcaaagttgtacatgcaaacagaattgacctanaatattaaactagaaacccaacanaattaacaaatntaacataactagcataaccaaagaacacctcccccatacttaaacaagt

SEQ ID NO: 60781 - DNA, 307 bp, Glycine max
tggaagtacctagtatttattacctatacttaacagcaaatacttataacacttcaaaataaccataaactggtgaattctgatacaatttacactggttttatacataaaagttaatcgttttcatcgactaacaatctcctccaacatttacagttgttgctttgtactctaagcataaggtgaacagtttcacctgtcctcatgtgaccatatcatgcagtgatcttgttcaaacgtgtatgcaacaaaagttactgattgcatgataagagaatgatgcaataagataacatgcacgctgtct

SEQ ID NO: 60782 - DNA, 296 bp, Glycine max
  unsure (1)..(296): unsure at all n locations
cagttatccacaaaggccatccctaaatcaaccacaaagtctgtctaccgcacttccaatgacgaagaccacctttagcacaaaccnntnnntannanntaatataaaaaaaaatatccccccaacaaaaaggaattttgcagcaaaaagcctgtagggttcaccccaaattccgttgtcatatgctaaacttgatcccatatctacttgataattcaaatggtagccataaccctagccaaggttcatcaacctccatttctccgagaatacaactcgaacgcaacgtgtgcttg

SEQ ID NO: 60783 - DNA, 452 bp, Glycine max
  unsure (1)..(452): unsure at all n locations
tgtgcanatcaaatcactcctacatttcatctctagcatgcattttctttctttacccactcctcacgtttggttttttagggaaaaacaccataactaaacgcgccgcaagggatccctatcgcaccagatccaaatctataatgatgggtgatcaagaggagacgcaggaacagatgaaagccgacatgtcggctctgaaagaacaaatggcctccatgatggaggccatgttaagtatgaagcagctcatagagaagaacgcggccaccgccgccactgccagttcggctgccgaagcagacccgactctcttggcaactacgcaccatcctccctcanacatagtaggacggggaagggacacactgnggcacgatggcagtcctcacctgggatacaaccgagcggcttacccttatggattgccgcccaactattcaccacccgtc

SEQ ID NO: 60784 - DNA, 400 bp, Glycine max
  unsure (1)..(400): unsure at all n locations
agcttctgaattgcttggtcgatgagctcaatctttctatcttgntccatgctngnatgtggnttggacttcaataataataaaagggtctttctctgttctcacccatcggccaccgacaagaggtgtattattgaatgaacaccacaagagacgtggcgttttggttttgtttcttgggtcttctcctcatctctagcatcatccaactttgggaagtggcgttagtgcttcttaccttttcatgggaaacttgtctatacacaacacgatgacttatcctcaccacataataagtgggagagtggggtccttatgttgactcttccatatgtggttcttaacttatatctatatttaaataattatcttggagaagaagatatgacttgcgtcaaaa

SEQ ID NO: 60785 - DNA, 462 bp, Glycine max
acataaaagaagaatcttgtacgtgtattgttgaggctttaatggaaatatctaaaatacaaggagccccagagataaaccaaataacatggtatctgtaagtaaggaatgagctaggataaatattaacaaggacagttctatactgattgaaacttaagaaactatatgatggcagaaatgcaagtgttatggggggaatcaatgatttctataagagctaacacttactgaggttaaactgtacactgcaggaatctgaataatattcttgcggaagactctcaaacaggaaagcagcggcatataccgtatatagattctaggttgacacttttgttgcaggagtctctcggaggaaatgcataattagcaatgatttgtgctatttcaccatcacacaagtagtatgtaatgcactgctcattcgatatgttttatcttctgatctttctgtattac

SEQ ID NO: 60786 - DNA, 360 bp, Glycine max
  unsure (1)..(360): unsure at all n locations
ctgcagcttcttaaaagatcctacaaagaagttcttttctcacatacctctgtaatagctaagctcacctccttgagatgagaagctagagcttanctacacgccccctataatagctaagctcacccccatgacaaatacatgaaaagacaaaacaaaattgcttactacacagactactcaaaatgccccgaaagacaaagctgaaacactatactactagaatggccaatatacaaggcccacacgaagganaaacctattctaatatttacaaagataagcaggctcgtacttagcccatgggctcgaaatctaccctaatgctcatgacaaccctatggccttaccttggatctc

SEQ ID NO: 60787 - DNA, 462 bp, Glycine max
  unsure (1)..(462): unsure at all n locations
ntgaccccacttgttggacaagtgacctcagtatcttaagaatgtgggttgaattaagatacaaaactttccctaattaaaattntaactttctttcggattaacaatgcacccttaatatgaattactcaaagaacaattcaaaataaacttctttaaagcaaaagataaactgcaataaataaaagaaagttaagagaagagagaatgcaaactcagtttttatactgggttggccacgccctgtgcctacgtccagtccccaagcaacccgtttgagatttccactatcttgtaaaaatccttttacaaagtctgaaccacacaaggacatctttcccttatatttagaaatctttacaacttaagagaccctcggtctcttaaacagatctcttngaataataagaagaagaatattctctctttaagagaatgacattacaattgaagatcgatcaa

SEQ ID NO: 60788 - DNA, 327 bp, Glycine max
ctagaacaatacccattctcttgtatcgggtacccatgccaatgggaaaacaactccatcctccctgcatatgtcaactccatcctctctgcatcacaggagtcacacagatcttgacctctcctcattaatttgtacatgccttgacctctcctccaatcttgacaatgttgcatcaatgtctaccgcccgagataaattatgcacaatctaaaagaatttgtactaagattacagcccatatacttggtgacaacaaaaagaacaatcaacttgagccccaaagaaaaataatcttgtgagatagaaatatgaatcttagtttga

SEQ ID NO: 60789 - DNA, 359 bp, Glycine max
gcagcttcattgttaatttggaacgtctttatttttatccgcctgaactggacctccgagttaaaagttatgagcacttaaacgttctgagagctctcgttgttcaattctagcgtctcgatatattatgcgccttgaatcggacctccgagttaaaagttatgaccattcgaattttttgagagcttctgttgctgaatttcgagcgcctggatatattatgcgcctgaatcggaccttcgagtacaaagtatgaccatttcgaattctcgagagcttccgttggtcaatttcaagcgtctctatatattatgcgcctgaatcgtaccttcgagttaaaagttatgaccaattgattt

SEQ ID NO: 60790 - DNA, 401 bp, Glycine max
  unsure (1)..(401): unsure at all n locations
tagtatagctaggcactaacaatctcccnctttggcatattttgtctanaacatacttagacacttcctgagcacgtacgagcagttatgcaagtgggatcaacaactttcattatcagagtaatcaagcacagcggaaattctgcaagttgcaagtcgtttccaggatgtcaagacatcttacatgacatcagctttctgcttctgctccccctgtctccatgctcttactccagcatcttctatcagctactaatcttttccaggatgtcaagacatctcatgtgacatcagcttttccttgtctccatgctcttactgcagcatcttctatcagctactagtagcttacaatagtcatcatcagcagcaggaggctcccccttcaaacatgtacatac

SEQ ID NO: 60791 - DNA, 443 bp, Glycine max
  unsure (1)..(443): unsure at all n locations
agctngaactccattaatccataaacttattttatacatttcatatgaanattgataatcatgtatatcataacgaatattaattattagacaaatgataacaaatttacttacatcattcacaactatagtataactatgttcaaacattcgtcacttgatattatttcatttacatcatagtatgttaagaagaaggatgcatctacatgtgggaattccaaattagttccatcccacaacaactcaatgagggtgtcataaaaatcataaagactcctaatcaagccacacaagggatcatctgcagcaacattattggacctttgaacaggtttaatcactttctctggagtaatatatgaaatctatatggttaatgaaaacaagaattanactaatgttagtaactaacttatatcaatctacaattgtcttaatac

SEQ ID NO: 60792 - DNA, 338 bp, Glycine max
aagaatcacgagagaaaaattaacaaatcatacataatttaatcccaaaatatagctacatatagcagttattagaggttagaaaaaactcgctgctcttttaggactataatcttatgtttagtctgtttagaataaagctttcacatagtagttcttacaaacatatcatagaagccaatgaggattggctccctactttatcttctttattatatggtttcgggatataaattgcaatcgacgatatcatgtcatttgatttcagctcatgaaccatcagtttaaagctcactctactaatcatattaagtgactcatgagtgcctccatctaat

SEQ ID NO: 60793 - DNA, 372 bp, Glycine max
  unsure (1)..(372): unsure at all n locations
gcttcagcctgattgctaagcgatagctttttattgtgttagcgtgacctattggcgctaagcgcaattccttacggccataattgaggtccatgaggctaagcatcagncatggcagctaagcgagattcattgcggcaatgtgagcgctacgcgagtccatcgcagctaagcacatgctcctctgtacttaagatgcatcattatatctaaactgcccaaagctaggcttaacgagagttgcagctttttaaatctgcagacctcgctaagtggactcaccctcgcgctaagccaagtctctgtgtgaaaaataatagattttgaaattgaaacatcggctaagcgcaggggtccgctaagcgagcctta

SEQ ID NO: 60794 - DNA, 280 bp, Glycine max
atgaaacactttgattgatgtggctgtaatttatcgataaacattttacaattgacaatcaccagaaaggttgatttaacaattggcttcatgatcttcaaatgtatacaaaatattatcaactcgttatcttgatgatttttgcacgtgacataattgaaattctcctcacagggcatgaccatacaagttatatatatcttgtttcaatatagtactcattactgtaacagcaagcaaccaatgagaatttgaagaaaatctcacaaaacacagttat

SEQ ID NO: 60795 - DNA, 271 bp, Glycine max
  unsure (1)..(271): unsure at all n locations
agcntgtgttgggcggacaaatgatgacacggtttattgatctctcanaatatgatattgcctacaagctgagaggtactatccgagcccaagtactacccaacttaattaatgaattccatcccccaccaccatatttcngaatgaatggaggacgacgcatgtgtaaaactctttcataggcacgggagtggtgatggggttattctcgaaggagcatggcactatcctcacatgttggattcaaagacgcatgcaattangccgaata

SEQ ID NO: 60796 - DNA, 420 bp, Glycine max
aagtcattgatgttgaagcaaagcttcatgatgaatcaaaaatgattcacaggtgtttcgatgataacaatgatgacaacaaaagatgatgactaaggtgatgaacacaaagctcaaaagatcaaagaacaactcaagtgaatcaaagaacatctcaaatgaatcaagaacaagtccagagttcaagaatcaagaagaattgaagactcaagaagaaagtctacaatcaagaatcaagattcaagattcaagatctcaagaatcaagatcaagattcacgactcatgattcaagaatgatgagaagactcactcaagataagtattaaattgttcttttcaaaactatgaatagctcatgagtctttgacacaacctttaccaaagagatgttactctctggtaatcgagtaccatattg

SEQ ID NO: 60797 - DNA, 295 bp, Glycine max
  unsure (1)..(295): unsure at all n locations
cttttaataattgggtgcgtgtattttgaaaatcatttaattttctgtataatggggatattttaaaaccatagacacgcatgatataatatcaaagcagaatttctcctatgtgatgatcatctattacataggccttagtaacaaagcattttatcaatggtttaagtagttgtaacttatacttcttaaatatgatattagaggttcaaatcttgactaatgtgcatgacanaaatattattatgagggatgaactcacctatgaatgacccacaaaaatacccttacattt

SEQ ID NO: 60798 - DNA, 418 bp, Glycine max
tcgggtatgattataacattcaatactcgtgcaagttcaagatatattgcgacggatgctttgtctcgcttaccacaacagggataatgccttttactcaccattccaaattatgtcttcctcaacaacttgagccactcccttaaccattcccctgcctttctagacaagttgcgtaatgtcaggatctaccccagggacaaccttgaatactcaattcaacaagagcttctcttttatcagggtaaattttggctcccccctaattggtcttttattcccctgttactagaggaatttcattctacccctctaggaggccacgtgggtatcgcaaaggcactacgttatgtccaagagaactctgtatgggacggaatgcatcatgatgtccaatgtttcgtatctcaatgtctta

SEQ ID NO: 60799 - DNA, 289 bp, Glycine max
acaatacttgagggccttcgtccatcgtcagccagcggtgtggggacgatttctgttgtgggcagaatggtcgtataatacttcgcgccattcgagtacgggattaactccgcttgatattaccttcgccgaaaccaccagcgtatcctttatacatatgtggaacatcacaggtgtcataccctaatttcggcggggaccatccgtttgttgggatgcgacccttcgttgaccacttcgaggtacttggcacccatcgttaggcaatctgtgaagatcctgacatgct

SEQ ID NO: 60800 - DNA, 423 bp, Glycine max
  unsure (1)..(423): unsure at all n locations
gcttctctcaaattcgtaaaaggatcttttttcttaagatacaagatacatcccttatttataacctgctagaanataataggccaaaaaggcgcacaacgaccatgttgaaatccaccatgaccacgattgaaaagttgtgacgctgaaactctacgacgttgttgattaactacgaccctcattgtgtgactagaaccatggtggaatttaccacggctgccatatggttggagttgtcttggaaagcagntatccatttgtcatgggtatgtagcttaccaagactgtgatagatgaccacgaccattatcatgtgaagaagttaatggcagctgttacgtaagaccatttacgcaagtaagacttgaatggcgatataggtccaatactgtgatattcatgagctagatgtacagacta

SEQ ID NO: 60801 - DNA, 392 bp, Glycine max
  unsure (1)..(392): unsure at all n locations
actttntgatgtacattaccaaacactgatttatttttataaataagctccactgtcaacaattttagtttctgacgaagcacaaacataggacaacccanaatgggttgtccctaaacttccttgaccaaccacaaaaaatccttatgcccagtccatattttatgaaatttaaacatggaaggaaaagactttacttaatcaaacacccgaacaggagaggatggtgatccacatagttacgagttaaagtgcaataggataacttcttccaagaggatagccagatatcattacatatcattctaccaagacgaatattaatactatcccgagtagccctaccattacaccaagtataccgagttccttgagtatctaaatgtataagt

SEQ ID NO: 60802 - DNA, 413 bp, Glycine max
  unsure (1)..(413): unsure at all n locations
atatcaaactccacttgtgcataacttcaaaatatcgagaaacaaatatgagaagaagctaaaaaacaaaacacccatgattccataactcatgtttatggactttntaagttggttaaagctaaagcaataagctcaaagtttttagaaatagtcagggactatgatttcatccttgatggttttgggtgtctgtttgtcaccgcaatcttaccaagttgacatctctttcttttggtagtgttaaggttcttcagcaatttgggacaaagagtatttcctacgaaactaaaccctanaaagctataatttctttntgaaacaattcgcaccataatgaatntctaatatgttaccctatcacaatcaaagccattgaaaacattatggggtatcccggttatgtaatatag

SEQ ID NO: 60803 - DNA, 419 bp, Glycine max
tcgaaagttgctttttttttttttatcaagtccatgcaaaaacatatgaattcatttgggttttgggaaagtccttcattgtttttcattctcaatgttttcaaaagaattcttttgttgtgttctgattgaaaaataagtttcaaaaatactggttgttgattcttttcaaagcatgttatattcaagaaaaaaaaatttgtttaagtcccaaaaagagttataatctataactatattattattatattattatttaaaaaatttgcgtaaaaaatgtatttcatttttcttattaaaaaatatatttcattagttgaatagtattttgagtttaaacattatatagaagaaagaaagactagtttaatataatataatgaaacacatctcaatagatttaatttaatttaacatga

SEQ ID NO: 60804 - DNA, 424 bp, Glycine max
  unsure (1)..(424): unsure at all n locations
agctnttcaattcactctatgtacccatggtggtccacatnttttttcatgtatttaaattcttgatttcgtctactttttataccccattttgacgtgcttaagccatttatttaagtcatttctcgcttaatttaaaaataaaataaatttccaccgatcgtttgaattgtatcatcggttaattntggttaaaatgaattccgaccgttcggttgtgccgtaaccacgttggaaataaaaaaagaggtaaaataataatataataataaaaaaataccttttagtaaagtaaagcgaanaatcaatcggacgttttctctttgggatttctcattcttaattgaattgattaataactaaagtgaaactaaagctaanatcaaactcgcctagtcaagctcgtccacaaaaatatggtttt

SEQ ID NO: 60805 - DNA, 436 bp, Glycine max
  unsure (1)..(436): unsure at all n locations
nttcatacttatcttgattaagccttctctcgattcttgaatcttgagtcttgaatcttgatcatgattcttgggatcttgaaccttgaatcttgattctttactctntaactttcctcttgagacttgaattgttcttgattctatcttgatcacttgagttgntctttgattctatcttgatcacttgagttgttctttgattgatctttgagctttttgtcatcacctttgtcatcatcctttgttatcatcattgttatcatcaaaacatctttgaatgaatcttgattcaccatgaagctttgcttctacatctagccaaatgagcctaccttgaattaattcctttgatagcccctttgaacctatgttcccctttctttgntntgaagctcattacaagccttaagtgaaaaaccatgatctcacccta

SEQ ID NO: 60806 - DNA, 420 bp, Glycine max
  unsure (1)..(420): unsure at all n locations
agcttgcctaattaacctgaaatgagataattgattatttgacacacaagatgaacataccaagtgtttattacctatacttaacagaanatacttgtgacactacagaataaccattaattgtgagagttggatacaacttatacaagttttatacgcacaagttagtcgttttcaccgactaacaactttcccaaatatacagttttgcttgtcctcaagaaaaaagagaacaactcacttgtcctcaagtaacaatgaaatgcagtgactacgtacaaaggtgtatgctgcaaaagttattgagtgcataataagagaatggagtgaaatggcttcatcacttgtctntcacaaggtatgcagctatccaaagagaagaatgaaatgtaacctgaacaaatagatgggagtaggcat

SEQ ID NO: 60807 - DNA, 445 bp, Glycine max
  unsure (1)..(445): unsure at all n locations
tgcatgttaattatgacgcatcaacaagaatcaagccaatgctattgtgcaagcaatcaatggggcaaaacacaccaaatgattataatgatggatggctcatattctcacacaggtaaaatcatcactttcaaattgagctctcaaaactatcatgacatgtagagaagaatcaaagatttcaagtcacaaaatgtcaagaaacttttattttcaaacaattacccatttcttgaacatatcctataattcatagaacaacatgctaagtcgtacgtgcacacgaaattgaccaaaaatattaaacttgaaatccgacgaaactaacaacattaacaaactatcacaactaacaaattaacaaaaccaacaaaactatgcaaaccaaagaacactctccccccatacttaaacaacacanttgcctcaatgtatcacaattaac

SEQ ID NO: 60808 - DNA, 454 bp, Glycine max
  unsure (1)..(454): unsure at all n locations
agcttattaaactaatagtagaattgatttatttttatgatttanatattttttggctttgggtttttaagaaagcaaataaacaaatattaagaggagtttgagttattacaaaaaatggccagcggttataattcactaatatcaatcttacctctatcctaatcttaatgaaatttctttcctagttaattacccgattcccaaaatcaactaaagcctatgatcaatgtcaaaagatntgttttttgcattaaatcaatatcccaatgatcacgaatctattaatnttagtcaaaggataagattaattctatggatgattaattgaagattaactaatctatcagagtntacccaaacactttgatcatgtaatttggtataaaacattctctacctaaatctacccaattaatgtagaagatcactactatacacttaagtgagtatt

SEQ ID NO: 60809 - DNA, 399 bp, Glycine max
  unsure (1)..(399): unsure at all n locations
tctgtgagctaaagctgganaccaaacaaatatcttgtaatgcattctatatccttccataattcacattataacagtggctaaacaacaccagatctacaagaccaagctgaatcaaagaacacggaaaaaaacacccattgaagaaaagggtaagataaaaaaaacgagatttgaatcgaagatggagcaaacctgaggaaacattccccaatcccctaagattctctgcgttgggagcgccaccaacaccacccccacctccaaacccattcatattcagcataaaaacgaaggaagaacaaaccccagatagcataaaccgcgaaagatcgaagaattatgtgagaaaagagaattagagaacccaatgtgaaaagggtcgttcatacttgaaac

SEQ ID NO: 60810 - DNA, 237 bp, Glycine max
aatgaagttatgagcaacccaagattcaaaagatgtgacatggaccactgctgcgatgtaaaaaaatatgctaatggacatgttatgcttggtgaggactgaaaagacatgtcgatagcatgatctagtatggcagaatataacaggatgaatcacgagttggcgtgaaagcttgacatgaaagatcttgcgccagctaaacacatccttggggtgagaattctgagaaacagatca

SEQ ID NO: 60811 - DNA, 364 bp, Glycine max
  unsure (1)..(364): unsure at all n locations
ttaatatactcaacttgctcattagactatcacttgacttgttctaacaacacacacacacacacttatttgaacttttttcttctttttttatgtgtgtgtgggtggtttctaactttaaacattaaccatctaacagactcccccaaatttggggtgaaattgtcctaacccaatatgccatcttaaaacctacggaagctaaataggaattacaactcaaggctcacggntcaatacaattacagtttagctcatagatgggtgcgaatgatataatcattgataacaggtaagcttttggtcaagtggcttgtatatacaacaatggccttcatcgatttcaatttcatacatttcattc

SEQ ID NO: 60812 - DNA, 465 bp, Glycine max
  unsure (1)..(465): unsure at all n locations
ctgagcatgcaacgccttttaccttaacagagagtgtgcttttcttatttactatgngcttgccatggaaatgattcttggccttatatgatctcttatgcagcagagccagcaattatgccagcaatgtcagaagtgggcttgtacttaataaatatgataagaaaggaaaatcacaaaagtcaatcaaatgaataaacaatggaaatggtaatgatatatgaacatgaatgcatgagcaaagaattacatgctgattgctgaatctctactagttgagatatgcatgattgcatgtcacccaatgaggtgcccaattagatgccctcatattcgaagtactgatccatccaatattcacatgccaggaactttgacccatcagctncatagaattgtagctaccgacactccctccactctagtaggttatatcttcttatattatatatacatatatgatca

SEQ ID NO: 60813 - DNA, 349 bp, Glycine max
  unsure (1)..(349): unsure at all n locations
tggctcttacttttcatttttgacaacgatatgcatgctttatgagaaccanagaggtaatgatataaatatagtactctctttctggcgtctttctggtgtggctgttggattcaaaacttgaagtntgtgggcataacttataagccacgtctagatttgtggaaaatgattctgaccttgaagttattggtcttctatggcagcgtgccttgtaaatagtattacaactctcttttatggaatctaatgacaatatatagtgcaactaatgtttctatcgcgggatgtctttgaacaattcagcgcattgtgggctagttgtcactattagaataatggcggcttc

SEQ ID NO: 60814 - DNA, 409 bp, Glycine max
  unsure (1)..(409): unsure at all n locations
tactaagctaagggttatgttgtacacctactattcctacctgttactttgttgagggttgtcattgtgtgagtcctacccatggggagacctaacttaaaaatccattcttacacatctttaccatcaaatcgtggtaactcaagcttaaaaatccttatctagaaccgaggttgggggttgtcattgtgtgagttatacccatggtgagacctaacagaanaatgggtggttgacaacagtttctcaatcgcagcttctattttattaatcctggagccatgatttcgcaccatctgcttaatgtgaatgtccacagaccgcaacaagtttgccgtatttcatgaccttcattttttctatagaatcagtcacacttagcttgcaatccttgagtatgtgatgtcta

SEQ ID NO: 60815 - DNA, 308 bp, Glycine max
  unsure (1)..(308): unsure at all n locations
gcttgaccanaccccagcagcagntggttctcttatatacttgtctcancaccttgtctgcaagactgaggataattgcactgtgtgccttctgcaagagcgctttcttatccccatcaaccattatactttcgagattggcttctccatcaagtgcttccaccacgccctgctgaacaagaagagctttcatcttcaatcgccatagcccaaaatcattatgtcctgtgaatatttaacctcatacttggccgggcccatcttttgaatcgaactcaaaatcgatccacgttcaccgcaccaatttg

SEQ ID NO: 60816 - DNA, 390 bp, Glycine max
  unsure (1)..(390): unsure at all n locations
caccggcgaaaggatcaaagtgggtctgtatagaatcatatatgatcatcctgctttgacaaataaaaagcctacggccaatgaagagaatgagaaagaaggatgaacccatgctgcgactgccattcctacatggccaaatttcccaccaattcaacaatgtcattactcagccaatatcagcccttctcattacccatcaccctattaaccaagaaccctaaatcagccacaaggctcgcctgccgcacgtccaatacctaacaccacccttaacacaagccaaaacaccaactatggaaagataattccaattaagaagcctgtagatatacctcaatttcggngtcatatgctaacttgctcccatatctactctataatgcaatg

SEQ ID NO: 60817 - DNA, 278 bp, Glycine max
catctgaatctgaatctgcacagatttgcacaaatgggtatatatagcaactaacttctaactaactaaactaactaactaattatcattaggtgcaaccaactaaactaacttccaactaactaactaacactaagagcccttcttagactatgaatgaatttcagacatttctactttggatgcataaattaaaagcaccaacattggagcttcatgtaacatcactaattgattgtagaagaatggaagcacttacaagacccttacaccttttc

SEQ ID NO: 60818 - DNA, 354 bp, Glycine max
  unsure (1)..(354): unsure at all n locations
tatgctacttgaaagttgcttttcatgatgaatctccttgggaaagacatctttaaattcctgcaataagggttgaacactacgacaaacataaatatttaacttattacaattatcactctctctctcttgtgtatcactcttcctttttctattcttatgcgatgcctcactattggctctctcttgtcctctcttgtttctcnttctgatttggcatcacacacttctatagggatagaggtttataataatcttttgtcatggtgctggaaacaaatcttgttggtgaagccatcatgcactgctttggtgtcctcttcaatgatggccctcactaatgccatctccatc

SEQ ID NO: 60819 - DNA, 237 bp, Glycine max
tcagctttgctcaccttttctcccttggcacatttttttctaaaactcgaatcacacagtttaaaatggagtgccagaataagttcagagtttaaatacatagccaactcatattcagaaatatttaccacattttagatataaatgtcaacaaccacaaatatcaaactgaattaagacacaagaaaatagcgagtcttacatatatgtaatctagaactaaaccaaataccgtta

SEQ ID NO: 60820 - DNA, 507 bp, Glycine max
  unsure (1)..(507): unsure at all n locations
gtcccggatcttaagtcaccgcngctgcaacttgccagaatatttgatgggttggttgtttaattctggntgctcctggcgcggagatgatggtacagcgggtgaaccaagagcggaagtttcttttggtgaggaagccatggaaaaacagagcatntggaatgatttcgtaaatctcagaaaactattgggaaatgctggagaatacacgaatgccaagcagatataaatttgaatgaaaaatgtagagggacgtgtgaagcaaccggcgaatttgctttgtagtgaacgtgctattaatgttaagtgactcgtttgggcacgttcagattgcagtagctgctataatttctctagcagacaaatgcccagcttgcccctcagtttttcaaactgagttgcatccaaagcctttgtgaaaatatctgctatctgttcctcagtgtcaacatgcttcagtgtgatcactttatcatcaacaagatctctgatatagtgatgtctaat

SEQ ID NO: 60821 - DNA, 298 bp, Glycine max
cgacaataagttttaactcggatgtcctattaagccctgtaatatatcgagacgctcgaagttgaaaacggaagctctaagaaaagtccaacaacaataacttttaactcgaatgtccgattgagtcccgtaatatatcgaaacgctcgtaatttaaaacagaagctctgagcaaattcaaacgacaaaaacttttaacttcgatgtccgattgagccctataatacattgagacgctcgatattgaaaacggaagctctaaaaaaagtcaaacgacaataactcttgactcggatgt

SEQ ID NO: 60822 - DNA, 292 bp, Glycine max
cccagctggccttgaatcagaaatctgtacctgtcgcaagggtttgtggtttgtgctcctctgctgaccaccatacagacctttgcccttccatgcagcaacctggagcaattgagcaacctgaagcttatgttgcaaatatttacaatagacctcctcaacctcagcagcgaaatcaaccacagcagagcaattatgacctttccagcaacagatacgaccctggatggaggaatcaccctaacctcagatggaccagccctcaacaacaacaacagcagcctgctccttc

SEQ ID NO: 60823 - DNA, 325 bp, Glycine max
  unsure (1)..(325): unsure at all n locations
atctatccttcctaagatggtgtcagacccagtcaccctcattaagaactagctcttttcttcctctattgcctttagttgaatacacctttgtttggttntctatttggttcttaaccctctcatgcaacttctttacaaactctgacctagattaccattctttatgtataaaagaagtgtccagtgggagaggaatgangtctaacggtgttaggggattgaacccatagacaaccttcaaaagggactgcttgatggttctatgaacccccctgttgtaggtaaattcttcatgaggaagatactcatcccaagacttatg

SEQ ID NO: 60824 - DNA, 354 bp, Glycine max
ctttcccctactatagtctcaactactaatatctctatgttctcactcattttaaaacccaagtaattaaacaacaaattgtcaccaaattcaccccccccccctcattcatatgaggttagaatagaaatgcacaacagtccaaaaagtagatgactcacaggtgtgattgtatcaagtaagtactctgatgacttctcagaaacataattttgatacttggatgaaacacatatcaaaccacacctcagcatctgtgagctacttgttcatcattcatgcaactttcatgttattcacatggtttgaaagatgagtaacttacgatatatcatcagtattgctatatagaca

SEQ ID NO: 60825 - DNA, 392 bp, Glycine max
  unsure (1)..(392): unsure at all n locations
tctttgtactcgtgggcgagatattttttcttcacaaactcaaggacatgttaatgttggtttggtcagagatcaccctgctgtgaaaaagtgtatcgggctagtggcacaacgttactaacttcttttagcaaatataaattcctaatgtctctcataaatgatggtagtcattaatctagataagaaactaccagaagagcatttaactttcggaaatcatgaagcatgaacaatagaggtaacaagtaagctttctgtcagaaatgccttttccatagtataattgacactgatatntatggaaggattaacactataatattgttacaaacacaacccactaatgtgacccaaatagatgatttaagtaatttgagaatgataagtat

SEQ ID NO: 60826 - DNA, 270 bp, Glycine max
ctctctaatagctaagctcacctccttgagatgagaagctagagcttagctacacaccccctataatagctaagctcacccccatgacaaaatacatgaaaataccaaaaaagtcctactacatagactactcaaaatgcctcgaaatacaggctaaaaccctatactactagaatgggcgaatacaaggcctaaaccaaaggtaaatctattctaatatttaccaagataagcaggctcatacttagcccatgggctcgaaatctacct

SEQ ID NO: 60827 - DNA, 438 bp, Glycine max
  unsure (1)..(438): unsure at all n locations
nttcgattcattctatgtacccgtagtggtccacattgtgtttcgtgcacttttattctcgctntgtttactttttatacccccctcttgacgtgcttaagccattttacttaagtcatttctcgcttaacttaaaaataaaataaatttccaccgaatgtttgaattgtattatccattaacttcggttaaaatcaattccgaccgttcggtcatgccgtaaccacgttggaaatcaaaaagaggtaaaaaataatataataataaagaaaatatctttgtagtgaaataaagcggaaaatcaatcggagcgtttctctttgggatttctcattcttaatcgaattaattaataactaaagtgaaactaaggctaatatcaactcgcctagtcaagctcgtccacaanaataggcttntgaagtttgtcatttcaat

SEQ ID NO: 60828 - DNA, 451 bp, Glycine max
  unsure (1)..(451): unsure at all n locations
agcttgcttgtggagcttntatggatgctggatctttgagctccaatgagggcctttaatggtggatttccaccatggagatgcagcggaagacaaatgagaagaggtaagaggcggcgccatccactatggaataatccatggaagaaggagcttcaccaccaagatgagccttggataaaaagcttggagaggatgcttcaatggacgaatagaaagagggagagaaagagagaggggggaacacgaaattgaaggaagaataagggagagaagttgaactttgagttgtgtctcacaagactctcattcatcaaagttacaacaagtggtacacatgcttctatttatagactatgtagcttccttgagaagctgtctgaagaatacttccttgagaagcttctctgagaaaacttcctcgagaagctagatcttatctacacacacc

SEQ ID NO: 60829 - DNA, 380 bp, Glycine max
tatagcgcggatctgggagacaggtcaagtggtctttatatactaagatgatgttccgagtacgttggatttggtgcgaccatgccctcctgatttccaactgggaaattggcgagtggaggaacgcccccgcatttacgcaacgagcataatgtaaacctttaccgttttaaaagctctatagttaggcctaagctttatagtttttcttttggtaaggctctgcgcctttggttttgaatttataatacaaggatctttcttcatctgttcctacgcctctacccattctcattcatttgtatgtgtacttctttatttctgaaacggcagatccgatgacgagtaccccgaaagtactaatacctgggacccgctta

SEQ ID NO: 60830 - DNA, 401 bp, Glycine max
  unsure (1)..(401): unsure at all n locations
ctcgacccgggaccttaagtcacctgcggcatgcaagcttgtcactgttgggaacatgcacttttatttntatttcttagtaaatactatcagacttgtgattttcatttcttatggtttaaaagatcatagtatggaattattatgcatgacagctccagctgatgtctctacaattttggagccagagaaagaagagatatctntcaaaactaaatctttctggaatgtggtagtgccctcctattcagaaattcagcttatggaaggtgagagcacacatgatggcagaagcgagactccaagntaatataacctctatggataattttttttcataagcattaataaaaattaggaacaaaaatattcttttaatacttatactttcatgaaaccct

SEQ ID NO: 60831 - DNA, 328 bp, Glycine max
  unsure (1)..(328): unsure at all n locations
ngctcaagacananatctatacattccaatccactcaattcataccatttctcattcatatcaatcacaaacacttcatttcatatgaaatcaaaccactgaatatcattcaaatcactgttcaatcatgcttttgtacaagctactactacaaacaaaatactgaaatttatataactagaacttaaagactgatatttaaataactgaaacatatagcataaactaaatagaatgataaaaataaactgttcaaatatgcagaatttaaaactcctagtcatcctgccagtgatcctccacatgctcattaagatccaacaccgga

SEQ ID NO: 60832 - DNA, 276 bp, Glycine max
tattataacgaatactcattctatgaagaacaaataactaggatgtaacttacatcatccataattggtgtacagatatgttcaaactcttgtcacctgctatttatttcactaacatcataatatcgtatgaagatcgatgtatctccatctaccattccaaatttactcccatcaacatagattctatacgctcgccataaatatcaaaactaaacattatcagcccatgcatcggatcatctgcatccacatcaatcggtgctggcacatgtg

SEQ ID NO: 60833 - DNA, 400 bp, Glycine max
tgttgcacatcattcgcgtgtatgatattcactctacaaggttttaagtagaggagaccttcaaccctataacgcaacgtggcagacaaaagtgggcagctaacttgaatgggcatcattgtcaatgcggaaggcattctgcgcttcactatccatgtgcacacattattgaagcttgtggttacgtgagcatgaactactaccaatatatagatgttatttacacaaatgagcacatcttataagctcactccacacaatggtggcctctcgggaatgaaacgactattcctccttctgatgacgcatggacacttatccctgacccaactacaattcgtgcgaaaggtcggccacaatcaacaacgataatgaatgagatggattggtgtgaaccatc

SEQ ID NO: 60834 - DNA, 438 bp, Glycine max
  unsure (1)..(438): unsure at all n locations
gcttaaagtatgcccgagtcattcattcctatgatatgttgttgaagtattggcgatcagaattgccattccttggattataggggtgaaccaagctcatgcttttacaaaaaggttcatcaagtcaagttgaaatatggaagtaaccgtcttgcaaaattggggcaaaaagatgaatcgagtcacatcactgcttcgtctactgccaaacatatttaggattattgatgtccttgttacttccagtttcaccttgacaaagatgtcatggaccatgtngaaaatctaaattgattcaaccccatatcttgcgtaaaaattcgcaatacttcaattgtacatcattcgcatgcatccatgcttttcatatggtgcattgctcgctgcactctttccttataanataaaataaaatgaacttaatcattgttataaaaa

SEQ ID NO: 60835 - DNA, 432 bp, Glycine max
  unsure (1)..(432): unsure at all n locations
ngtagaatggctggacatgatacatgtcacggtttggtttggttcatggataaaagggatgccccacattatttccatgacacanatgcaaaaatgatgatntggaaatnttatgcagaactggttatgcatgcacctatgcggacactcaagtgtcaaatttttatggtcatgtgatgctcgggctcacgattcatttcctctattttagtcaacccaacgtttccaaaatatgttcttttatcaatttgcgcattcatccgagtccattttgggcgtctgggaaaatcttcacagcattcacccttcaggtgtatacacantttttcaaaaactagttatgatcagtgaattttttcaaagaaaaggtggaagtcatctcttttcaaaagcatgttggttattcagcttgacaacgtacttttcttttcc

SEQ ID NO: 60836 - DNA, 485 bp, Glycine max
  unsure (1)..(485): unsure at all n locations
tatagtcattacttgttgagaaccataagccaaatatgattgtatttctgatatagagaagaattcattttgtggccttgagatgagtaatggtttgagtctccatgtatcaactaatgagtgcgataacatacagaatgtctagtcttgtacacaccaaatattgtcaactacccaccaaactcttgaaatangtaacatacacctcttctgctttgtcgaactatgataacttcattgtgcactccattagtgctccaatatgctcggggactggatgtatgcatggtttgtggtcnaaccaaaataaatcatgtgtgtgtcgtcttattcctacatctataatttccgctatgacttctaaatatcgctgtacttttggtaatttctattctattcctacttcataacttgtagaaaagcctattgatttagaacattaaaaagataattttaatagtcaagacatcatattattaacccct

SEQ ID NO: 60837 - DNA, 326 bp, Glycine max
  unsure (1)..(326): unsure at all n locations
acctanaaacgactggagcatgcagctatgnatgctctctcgcctcggcggtgattttctcattcgcaaaagcgacatatatgtgccagagacatatcgaccacccctccgacaccatctgccgagatgtgctgagccacaagggccccgtacataaccttcactagcacagaccgagaggctcggagctcatgagcaacatcaacagcgagacccaggccggggtctcgctgaggtgtacaataaccatgacaaccctcagctgaattatacggaggaactcactggctttctctaacgagaccctccttttaccatcctttttc

SEQ ID NO: 60838 - DNA, 425 bp, Glycine max
  unsure (1)..(425): unsure at all n locations
ctatcatcacatgacgctntattggcacnagaataagtgctttctaagcaactngagaatttaacagaaacacttggtaagttgccaactaaactgtctattggtcaaccttcacattcttctgttttgcaaggtataggttgtaccatctgtggtgaggctcactgtcataccctaatttcgtccggagaccattgtttggtggcatgcaaccttcgcttgaccacctcgaggtacttaacacccatcgttaggtaatccgtgaagttccgcaacattccagaaatcgaaaggaagcattgttgcgcaatccgtaaagtccacaacatttcggaagtcaaaaagagcattgttgcgtaattcgtaaagtttcgcaacattccgaaaagaaaatgggtgtcgttacgtaatccgtanaagtctgt

SEQ ID NO: 60839 - DNA, 391 bp, Glycine max
  unsure (1)..(391): unsure at all n locations
ctcaagcttgtagtttctatcgtggtaacgttgctccattccttgatttaatgctgncacaagcaccctaataacagaacacaataatgccagaacatgcattccctttcgctagctactatgagagtaacattcaaacaaacaaaagctactccatatttgtttacatccccaataagcatatccttctcagtgaacaacacaagaagaatatcctcatataaaagacctattttttctcgttcacatccacctaagcgtagtagtaaacgcccattgctgcattgaaacagtcccccaacatatataaggaaccatatgcgtaatgcactacaaagaaaaccaaaactaagtgaccgttttctcttacaatggcactggaggtgcttga

SEQ ID NO: 60840 - DNA, 453 bp, Glycine max
  unsure (1)..(453): unsure at all n locations
ggatccttaagtcacctgcngcatgcaagcttanatgggaagggagtgtccacttactatgatgccctntcattgactcactgggtagtaccatgtntatggtttacttggtttttcataccaacgctgcttctgatatttttctcttctctcaatggctagatcacaccacgtgagtgtctgtggactgtgggaaaccttcaaaacaataaatttcatcggattcttgctgccaaatttcaattcacattggttagcataaatacttttttttttttttaaggcgagagactaccaatgtcttcaaatattggattaaaaatattgaattaaagattaattttatgtgatattgattcanaactttttatacataatcaaaatcaaacaccaattctctactagataataatactcaattctttaccagtcatacccatatcatctttatat

SEQ ID NO: 60841 - DNA, 408 bp, Glycine max
  unsure (1)..(408): unsure at all n locations
tctcttacagcatgtataaaaacacgttcaanaaccatgtctatttttatgggggggaagaaacatgaaagccaacatatgaattatgaagaaatttacgtcccggatctaccacaaacatgcattggttgcatattaaggtacaagctaccttatattatttctgactgtcactcttttgtttccacaattattattttttatcctttagagtcacagattatacttaaaatattattacacttcacacaaattattcaaccaattaaactaaattattttctacgtcccacaattatttggggactataaataaagcaaagaatgtgtggtgtgcaacgtctacaaagatagagagggatgctgcttctattgtcgtgtcaagaacagctgtgactgggtaaaaaa

SEQ ID NO: 60842 - DNA, 362 bp, Glycine max
  unsure (1)..(362): unsure at all n locations
tatagtatgcccgagtcattcattcatatgagatgttgttgtagtattggcgatcagaattgccattccttggattatagggttgaaccaagctcatgcntttataaataggttcatcaagtcaagttgaaatatggaagtaaccgtctcgcaaaattggggcaaaagatgaatcgagtcacatcactgcttcgtctactgccaaacatatttaggattattgatgtccttggtacatccagcttcaccttgacacagatgtcatggaccatgttgaaaatctaaattgattcaaccccatatcctgcgtaaaaattcgcaatacttcaactgtacatcattcgcatacatccatgcttttc

SEQ ID NO: 60843 - DNA, 323 bp, Glycine max
  unsure (1)..(323): unsure at all n locations
agcttgagatgaggaagngcngaatggtgaaactttctgcttctattggcgaccacagagtgggtcctggagatatgtcgcggtggtcaagagacctttgggacgtcatgtggtgtgctattgcccaaaaccaagctagaccaatcccgacccaacccgggcatagtcggtcagtgagaacctgtgatgtacctaaacatgcgagctcctggcagtctacagataaaatgaaaacaccaccacatagcaaggaggctcgtggtggctggcccactgtgaatttcgtgtaatatgtgagatatggcctctggcaatcgaatact

SEQ ID NO: 60844 - DNA, 268 bp, Glycine max
ttctcactcatggccagctggagtactaagttgacccaagcatcaacgatttcactcacgctttctatttccagtagatgaagatgaatccggggccacctcatggacttctctaagaacaaacaccacattgctagcactaaagtgcttggagttggaatccatcttcataatcaaattcctagcttcagcaggggtcatatcaccaacggctccaccactggcagcattaatcatactgctctccatgatgctaagtccctcatag

SEQ ID NO: 60845 - DNA, 300 bp, Glycine max
tgatgtccctcaaccaccactcaatattaatatatctcatgcctaatgcactagtcattccgcaagacagactgattttcaaagtacaaggatttttctcagagcgcggaggtaactgaatacgtaacattgataatgttttatagacccgaaactggattatgccgggaatacacacaaatatacaaattgggagcggaacaaagaggcccgcagctcttgaacaagatgctagcaaaaggttaatccttagacgaatgtggctttctaacggtggggaagtacaacacactctcccca

SEQ ID NO: 60846 - DNA, 381 bp, Glycine max
tcatgtctttctctcacacattctccttctttggggggtcgtgctggcaccatctttcaatctaaatggccaatgaatctgccttttattttatacattagagcctgtctactactacacatatcaaaccacatgcagaaaaaaaataacaaaaaagatggaatttaagcataatataagctcattaccaataaagatcaagggagtcaagttggagttcttgaagagtattgttgatagcacgtctaactttttcacgggtcaagtctgtgcacctactatatttaaaatttctcacacacacacacacaaactaccatgagaagttctttcagatgttgaagcaacattattcacatgaattatcatagtcaccccaga

SEQ ID NO: 60847 - DNA, 427 bp, Glycine max
  unsure (1)..(427): unsure at all n locations
ntcatctatgatttaacaaaaaactntattagagatgaataattatttctcatgtgaaaggattgtgatgacataaatatggaacaaaaaagacaaacaaatctggctaacttgtaagaaggagttagtgttcctattggactttgagaaaataaaagcagtgcaaacaagattcttgcatactgaccatgtaactaaaaaaaatatagttcatgtgctcagtgctcatatttgttgttgtttgtggaagcacataattccttaaagatagtgtgtcctcctttcaaacactattattcttccttaatgaacctccgaacattactcacacgtacctatcggtaacatatttagtgtgtaaaagcgttaccagaagagagagagagagaacattacttcatatttgaacgaaagatgaactgactaa

SEQ ID NO: 60848 - DNA, 400 bp, Glycine max
atgattggtacatgatttgggacttgtatgtattcaatttgggcaacattggatgagggaaagagtggttttctaaatctgcactctatgcagaatattgctgttgaaatgtgcagcagaattttgtataagtgtagaaaaaaatgcatgtgtgtggctggctgtgaaaagggtagtacatatgggggtctgggcctttgcttcagatcccaccggcgatatgtcacttatgttcagagactttcagtaaattttcgagtcgatccacggttactaattggaacaaggcatgttgttgggtatttgttgtgcaagcttgatttgagtgtgtatgggcaaatatctgccttgcctgtttgctgatttgtactcatatgattgatgtgaatacttggatgtg

SEQ ID NO: 60849 - DNA, 460 bp, Glycine max
  unsure (1)..(460): unsure at all n locations
ttctcatcgactctagattgctatatagaaagacaaagatntgtatggtgatctgcagaagaacatagaccacagaatcttgcaacaggtgcagatttctgattcatggcaagctgagttactatgctgaccaaggcatcaagttttccctcaagctttttattttcagtagatgaagatgaatccgtggccacctcatggactcctctaaggacaatagcatcatttcttgcactgaattgttgggagttagaagccattttctcaatcaaattcctagcctcagcaggggtcatatcaccaagagctccaccactggcagcattaatcatactcctctccatgttgctaagtccctcatagaaatattgaagaaagagtngctcagaaatttggtggtgaggatagcttgcacacaatttcttaaatctttcccagtactcatacaagctctcttcac

SEQ ID NO: 60850 - DNA, 430 bp, Glycine max
  unsure (1)..(430): unsure at all n locations
ctgangggaaactngatgccttggtcaacctagtaactcagcttgtcatgaataagaaatctgcacctgttgcaagagtctgtggtctatgttcttctgcagatcaccatacagatctttgtccttctttgcagcaatctggagtcaatgagcaacttgaagcttatgctgcaaacatttataatagaccccctcagtagcaaaaccaacaacagcagaataattatgacctttcaagcaatagatacaatccaggttggaggaatcatccaaatctgagatggacaagtcctccacatcaacaacaacatgtccctcccttctagaatgctgctggtccaagcaagccatatgatccgcctccaatgcagcaacaacaaagacaacaagcaacttaggctcctnctcaaccttccttatgaaaagtagt

SEQ ID NO: 60851 - DNA, 489 bp, Glycine max
  unsure (1)..(489): unsure at all n locations
ctcagcttgtactggcctatgtgtaccagtagtggtgtttgctatgtatgtcatgatctancttcgtgtaagtattattgttgttggagcagcctatggatctcttataggagtgattggcaaccttataagatgctgtgagtgcatatgctgtatgaagattttgatgatgacaaaagattgaagcaattcaaagttgattcaagtcaaaatcaagagagcaagagagacaattcacaatagtccattatttgttaaaagaatctcttataagattgcagaggtttggccttaaaagacttaaattgtcgtttatcggtctatgttcaacttcaatatacttcctattactttatatgtagtgctgccactaaaccttgcataatggcaatatttaactaccaatagcttctttcttatatggaaagcttatctgcaaattattattacaggaagtatttttcatttaacggcgatttcgtaagattt

SEQ ID NO: 60852 - DNA, 285 bp, Glycine max
atagagcaacatgtgttgaccacagcttctttgacttgccacctatcttctctggtataggcccctctgcagccggatcacaatcctgttgggacgcgccagggtgacctttgattgctccatctttcttcggactagaccctgcttctccagtgtcaaaaataagaacatctcgatgctgcggggcgaggtcatctgcccatatctcatgataaaacactctcacatcactgcgggaaccggactcatgtatcatagacgtgatatgttctttctgagggacga

SEQ ID NO: 60853 - DNA, 372 bp, Glycine max
  unsure (1)..(372): unsure at all n locations
ggacctatgatactcagctntctttggatatggtanaccgaatttaaattctatagtntgtataaacgggacactactgaattgaaccgaagttaaccacatcaatccttaactcctctccttatccactatatagctatagaaatattatctttgaccggatagatgaggtgttcattattgtctttantaagtagtatgataaatatcatggcaccttttttcttctgcgcaacataatttacatgacacgtttggtccctgacatactcttgtctgacctatgttttttcagctgtcaattatagaggccatttataaagtcatctgtatctattgaaaggggaagatctatagcagttgtgtggatga

SEQ ID NO: 60854 - DNA, 441 bp, Glycine max
  unsure (1)..(441): unsure at all n locations
agcttatccttatggctggcctccggacttcaccctctctgccaccccggaagatttaagccaagcccctactttcgaggggcaactcccaccttatgacgactatcccgggcaagacgatgaggaaggagatacccatcttggccccctgctccacctcaaagatccgtccccccatgaactaccccaactgaacataatccgccatatcccggcctcacccacacccgtaaaagaatctgttcccttcgcggaagataagggaaagattgatgcgcttgaagagaggctacgagcagtcgagggccttggcaattacccattctcggatntagcggatatatgtctcgtgcccaacatcgtcatccctcccaagttcagagtaccagactctgacaaatacaaagggacaacatgtccaaaagggcatctccggatgta

SEQ ID NO: 60855 - DNA, 349 bp, Glycine max
catgggttatacctttacataacagtattacgtgcaattcgagaatactttggatgtcattatcatgctgtgtatgtgacattatctttatctgatatacatttgctacattgattagggatgcccttaataatcccgtaaaccttctattcaagaatttcataaagtatgaaattgctaattgataccatgataccggcattgcttctatgatgggcgatgctacaataattttgggataacattattacggatgtgatatttacttgtgaataacctttatgtttattgttctcataattatgtacaaatttaacagttcacaactgttcctatttatttgcatgtt

SEQ ID NO: 60856 - DNA, 400 bp, Glycine max
  unsure (1)..(400): unsure at all n locations
agctttgacggactataccaagttcttgattctggacggagaaagatctatatataggcttgctcagggtagagagacgaagactacacaattggatcaagtaaagtgtgttatggatgaacaaagcctactcttattgcatgaaaaagatatcaaggaaacgtggaaggcgtatttccacaacttatttaatgatggatatggatatgactctagcagtctagacacaagagaagacgaccggaactataagtactatcttccgattcataaacaggaagtcaaggaagcgtcgaaaagaatgagtaatggttacgcggcggggccagacaacatacctattgaagtgtcgaanactcttggagatacacgtgttgagtggctcaccccactctttaac

SEQ ID NO: 60857 - DNA, 463 bp, Glycine max
  unsure (1)..(463): unsure at all n locations
tattataatttgttgcacaattactaaatgcctccttcgaataaaaattcccaacatcctcctgctatttgnttttctcttttgccaccaccaatgactctaatgtcaaataatcaatctacttatataaaaaatactcaaaattctcaaacttttccttcaattccaccaaacaactctgccatgtttcgtaggcctcccaataattttagtggtgcacaatcttccaatgatgaagttgaaatgcaatttccacaatnttctatccaagttgggatattaaatatcacattcacagaaggagagaattctacaaaaataaacaagaaaatagaaaacatgagtgatgtgtacaattgaagaggatacatatctcattgttcatggctcaatgtctcaactgatccaatcttcatcaatcaaaagaatattttgtgtgagaatcatataaaattaccttctg

SEQ ID NO: 60858 - DNA, 499 bp, Glycine max
tgcgtcggtgatctactacgcttctagaactctggatgctgtccaagcagatgacactaccacagagaaggagctcttagcgatagcttttgctcttgagaaatttcgttcatatatgcttggtactcgtgttattgtttatactgaccatgcagctctgaagtacctgttgaagaaggctgaatcaaagcctacattgatcaggtggatgctatggatccaagagtttgagttggagatccgtgatcagagcggtacacaaaacctcatggctgaccacctgagtatgattgagcgtgcgcctgatgactcacccattcgggatgagttttgagatgaccatatgtacattctgtataagagctatgattcctttcccactccttggtttgctcataatgagaattattgggctgcttctggtttatcttccttagcatctaaagctcaaacttgataaattaacagcgatgctaagcattatacttgggataacccc

SEQ ID NO: 60859 - DNA, 458 bp, Glycine max
  unsure (1)..(458): unsure at all n locations
gcttaaaacaatatactgccttattaactgtcttgggcttggcagccatgatcaacaaagtacttttgacacctactatatgttgatctgaccaacgatgttatcggtatgttgcgacaatccttcaaaaccttatttatacattctgagaggtttggtgtcatgtggccatatcgacgtccttctctatcataagccatggtccatttttcctttgaaatgcgatcaatccatgtcgctatgactggactccgttgacagaatttttctaaattttgatcaaacatatgctngcaaggagtgtagcctacatgaaattagttagcaacaacaattttaagtatatatgagacttnatataacatgaccatgatanatgaaatcttacccacatctctcaacatttctttctgtttggcatattgaattgcgattgaattgtttgtatgtgcggacgc

SEQ ID NO: 60860 - DNA, 417 bp, Glycine max
  unsure (1)..(417): unsure at all n locations
nntgtcatgcgttctccaccatcgagtctggagcctcacgaatatattgtctaacgctgttcatctatgctccaccctcaaattttattccgatatccatgaatagattgcctagcgctgttcgtgtatacatcaccattctattccgagccccatgaatagaattcctagcactgttcatgtgtcctccaccatcatgttcgtatccccacaaattgactggctaccgcgtttggtggatcctccactatcctattcggagctccatgaattgattgcctagcgctatacatgcatactccgttatcaagcgcggagcactcggtgactgtgaaaagttattttgattatttacctatcgggcccttcaccgaacatgtgtaatgtgtatatatatcatcagcgtatcagatgttg

SEQ ID NO: 60861 - DNA, 360 bp, Glycine max
  unsure (1)..(360): unsure at all n locations
atgcaagcnntgttaccacatgatgaatatgcttacattatatctattcatagcaccactaattgttctccttttgaagttgtttatgagtttaacccactaacttctctttgatctttgnctatgcctaatgtttctatttttaagcataaagaaggtcaagcccaggcggactatgtgaataagcttcatgagagagtcaaagatcaaattgagaggagaaatataagttattgctaacaagacaacaaatgaagaaagaaggttgtcttccaaccctgagattgtgtttgcgtgacatgacacaagaaatgtttcctgaacaaaggaaatcaaagcttctacaaaagggagatggac

SEQ ID NO: 60862 - DNA, 238 bp, Glycine max
  unsure (1)..(238): unsure at all n locations
tntcgattcattctatgtacccgtagtggtccacatagagttttgtgtatttctattctcatttcatatactttctataccccctcttgacgtgcttcaaccattatacttaaggcatttatcgcttaaattaaaaataaaatatatatccaccgaacgctcgaattgtattatcctttaacttctgttaaaatgaactctgaccgctcagtctgtgctcgacgcacgttggaaatat

SEQ ID NO: 60863 - DNA, 480 bp, Glycine max
  unsure (1)..(480): unsure at all n locations
cacctgcggctgcagcttgttgtgtttattttgtcaatgggtgagttgatcttgaaatttgtcaatagttactgcatctnattttcttgaaattcaacattcggattgttgattcattgcttatggtggaagatatttagtctgcacgtcatacaaaatttgtagttctttgatcttattgattctctatttgtaaattaaatgcttangttgtatgtatggctcgtaatcatggtttatgcacttgtttgagacactttgtgcactcgttntaatcatagtggaacttgattgactggcttgtgcccatgctctttatctctcacatgagagaagtttccatgtaataatcttggtgtctcttgatttatctgtgacattaattctggcatatatttattagaatactcctcttagattctttgtaagtggtaggagttatcttctgctactcctaacttctgattcgtccgtcatcat

SEQ ID NO: 60864 - DNA, 507 bp, Glycine max
  unsure (1)..(507): unsure at all n locations
tatgcncctntctctntcttgctcatacgagcttactntagcatatacttgcgttgcttttctcacacatattcatacttgagcatcatagtcatttgttttgcaagtccccctcatgtcaaaaaaggtacctctccatgccgacgtgtgaagttcgggactccacttcagcacgtccaccctcacgtgttagggttctggattatggtaagaacatttggcgcccaccgtgggctacgagaaaacataccttgtagcttgtcatcaatcctctcacattcatccattggtagcactcggtctggcctcagacgtgagaccccccttatagactctcatccttgtctggcagctatgatagacacaaacattctacaacaacttcaaaaccacattccacagatggaacgactccatgaggaagggttgacacagaanatagctgaccatgactagctagggtctcgcgtcagacttcccaccacaacgaggagtcactcacacctt

SEQ ID NO: 60865 - DNA, 396 bp, Glycine max
  unsure (1)..(396): unsure at all n locations
nagcttgcccagagaaggaggccactgttgttattgcttccacctcacaagactggaaagcggtttctaatgactcctctgcggcctccacataaggcatagaggatgggcagctcaccaagatgtctttctcacctgacacgatgaccaaatgcccctccactacgaatttcaacttttggtggagtgtagagggcacaactcccactgagtggatccaccgatgccccaacaaacagctgtagggggggttaatatccattatttggaaagtgacttgacaggtgtgagggcctatttgtactgggagatcgatctctccactaacctctcgcgcggtgtcgnccaaggcacgaaccaccattgaactccgctttaagtgggaagcattgaatg

SEQ ID NO: 60866 - DNA, 462 bp, Glycine max
  unsure (1)..(462): unsure at all n locations
tagtatagctaggcactaacaatcccccttttgacttactgtatgttacggaacctcacttaattatgcaacgatgcttccatttgatttacggtgtgtcacggaaacttacggattgtgcatcaatattttttggttttccggcatgtcctggaatttcacaaattgcctaatgatgggtgccaagcacctcacaaggaccaaagaaaggtcgcatgtcatcaagcaaaggtccccggacgaaattagggtatgacagtatttatggatgatttctctgtatttggagatttgttcacgttatgcctcaacaactcggaaagagtcctataaagatgcattgaaaagaaccttgtgctaaattggcaaaaatttcacttcctggtaaccaaaggtatagtgctcgagcataaaacttcaatangaggtattgaaatagatcaagccaagatagaagtaatt

SEQ ID NO: 60867 - DNA, 413 bp, Glycine max
  unsure (1)..(413): unsure at all n locations
ctgcagcatgcagctttaatgtgtgtttgaaagtattctttatataatattatncattttatgcacactaacaccaacattatttgtacacaccatgagttgaaaggggccctatactccggtccatgggaacataaagagtggacgtgaatctgtggtcatgcttggtcactgacttgcttgactacaatgaaccctcatctaaagtttttctctttgataacatgtggttgctggtaatcctactgcacaatatgtttttatataggcatgatcctttaaaccataaaagaatatgacatcttggaattatactatagcctttagttctccgtttagtaataaaaggagccgagtgacaactggtgcttaaaactgcatgatatactaattatgtcccttgtgatgatatt

SEQ ID NO: 60868 - DNA, 347 bp, Glycine max
gcctcgcctcatataagtccacgaatgacaatgctgcctaaagaactaatttcgctcctgattactacagtcaccgctctatgagcgctgttcaccaacatcgctttgaagccatcaagggatggtcgtatctccgggagcgacgcgtccagctcatggacgactagtatactgattttcatgaggacatacggcgcctgcggagggcccactggtactctatggccagtctgatcctaaatagtcctgaatttatgccaatgcttgcctacagatgcggcgtgcgcacatgatatctgcgtatgggcagtggatcccgtcatccgaccttcaccacttctggatat

SEQ ID NO: 60869 - DNA, 440 bp, Glycine max
  unsure (1)..(440): unsure at all n locations
gcttacatgttgagtgacctggcattggaacctctactttatcttggagggttttcttaagttgcatatgaaccttcgacaactttgtgaaatcttttcgctagtttttttacgcttttgaaagaatggataagtttgatgggtcattcatgataattttttaaagacatttgggatcatgaagatttacctaatcctcttgattttattcanattcttcagaagttatgtctgccattagacatggattgacttcttcttcatcttcatcagacgaggtgtccgccggatcttcctaggtgcctcataatattttcttttctttggtattggagtggttcttcttgtcttttgacttctccagttntgagcattcagatttgaagtgtttaggtttctttgcttcatagcatnatatggagctttggtcttatcttttt

SEQ ID NO: 60870 - DNA, 443 bp, Glycine max
tgcccttaagggtgagtatctgataatactaagggaaagatccagaatatcaaagatatggaagaaggactcttcaccaacaaaccacttgagtgagcatctttgattcttcaccagaaaatcaagaagctcattcaaagcccttaaagttgacaattcctctgatgaagattccaaggaagaatttgatgaagatgagctcgcctttatctcacgaaagattgaaggatgtagaagaacaaaggtgactccaaatggaagaactccaaaaaaagtgtgttcaatgaaaagaaagataaagacaaaatctccataatttcctacagatgcaagaagactggacacttcaaatctgagtgcccaaaactggagaagggtcaagcaagaaaaacactacagaccacagaaaaaagggcttatgagcacttgggaagctagatgac

SEQ ID NO: 60871 - DNA, 335 bp, Glycine max
aatcggacatccgtgtgaaaagttttttcatttgaatttcgcgcgtctctatatgcgatgctcctgaatcggacatccgcgtgataagttatgaccatttgaatgtgtcaagagctctcattgttcaatttccaggctctcgattattatgcgcccgaatcggacatccgtgtgataagtcctgactcaattgcatttctggagagaatccgaggtctaattttgcagtgtacacatatattataagcccgaatcggacatccgtgcgaaaagttacgaccatctgcacttccccagagctttctccgttcagtatccacgcgtgctatatgtga

SEQ ID NO: 60872 - DNA, 134 bp, Glycine max
cgcccgaatcgggcgcacgtgagaatggtcatcgccagctctatatatcgagagatgccgatgtcttatatcacacgaatctgtatatggcacacctcgaatcggacaagcgcgtgaaagagtatcgaccatct

SEQ ID NO: 60873 - DNA, 293 bp, Glycine max
  unsure (1)..(293): unsure at all n locations
ngcttgaaaatattctcttttacatgccttattctttggtgacatcagcattgacggctgcattttaatctctatattatcatacggacatcatgcatcatcattcatggagaggtaggaatattgtttctaaagttaaaagcttctttagcgcataaaactccttattttaatcggatacaacactatctggaatcgattacacaagtgtttgtactttacaaagggattctagttacgcttaatcaattactggttaaccataaccgattacatagatcagttgagatcat

SEQ ID NO: 60874 - DNA, 477 bp, Glycine max
  unsure (1)..(477): unsure at all n locations
ngaccaagaaattactcanagcccaacaacgcatgattgagattatggattagcagaggagggaagtgcagttcactataggagactgggtcctcgttaagcttcgtccatgtcgccagtcaacggcttcatgtggtctatactccaaattagcaaaaaggttctacgacccatttcaaattgttcaaaggatcggacctgtacatataaacttgacttacctcccacctcaagaatccaccctgtcttccattgggccttactcaagccttatcactcttcactgaccacaacagagacacccattcccttgcccaatgcggatgaagataaccaacccctcctcacccctctcacgatattggatataagtggcacagttcaagggatgacaagcagttactcgttctggtccaatgggatgttctcttaccggaggataccactctggagctctggagatactaaatatacata

SEQ ID NO: 60875 - DNA, 212 bp, Glycine max
  unsure (1)..(212): unsure at all n locations
tcttatatagctgtgtttgaagaacttttatcctcaccccctgatacaaaaccttcacccgggtattgactgaccctgctattgtgtgaagttcaaccattggtcacacaccttggtacacaacgtgctgacaacgaacatntctcttatttgtattctcagtttgtccctgaaattctttgcagttttcttttgagatgtaccctccctga

SEQ ID NO: 60876 - DNA, 404 bp, Glycine max
  unsure (1)..(404): unsure at all n locations
agcttttctccccaatttctataaatagggggagaatttaagtaganaagggttcagccccttaggcacttctctctctttcgaatttgcttaggaaaattgtttccgtgaagaaaatccaaaccaaggcgcttccgtaacgtttccgtgggtgatttcgcgaaggttttcgaccgtacttcgacgttattcattcgttcttcatcgttcttcagtcttcaacgggtaagtaccttaaaccaagcctttcaattcattctatgtacccgtggtggtccacatttggtttcatgtatttntattctcgttttcatttactttttatacccccttttgacgtgcttaagccatatatttaagtaatttctcgcttaacctacaaataaaacagatttccaccgatc

SEQ ID NO: 60877 - DNA, 177 bp, Glycine max
ccactgaatgtcaatctgaaggggctctgctcttgtgaaacgctatctggaggtatttgctacctactttctacgaagagacgagacccagtactgttgcttacttgatgctcgctgagtgattggagagacatctggttgtcggacacactttcatagaggacagtgtgttgtgtg

SEQ ID NO: 60878 - DNA, 379 bp, Glycine max
atccaagagcaagccataaaggaaggaaaggaaattccccatcaaagagtgggagaaagagaaaaatagaaacgaaaggataattcccatctaagagtgggagaaagaataaagaaaagaaagaaacttcccaaccaatgaatgggagaaagtaaaaaagaaggaaaccatgacctaaaagtggtcttctccctttgataccaaccaaaatcctgtgcgctagcgacttttcgtcccgcactaaacaaaaacagaaaaggagaaaagccaaccataaatcaaaagccaaaaacacacaaaagccataaataaccatcaaaagaacccattcccaatggaagtcttattgatccatgatcacgcatgtaatttttgattt

SEQ ID NO: 60879 - DNA, 293 bp, Glycine max
  unsure (1)..(293): unsure at all n locations
gcatcttggcttgcccctagatatattagagggtcttatgttcactatgaatgacatacttccttgggattaaggtagncgttgtcatgtattcataagcccgtacttaagcatacaactctttatcatcagtcgaatacctaagggctagaccactttacctttcactaaaataagcatatggatgaccctcttgcattaacacagccccaataccaacattctaagcatcactctcaatttacaaagatttttgaaagttcggcaacgccatgacgggggcattatatagc

SEQ ID NO: 60880 - DNA, 274 bp, Glycine max
  unsure (1)..(274): unsure at all n locations
tgagttatcaagaacatcatacatccatcctacacatcataggaaggggaataaaanaccattaaccatgcccatttgttacaagaaaacatatttccacaaggcctaacaaccagtttaatcgaacagttagactatgtaaacaataacagccaacaaagacaaggggacctaagggttttttcttggacattctggcacttatagagtaatctagtttgttcaataatattggtgtgtcttatcatnaccatttttaatgatacttaatggc

SEQ ID NO: 60881 - DNA, 371 bp, Glycine max
tcagcattcttgttggttcaagaagatgttgaaaggaatcttcccgtcattatggttggaggccgcagctatataccaatattttgggtaataactagcactaatgaaatgtccgcatgtacgtgtattgaatatcaactcgctacataacttccatgtgacatcacgtaaagatctgacttacattaagagcatcacacatcacaagatgatatccttgggtcaatcacttgtgtccaaaatgcatttcgcatagtttggttccgccacttgagtgagtactgattattgtcttacatgacctgatttatcgccaactgtgtttctgcatatgaactacacagttatttcattattacttactacaacat

SEQ ID NO: 60882 - DNA, 363 bp, Glycine max
gactgaatggaccattcagtctctggaggaccttttgagggcatgtgtcttagagcaaaaaggaagttgggagattctccttccgttgatagagttcacttataataacagctttcactctacgattggcatggctccctatgaagctttgtatggtagaaggtgtaggacacccctattgtggctagagcctagagaaggcctcaccttaggatcataagtggtacaacaaaccacagagaatgtcctgtttattctagataggatgatgactgctcacagtatgcggaaaagttatcatgacaagaggaggaaagatctgacattcgaggttggtgatcatgtattcttgacagtcactct

SEQ ID NO: 60883 - DNA, 267 bp, Glycine max
  unsure (1)..(267): unsure at all n locations
ggtttagaaagctttttttttttanagagtgccctgtctcttttgagggagcaaaaggccattttttcttgatggctccactcaccacagagagaaatctgcctttgaatgctaatctgctagttgctgcgtttctggtcagcctccgtcttgcccgcggccgttgaagacattttttcaacctaacgaacccagcggtcaagtggttgtaattagtgccccacatatttaactaatatgaatacttacttcagttgatctttcgat

SEQ ID NO: 60884 - DNA, 350 bp, Glycine max
  unsure (1)..(350): unsure at all n locations
catgacttgcgaaacaaaaggtgatcaaataacaagcagagatttaaaaggtactaggttgcctcctagtagcgcttctttaacgtcttgagctggacgcctgatgacttgtcgatcacggacctagtactttgcttaccttcggctttggacttggtcgcctattggtcgaccatgtgtcgtaggcaatactctaaaccttttgtggatgagctgaggggctctagaggtggcgacggtgcatatattggctgtngctggccatccccaggctggtgtggtgtttcgccttgcacctgcctgggggcgcagtacttctggatgaaagctcgattagtaggggacctgat

SEQ ID NO: 60885 - DNA, 287 bp, Glycine max
  unsure (1)..(287): unsure at all n locations
tctcctcttctcctttgccttcncgtgcatctccatagtggaaaatcaccattgaaggacctctatgaagctcatagatccacccttcatataagctccacaagcaagcattcatcatgatgttattaatctaatctcaagaattaatgaagcattgggcttgaatccagaattgtgcttgaacttgaagaggacagactaatttattctacataantaaatcgtatcgtatctagatattatttagatttgatctcatctagaacttatcttatcatatcttatct

SEQ ID NO: 60886 - DNA, 327 bp, Glycine max
tggctcttgcaagatctgcattttattttataacacaacacactctttccggacagtctgaacgaacaacttgaatttatctatggcaagtcttgcttttcctagctcgggtattataggccggacttcttcattctcttccggagcttcgaagctctcctccttgataattttcaactaggagagccaatctaacccttcgcgtacgaactttcagccattcatgataaccaccgatgacaccattatggatgcccctaatgtttttaatcttccctaacgggccttctcacgccttaaggacatcttgttataccttgaaacttt

SEQ ID NO: 60887 - DNA, 353 bp, Glycine max
ttcggattctaatgacacctctgcggcttccacattaggcatagaggatgggcgagtcaccaagatgtcttcttttctgatacgatgaccaaatgccctttcactaccaatttcaacttttggtggagagtatagggaacaactcctcctgtgtggatcaaccggcgccccacaaacagatgggggggggttaatatccattatttggaaggggacttgacaggtgtgagggcctatcttgactgggagatcaatctcttccctaacctctcggtgggtgccgtctatgtgactacacaccattgaactcctgtttaagtgggaagcattgaatggctatatctccatagtgc

SEQ ID NO: 60888 - DNA, 181 bp, Glycine max
ctccgacgtccgcggagctattaataaattgatgactccctccctcacacagtctttaatgtattttatttcaactcctgtttcgccggactattctagactatttgcttccccttccccctcctttcccctacttcaattgtgacattaccggcggtgagcgactggatctcgagagaaa

SEQ ID NO: 60889 - DNA, 429 bp, Glycine max
  unsure (1)..(429): unsure at all n locations
ctgcagcttgcacccagctcgcccaggcgagctatgtttcttcctccanaatgttctcgtctctggagaacttactagaatgcccaagtgggccctggtgctatttgcaccctcatgttactaaatacaccccctgcctnttcttgctgattctntttctgtcacgttactgaaacttactaattacgtaacgatacttgttttcttttcgtaagttacggaaccttacggattacntaatcatcccttttttggctttcgggatattacggaactttaccgattgcacactaacactttcttttgacttacggcatgtcacggaacttcccgggttgtgaacaatgcttttttttgattctggctataccgaacttcacaaatggttacgatgggcgccacacctcgagtggtcaatgagggcgcatc

SEQ ID NO: 60890 - DNA, 371 bp, Glycine max
  unsure (1)..(371): unsure at all n locations
agcttgcttatagagcttctatggttgttgttatctttgagcttcaatgaagtccttcaatggtgatttcccaccatggagatgaagcggaacaaaggagaaaatgtgaggggaggcgccatccactatggaataagccatggaagaaggagtttctccaccaagagagtgtcttggataataagcttggagagggtgcttcaatggaggaaaagaaagagagagagaatgagagagggggaagcatgaaattgaaggaagaaaagagggagagacagtgaactttgaagtgtgtctcactagactctcattcatcanagttacaacaagtgttacacatgcttctatttatagactaggtagcttccttg

SEQ ID NO: 60891 - DNA, 227 bp, Glycine max
cctgtgtaaaatgccatttggggattttaacttgtcaggtagtgatcaaagtgtttcgtctgctgcaaggtgctatctaaggatgaattgctttgaaggctgagaaaacttgtccacagaattatgtcagcggagagggctatgataagcttcgctaacacccaacatgattaattgtccctgtactagttgaaagtaggattccttttaaagtaatacactggtct

SEQ ID NO: 60892 - DNA, 431 bp, Glycine max
  unsure (1)..(431): unsure at all n locations
gcaagcttgcagattcggtcttcgccagtgaattgattttgtgggtccgaaaagtatgcaaatntgatcatcctactaggacgactgagaaaactggggcaaatgaagagggtgagaaagagggagaaacccatgatgtgactgtcattcctatacagccaagtttcccaccaacccaacaatgtcattactcagccaataaccaaccttctccttacccaccacccagttatccacaaaggccatccctaaatcaaccacaaagtctgtctaccgcacttccaatgacgaagaccacctttagcacaaaccaaaaaatgccaacaaaaaggaattttgcagcaaaaagcccgtagggttcaccccaaattccgttgtcatatgctaaacttgatcccatatccactcgataattcaatggtagccataac

SEQ ID NO: 60893 - DNA, 414 bp, Glycine max
  unsure (1)..(414): unsure at all n locations
taactcaatgccattaacctagggaattaaaaaaaaaaaaacttaatggctgagtgtaactgacattgtggcaaccaaaagtcacccccaacagccaacaagtcagccaccatttggtctcccaaaaggctgatgcctangttgtcaattgggcccttattacaacttgaactaaacctaactaaagcccttttaattgattaacccaaaacatatttttggtcaaccaactttacaaggattgggacattatttagacaaactatacactctaaaaatngagacagagtggtgtcatttagtcctcctccatttgggccatgatacaactcacaaccttggactttctccttgaaacttgtgcttgattcaaatagtatgcacaacactcgttgaagagcttccttggctttc

SEQ ID NO: 60894 - DNA, 230 bp, Glycine max
cactcggaagcctattgagtcccgtatatatcgagacgctcgaaatttaaaatcgaatctcgtataatattcgaacaacaataacttttcactcggaagtccgatagagtcccgtcatatatcgagacactctagaatttaaatccaagctgtcagatgcttcgtactacaataacttttcactcggaagtcctattgagtccccgtatatatcgagacgctcgaaattt

SEQ ID NO: 60895 - DNA, 403 bp, Glycine max
agcttgatagagctatcatcacatgattctttattggcacagaacaagttgctttctaagcaactggagattttaatagaaacacttggtaagctgccaactaagttgtctatgggtcaacctacacactcttctgttttgcaagttacaggttgtaccatctgtggtagggctcatgaaacaggccaatgtactcccactgaagaaaacactcaagaaattcattatatgggaaatcaacagcgacaagggtgtactcaaggaggacttttaggcttctagcaaggtccatataatcaacaaggacagtggaggacacaccctggcaatcaagtaacaaagaccagagtgggccttcatatatgccaattcaacaaggacctaacatattccagagaactac

SEQ ID NO: 60896 - DNA, 209 bp, Glycine max
tgcagcttgtgttggtggactgatacaattagttgttgctgccctgagcttggtttaggtgctcccctcccaccccacctgcgactcgctgagagtgctcttgatgagagctgcttggcctcctgtgtcaaacctttcattctcgtttctttgccgctcaagtgctgcgacatcaaaacaaagctcgccaaacaatctgcaaaatatac

SEQ ID NO: 60897 - DNA, 382 bp, Glycine max
  unsure (1)..(382): unsure at all n locations
agcttggtgagtatattaactatncatttgtatttcatactggcgacttatgctgattgggaaatcttggatttgtagtggtgagagtgcaagtgaaagaaatgaagcccattctaaaaaatgttcgttcagggacagtcctcagttttctactatgtttgcagtatgtatccattaataattatctttgagtaaattgtgaagttttaatgagtatacaatgacaacaaaagccttatcccactatgtgaggttggctcatggatcgttcaatctcattggactgggtttggagcaaatttgagggatttattactatgaatccctcctacatttcctctatatctagtcttactcttttaacaactaaaacattgactac

SEQ ID NO: 60898 - DNA, 230 bp, Glycine max
  unsure (1)..(230): unsure at all n locations
acacacaaagaagggaacttcccaatcataagagtggaagactacaataagagactatttccaatcgaagagtgggagatagcaaataaaaggaaagaaaattcccaatctaagatcggaggacaacagaagatatatacagataggtcgttggaccagacaatatctgaacaatacagaattgtcaccaataaaatatgagaagaaaggaaaccacgacctanagtggt

SEQ ID NO: 60899 - DNA, 415 bp, Glycine max
  unsure (1)..(415): unsure at all n locations
gcttgcacccaactcgcccaggcgagcattgttgtttcctccagaagcaacagccttctggaggatatttntggagggcccaagtgggcctggttgctatttgcacccccattattactaagtacacccccctgccttttgttttggtgattctttcttcgtaaagttacggaaacttacaaatttcgtaacgatacttgttttctttctgtaatgttatggaaccttgtggattacataatcatcccctgtttgacttacggaacgttacggaacctcacttattgagcaacgattgctccatttgatttccggtgtgtcacggaaccttacggattgggcatcaatattttcttttgctttccggcatgttccggaattaacaaattgcctaatgatgggtgccagcacctac

SEQ ID NO: 60900 - DNA, 238 bp, Glycine max
tctggaggaatcttctggagggcccacaagagcctggccgctatttgcacactcacttttactaacaaacacccccttgccctttattggtgagtctcttgtttcgtaaagttacggcaacttacggatttcgcaacgatacttgctttctttccgtgatattatggaaccttgcggattacataatcatccctttgtttgacttacggagtgtggcagaacctcactaattgtgcaa

SEQ ID NO: 60901 - DNA, 420 bp, Glycine max
tgcagcttttctcttgctgtttagggctctttttttatttaagcactatgggtgctggcccaatttggccaatcattagcttaccctaattctgcataaaacaagctttaaataagctctaaattcacgatgttgcgcttagcgccatcctcgcgcttagcttgggtaagtggaattgggcctagcgtcagtctcgcgcttagcctggctgaaggcacctgctgcgcttaagacattgatcttgcgcttaacgcgcagctttgatgctgatgctatgccagattcttctttgcgctaagcacgctgaaagttgtcttagcggtggatatgcgcttaacccaactgctgagcttagcccaactgctactttttgcaattcaaaacttagcctctttttcacttggaaatgcacagatttca

SEQ ID NO: 60902 - DNA, 427 bp, Glycine max
  unsure (1)..(427): unsure at all n locations
gcttctcaatccggcatggaagattttgttactgtcttattaagcagnaccaatacgacacggatatggcttctgatcggaaccaacttctgagcatgaccaagcgggaacatgagttcattaaagaatatgctcaaaggtggagagacctatcaacccaagtcgtcccgcccatgactganagtgagatgatcacgattatggtagatacgttgcctacgttctactactagaagctgataggatatatgccggctaactatgcagacatcgtcttccccagagaaagaattgacttctgacttataaaaggcaagtttgaatatgcctccaacgttgcccctaacaacaatagaagagccctcatggtgggcacacggaaaaaggaaggagatacccacgcggtcaccaccgtcttaacatggat

SEQ ID NO: 60903 - DNA, 342 bp, Glycine max
  unsure (1)..(342): unsure at all n locations
ctgctagcttagcgagcggtcgctaagcgcaacactcatgggctaagcacgacgaagactctgaaaaaagatgagctgtacaggtttgctaagcgcaccgctttatctcactaagcacactgcttcatttcatccgctaagcgagaaaagcacgtgctaagccgaaattcactaatgtgcgctaagcggtgcataagtgcgctaagtgcacgagcacgaacaacgccacctatttaagcctgaaatcagaatttagaagaagagtttggagtgggattanaagtntgcatgtctagggtgtctagagagagaaacgtccacgttccagagagttttgagaga

SEQ ID NO: 60904 - DNA, 281 bp, Glycine max
cattcattttcaaactctcgttcaatacagatagtcactattcacacatagatatactaactataaatggcatccatgcaaggtatattttgatgaactcgagtagcaagctgcttctgatcttggataataagatatctacataacttttatacagtgtatatagtattaaaatgactacttgcaggatatcatttactcaaccttagtgattctgccattaaatctctctgatagtgacactcataatatagcctctgtgctactgaacttggttatca

SEQ ID NO: 60905 - DNA, 364 bp, Glycine max
  unsure (1)..(364): unsure at all n locations
tctactattngacatcgacatccacaatctctctagtttctattattttctattccactatgctaagagcaagataattaagctatggtcttgaataagagagcaattgcttgttcttttcatggctatatacgacccatgcaattaatcatcccaccctctaaaaaatacaaaagaaaggaatcgtggagaagggacacgtagaataatactatcttactaaagttgttgcttggctgttgggtgtacttatttacacccttgtctaagtcgcatttgcattacatatttgaaccatacatggctcttaatacagataaatactgcatgtaagtgtgtaactgaattggcggacatatgacac

SEQ ID NO: 60906 - DNA, 318 bp, Glycine max
  unsure (1)..(318): unsure at all n locations
gacacaatcggaaatccgaggtaaaagttatctgtcgtagaatattctcatagcttccgttttcaattacgagcgtttcgatatcctacgggacacaatcgaacatccgagtcaaaagttattggcgcatgaatttgctcacagcttcattnttcaattacgagcgtgtggatatattaccagactcaatcagacatccgagttaaaagctattgtcngttgacttttcatagagcttctgttctcactacagcgtctcatatattacgagactatatcagacatcggagtcacaagtattggcgtttaactttcaca

SEQ ID NO: 60907 - DNA, 241 bp, Glycine max
taaaaccacacacagaccaccacgacaacttccgggaaagcaccaccccaaccaaacaaggaatcacaaaaaaaagaagccagagagaaagaagaagaagcccaagaggaaaaacgaacagaaccccaccaaagcaaagaaaggagagccggaaaacaaaggctgacaaaacgcgcgacgcccagacgagagaaaaccaccaaggcccctaaacccaaccgccacactattcccgcaaaaa

SEQ ID NO: 60908 - DNA, 353 bp, Glycine max
cacttcctattgttcttgaaggccctgttactgcatggggcgctatcctaatccctgtgacattaattcttttgtttggtgaggtgagaaagctctgtccttatatgattataagtataatacattcatgtcacatattaaaagcttgtgctgcttgtttagaggttggaaccttgaacataaatctggtggcacaacaccccgtttgttaggtcacgtttttccatttgtgaaaacatttttgtaattagaacaacttctgtaaagcgggaaccacactcctattcctctatgttttgttggcacaataatgttcaaactctatcgcgaatgaatgaattactacctcatat

SEQ ID NO: 60909 - DNA, 407 bp, Glycine max
ctgcagctgtccacaaaaagaggcttttgatttctcattcaatttcttttaagtaaaatggatcatttttaaggtccaacgccttaaaatgatcacctcttaaacgaataaagaatcacttgataagaaagaactacgtacgtctgatttcctcatcgcaattgatgatacgtatgagcaaaagccccgcttttgtcgaccaccccaagagatacgttatggtccaatgccttaacgtttctctcctttcaaaaacaagagatcgttaatggtccaacgccttaacgttctcacctttataataaaagaccgttaatggtcaacaccttatatgacctcttgttaaataataacatattttgacaatagacagaacaacttatccaacactctgttccgaaaaacta

SEQ ID NO: 60910 - DNA, 274 bp, Glycine max
gtagctctcttgccgatacaatctgtcttatgtggagtcgtgtcctgttgacacttgaccaggttgagatgtcatttcatgaatgtggaggcaatcttggtgatgatgtttgtatttcattaccccattgggtcgctgagaatggtatgagcactcctgacatcttcttcactgatagagagggaaggcacaaccctgaatgtctatcttggggaatagataaagaacgggttttaagaagcacgactgctctggaggtaatgatgacatgatg

SEQ ID NO: 60911 - DNA, 276 bp, Glycine max
  unsure (1)..(276): unsure at all n locations
aatacaaagactactcaaaatgccccgaaatacaatgctaataccctatactactagaatggccaaaatacaatgcccagacgaaggagaaacctattctaatatttacaaaaataagcaggctcatacttagctcatgggctcgaaatctaccctaagactcatgagaaccctanggcctttccttggatctctaacccaacaacttggagtcttcacccaatgcccctacngagtaagattgcatcaccttgtccgttcttataagaaaattct

SEQ ID NO: 60912 - DNA, 390 bp, Glycine max
  unsure (1)..(390): unsure at all n locations
ggatccttaagtcacctgagctgcagctttatctaaggagacaaccatcctttgttggaaaatcacgacatgcctcaagatgactngctaggagtataatgaagtgccacttcatgtgttgactatctctttcgatcagatggagagccttgatttaggacaattctttctaggaggatgatatgacatacctaggcaagacatgaacacttgaggtccatgccagagcagacttaaacaacccacacatataagacaagctggcatttgatactgcattgtgatgatgaagccaagtgagaagataaagccagagcaacgactaccagactatattgtgtgaagccaactattgatgccaagtaaaagtttactatattatttattgat

SEQ ID NO: 60913 - DNA, 365 bp, Glycine max
ctggagttgctgcacatgacgtccaacgttttgtcaaagaatatagatcgggctgcacaatgcgacaagcaagattaagtgtcgatgaagaattgaaactgcatgattcacgatgtcggatacaatgtccaggacatcctgcctgaaaatactggaattgctatagcattgaagctgcaagatccacgatgtctgatacaatgtccaggacatcctgcccgaaaatactggagttgctgaaagcattgaagtcgcatgatccacgatgtctgataccatgtccaggacattttgcccgaaactactggacatataaatctgttatatctttaacagattattgtgcagttagctagagattttat

SEQ ID NO: 60914 - DNA, 394 bp, Glycine max
atgagatacaccagatgaggatgaactattaccctccgtgtccacaaccagagaatgttattggcctctcaaaccattcagatggagtatgtctcactatcctcctacatgtcaacaaagttgaagggctccagataaagaaagatggagtgtgggtttctattaagcacctacctaatgccctcgttgtctacattggagaaatacttgaggtaagataaccattcatctacctataattaattagaacagaggctatctactcgccatgtaaaagacagtttgaattgcgctcacatctattatacaacttatcctctatttaataatttatctcttgacttctacactttactagcaagattttatgagccaatttgatatcttcctccaa

SEQ ID NO: 60915 - DNA, 288 bp, Glycine max
  unsure (1)..(288): unsure at all n locations
aataacataatataaagagaaagggaaaagaggattcaatacaaagacttttatattggttcaccccaacctatgggcacattcagtccttatcaacaatgacgaggatttcactaacataaccaacactgtggagtttttcaaatgccaaccacatttnggaattcacaccatcttactcatcacactcccacactaggtcttgattaggggataacccgtctcaaccacaacaccatgggagataatatacaagtatatgttacataatcatgtgggcttaacaca

SEQ ID NO: 60916 - DNA, 327 bp, Glycine max
ctggatctctgagcatcaatggggtcctttaatggtgattttccaccatggagatgcagaggaagacaaaggaaaagatgtgagaggaggcgccatccatttattgatatgccatggaagaatgagcgttcccaccaagatgagccttggataagaagcttggagattatgctccactggaggaacataaagagggagagatagagggaggggggagcacgaaattgatgaaaaaaaagggagagaacttgaactttgagtagtgtctcacaagactcttattcatcacagttacaaccagtgttcacatgcttctatttattgact

SEQ ID NO: 60917 - DNA, 281 bp, Glycine max
  unsure (1)..(281): unsure at all n locations
aaaaagtgtattaatatatncacatccatacagtgcgcgcccattacgctactatacatcttgagatggttcttgggacaagtcctacctctatactcgtcgaagagcggtaccctgaattttggggggattacaacatctgatacctagcagagatccgtgaatggatattcaccaaagccttcaacagccctcaatctctcctcgaggagaacgaggcttcatctatttacgatcggtgggggtggaccatctgtggaaaaaataatggttgtgctgtg

SEQ ID NO: 60918 - DNA, 418 bp, Glycine max
tatgcaagcatcccagaggacctgtattgtgtattcataaatatctagccccctggtcatagagattctagtcaacaaataacacagagtgagaactcccttttgttaatctaggtaaaactgtgtatgtaatctgaaccaatggaattcattaattcaagaaagttttggaataaaatttcccaagcataatataaaaatagaagcagataatttgacaccaacctttattccctttcaagttctaaagaattgtgggaattgacgcaagtatttggtccaatgtttctgaataaaatgctccagcgagatcattctggccaatgtcaaacatgtacaatcccttctaaaaatatttttatctgggacgtacttatcaaatttccctgctgaacaattggataatttttttgacatg

SEQ ID NO: 60919 - DNA, 459 bp, Glycine max
  unsure (1)..(459): unsure at all n locations
agcttaggttgagttctgcttaccacccatatattgactgtcagaccgagcgcaccatccaatccttagaggacctcttgagagcctgtgtgttaaagcaaaggggtagctgggatagtttcttacccttgatagaatttacatacaacaatagttttcactccagtatatgtatggcaccttatgaggcattgtatggtaagagatgtacgacacctctatgttgggtagatctcggagagagcattggcttacgacctgatgtggttcaatagaccactaaatagatcaagttgatccaggagaggatgagaataccctcaagttggcagaatagctaccatgattggagaagagaggacattgaatntgttgtaggtgatgatgtatctctaatacgcactccgagaactgtcgttggtaaggcgttgatgtccttggagctcacacctatattca

SEQ ID NO: 60920 - DNA, 271 bp, Glycine max
  unsure (1)..(271): unsure at all n locations
agtcacctgcggcatgcaagctngtacttcaccttacgagccatatatttctgactcccacaagttgttccacaagctgtccgaaggatactcgccccctatcagaatattcaaaagtttgaagcagtttggtgttattatatcttacatgagtcgcaatcatatataaaaactaatttggtgacgaactcgcctgctcaggaaatgcactcacaccataatcggaaatctttatatttcctagtgaatcacacaaaatattttcacgctg

SEQ ID NO: 60921 - DNA, 274 bp, Glycine max
cgatatatatgaacaaatcttgagctacttgcatgcgatgcaacaataaggaggcgacaaccgctaacaaagaaagcctagaagagtcattaatcgcaatcatgaagatggacatctacgattgatgaatgattacttctcagaaatatcaatatacatccagaatccttccgacgtatgttttaaatgcggcgacaattgtgcattcaaattgttgatgcttttggtaatcacggtgagtattcccaaatgagatctaatgttggtggtaaaa

SEQ ID NO: 60922 - DNA, 399 bp, Glycine max
agctttgatccattatcttgactcaccatatttcttgacaccaggtgagaatgtcaatccttaccctcagaagcaaaaaagaagagaaggaaaatttcctatccaaggaaaaaggagaaggaaaattttcaatccaagaggaaagcaaaaaaggaaagaaggaaaatttcctatcataggaaaaagagaggaaaggatattcccaatcaaagagtgggagaaagccaaaagaaaagacagaaaattcccaatcatagaatgggagaaagaacaaaagagaacgagaagaaggaaagaaagctcatgatcaatgatcgaaagaaaacataagaaatgtgcagagaggtctttggaccagacaatatctgaacaatacggaattgtcaccaaatgaacaaa

SEQ ID NO: 60923 - DNA, 275 bp, Glycine max
  unsure (1)..(275): unsure at all n locations
gctttttttgggggctttntcttcctaaacatcaaatttgttcaattgacgttatgtttataggaaaactaagaattacaatggtgtttaataagaaaactgacgagtttataaaatttgcaagatattcatagtacttcgtactcttaattttttggattctaaaagaagttcttattcaattttttttttcttcagaaagccttctatttatattagtaaaataacgaagtgatttctcttctaataccaaacatcccataatttgatggcat

SEQ ID NO: 60924 - DNA, 260 bp, Glycine max
  unsure (1)..(260): unsure at all n locations
atgctcctgtgcttnggtgtagtgggctaccactcccaaacccacctgaagactcgctgagagtgcctctagatggggagctgctttggcctactgctgccnaaaccttttcattctccgacttctttgcacgcttgaagtgctcgcgaacatcataaacaaatctcgccacaaccacctgcgacaatatacattacaccatgtgtactgcaacacaaactgacgatattatatatatatttacttgatgttattgagga

SEQ ID NO: 60925 - DNA, 375 bp, Glycine max
agccaccgcggctgcagcttgaaagactttgatctgtttctcaattttgacttgatggcatgagatgaaatgcaaagattggacctcctgttagttgttatcaatgaatagcttacacacttgtgcttgagtgaaatagctgccgcgagaatgtgggttgagctactttccttgatatctatcttatgattaacttcatccaactgtatagctcacattgtgtgctcctctttgtctggctgcattttctgtgaaaacaagtgataggtacacattgcttcatctttctcatcatgccatcaataaatattgatgcatacacctttatacataaatactacatgtttaccactcgaggacaagtgagctgttctc

SEQ ID NO: 60926 - DNA, 267 bp, Glycine max
tgtacataacttggttctccttgtatcttattaatggctagtgttaagttggcttggcaggtgtcaagtatacctatcacttctttttttgtgtcaacctcacttaaactaagttcaagctttattgtattttaatatttggagaatgtgaagctactctggctggggaactatttttaagctttagtttataacgcttgagtttcaggtcttatgttaaatgtgcttaagggtctccatctaaacaaatatatcggtgacacctaa

SEQ ID NO: 60927 - DNA, 380 bp, Glycine max
gccgacctgacgcatgcaagcttaccaccaagagagtgccttgtatattattcttatatgggaagctctcctggaggatgagaatgagagacagagacacatagagagatagaggggggcctgggaattaaacgagattatggagaaaacagtaaacttgatgtgtgtctcacaagtttcacattcatcaatgttttgacaaagtgtacaaatgttcctatttattactaaccacatgggaagcttccttgacaagcaaggaatgtagatttcttgcgaagctataagaagaaagattccttgataagctagagtggggcttctcacacccctcctatagctaagttcaccctcataccaaaatacatgaaaatgcaatg

SEQ ID NO: 60928 - DNA, 370 bp, Glycine max
  unsure (1)..(370): unsure at all n locations
gatccttaagataccgcngctgcagcttatgtgtgtattatagtgttctgacactctgtgggtcttttctgcctggcttaatcatctatttatatgtgctggagtggacttggtcctgcgtactcacacaaagcctgcactgctcgcttagcgcacgtgcctggattcatgctaagcctgcacttgttgctcagcatgggtgcttgtatttgcgcttaacgtacctcttctctcttaccgccagtgcatgttttcgcgatgcgcgttgaacgcgtcttgagttaagtctaatcgccaaatcctcatttctcatatctttgctatttcttgcatcattctggcgttcaaatcccctattttatatatgcca

SEQ ID NO: 60929 - DNA, 370 bp, Glycine max
tagaatactggtaatgtgtctactatcattatcatcattgttttctttgacattgaggtgccacttgagctgccaagtctctccacctcttgggcgtattcttttgaaagattcacgccccctttttgcacatgtacagtagttgcatcctattccaagacattatactgacactgcctaacgaaggcaaccactatgtcctttcaagaatggactcgggaaggatccaagttagtgtaccccagtaagacttctttggagggaatgtatcagccattcctcatctttcgcgtatgctcccatcttccgatatacatctttatatggttcttggtgcaagtagtcaccctgttcttgtcatagttcaaca

SEQ ID NO: 60930 - DNA, 361 bp, Glycine max
ctttatttcattaaacagcaccctcaaatactgttccaatatctggccttatatttctatctgtagaacaatactcatcgttgaaccactcgtacagaaattatatgatcatgaacaattttatggtaaccaggtcaattctaactctctatcaggaatataaatacaagcaagtcattgatgaataatccttatccttactactctaacatgacatcaactcaatacaagaatcattgaccactacttttactagaaacaaaaccttgtttctggagtacaaaaaccgaaaatcaatgcttcatattagtttcttgctgccccccataggtgaattcatctactatgaatatattaaaca

SEQ ID NO: 60931 - DNA, 331 bp, Glycine max
tattatgattagtctatatattcacaaaaacgaattacttgtgtgctttaatgtcaagattataaatcttaaaccttatttatttaagccagtccaaaatcaagtaaatttgttttgttatcaaagcacacaggtttaattgaacacttaataaaccaaagaataaacgagagacttaatctatgcttgttgttaagaaaacaagaaaattgaataaatatatacaattgagaatacaccttaacctattacattcttttggtgattatattataaatagacctttgatcgcatctttatattgcatcacaaagtggttcgtgaccactcc

SEQ ID NO: 60932 - DNA, 440 bp, Glycine max
  unsure (1)..(440): unsure at all n locations
tcaatcatttctctatatgcatgtgaattangaagcatcaacaagaatcaagccaatgctattgtgcaagcaatcaatggggaaaaacacaccaaatgattatgatgatggatggctcaaattctcacaaaggtaaactcaccactttcaaattgagctttcaaaactatcatgacatatagaggaaaaacaaggatttcaaatcacaaaatgtcaagaggcttttcttttcaaacaaatacccatttctcgaacatatcctataattcaaagaaaaacatgcagagtcgtacatgcacacaaaattgacccataatattaaactagaaacccaacgatactaacaacattaacaaattaacacaactaacaaattatcagaaccgacagaactagcanaaccaaagaacactccccccccccatacttaaacaacacat

SEQ ID NO: 60933 - DNA, 291 bp, Glycine max
ctgcagctgttgccttggtctcttacaattccttgctcttgagacaatggccacgatgaaagagaaggtgattgcatcccttaacaaaatgatcaaattagttaaaaatatgaggaaggaaaagggcacaactttgcctcaatacgttgactttagtgaattttaaatatcaagtaaaaatcccacccacgctcttttttcctatgtacccaaatggaggaattgattcattcaattccttaattaattgaatgggggcccttttacccaaatcctattatatagtgattt

SEQ ID NO: 60934 - DNA, 353 bp, Glycine max
  unsure (1)..(353): unsure at all n locations
ttgcttttatgtatacaaactgtctcttcgttngtgaatctcatgctccgaaagcactcgctcaaatattgntatcctttctgctaacaagattcttatttatcttatagttcttcgattcttaaaatatgctcattacattttgcttcttccctgcttggagagtgttatacttgctttatattctctccttttgtcgctaataaaaagacattctcatgagtcgtgtctctagtaccattttttcttctataaagataacatgagattattcaagcatttaccactctatattgcattttacatctattatcgcgaacatgactaattcgaatatataaatgcaatcatat

SEQ ID NO: 60935 - DNA, 426 bp, Glycine max
cttctctatggatcaagctggtgaggaaagaaagtcgccattcattgagttagatgaaatccgcctataagcctacgagaatgccaagttctacaaagaaaagaccaagaagttccatgatagcatggtagttaagaaggacttcatggttgggcaaaaagtgttattgtataattctacgcttggactcatgagtggtaagttgaggtctaagtggattggtccttttgttgttactaatggtttttccttatggtacagttgagatcaatagcgacttcacaaacaatagcttcaaggtcaacggacatcgacttaagccattcctcacgaacccttctgtagtggacgtagtggtggaggagactttcttactccaccctactcttcctccacgatgacttatggagtgtttcttttcctatc

SEQ ID NO: 60936 - DNA, 404 bp, Glycine max
ggtcatcccaatgacctggaatgcaacacacttttatgcatacttcaattagaaaccaggtgtcgtactctctttcctactttaatattttatcccaaataaaaaaataatgtcttttggctgaagaggttttaacaagttgttcctatgtcaatgtaaaaggaaactcttatcattacaattacttaatgaaatccatatacgatgtatatcatttactatttgttaccatcattactcatgtgcttatatttgcaaataaaaaaacatgagctgaatggaaaatgtcttacccaacactgtgtattgacctatttatgtcttactcaaatctatgtgatgaccttctcaagtcttgtatcaatagtacattggcattatgtctttgcgcagatgcatatcga

SEQ ID NO: 60937 - DNA, 460 bp, Glycine max
actcatagccatcattaacaatctgatacatgtgaattgcttcgtcttcacctccagtaaaaaggaagtcccctgtatggctccgtgccgaagcataagtgttaccaacatgagcattatgaacaatggtgaccaaagtcccacattctcacaacagagtcatacccagaggtaaatatgagcttcgcagaagccaataggagaacattattaaaatgtaagcgtaaatttgattgcattactgtattaacttcaccttttttttgctttcatttttggatcttataaaatttttaaatgcaaaactgaataataaaatccaataactatgagaatattcattaaagagagaagatatcaatacatgggatgagccaacaaatacaatatatatatataaaccctcccaacgcggtgaacaagctataatacacagaaattaataacactaacaactaat

SEQ ID NO: 60938 - DNA, 232 bp, Glycine max
ttaaagcttaagatggatgtagcttcttttttgtttgcagccacggatcttcgtcatcaatggagtcctttgcttcttgaagatcatggccgtggaatggagatggaacaatgatgattggagatgcctcttttatgagaagattattcaacaagatgctctccaccttagaaggccttgattagagcttgcaagtttgataaaacgatttgagggaaagggagagaatgag

SEQ ID NO: 60939 - DNA, 504 bp, Glycine max
actcggaccctaatgactgagctgcaactttataaatatgacagaaatcttattgatttgactctactcaacagaacgcgataactttgagtataaaccacaagcttttagcatcgattttaaaccggcatgggtgaaattaaacactttcaacatctatttctagattgatgagaaaagataatttctacatttattgggtcttaaattgatattgaaagtatgaccacaatgtctaccaaatattctacatcaattttgacttaaatcgatatgtagggaatgttcattcttacatagactttggtcataattaatatatgagaaatttcttctatatcggagtgtttcacaacccatatgattcttacagctattttaatgctgattttgtcttaaaaaaacataaccaaattcacgtaatacggcgatgattaatatatatatatatacttatatacatatatatatatatatagatatatatatatatatatacacccc

SEQ ID NO: 60940 - DNA, 364 bp, Glycine max
tttccacatgcccaacactttcatttctattggaatcctatgcaactataagaggtatattatgtggatctaatgatttacagagacaagcatatcgacctgcaaagggagcagagtgttcgataggactcgagtcttattatgccaacggtgggctcctggatgaaatagaagaacactctctggagccgcacagaatgatctcctctctcgcactgctactgtccttcactgtaacactctaactttcctaatagatatttgtgcatttatgcacttcctagacctgaggatgatcactgcttgtcgtaatggtgatacgacagatacgagtgatgagcgaatgatgattcattttgggatg

SEQ ID NO: 60941 - DNA, 478 bp, Glycine max
  unsure (1)..(478): unsure at all n locations
caagcttgatntctccactttccattagaaaattctntgcacaaatcaaatcatccacttattctggttttccccttcatagtcacaaaatattactcttaacttctagtcataactgtgcaaaatctgtataaataactttgtataaatntaatttagagcaatgtattcaaatgaaactgcatacatgcggttgaattcggatatagcaccaacatctatgtggataaaacatcaacagtactgtgcattccataggttcatctttgatttgttatgtaggtaaagaagtgatgtgccaatcaccggacaaaaatgttgatttgtattattatgtatacgaatcttctaacttaaaaattgttaattaattaattagacgtatatgagtgattggcggcagatctattaatatacctgcagtgtcatactgatgtcaccattactggggatgatgtgngtttcattctcaattgta

SEQ ID NO: 60942 - DNA, 390 bp, Glycine max
  unsure (1)..(390): unsure at all n locations
acctatctatctcccanatgccttngcanagactctatatataaaatgcatgacgttctaattctagatgtttgctttgacgcatgggcataatgcaatcactctatgcctagcaatgattctattatgacatatctccttcttgttttattagaagttatcttctcccgagcgtgtaacccctaaaactgatgcatgcataccttctttaaatattatttagaaattatcctctccccagcatctaactcctaacatgatataaagatagatgaatatgctggataaaaacagaaaagaacatatgaatgacaacctggtattgcattgatcaatagtgaagagtacatcatacatcgngttggcttctacgcgcgccaggccctaact

SEQ ID NO: 60943 - DNA, 426 bp, Glycine max
  unsure (1)..(426): unsure at all n locations
catttccattatcaaactgagtataaatgcatattcttatatatcatagaatatgttttcttgatgatttaccttctttagttctgcattttcattgtggataaggtctatcttcttatgaagttcttcattttgtcgacgaatcaagcttccctgcaaataataatggtgtcaatgaagagattggttcaaaatttgaaatttgtggagtattaaaggaacaaaatctgatgcctggaaccttctgttgtaattccttgatctcatcactgaaaatgtgatcctgcagatgaaataaatgattgtgtaagagtcgtgcatgatataaagaggaggaaacaaactttctttttactaaaaatgattaatgaaaaccaaacatgtagtataaagaggagctctgatttgctttgactntgaatcatg

SEQ ID NO: 60944 - DNA, 184 bp, Glycine max
  unsure (1)..(184): unsure at all n locations
agctggaattgattngggcacctcattttattcttctatgttgtacctacatataagagacaggcccactctcccaagtttacataatcatattcatatattattagggcatttcaccgagcacttggtgggcgcatggttggacataaattgcaagaggatgggagacaatgggcatgcccca

SEQ ID NO: 60945 - DNA, 417 bp, Glycine max
  unsure (1)..(417): unsure at all n locations
acacttaaaactccgcttttatccaggcaattcttggtggtgaagctccttctttcttggcttattccttagtggatggtgcctcccctctcctcttctcctttgccttcaactgcatctccatagtgaaaaatcaccattgaaggacctcattgaagctcaaagatccagcctccatagaagctccataagcaagcttccatcaccagctcacctgngtgagctcattgcttcaacactaagtttcagctcgcctgcaacatccataaagtgaccctttgcctagaaatatgcatcataggggtgttttaaaagattccaaggttcaaaagtggagagaattgagagaagagagaaagaagaggaaatgaagcttacgcactgccggatcacgactgtgaccaatccctacatcgt

SEQ ID NO: 60946 - DNA, 328 bp, Glycine max
  unsure (1)..(328): unsure at all n locations
ctcacgtgctctcacgtagtccatatcctcgattctctcaacaccggggccccatcaatccatccaagcgttcccaacatcaaagtaatacaacattcaaacagcacatactatcacagccaagacaacagagcaaaggcagaaaactctgccaaaacaccaaccaaaatcacagcttttcttacttaaagaccccagtaacaattccttcgttccaattcgttaaccggtggatcgactccaacattttactggaagtctctagtacataagcctacantctgaccggtgggatctactancaaacatccagaactcattctgcact

SEQ ID NO: 60947 - DNA, 466 bp, Glycine max
  unsure (1)..(466): unsure at all n locations
gtctatataaagcttcaagatgtgatgtagcttcttgtatagcttgtaggcctcggatcttcttcatcaatggagtcctttgcttcttgaagattaatggcagtggaatggagatggaagaatgatgattggagatgccacttcaaggagaagattagtcaagaagaagctcaccaccataggaagccattgataagagcttgaaagtaagagaaaaggagtggagggaaagggagagaaggagcacgaaattttatgcgtcaaaagtagtctgaactttgaagtttaattctcaaatgatcaaagttgaaaaaatgcacacacatgaccactatttatagcctaagtgtcacacaaaattcgagggaaatttgaatgtctattcaaattttacttgagtntganattgaatttgtgcagccaaattttggtaccaacatttcactaattatgattaagtaaattt

SEQ ID NO: 60948 - DNA, 475 bp, Glycine max
  unsure (1)..(475): unsure at all n locations
ngcaaggactatagttggtgtcattgagtcttgccactccttttgtgtcatgcatagggatctcaagcctgagaattttctctctgttaatcatcaagaagaatcccctcttaaggcaatacattttggactgtctgcttttttcacaccacgttggtcaaaatgttccattgtttcttccccttgtgcaataaacatctatcttcagtagtctgctntacgttcttattatcaacagagttgttatggtatccaaagaaatctaaaggttttgatacagttgtttttttgagccactagttgaatgagtctggtacaccaaagaaaatagatgctaaaagagtttctcagtagtcagtaccatatcccttagatttccaaaggtagaatttatcttttatcaattcttcttgggggcagctgatttgatcatttacattaggtgtacattgcccttgtgcagtgaacctaatat

SEQ ID NO: 60949 - DNA, 409 bp, Glycine max
  unsure (1)..(409): unsure at all n locations
agcttattaacaagaatctgaacataatgagattatccgtaatggagtgattatcaagaaagagagagattgaagctcattgcatagntatcgaatatgagcttgagtaaatgactgagagtgcgattgaatcctatcccatagctgccacgaggattaacaaccaatcacccgtgaaagcatgtcattggaaatagtatactacagccacgcaagacagaactaatcttgttcttcctaagtacgaaacacatcanagacaatgtctgaatcatgatcttcaagcaacacatatttcttgcagaatgatcgaattaataagataatgttgaagatgatgactcttgatcacaggttccactctatggagccgaagaagaatagttttctcttgcattcctaagaaatc

SEQ ID NO: 60950 - DNA, 469 bp, Glycine max
  unsure (1)..(469): unsure at all n locations
taagggacttgtactctaacttctntaatttccacatcttgtggaactgtactcccattgatttcaccattctcaatgaatcttgcatttccagttttgaaaattctcatactatgattaggacaataaaacatataccccttttgacttttctggataaccaatgaaatatccactgattgttcatgcatccaattttctttcttgtggattataaatccttatttctgcttggcaaccctaaacatgcaagtgccttatactaagtgtctttggaactgccttactaggaaccctattcaacanatacatggtattnttcaaggcatacatccacaaagatacaggtaaatttgaattacttaacatactcctaaccatatccattaaaattctattacgcctctctactacaccatcttgttgctccatgtggagcttgtangccttagatcttcttcatcaatgg

SEQ ID NO: 60951 - DNA, 348 bp, Glycine max
cagtagacaagcaaaaatctaagcctaatcttattattatatattcagagaatcgatagtaaatccgaacttcagattaagtgaatagcaatgcaattataaaccaatgtatgattgctttctatcaaaccaaacaaggttgaactccagcatgcatgattcaacttgtattaataggaagatttaacttaaacaactcaacatgacagttgccaattgctaaacattgtgtatttatatatagttccataggacggcacgagtgtgaacgctgaactgtttgatctcacattataaagatttataaatttcaatgaaataatagtaagaacatgtgtccagaaaaca

SEQ ID NO: 60952 - DNA, 471 bp, Glycine max
  unsure (1)..(471): unsure at all n locations
tgcnagcttggactatncagtgatggaatgaatccatatggcagtttaagcactcaacacagttcatggcctattatgctagtaattaaaacttgtctccttgggtgtgcatagaagcaaaatgcatgatgttatctatgatgatatcaagcccaagacaactaggaaaggacattgatatctatctcagtccctcgattgaagacttgacaaagttgtgggacaagggggttactggtgttgatggtatcaaaataaaacatttaagttgcgtgcaatgctatttcgtaccattaatgactntccagcatacgagaatttgagtggatatagtgttaagggccatcatgcatgctctatatatgaagaagacacaagccatgtacaatngaaacatggaagaaaaatagtatacactcggcattgacanntttctaaagcttatgaccattactagcaatagaaagaagc

SEQ ID NO: 60953 - DNA, 484 bp, Glycine max
  unsure (1)..(484): unsure at all n locations
tctgaatgttgctgaaggaagagagagaatagttgggcttttattaaaaatgagtntcttttctctttttttttaaagcaatgccacatgtctcattttaagtggagcaaaaagggcccacttttttctcttgatgtgacttcatactcagccacaaggaggaaaaatttgaccttttgaatgctgaaatcctgcctcggtttgtgtgccacctctctggttccagttccccgcatttctctgtattcgtcggtgcccgttttcgaaagtagtcaatatatatatcagaacactcagaatgagatcctgagcgtggttcagaggttggttttgtctaaatttaagttgcacgcacaacgataatctttagactaattaagtgagaaataatctataactgtctagttatggattactcttcgctaattagtctaatccgcgtatctttcccccaatgtacatacttctaccaagagtatatata

SEQ ID NO: 60954 - DNA, 219 bp, Glycine max
gtggattttggctatattattatgatatttgaacaaattactcatttcttaattgcatggaatgtgtgaacaaataataatattttattttgctatgtggatttatagttaactattctcattgcggcttatgatttggtgaaattttcataaaggggatggatgctagtatttgggatgcctaaattgtaccaatttggttttgtatgcaagggggaa

SEQ ID NO: 60955 - DNA, 297 bp, Glycine max
  unsure (1)..(297): unsure at all n locations
tctctgttnttntatcagcaaagataaatatattcatatatatgataagagtaccagaggtactttaatacagctgtttggtttctgagatttggttcctaaacagattagattaaatctagaaaggagccaaaaccaggcacctattacacttttagtatgtagcttaaaccagaattgcatcatctactaatacataaaccttgctccaagattactaggagagataatctgtttggttgaaaagttgcacatgggcgtctctagtgcttacttatgtggggtattttgttagtt

SEQ ID NO: 60956 - DNA, 413 bp, Glycine max
  unsure (1)..(413): unsure at all n locations
atgagaatggngtaattttggagtaaactctcatcttcaaacaagtctataaaatataagttagactttctcaaactgattgtaaagcgacaactccaccgattcaagatttgacccctcaacacccaatttacnctagaaaatgactctttgctgtcacaattgtcactcatttttctcatgtgctcttgccaagccttcctacaagtcctaattgacattctatactagaatcaactcactgtagactccaatttccactaaccccaaatttggcttctctaaccactcaaatctcacactgttctacctacaacattgtcattctcacatttaaccctaagttaactgtccccatcatctctaccagttttctatcaacaatttcagcacacatacatcacaaagcatca

SEQ ID NO: 60957 - DNA, 404 bp, Glycine max
ggtagaaaagagaaaatgaaagattaggaagtacatttggtgaggatgtctccttcacctctagaaacctcacaatcactcaaactctcatccaatactccgcatgataacttcctctttaatctctactgtccctcaggatcttcacactagaagttctctccgccactcatccactcagatgaatgctaccaagaatagagaaaacaccaaaaattgagaactcctttgcatttctgatttcaggctttaaatagggttgatgatttttggtcgttcgctcagccacattctggttcgcttagcacgcctcttcttcgctcagcctagaggtgcaagcagtgcgcttagtgttcgaacccggcaagtgcaccggatcgcgcaagtagtataaaatggtaaga

SEQ ID NO: 60958 - DNA, 236 bp, Glycine max
actcgtgctaatcacaagcgtgctaatcagcaatcttcaacgtactccaattcaactccttgtggctttctgcttccctgccttaatgagaatccatacctgatcctcttgccatctcttcttgtaaaacttagctctacaccttcaaatcatgaagtagttctagggccttatggctttggatcgccctctatcatattcattatgaatactatgtcggcgcactatatacaaat

SEQ ID NO: 60959 - DNA, 472 bp, Glycine max
  unsure (1)..(472): unsure at all n locations
acacactatgtagacctaaatgaagactaatcattcattgtttannttattgnattcattatgcgatataattcgntgtaacccgtcactaaccaattaatattatcaactactcgtttggttaagcaaggaaattgttggtccaacaaaaatcatttacgcgtacagcatacatcattgtcataattgacaacacataatgacatgcatgcgtgttacagtttgagcgtgacaacacattggttgacttcagtacacatattgaaactagcagtcgctcaacaacacattggttgacttgactacacattagcgacaacacattggctgactngactacacatttacgcgtgtctattnttttgtaaacaaagttaaacaaaggctcggtcacaaccatctatatatatggcagactangctactaaatcacacattattttgctttcaaaataatctccaactgatacac

SEQ ID NO: 60960 - DNA, 310 bp, Glycine max
  unsure (1)..(310): unsure at all n locations
agcctaaagcctggccgcactatcaaatatgaattaggtttaggagaatcataccacattgcaaccaacaaagatcaacgaccaatttgcatgcagtaaagggatataatggatgtataactctagcgaaatattattgtgttctgaaactattcaatgtttcatccttgtgttgtgctggatagtatatcatcccttaacagngcattggtatctttatactcattggatgagatggtaaagctaactaacaactntaagtttaggattactcacatataccgggaaggcaatgcttgtgctaacatgc

SEQ ID NO: 60961 - DNA, 460 bp, Glycine max
  unsure (1)..(460): unsure at all n locations
acctanactagattgcaaaaagtccaccttatatatatatttagctntgaagaccctcgtaacaatagcatcttggttgaaaataaatntccaactgtgctttcctagcatgactaagttaaagtcgtaaagatggtgaaattccatgccaccatgctcctttctcataattagcttgttccaactgagtcagttaattccccttcttgaattattgtttgaaccttaccaaaaggagttaaatatcctttgaatctcctcctctagagtggaaggtaaaaggaaagtactcatgcaatatgatgaaatagcttgagccacaaaattaatgagtacctccattcccgccttggaaagatgtntgcctaaccaatgatttatcttcttccaaattctgcccctcaaatagttggatatagctttctttttaactccaatcatggagggcatacccatatat

SEQ ID NO: 60962 - DNA, 500 bp, Glycine max
  unsure (1)..(500): unsure at all n locations
ctgagaaacacctatngacaaagcaacatataattgatcacgtcttatagcatgtggaagataaattccaacattgggtatggcctgtccttgagacttattgatggtaattgcaaaactaagtttaatatgaaattgcttcctaagaagaacaaaggacagtctctacattctttgttgtcctgagtttaattctatgtgagaaagttctccttctagcacggtagcatgttatgattttaacgtctaacatattcataaaaaaatcaatggcatagtagtcttgtcccattacacaggtgaaatttaaggtctatgtttcgtaacaacattaagggtgtgccttctttaatctttaaatatgagggggcaaatcacctaaagtaatggagtgcaaatactattgttgatacgaagtgtgtgtattctcttcaacctcattaaatgataacaaattatgctcttctcctaggagaatgaataattatgtcattactttt

SEQ ID NO: 60963 - DNA, 231 bp, Glycine max
gtacagtactctcccatttgttactcttcgatatgtccttggcatatgttccaacaacaccttgtctagtctgtcttttctaacgctataccgagttcatactcacttatcatgtgccactctttctacactcggatcgctatttatgctatgcatcaattcatatctcattaagcattacctatcttgctctagttagcacatcaaaataggagttgttttacaatcacg

SEQ ID NO: 60964 - DNA, 378 bp, Glycine max
  unsure (1)..(378): unsure at all n locations
catgcagcttgaaggttccccccattccgcagctcatgcttaacntgaacccataactacttgatagattcaatggtagccataaccctagccaaagctcatcaacctatatgntttcaggatatcgactcgaacgctacgtgtgcttgtacggaaagcccgggcgtccattggcattgagggcttgaaggaggggcaagctaatgagcgggtgaatttgagagaatgtgtgaaatcctgacattgacaagagacgccacacatggggcaattatggaagctgctgttagatgtctctaatgactcaccacgatttttaactttcaccggaatgtgagtgtaatccattggactgtatgctctagcaacccgcgctcc

SEQ ID NO: 60965 - DNA, 400 bp, Glycine max
  unsure (1)..(400): unsure at all n locations
ccccaactccccagcgagctaagatgcttagtgtgcttagttgctatttgcaccccatgttgactaaatacaccccttgccttattttgctgattctttttctgtaacattatggaaacttacgaattacgtaacgatacttgttttctttccgtaatgttacgaaaccttatggatcacgtaatcatccccttttttggcttccaggatgttacggaactttacggattgcgcactaacacttccttttgacttctggcatgtcacggaacttcacgggttgtgcaacaatgctgttttttgactttcggcacgttacgaaacttcactaattgcctaacgatgggtgccaagtacctccaagtggtcaaacgagggtcgcatnccaacaacggatggt

SEQ ID NO: 60966 - DNA, 472 bp, Glycine max
aagggtatacgaaagaaggcccaggatattcatatttaatgactgcccacacgtactgtctcgtggggggtatgaactgcttgacaagaaacttatggaggagaagagcaagcgtggacatgaggaacatttgtgtactgaaagcccaacactcaacatcgacccaccatccccagttgtaagacacttgaagtggaagatcgcctgcaaaaagcggcatggccaaatgacgtctgaagtggcacaagaaattgcagacaaaattgcgagttcatatattttttggttactgtcattgccaaataatggttagctaacctagtcaaatttattttattcaaattcaacaattgtatatccatgcaggattcattacaggaacaagcaacatacgggaagtttgttccgcatgggtgacatgacatactcaacacggcccttggccgacctgagcatccaggccatgttcgtg

SEQ ID NO: 60967 - DNA, 403 bp, Glycine max
  unsure (1)..(403): unsure at all n locations
acaacgagaggtttgttagaccctcggtagtcattttattactcgncgaaataccaaacatggatcccctgtgacatatttgaggattcggtctttaactgaacccagtggcactgtgtgatacatgtagctaacctcacctaatggaacaaagcttttgttgttgtattcacttgataaaattagcaatcaacattgcggggcaaaatgaggtaagtgtcacacatacattttacaaggaccaacacattagttatttccattcgaaatttctagattgtagtagtttaaggattaaatacactcttttcagaactaaatgcatacatagacttacataggaaattttacctcattgacagatctgaatcccgggcagcttctccaactgctaattccatct

SEQ ID NO: 60968 - DNA, 402 bp, Glycine max
tcctcagcccctatgaataacttcttacttttgggtatggaacttggaactcctctcttattttaattgcgaaagtggaagtcaaataaatgacaactaactctataataagtagggttagcatcgcttttaagatactccaaaaacatgctcattgttagtgaagcactcactattagagaatatacttcttacatcgggtatcatgactttctacaacgcgtttaaccgacgttgaaagtaccgatggtgaaaagattattgttaatatcggtttttaaaattgaggtaacgtaaattgacacatcattatcaaatactatgtatataataagaatacacaaaaaaatgggaatgtgacgtaacacatttatacaaacgaagtactatacataacatgtt

SEQ ID NO: 60969 - DNA, 285 bp, Glycine max
aagcctaatatgcagtagtaaagaaaacaatgctatatattataattatctggacatttatttaattatgcttatattcttattatgttaaatgtgagtattaaaaatcatatagaaaaaggatcaacgataaaagacattttttacgactttcatcaaactatacatatatcaaatctataattatttaatatgctaatgtaagagtacaataatactagaatatgatatgatattgataattctatataaatattatgctgtacatgtacatgatgattatta

SEQ ID NO: 60970 - DNA, 322 bp, Glycine max
  unsure (1)..(322): unsure at all n locations
tcttcatctctctaaaaggtttatatcaacactgtcttcttcaagaaaagttctgtattcaaaaactagagctattcatctttttcattctcttctctcttttccaaaaagaattcaagaaggactaatcgcctaaattctttttgtgtctctcttctcccttttccaaaagaacaaagggactaaccgccagaatctgttgtgtctcccttttcccttctcaagagaattcaaaacgacatagtgtgaaaattcttttgattcttccctttcccttnaacagaagatttataggactaaccggctgagatatctgttgttt

SEQ ID NO: 60971 - DNA, 461 bp, Glycine max
  unsure (1)..(461): unsure at all n locations
tgtcggattcagtttcaattaagcgctngtggcattctatttattgagcgaaaaggctcgggtcattaaagactatgcatcttttaaggcacaaagcgaggatcgaaaccccaatcctacattcttttaaatgactgtgatgagaaaattacagaggacagaaatccctatgggaaaccacagaaaaataaaagcatgcagcgacttccttaattgccccagaacttaagcatagtatcgcttgacaacatcggagttcaccggcgaaggtagttcctcgtcatccatgttggcaagcacaagggcccctctaaagaaagcctntnttacgacgaaaggaccttcatagttcggggcccactttcccctatagtctntcagggtgtgggagactttcattagtaccaagtcctcttcgctgacctgcgcgagcgtaccttcttgtcaaaagcgttcattac

SEQ ID NO: 60972 - DNA, 420 bp, Glycine max
  unsure (1)..(420): unsure at all n locations
ttcatgagatgatggtagtgatgttatatgctgaaattactgatggaaatctggtagagacgaatggtagaactaacctaagttagaaagtgagaatgtgatgttatgagtggaaaaagagtgagactttgagagttggaaggttaagtctgaattctgtggtaaatggaaggttaaatgagttaatcctagcttgaatgtcatttatgacatgtgagaaaggtatgctgagctanagagaaaaacatatgaccatagtgaacaaagagtcctttctagggcaaaattgggtgttgaagagtcaaattttgattcggtggaattttatgtgtaaattcatgttgagaaagtttaaattgattgtatggacttgtgngaggtgagagnttgttcaaattacctcattctatattcactttt

SEQ ID NO: 60973 - DNA, 312 bp, Glycine max
taagctcgtctctggcgctctcttcaacttctcttccgcacccaacctattttctcatctcccttttcaccttcaacagacactcccggttgcacagaagctccgtcatggcccactctattgtgctgctcgatgtttctgacccagccaagaacattttctgtccacatcattggattggatgataaggacttcaaaaataatctatcaataataacttacaagcttgactaaataacacattcaggttatgttggtggtggttttttttttttttctctttaagctctctgtctttttattctgataaaa

SEQ ID NO: 60974 - DNA, 377 bp, Glycine max
  unsure (1)..(377): unsure at all n locations
attaatcatcaaagaagatagaataaaatgttatattaaatagaaaacaccaagttgaaaatgattaatatttcaaggtatgtaaaaccttaaatcgaagctaggtggtntataagttataactatatcaactgaattatttttttctaactgttacttatcttttgactacccttcgtttattgataagtgaaataattgaaacgaatagtctttacccaaatctgcactgactctacctaattaagcttaggtgtcatggttctttttctgtagaaatgaacaagattacccaacacacagtaggcacaaaacaaacctatatttgtgaacatttgttttgtgttcttagccgtgagcattatcatgctcttaac

SEQ ID NO: 60975 - DNA, 468 bp, Glycine max
  unsure (1)..(468): unsure at all n locations
tgttttctggctaaaataaccactggtaatcgattactatattagtgtaatcgattacaagcagttatttctggcaaagtttctctctggtaatcaattaccatatttgtgtaatcgattacgacgcgtccctgcatctatatattcaaatttcaaattctgaaatctgcaacctttctctctctcgaaaacccttgcccccgaattttcttccagccatatctcactcaattcttgcccaaatcactccccgcagagcccaaacttcatcttttttcaatatctttcatttgaaccgattgaaatcccaaaaacactcctcaaatggtataaccatcgataaagcggaaaggaacctcgagtcggagtctgcgacattctgggtcacaggaagccccaattcctccctccattccctctgaatcattatttntatcagaggaacagcgtacacagtacacaaacctc

SEQ ID NO: 60976 - DNA, 466 bp, Glycine max
  unsure (1)..(466): unsure at all n locations
agctaaactgtgatgcaagctgaaccacaccatttgtaattcttgacaggagatatcttcatgtaaagtgtttgggtaggaagaatatattgtatgggttgagaccatgtaatttcagtcaatctctacatgacacattattaactctttctcctaaattgaaaaatgtagttaagtgtcacgtggagattgactgaaatcacatagtcccggatcatataataatntatcccaggcaagttgtcttcaaaggccaatggacacaaaccgtcttagaagaacatctggttatgtcacacaagatcaacaagactattcccatcacttacagttaataanaaataaaataaaagaaatagacagtcagatagatagtgctttgctggttgatgaaagagctctggttggattatattgtaaattcaagaattggtggtgattaaacccagacatatctggtgttgac

SEQ ID NO: 60977 - DNA, 372 bp, Glycine max
  unsure (1)..(372): unsure at all n locations
tcggagccccatgaatggcgttntcgttcatgcgtccttcacccacgagtttggagccatgcgtagagattgcttagtgcaaatctccatcctttaccctctttcggagccccatgaactggcatttttgtcatgcgttctccacccangagcttagagccatgcgtagtgattgcttagtggaatttccatcctcaaccctttttcggagccccatgaatggcgttttcgtcatgcgtcctccacccatgagtttggagccatgcgccgtaatgtgcttagaggcaatctccattctcaatcctatttcggagccccatgagttgcgttttcgttcatgcgtcctccacccaggagcttggagccatgcgt

SEQ ID NO: 60978 - DNA, 493 bp, Glycine max
  unsure (1)..(493): unsure at all n locations
cgagtcangaagagaatcagcaagtctgatatccaatgtgatttttgacccaattgacccacagtgagaatgtttatgcttttgcccataggctgcttatgaagtcaaggtaaatgcaacattttactatggctcaaatcaatcaaaccctcaccatagtctgttttgtgcaaaccaattgaagcttagttgtagcatgaagttttgttgctatcaaagttagtgttgtcaacttgtcattcttttatagtgatgatgcctatgaactcagcatccattgtgaaaccaaaatcatgagaatccagtgtggtcaatccattgtgaagaagaaaggatgcatgtgaaatacagagctttgcacanacaataaggactaaaactaacataaccatactttcagaaaatttaataatcagtaataccatggacgaaccttctagtttggagccaaatcaaacaattctcatctcgagtacatgcatgcaagtacatg

SEQ ID NO: 60979 - DNA, 360 bp, Glycine max
tctacgaggagaaaacctaccaaaagctactcttctcacataatgaaaatggaaaaattggggatacttcttatatttacacagtcatgaaatgtgagttgaacacactctttttctatgcaagcgacgcagactaaaattgaagactaccacagcacaaaagggaaaaataattgggtccatatgttagctgatagaacctaaggcaatccgtttgtccaaattcataagcaactgtttccgtatgcgaacattatcaatgcatactataagcgaatctccacgagcacttatttcaacatagattctaagcacgttcagaagcggatagatattgttctgcataaaactatcatacta

SEQ ID NO: 60980 - DNA, 476 bp, Glycine max
  unsure (1)..(476): unsure at all n locations
agattcatatttcatggctactagtaattnctatttctggtcacatttatctcatttcattccctacttggctatagtgatagatcacgcgacaaatattgggaggctaattttgagccacgttttcttcttctgtcttgatgccaaaaagtcaggactcaaaactcgtatgagtcgccacgttaatcgccaataaagtccatgcaagtatcatagataccaatcctatcataataataatactattaatcccgtgaaacgacatggctctgtcgtcgttgcatgtgctcgcaaccaccgcttttatttcaattcctttggtttgcccggtgcggtgggcgccgagatttcccatattcccgttaccgtacccacaattttgaggtgcgaagcacatctcttantcctttttataagcggcactgctatacctcgtaaatattatatcccgcaacacaaatatgtatgtaaataca

SEQ ID NO: 60981 - DNA, 432 bp, Glycine max
  unsure (1)..(432): unsure at all n locations
atgtgggagcagaaacaaagtttattttttatatataagaggctaagaggcttgagagtctgattttaatagtgcacatggtacttgcatgatagtaccataatcactggtctaccaatcttagtgcaagatttttaagaataccttgatatgtgtattataaccattctttgttacacactctatccatggtcagaattacgtttacctggaatctaatctgatctctaattngaaccttatctagtacctctggtactctttaatatatatatgttatctttgctgcatgcacactctatacatggccagaattagttatctccaactcttattctatcccttcgctccatctctcacattcttattgaaatattaatctggcctaccttgttgaatatctagagtacactcagtaatttataataaaat

SEQ ID NO: 60982 - DNA, 407 bp, Glycine max
cgaagtgagaaagcgtggaagagtcagtcttcctacttttgtttcttgaccacaaagaggtacctggagatatatcgcggtggtcaggagaccttggggacgtcacgtggggtgctattgcccaaaaccaagcttgaccaatcccaacccaacccgggcatagtcagtcagtgagaacctgtgacgtacctaaacaggtgagctcctggcagtcaaccaataaaagaacaaagaccacaaagcaaggaggcttgtgtggtggctggccagctatggatcttgagtgatatatggaatagggcctctggtaatcgattaccaagggtgtgtaatcgattacaaggcttaaaaatgaagacaggaagttaagatggcctctggtaatcgattaccaagggtgtgtaatc

SEQ ID NO: 60983 - DNA, 439 bp, Glycine max
taaagtctggatcagtttatgaatattgtgactcatggtgcttatcttcacgaaatgatggttgttctggttgaccaagagatgcaacatggagttgtaaggcaagagattggactatagaacttgagcatggtgtggtggaaacagaagctattgttattgatggtaggtctgcacaagaattggagttagtataaggtagtctagaatcatatatactaactacatgttgtgtaggggagagaattgttttatgatggttaggtctatagggaaagattgactcctaaaagatacatgttgcgagataaaaaatttcttactagaaggatgaaatcatttatatgctttatgtatatcactatatccaacagagacacaagatatagttttagggtcagatcttgtacccatgtattcgaggtgttatgaatacatt

SEQ ID NO: 60984 - DNA, 499 bp, Glycine max
tattacgcgacctatgaaactcagcttcccaacatccaagcaaaacaacattcacacagcacatgctatctcagccaagcaaaacagagcaaaggcagaatactctgccaaaacaccaaccaaaaatcacagcttttaccactcaaagaccccagtaacaattccttcgttccaattcgttaaccgttggatcgactccaaatttttactggaagtctctaatacataagcctacattttgaccgttgggatctactagcaaacatccagaactcattctgcactgctctttccacaaccagcaaatgcctagtatttttctgcacttgtgcaaaatcctgctgcacaatttcacagcaaaaatctgcacaaaatgcagatttcgaaaaccacacttcccctcatccaatcttgcccaaatcagatcctacaagtcccaaatcatgtatcaatcatgtctaaaccaaggtcaagcttcacaccacagcaacacaaaatc

SEQ ID NO: 60985 - DNA, 341 bp, Glycine max
agctaacaagccattatctgttgaaccaataacaagcaccaaagagtggctggagaagacaccatcagacgctaaatactggacaatgtcgccataatggatcgaccgcatattgaaatactatctgtgacaaataccgaaatgagaggagaaagctacacaaaatcagaattcagaacactcccatattttaggaataaggcagaagaattgagccacacgacaggttgaagaggaatatgggttatctcaatgaacacgcgggagctcatggcataggcagtggtccaaggaagcgccatgcaacaattacagacatgtctggccatcaaagacactga

SEQ ID NO: 60986 - DNA, 475 bp, Glycine max
  unsure (1)..(475): unsure at all n locations
agctttangagataccatattaactaaagttgttcctaaacaaaaatcaattgaggaaactttgccaagaatccccattgaaaaacctttattcatacctntcaaagttagtgagaaggctaaaagaataattanggaacttagaaaaaataaatccttaattgaaggcgtaggtgacaaccatagtgaattactaaacaagattggtagtttacttatagtcattccagatacccgccaagcctcggaaaatacttccaaaatggtaacaagaagtacctccaaattaatcaatgttattaatgaagatagtgaccaaaactcagataacacaactgagataggatcagtgtcagaaaagaatataaatccaattaattccaaacactggaaaacaccctccaatatatattatcaacgttcaactgcccctgaccttctattagaagaaagaggtgaaaacaatnttaagagt

SEQ ID NO: 60987 - DNA, 482 bp, Glycine max
  unsure (1)..(482): unsure at all n locations
ttccttgcagacgtcggctaccattgggttcgatcagtatttgtcaatcgagacttttttgcggaggttggttagtgttttccatgcctagcaaatgaaaacatgccggtgtcggtcgaaacacaacatccgttgagctcgaacgaaaaaacctagccgacctacgttgtaaatttttacgtcaacaccgaaccaaaaagcattctctgccgtacgaaaataatatcggccagcggttgtaaaaaaaattgtccaaagtcggcaggaaaatatcagtctgcgactttacaacgaccgatgtcggatattggatcttagattaaattcctgaataatatatggatgatgtctaataggaaatgttcgatctgcgtcacccggtgaatcatgtattttcgcanagtttggttagagttttccatgcctagcaaatgataacatggtggagtccgtcgaaacacacaatccagttgtgctcgaac

SEQ ID NO: 60988 - DNA, 373 bp, Glycine max
  unsure (1)..(373): unsure at all n locations
tttggatcgatntaatcttttatttttttcaatctaatntgatcctctaattaaaaaaaaaggatattttgatcctcaatgttgataatttgtccataaagaataattagaagacttccaactaaaataataaatgtgagggggaaaaataatttaaccttcgttttcgtgtgactggngtaaaaaataaaaactatataaacaacgcgctgcatcaattccctccgctctgataataaagccactcgccgctctctgcaccctcctctctctctctttgggtatgtcgttttagatcttatcacantntacatttaaatatcaaatatttgttccttactaataaatgcatgagataaatcaatcttatgga

SEQ ID NO: 60989 - DNA, 420 bp, Glycine max
  unsure (1)..(420): unsure at all n locations
cttctctgtggcgtgatgaactctgtcgtgcaaaatggcatgttcattggctgacatattctcaattagctcagttgcctctagaggggtcttcagctctatttttccccttgctgaagcatcttgatggaagcttgcttctggggcttctatggaggctggatctttgagcttcaatgaggtcctttaatggtgattntccaccatggagatgcagcggaagaaaaatgagaagaggtgagaggaggcgccatccactagggaataagccatggaagaaggagcttcaccaccaagatgatgcctggataagaagnctggagaggatgttttcatggaggaaaagaaagatagagagaaagagaaaggtggggagcacgaaattgaagaagaacaaggagagaattgaacttgagttgg

SEQ ID NO: 60990 - DNA, 314 bp, Glycine max
gtacttacccgttgaagatcgaagaacgatgatatatcttttgaagaacgtcgaagaacggttgatacctttgcgagattcctcacggaaaacgttacggaaacgtttcggaagcgcctgggcttacatattcttcacggaaacaatttttccaagcaaattctaaagagagagaagtgcctaaggggctgaaccccttccttcttgcctttctgccctatctaaagcaaaataggggaggtggttgtcgcccaactcgcccaggcgagcagggttgttttctccataatcaaccgcctttcggaggaatattc

SEQ ID NO: 60991 - DNA, 366 bp, Glycine max
cttaagagaccccggctgcagcttagagaaccttatactaagtttcctattcaattcatgaggagctccgcagtgtcccacgaattgataacttatcaaaccttcaagtagtgagaagctaacgaaaataggtactaaaaaactaatcttactgatgcggagtgacatatatgaatactaacagatggtagttattatgcatccaaatctcccacctcgaaaacttcaaaggtacagagtcctcaataattatgataagaaatgtgccacctaataccactgaaaggacggcaaaaaaataatcattatcaacctgaaacccctcaatttacacgcactgccgccttttaaaagaggaacattaag

SEQ ID NO: 60992 - DNA, 478 bp, Glycine max
gattctcgagcatgcagaggctgatatataatataatgtcacactcctctcaaaaaatctgatttctagctggaataggtgggttggtccgtgctcgcgcgcttagcgcaaatttgaatcccttagcgcgcataagtggatttcggcttagcgcgcctctctcgcttatcggatgagctgaagcttgatgacctggagcggtgcgctcagcgaacctgatagctcatcttcttctggattcttccttgcgcttagccactgagtgtcgtgcttagcgaatgctcgctaagccagtagattggctctgctagatggcgaaaacaacacttttgtcaattttcctaattaacctgaaattgatagatattgattattaaacacacaaaacacaagtataatttatctactacctatatttaacagtaagtacttcgtatattacaaaactactatataatggaggatgttgatacactat

SEQ ID NO: 60993 - DNA, 376 bp, Glycine max
  unsure (1)..(376): unsure at all n locations
aaacagaacctattaatcaatcgtcatcaccgtgcccatcaaaataaaaacattttgtattagattctcagaaatatacatcatcgtatatgactatctaaatcgtgattagttattattttgggctaatatctagctatctatttgaggttaattctattaacttatatatagcattaaataaaaggtgacatgatatataattacacaatatcacaacagaataacgaattactatataatttaataaacccattatgatcgatgaatagtgagaggttgaagcaaaatatgaaaatntagggttgtttcattatcatcattagaaacataaaatatactatatangntaactatagaagccttcattattaaa

SEQ ID NO: 60994 - DNA, 478 bp, Glycine max
  unsure (1)..(478): unsure at all n locations
acaaccttntctccctctttggcaacatcaaaaagttaatgacctctggaatcaacacagatatgacagaggagtagaanaatatataaatatcagagtataaaacacaagaagccaaactcacaaagaagaaagaatcaaaccagaatccaaataactgaaaatgtcaacaatcacaaaacatccaagactgaaatttaaaaaccataagataaataagcaaagtacttagcacaataatgtatattctaagaaactaaaagccaaaatacacggcttataatagataaataatcagaaactaaaatctaagaagacggaggtggtggtggaagatcgaaactctgacgaatgtatccgacatcctcttcaagctgtgtaagacgaatgttcataccggcaaagcgtgaatctaacgagtcgaagcggcaccaacataagaatgaagaccccgtaattcgagaggactcattcatga

SEQ ID NO: 60995 - DNA, 295 bp, Glycine max
catgatagagcagacatttcactgtctatgatatcatggacgagaatggatgctcaagccaagcaccataaaacaaaagataccttcctgtctccgtctttctcaaagaagcaaggcacccttatatggtatcaacttatcacctttgcttctttgaggaggagcattatgctagaaacgaatatttgactacacaatactaatacttggtttatgaatgtgagtgagtgtagacatgttctcaagatgcgatccattgctcaagagatactcgggattgcatttccatctgcac

SEQ ID NO: 60996 - DNA, 453 bp, Glycine max
  unsure (1)..(453): unsure at all n locations
ttaagcgactgagcatgcactagatagtcccaatattgttattttattataaagcgaaaccaatcttggttatgcgtaacgtgccctagaacatttcatcagaacaaaagatgaaacctgtgcatctacatgtgaaaacaaatgctcagcttagaatagcaagaagcagtagttgtgctaagctcaatagttcaggctatgcacatatacatcactaagcgcagcatcaacacactcatcgcaaaggataatttgacaaagcatcaacatctaagccgcgcgctaagcacagcaggtgccttcagccatgctaagctcgggacatgcattaagcccgaatccacttactcgcgctaagcgcagcattgcgaattcagagcctatttaaaacctgtcctgtgcanagatagggcacacttctgacacctttcatgacagcttatacagaacggc

SEQ ID NO: 60997 - DNA, 447 bp, Glycine max
catccttatggctggcctccggacttcacttcccgtgtcccttatattatttaagccaagcccctactttcgaggggcagctcccaccttatgacgactatcccgggctagacgatgaggaaggagatacccatcttggtcccctgctccacctcaaagatccgtccccccatgaactaccccaaccaaacatagtccgccatatcccggcttcacccacacccgtataagaatctgttcccttcgtggaagataacggaaagattgaggcgcttgaagagaggttgagagcagtcgagggcctctgcaattacccatcctcggatctagcagacttatgtctagtacccaatatcgacattcctcccaaattcaaaggaccggactttgattagtacacacggacgacatgtccgaaagggcttctttcgatgtattgccgaaaat

SEQ ID NO: 60998 - DNA, 313 bp, Glycine max
  unsure (1)..(313): unsure at all n locations
aacccaatttcttgcctggatagaattgggctaagacaaacactggcgccatgctcatgcgttaagccagaaaactcgtgctaatgccaagcgtgctatacagcaatcttcaacggactccaattcaactccgtgagagctgctgcttcctcgccttaaatgagaagtccatccttgatcctcttggccatctcttcttgtagaaactcggctctagacctacanatcatgaagtattgctaggcccttacgttcattggattgccctctatcatattcattatgcaatactatgctctcgtcatattataca

SEQ ID NO: 60999 - DNA, 500 bp, Glycine max
actatagaaactcagctcgatgtcattcatacacactatgtagacctaaatgaatactttacattcatcgtcattcattcgattcattatgcgatataattcgttgtaacccgtcactaaccaattaatattatcaactactctgttggttaagcaaggaaattgttggtccaacataaatcatttacgcgtacagcatacatcattgtcataaatgacaacacataatgacatgcatgcgtgttacagtttgagcgcgacaacacattggttgacttcagtacacattttgaaactagcagtcgctcaacaacacattgtgtgactcgactacacattagcgacaacacattggctgacttgactacacattaacgcgtgtctattttattgtatacaaagataaacaaatgctctggcacaaccatctatatatatggcagactaagctactatatcacacattatcttggcttcaataaatatcacaactgatacac

SEQ ID NO: 61000 - DNA, 302 bp, Glycine max
ccatcaagcaataaactcattaagaaatgaaatagaaatgttatataccttaaagacagatcaaagccaccttctccaacctttccgagaatgaaaatgcgcgggcaatttaattgctgtgaggaaaacaaagctctatcgtgatctcttatctgggaatctgcaggcagccaagagagaccaagatatgataaacattcaaagacaaaatgtcaaaaataatgtgggaccgtgtgtgtttttagtggcgagggaaaacagaaacaagaattatgttgaatagctaacgacacatgacactt

SEQ ID NO: 61001 - DNA, 469 bp, Glycine max
  unsure (1)..(469): unsure at all n locations
tctanactntatacaagaatgaagctctgataccacttgttgtacatgtggcctcagatatcttaagaagggagaggggttgaattaagatattacaacttatttccccaattaaaaattctatttaactttctattcaagttataaattcccttaataattaatttcttaaatattgattcaaatagaacaatttgaatatgaattggtgtgccatcattttcttctattttctaaaccctttgtgcaccattttaattattgattgggcttaattgtcaattaattaggcacgtttattatttgggctcatctagctaatttgatgtttttaatctaatttcacgaattaatgaaacattgggcttaatccggattttggttgtggacttgaagaggacatataaagcagcgcttaccttagttaatttctaataagaaatattgcaatctacttcatgttgtcagt

SEQ ID NO: 61002 - DNA, 439 bp, Glycine max
  unsure (1)..(439): unsure at all n locations
acctctaatcaccgcagctgcagctttgcatncctattcatgttaatttttatttcaacaacaacaatatggctcgggctgatatccttatttttatactatagattatttattacatgctaattggcgaaatgtggatgaagccagcataatactagaacgaatagttcatatttttatgcttgcaaattaagttcatatatacactaatttggcataacagataaacatacaagggaatggtatcttataactatgcgtactctatacacgcagggttccatagagagagggagaatatgaataattcttctcatagtcccccctgatttaggttccaccctactgatgaagaacttgttgatactacctaatgaagacaattaccctaagaatgactgacctcgatgcataaaagacgtgacctctataaaatgag

SEQ ID NO: 61003 - DNA, 336 bp, Glycine max
  unsure (1)..(336): unsure at all n locations
ctgtatcgattacacatatactgctctcgattaccacagcttatattcgagaaatattctcaacagtcacatacttttatgaggttcttgactggctatcacaagcctatatatatgtgacttaacacactaatctgctaatagattttccgaacaataacgtcttatcctcttataaagaacaatcattgtatcctcttacacattccctggccaaattacttgtgattcactaccgaatcatctgagtgctcaaatcgntcaatctatctctatcaagagagattccttttgttcatcgtactcattctgcacaagggattaagagaccgaggg

SEQ ID NO: 61004 - DNA, 475 bp, Glycine max
  unsure (1)..(475): unsure at all n locations
atgcaagcttgactctcggncagtttattaanataatgcatcttgattacagagggataggtgcttcgcggttgagggatcgcttancgctgctatggccacaaggaattgggcttagctggcatgagtttcgcttagctcgatgaaacccagtttaagctgcaaagaattgagcttagctgccatgagtggcgcttagccgaaatcaaatcgagttgaaatcggtttagcttagccttggccagcttagcggatcacatcagcctgagatgcaagggatgagtgctaagcgctagagactcttggcttagtgcatgaccaaagatgcacttagcacgaggcttgcgcttagcgaaatgactantttttcagaaaaaaatntataatgttattttcagccccttccttaagagattgacacccttatatctatcattggaaaacaagctgatataccccantgtaatgattatga

SEQ ID NO: 61005 - DNA, 434 bp, Glycine max
  unsure (1)..(434): unsure at all n locations
tgcaaaacggttgctttgagtgctactttattttgtaactcttaaactcgtaagagtctatgagttgactctagagtttgataaccatgcatgcgccattatctttttcgccatgattaggaaacatctttcaaaatattaatttttttaaacattactgcacgtttctctatcttttaaaaaacctataaaaggcttagttgggcaaccaaagaaactcttttgaaaaacttgaactcttagaaatcttttgtaacttttacatcatttgagaactcatttcttcaaaattctctctctctctctctctctctcgatcaaaggttaaatctttatgtgaacaatggctcccaaaagaagtgatcttgttagggtttcaactatcaacagtgttgaagacgcanagattgctnttcctgaagataattcattct

SEQ ID NO: 61006 - DNA, 441 bp, Glycine max
  unsure (1)..(441): unsure at all n locations
agcttgcatacttctggggaatgagatgattctttgatngcccaagtcaaaaagctaagctggttcatggggtctttatcggggaaacaatgtgaatctgggcaaacatattgggtgtaaagtgtctgtctcgggccgaactcccatatcactccataaggcacgcgtgacaatgatgatttgaaacaacatgcaaaattagtcatggctacagccatgtgggcactcaagcatcccgtttatggcattgtgatactacgggttgtgatattacacaaacagacccaatgggtccaaattatgctctcccatcagatcaatgaattcatccattcttatttcggctatctcagaaaatatactcttagcgtcagtccctcgtttccagaagattatgttgctcttttacgaatgaattatgcttcttaactataacatatc

SEQ ID NO: 61007 - DNA, 465 bp, Glycine max
  unsure (1)..(465): unsure at all n locations
taacgttgagactaacaaggtgcanaacagagaaagggaaaatgtatagtttacacacaacatatatgtatcttctattttaatttcagaaataacctttgattgtggagcagttatacttggctaatcaagagaaattccacatagtggctgacaaaaattactggaaagctattggggagatcattcctcgagaggttcccaacattgagaatactagaagcaaataggatcaggagaataagccatcaatcacagtcgtccaaggcccaaagcctgtctaacccacagatctttctatgttgaggcagatattgttgaagctgaaacatacaccaccagctcacatgattccccctcctcctgcacctgctaaagacgccaaagatgggaaagatggaaaagactgataagaaacagcttctaaagctcatggatctgcaccagacgccgcacctgtatcac

SEQ ID NO: 61008 - DNA, 350 bp, Glycine max
  unsure (1)..(350): unsure at all n locations
gcaccccctttatactaaatacacccttggctttttttgctgattctttttccgtaacgttacggaaactaataatacgtaacatacttgttttcttctgcaatgttacgggaccttacgaattacgtaatcatcctttctttgccttccgatatgttacggaacattacggattgtgctataatgctntctcttgacttctggctggtctcggaacttcacgaattgcctaacgatgggtgccaagtacctcgaagtggcaaacgagggtcgcatcccaacaatggatggtccccggacgaaattagggtatgacagtgttgcttaatcacataatgaatgccttatgt

SEQ ID NO: 61009 - DNA, 459 bp, Glycine max
  unsure (1)..(459): unsure at all n locations
tatatgtcggagacatggtcatgaagtctcaaattgttgcccaacacgtggcagacctagaagaagtctttgtggaactccacaaatacgacatgcacctcaaccctgagaaatatacttttgtggtaggggaaggcaagtttctcggcttcatgatcactcactgagggattgaagcaaaccccgacgaatgcactggcatattggagatgcgcagcccgaccaacgtccaagaagtttataagatgaacagtaggctagcatccctgtccaggttccccacgaagctcgtcaaaaaggtgaagtcattttacaaactgctcaagaaaactaagcccttcttgtgggatgagactcgcaaacaagctttattagctntcaagaagaccatagccacaccggcagttntgagtcgacctaggccaagagtacctctactttgtatctctcagtagctga

SEQ ID NO: 61010 - DNA, 473 bp, Glycine max
  unsure (1)..(473): unsure at all n locations
gctctactatgcatagaataaccaaggaatatttctttatctgacttatacatcaacnttcctaaggtntctttttcattgattaatacaaaacgcttgcaaccaaaaatatgaaaatgcgggatgtttgggttcctaccgtcgaacagttcatattggatntttctttagaatgggtcttattaaagccctattcatgatatagcatgcagtattaacgacttcagcccaaaaatattttggaagaggagtatcatttaataaggttctagcaatttcttccaaagacctatttttcctttcacaactccatnttgttgaggggttctaggtgcagaaatagtatgttcaatgccatgcntatcacaaaatanatcatattctttattttcaaactcaccccatgatcactcctaatagatataattttgagatttttcttatnttgaataacttttgcatgtttcttatat

SEQ ID NO: 61011 - DNA, 475 bp, Glycine max
  unsure (1)..(475): unsure at all n locations
agaactgagggaaaatcaagaacaagctngcatgcatcattgttctgtgtatgatatccactccacaaggtttgaagtataggagagcttcaaccctataacgcaacatggcggacaatagtgggcagtaaactagaatggttgtcattgacaatgcgaaaggtattctgcgcttcactatccatgttcacacattattgcagcttgtggttacgtgagcatgaactactaccaatatatagatgttgtttatacaaacgagcacatcttaaaagcttactccgcacaatggtggcctcttgggaatgaagcggctattcctccttctgatgacacatggacacttatccctgacccagctacaattcgagcgaaaggtcggccaagatcaacaaggataagaaatgagatggattgggtcgaaccatctgagcaccgaacaaaatgcagtagatgtggagccgaatggcataac

SEQ ID NO: 61012 - DNA, 486 bp, Glycine max
  unsure (1)..(486): unsure at all n locations
agcttgtactatgatntatgaccaaccgntttattacagtgtggataaattaagtagcatatgaaatcacagggggaaaataacatggagagaccatatttaattaatcttgtactaccaaccgaaatattaacagtgtgcaaaaataaattaaaaataagatcccattataaaattattaggtgatctttcatcattatgtagtctataactntaactattctttatatgatacgaaattaagtattattaatattgtttaaataaaaaacttaaatatatatcatataaaaattattttagatgggatcataaatattatcatatttatttatatggtcaaagagtacttaatatattttcaaaaataattaagatggagagaggccatatttggagggctggcatntcttggaagctctaaaaggacaggaacagctacgtatctctgttggagaatgttcgaaagccatggtgtttgaaaat

SEQ ID NO: 61013 - DNA, 491 bp, Glycine max
  unsure (1)..(491): unsure at all n locations
tactaagctntcacttgngaatcactggagattaagaagaagatacattatatgtgaatcaacctttcttttaatgaggtctgtccattatctttctcattttatttccattactctctcatcatcccacacattccttcaccaataattaatagtgaaagtctcaaaagtaccatcacaaataatcctgcgtcatattgcgatgtggacactaacgataggattctaatcaaacaacatggtgggagatgcggtggttcacgacaatcttcaacgaacgatcttgatggcaacatttgtagagactctgatgaggatcggaagatgtgagaatgagtaaagttatccaaacctgagaggaaccctggtatatataagtgtattcgtagggaaaaactgtagactcattacgcctcacatgtgtagtcatgtgatcatcgaaatatctgattacttaagtgagatctattcttatctcaatatgtccttca

SEQ ID NO: 61014 - DNA, 303 bp, Glycine max
tcctctaaagactatagcatcatttctggcgctaaactgctgggagttggaacccatcttctcaattaaaatttcggcttctgcacgagtcatgtctccaatggctccaccactggtagcatctatgatacttctctccatactactgagtccttcctataagcataggacaagaagctgctctaaaatctgatggtgagggcaactggcacatagttttttaaatttctcccagtcctcatacaggctctctccagtgagttgtctaatacctgagatatccttcttgacggctgtggtgct

SEQ ID NO: 61015 - DNA, 428 bp, Glycine max
  unsure (1)..(428): unsure at all n locations
gacctctaaacgactgcagcatgcagcttgtaaaataatgtagaattctcatttattcatgtaaatatggacatatccattactactaattatggattgagatggattctttgtaaccatgattgatattattatacccttatactgaattacaaaagatcatgaatagacatacaacacacaacattagatatatcctttctatatataggatcaagagtttaagtttctttgttattcactccactctgctacatgtnggttccaattactggtgccatgacctgcaaccactggacatctcatatcccccaccaccatgactccttgctccggcgtgcctagncgatctgcaccgacgctttctgctctttcaacaaccctctacaaccattatttatgtgattccacgaggtcttcaaagcatt

SEQ ID NO: 61016 - DNA, 470 bp, Glycine max
  unsure (1)..(470): unsure at all n locations
tcatgctgctcaatcgctccaagttgctgcatggaatgtctattgtctgcatggtggncatcataggagcacaaaccacaaacccttgctacatgtacagattttggatacaaggccagtcgggttaccaagttaaccaatcgcatccagtttgccttcaagcttcttagtctcagacgatgcagctgagttagtagctacctcatgcactcctctaatgactatggcatcatatctggcgctaaactgctgagagttggaaaccatcttctcaattaaattactagcttcagcacgagtcatgtctccaagggctccaccactgtcagcatctatcataactccctccatattacttgagccttcataaaaatattggcgaagaagctgctctgacatctgatggtgagggcaactggcgcatatgttttttaacngctcccagtactcatacaagctctctcactgag

SEQ ID NO: 61017 - DNA, 401 bp, Glycine max
tccagctagtaataatttaaggaagaatagtacttggattcttatgttatatcaagacatggttgaggaaggcagattgcaatgccaaggtgcatccctatttaccaagcaggtcatagcctttctagttaggctctcaaattggcaccctagaactgtcttcttattagaggtgtgcatgttaaacatatttacctacaattgaagatgataagtacatattaaagacatttacctacagttaggagatgcaagtagaagttaatgacttctacctacacattatacatagtacggaaaacctatagtgatagacaattagtcgtcattatacgcctcctcaaagttgatggaataaacgttcataggacaaagtctatcatacatttacctacggattt

SEQ ID NO: 61018 - DNA, 409 bp, Glycine max
  unsure (1)..(409): unsure at all n locations
tcagcttgtctcagcgtttatgcgagacagagacttacatgctagctatcatcgcctagtacgaagaagagttgggtctagccatggcccacgagcatagaatcgcggatgagtatgcccaagtatatgcggaaatagaggctagaggaagggtgatcgactctttacaccaagaggcaaccatgtggatggatcggntcgctcttaccttgaacgggagtcaagaactttcccgattgttagccaatgccaaggcgatggcagacacctactccacccccgaagagattcatgggcttctcggctattgtcagcatatgatagacgttatggcccacataattataaatcgttaggaaacgtgtatggtctcctagaccttgactagatatgacttcctttttgaaat

SEQ ID NO: 61019 - DNA, 455 bp, Glycine max
tgagcttagctacacatacctctctaatagctaagttcaccttcttgagatgagaagctagagcttatctacacaccccctataatagctaagctcaccccatgacaaataaacatgataatacaaaaaaaagttcttactacaaagactactcaaaatgccccgaaatacaaggctaaaaccctatactactagaatggccaaaatacaacgcccagatgaaggaaatacctattctaatatttacaaagataaccgggctcatacttagcccatgggctcgaaatctaccctaaggctcatgagaactctagggccttcccttggatctctagcccaatctacttggagtcttctacacaatgcccttgccgagtaggatcgcataaatggggcttcattaattccaaattatattggaagagctcgaccttacaaaacgtcttaaacacgag

SEQ ID NO: 61020 - DNA, 478 bp, Glycine max
  unsure (1)..(478): unsure at all n locations
agctttacaagatttctgttnntgcaatagttttacttcatttatgaactcagtccttccttgacccgagaagcctgaaagtctcttcacagctattngttatccatcagcanaatttccctgtatctattggttactaaatgctatgcagaatattattacttgtcttgttgcttttctcttgtaataataatactcaaatagtaatgaattacccaatatacttcgcagcaaaaggtaaacgtagaaagacaaaactaactacctaatatacaggtccaaaaccaccttctccaagctaatgtcctctgagaagtcatttgaggcaatatcaattgcttgcagattacacaacgagagatccagatcttccacttctggtgttctctctaccaaaatggagaaaatccataagcaatatgaatttatattattcattntaagtaaaatatagatttgacccctaataaatacctga

SEQ ID NO: 61021 - DNA, 451 bp, Glycine max
tcagcttccctaagaccatctatgtcccaagttgcttacattctaagtaatacacattcagatgttcccacaccaaatcaacctccatttttgaacactggaatgcttgactcagatagttccattacgtcttatagcactaacagcttcatatccaatgccttgaagaagattggagtgtcctacagctactcagagtcctcacgaaattcagatgggccatcaagaagtgaagaatcaattatccaagtttgatttccatgaaattaaatcgcagtcttcaataacaataggggtcgaaacatcacagttttcaaggtttccgtgactgcaataactgtcacgttgctcacaattgtccacaatgtatggcaagatcatgattttgaaggtctcctgatggtgataacaactggcagttaaaaacattgtgatcgccaatatgttcctt

SEQ ID NO: 61022 - DNA, 501 bp, Glycine max
  unsure (1)..(501): unsure at all n locations
atcttaagcacctgagctgcagcttaaatgatttatgcgatatgcgtttcttggttccaanttattatctagaccacgtgtgccagatgttgatcttatacagtgttcccctaaatgtacttcccttcttttgggaatgaatgtggattactgttgctgcgttattttaagataggtttaaaaagctctgtgactgcaatatcatccgcaacgccaaggtttttggagtccttgccagcattacagtggccaacaacatagaagcctcaccaggatagcaggataaccagcatttataatctcttatacagtttatcatgtgtcttatctacacatagattgtaaatatataaaaattattcaaaattaatgacattcataattaacaataatagtcgtcactaccaaggtgtgtcttggaatctacacataacactcccatagtgctactatggatactatttggtcagctattagcactacattatactgctctattac

SEQ ID NO: 61023 - DNA, 438 bp, Glycine max
  unsure (1)..(438): unsure at all n locations
ctgatgatgtcgagaagaaatcacatgtttgtcatcatcaataaggtggagaatgtgaatgtatgtatacatgattttgatgatgtcaaagaagaatcaaacaaggctgcttcaaatgataagcatttgcttcaacaaacaaagccttgtttcaagattcactaaagaccaagccttgccttaaaacagagtgctttcaagatatgcaaggctctggtaatcgattaccagaagacagggttgagaaatagctgttgaaaaagattatgaatttgaattttcaacatgtaatcgattaccagcaacgaaactcctgaaattcaaattcaaaagtcatgactcttcaaattataactgtgtaatcgattactcaaacattgtaatcgattaccagtggaaagttntcagaanatatgctaacagtcacatcttttcatt

SEQ ID NO: 61024 - DNA, 472 bp, Glycine max
aaccacgagatcaacttattggttctgcacaattatcatcaagtactatatattaccaatataaacacctactggacaagaattagaatgatgtaaaaattctaattattcacctacaaataagcaataaatgagagaaattctaacagtttttatatgacttaatcataaaatatacctatgcacaacaattatcataagttagacttgtatgaatactgtgtgcttggtaaatacaccataatggggtttaaagctacaaaacataccactaagaggattctatattatgtgcatactgatgtgtgggggtctactaaagattcatccttgggtgattctcactatttcgtgacattcattgatgatttatctcgaaggtctggcgcacttcaaaaatacaatctaagttttgataagtaagtcgacaaactcagtacttagattggaatggtcaaataccagactactg

SEQ ID NO: 61025 - DNA, 483 bp, Glycine max
  unsure (1)..(483): unsure at all n locations
ntgcagcaacanatgcagtagccanaacatatccttcatatttaaacttatgttccccattgaggaattgaacaaggatgtcaataagaaatggtccaacataagaggcacatgtgtataggaatgaaaacaaacctgattaaaggatcccttgccatgttgacaagaataacaccttcgccagcttaagagtggtcacaatcctaacactaccacactctgactcaagtttggttctaaaagttggaaaaaccccataggcactgtcattagtagcaagaagtgggacgtcctgatgctctaatatcttctccttgcctagacttattaatggaccaatccatgagaaagtaagaatgctgaaaaaaatccagcatttgaataacgggttataatttcatttactctactcttactggaatcagaattggtgcatacactatagtcaccattcaaaagggactctgtaagagggttatagct

SEQ ID NO: 61026 - DNA, 408 bp, Glycine max
  unsure (1)..(408): unsure at all n locations
tagtgtgatcatgttggcgaggcttccctctaatgccagcgcttggtttgagctgcaccatgttttccttgtgcctagatagagtgaaaatgtcattcaccgtgtacatgtgtatgttgaatatggagctaaatgctttgcaaatgtacatatatgttgaaaatggcttgaaaatgcgcctcacagtatgaacatatgatatgaaattgcctctcaagaatgtgaatgagtactacaaaaattacttntccaatgacggtgcgatatgaacttgattcatatgagtgaagcatgtgcgaataaacatgaagtgcctctcaatcgttatgtaatgaatgtgtacatattcaaacaaatggggtacgtgggagcaaaaccttgaatatattatggatagttgacacatat

SEQ ID NO: 61027 - DNA, 463 bp, Glycine max
  unsure (1)..(463): unsure at all n locations
cgctcatagatttnctgtacatcgaattcacatgtcatggcttgtttgcacattactgctcaatagaagaagagacggatggttagcctatctacttcgatatcaaacactacattgaagacaaagaatattcctatgaggcctctaacaaccgactagaggatgcttgtgataagtttgaccgccagctttctatcctcgaatgggcaatatccttataacaagacagaacacaccgacaatgagacttgcttccacgtctgccatgccagagtcgtntagaacatgctggccgaggtacatgatggaacctttggaacacatgccaatggacatgccgtggtctgtaatattctgtgagcatggtattactggctcaccgtgtgaagcgattgttgaatccatgtgaagaaatagtataagtgccatgcctctgctgatatgttaatgttccacccatacc

SEQ ID NO: 61028 - DNA, 506 bp, Glycine max
  unsure (1)..(506): unsure at all n locations
ctaagcttgaggcaactggacccattctcacactgattcaaaaaggtctttatataacgctntgagagcttggaatgggccggtcccgatattgtggtctgccgatacagccgtatcttgaccagaacccattcactcacctggaactcgtggtccctacggtgtccgtcagcaatttccttcatacgagcctatgctttctgaagcttttgtcggagtagagcaaatatggcttccctctgactgaacagataatctactgccgcccaccgtgaagtgcccgtcatgtattgcggaaagctcgacgatttgcagccaaaaggtactttgaatggcatcaaccccatggctgagtgagtggacgtattgtatgaccacttcacccataataagaaacgtccccacgtacttggccggcggtgtacgaatgctcctaagtatagctcaatgatcctattggcaacattggtctgcccatccgtctgaagatgatacgcagaactcat

SEQ ID NO: 61029 - DNA, 472 bp, Glycine max
  unsure (1)..(472): unsure at all n locations
tataaaactcagctatgccggaaatgtattatgaaatgagatgctcttttttcaccctttcctagntaaccatgcattaagtacaattattttttaaagagacacgggtttatgatcccaacatggatggctcgcggtgcctaacacatgaaactaagaatgtagtgtgaagtttcacgcttcccccttttttgttcctgttttgtttaggaaaacgcacggatgagcaaacatgaaaacaaatggtatgcaattttgcagatcaaaatatttgttgaacgcatatgcatgatgatgccatgactcatgcaaaatgtgaggctggaatatgataacggacaaatgcaggatatgtccattatgatgttatgaagagatgcttatgcgatgcatgatatgaatgcattttactgacacgagagcccggagaatatctcttttacttgtgctttggggcgcaggcccctgtgta

SEQ ID NO: 61030 - DNA, 425 bp, Glycine max
  unsure (1)..(425): unsure at all n locations
tctccattgcactgaagaccgtgacaggcactttttgtctatctatgttcggctattgaacggaagactgtgaccgctctaagtntgtttaacgaactcgtggttcatctaaggaccttatttatggttctggcgcaaagattggcgaactggtggtcacctgatgtacatatgactggtatgacgtggtctttgcgagcatgtgatgtacattatacatgatgtacgatctcaccggcattgccactgttgagttctacgtaagcttaatcgctttattgtaactttgtgcttccgcgtacgtggtcgttgtgctctntgctcatatagataggcaggtagctacttaataagtcactaatactagctatggtctggaatgcaggtagtcttgcttggatagctggataaagatattgccttat

SEQ ID NO: 61031 - DNA, 188 bp, Glycine max
tgagcctgaatatgtagttctatccttaagtcactcttttcttctagatagaaacatatccaagagagaagctagcatgtgcttggcaccccttccttatgaccttctgagtatgagcattgttgtaaaaaaaatatcaatgaacgaacacatttatacatgaaaaagatattcgcgcattgctactt

SEQ ID NO: 61032 - DNA, 434 bp, Glycine max
tgttgaagaagctatactgtgatgcaagctgaaccacacattttgtaattcttgacaggagatatcttcatgtaaagtgtttgggttggaagaatctattgtatgggttgagaccatgtaatttcagtcaatctctacatgacacattattaactctttctcctaaatcgaaaaatgtagttaagtgtcacgtggagattgactgaaatcacatagtcccggatcatataataatttatcccaggcaagttgtcttctaaggccaatggacacaaaccgtcttataagaacatctgtgtatgtcacacaagatcaacaagactatttccatcacttacatgtaaaataaaataaaataaaagaaatagacatgtagatatatagtgctttgctggttgatgaaagagctttggttggattatatttgtaattca

SEQ ID NO: 61033 - DNA, 468 bp, Glycine max
  unsure (1)..(468): unsure at all n locations
cgttcacaaacactacttatattatgtttaaggtcttaattaataaaaatcatcaatcacaataattctagacaacgtctatatatatgatgccaatggtacaaggattaatgtgtttacataccaccatctttttctttggctgccacacagaaatcttgctgaggactaagatcatacgcagagacaagagaggatgtcaaagccaagatggcaacaaggaagtacacaactttcattgtttttccttagtaatacactcttaaacaattgtgctatatgtaattgcttgtgatgattgaattgtgatttatgtagagcttgctgattgctatntataagtatgaagcattgaatcggttcgcattntatcttgaccgtaattaattatttatgtgatgaggaatcattccttaacaactacatgcgtgcctaatcaatgtgtagacgtagtagtagacgctctac

SEQ ID NO: 61034 - DNA, 364 bp, Glycine max
  unsure (1)..(364): unsure at all n locations
agctganatagacaacggacgctcttgattatttcatatggtcataacttatgacgagaaggtcagactcatgcacattatatatcgagacgcttgacattaaataacggaagctgtcgagaaatgcaaatgcctcttactttccactcggaggtccgagtcaagcgcataatatatcgagaagctcgaaattgaacaacggaagctctcgagaaactcaaatggtcataacttttgacacggaggtcatcttcatgcgcataatatatcgagacgctcgaaattgaacaacagaagctctcgagaaactcatatggacatgactcttgacgcgaatgtgagaacacgcgcataataattcaga

SEQ ID NO: 61035 - DNA, 381 bp, Glycine max
  unsure (1)..(381): unsure at all n locations
nttagctactcaagatcatacagaaagcggcactatcatgactttgcggttcctcatgatacgggccatcatatctatcatgtgctgaccgtccatgagtaggctatgaattcctggaggggctggacacactgttgcgatgggcatcgcattggctactaggcttgggacgtcatgactagcaatataaagccatgcgaagctattcatccacatgggcgcttattaatgcaatgcctcaaccaccctcccgcgtgcttgcttccaggtgtacgctagcacgaagagctttactagtggttgtatattcggcaacgactggtctgactcttccttgatccggctatgagtgtagtatgccctctagaggattcaaatttg

SEQ ID NO: 61036 - DNA, 492 bp, Glycine max
  unsure (1)..(492): unsure at all n locations
agcttatcacttttacattaaanaatatatatctttcttttctagttgatatcattacatatgtgcgttggtgaaatttaaatatgccattctactgtttatggaaaaatatggagaaattaacgaggaaattaagtcaaaagatgggtaaaataagggaaaagtgcaatgcagccgcaaggttggaatntatactgtgccataagcccataaccataagagtaatcatatttcaatattccaacggctgctacatctttttttccgaaagctgctacatcttattattgacacttattacttttcgagtttaataattatttgtgacaatataaaataatcatcacttaaatagactattattgatataattaattttaaataattattttaaaaggtaacaaaataatcatacataataatatataattaaacaataaaanatacataattgtgtatcacttaattgtgcttatattttgtctcttttcg

SEQ ID NO: 61037 - DNA, 237 bp, Glycine max
ccaatttcatagaagatttttgtgttaccatacacatggtctttatatggggccatgcccccaatctacttgggcggtcttgaaagaccgcccctttgaaatgtctgatgctcttcaaacattaaatgactaaactgctaacaagaccatagtcttcaatggactggaaaccagtatgccagtcactcccaaaacttttgaagaagtacattctatttggttcccttttactggaga

SEQ ID NO: 61038 - DNA, 280 bp, Glycine max
  unsure (1)..(280): unsure at all n locations
tgtataaacctcaaaagactatgaatggcaaacctttttttttttgcttggtttttntatctacacttttttgggacaaaattcaaatttgaatgcaaatatgtgattgggaaaatccaaatctagattgaacagaatttggctcaattgaaacagattgttcttttttacttcttcttccttttgcctatttgatctattatataaaaagattaaatttgatctaaaagtcataagaatatgactgatgataaacaaggagagaatatattaagtaaca

SEQ ID NO: 61039 - DNA, 443 bp, Glycine max
  unsure (1)..(443): unsure at all n locations
aggctgtaggctggagcagagattttgttgtgacttgcgctctaagggtaagcagctgcatcataagttgaatgaattggaagattccatgtctcaccaaccttgtaaccagcaagtccttcagttgaagaatattcacgctaagctatgggaaaaggctaacttgcacgaatcctttgttaggcagaaatctaaatgtaaatggattaagacaggagatagcaacagctcctatttgcatagaattatcaattntagtaggagaagaaacaccttgagggggctgatgatggatggtacttgggtagaagaccctgatctgattaatgatgaagttctacagcattntcagaacagatttcatgaaccccattcaagcagacccaacttatatggagtgcagtttaatgtcttatctgatacccacacggatatgttggttc

SEQ ID NO: 61040 - DNA, 489 bp, Glycine max
  unsure (1)..(489): unsure at all n locations
cagctttaacagatgtcttacaaataatcattacacagcagaatatctacaaaactacccatcatatctcccataaccccatacccacgaaaatcaaaggggaaagaagtccacccaaacctgaaatttcgaagtcccactcgtagccatgcacttcacgaccccgaaaatgccctcctttcgcgatttggggcagaaatgatggccaaaggttgaagctttgcttggagcttcaatggaaaatgaagaagaagacaatggcaacgtgagggagagagagagctgtctgaatagctttttggtcttaaataaaagggttttctctatctctattattttatttaagcaatgccacatgtcttcatgtgagtggagcataaagggcccactttccctttatgactgtnacccatactcagccacaaaagtgaggaaaaatctgatctttgaaacgctaaaatcctgcctctgtttgcgtgccatttctct

SEQ ID NO: 61041 - DNA, 460 bp, Glycine max
  unsure (1)..(460): unsure at all n locations
tatttgctataaatagggggagaagtgaagaagatatgggttcagcctcttaggcacttctctctctctcganaatgctgaggaaaattatttccgtgaagaanatccaagccgaggcgcttccgtaacgtttccgtgagaaattacgcgaagattctcgaccgttcttcaagattcatcgttcgttcttcgttntcttcaatcttcaacgggtaagtacctcaaaccgagcttttcaattcattctatgtacccgtggtggtccacattttgtttcatgtatttttattctcgttttcattttctttntatacccccttttgacgtgcttaagtcatttatttaagtcatttctcgcttaatctanaaataaaataaatttccaccgatcgtttgaattgtatcatccgctaattntggttaaaatgaattccgaccgttcggtcgtgccgtaaccacg

SEQ ID NO: 61042 - DNA, 443 bp, Glycine max
  unsure (1)..(443): unsure at all n locations
agcttctccgaagggcatggttatttccagtttcctatatatatctaaaaatctagccagatgacgatctttttctttcttggaaggtaccacaggatatggtacttccacaccttcatccacaactgtttcactcctactcttctttgcattcttattattcttttcttctttttcatttttttcattttctatctctttttctacttcttcttcttttcttggtccttcaattctntattcttgaccattatttgttcctctttttcttgattactttcacctctcnacctcattttcttgtcatcagtactttgttttgtcagcagttttcttcttatgcacaacactatccttatcctcagcctccacaaaccttttacttcttgtcatcacangtttgcattcctccttgtgattgtgtcagtatttgcacaaaactg

SEQ ID NO: 61043 - DNA, 433 bp, Glycine max
  unsure (1)..(433): unsure at all n locations
ctctacatgcattttctacatcttgaaagagactattatgatctcaaganaactcatcaagctcatttagttgattttgtcctaataaacacttcacttggtaatgtacaagacacatatgtttgtgaggaagtcaatgcattactcgacgaagaggtctctagtagacccaagactcttcttaatgattttcaagacttgtaagaaaggatgaaatccttaactgaagctcttgaagatctanaagatgaacgcagggaaatccttacacaaaanatcttacttcaaaaagaatgcacccttgctaataatgaactcgagtaagtggagaagaagaactcatatctctggatggaatgtctactttacataaagatctcttctgatttaaaataaatgcttaaaggacgtgatgtcttaaaggaactacctc

SEQ ID NO: 61044 - DNA, 432 bp, Glycine max
ctcggtaaaagcgccctcctgcattcgttaactgttggatcttttctaaatttggtctgtaggttcataggacaaatgtccatgaattgaccattgtgatctgtgatatgtcttctggtgtgtgagaaactcttcttttcccgagagcagaaacacttgagtgtttcaagtcttatttttcgtgtaaccttggaaaatagccattcctttctccttctttcttccaaaacccttccccaacatcccaagcttcttctccaacacccacaaccaccggtggccaccacggaccgctgttgttctccgttgaaaccccacaccgagaggaacccttcaatcggagcagaatcttctaaacttgtctcgcggtttcgatagagaacgaagcccaatctgaccttcatggtcttctttgaggtaaccatgattcta

SEQ ID NO: 61045 - DNA, 480 bp, Glycine max
  unsure (1)..(480): unsure at all n locations
gcttgatggttgagataatgagttgatggtgatggagagaangggcatgaaactttgtggctcacaataagattgaactttgaagtgtaattctcacatgatcaaagttgaaaaaaatgcaccatatgacctatatntatagcctaagtgtcacacaaaatttgaggaaaatttgaatttctattccaatttcacctgaatttgaaatgaatntgtggagccaaaatttcactaattatgattagtgaattttagatatggttcagcccactaatccaagatcaagtccaagattctccactaagtgtgcttaggtgtcataaggcatgtaaagcatgaaggacatgcacatagtgtgactatatgatgtggcaatggggtgtagcaagaaaatgctcaccttcccctctaaaattaattagattgggcttctcccagttcaattaaatntattgtccaacacacacatcatatattcat

SEQ ID NO: 61046 - DNA, 339 bp, Glycine max
aagcccactagcccacgcacctccccaactggtgggagttctcagtcagataaaaacgtgtcttaatctgctggtataagtggagggggtcctgctactgtgtctacaccactccggtgtgggaagtgtggtcagcttggccatattgctcattagtgcatagatagagaggtgacttactttaactgccaaggtatgggccacattagcaccggttgcccaaaaatagatcttctacggattcctacacatgtttattctaatccccgagcacaagtaactcatcctttatcttgatgtagtcgctcaagtgtactctattatcaatggagacatttc

SEQ ID NO: 61047 - DNA, 480 bp, Glycine max
  unsure (1)..(480): unsure at all n locations
agcttgatgcttctacttgtgatgaaaagattattatcataaaagagaagatgtccaagctctgtgatgaatatgtgatggtaaagtcaagctcatctactgcatcaagttctcaacaacctactgttgaagaagatttcagtatagaagaaaatcaagagatggatgatccatataatgttagtcttttggttaactatctaattgttgtatgattcaatttattntatttaatttttctcttatattgtcataggaatatatcaattatgtgagccaaaatgttaatgtcaatggcaagtctgaattagatctctatttggctgagacaccgcttgagccaaagttttttttcctaanatggatattttgagttattggaaggatcgccaagaacattaagcattcctataacgactggtgctagtgaatcagcatttagcattggtgctcgtgtgctaaacaagtatcgagctagtc

SEQ ID NO: 61048 - DNA, 434 bp, Glycine max
ccataaaactcagctagttgtgtttaagtgctggtctgtgttgtctgattgtcttttctgtttgatttcaatcttgtttttatatctctgatcagttattatgatgtttgattacagtgtaatttttattgaatgaatgaaatgctatgttattttccattgtcacatcatttgtttgtttgtttactctataagtaattgtgactttgtggccttgttatgtcaaaagcgggagaaaattgcattagcattgcattaggaaggattagtgcactatatatatacattcatatacaactctatctaatgatgatgatgataagaattgacacttctcttagtgttcagaaactgataagtttctaagaaaagtctttactctcaagactctcctaatgcactccaatgaaatttcatgtgtggcatcatcagag

SEQ ID NO: 61049 - DNA, 60 bp, Glycine max
  unsure (1)..(60): unsure at all n locations
ttgtngtctagtgctgctatcaattatcatgattattgctaatcatcgtattctggcatt

SEQ ID NO: 61050 - DNA, 312 bp, Glycine max
cctaccacctaaaccagctacctccgctttaaacaagggtgtttgctcccggtaattggccaatggaatatggggatagcaacaccgaaccattttaatggacggtaaagaatgtcaaacccttcgagggacttgcatgaatttgatgaatttttgattcatgagtggaaaactaagataatcttttttctgtaggtctaattaaaaaggtggtgcataaacaaaggtaagttcgtgaatctaggataaaaaagggaaaaggagtgacaattgaggtatcccgaacatttaattatctattgtataaaatac

SEQ ID NO: 61051 - DNA, 386 bp, Glycine max
cggacactataaaactcagcttagggacaaaatttaaaagggggagagttgtaatgctcttaatttgctaactataaagcgatggtaattgttttattgtgtatctgattatatgatcgacttcataagttgagatatggtgcgaattagacatgtgtgattccttgatgtggatgttgagttatgtggagatttattgacataagttgatgatgcactccctcccccctcgagcattggatccaagacccttctgggtcatggatgctggagaatgccccttatctgcatgagccttatggctgattgtgagctcttgggctaaatttatctctcttatcttttacctattataatacggttcgattctttcggtctctatttta

SEQ ID NO: 61052 - DNA, 445 bp, Glycine max
agcttgtgagcgtgaagaatattttttaatataaaagcacacaaggaggcaccctcagaagtcagtaagcactcagagattcatatatctataacaaaatatgattgcaaacaacggcatgaaaaaagaggtgccatatatgctaaaacaaaaaattaaaaatactctgaataagtgcacaacaatagaggcgtcataagtgccagaaagaaaagtgtcgctagaggaataaatgctgaagaataaataagcctaggcaggagataagctgacaatatttctaaagatgcatgctctcttataatcctaagcgtttgaaaccccagacaaaccataatattttgtttagccaggcccacactcaccccaggcactagtgcgcagagagaaacactaaccttgtgaggatagagaggcaagccaactagataatgtattaaccaac

SEQ ID NO: 61053 - DNA, 481 bp, Glycine max
  unsure (1)..(481): unsure at all n locations
agcttcaacatcagaccacttccagggtgctgtatctacttcacatggacttgatggggcctatgcaagttgaaagccttggaggaaagaggtatgcctatgttggtgtggatgatttctccagatttacctgggtcaactttatcagagagaaatcagacacctttgaagtattcanagagttgagtctaagacttcaaagagaaaaagactgtgtcatcaagagaattangagtgaccatggcagagagtntgaanacagcaagtttactgaattctgcacatctgaaggcatcactcatgagttctctgcagccattacaccacaacanaatggcatagttgaaaggaaaaacaggactttgcaggaagcagctatggtcatgcttcatgccaaagaacttccctataatctctgtgctgaagccatgaacacagcatgctatatccacaacagagtcacacttagaagagggactcc

SEQ ID NO: 61054 - DNA, 475 bp, Glycine max
  unsure (1)..(475): unsure at all n locations
gaatgagttagtacttagtggagtgctatccagtttttatgattngatcaactagctcagntattggattgcctttggagtaccaagttgtttgatgcatagttactacttactagtaccgcaggaggctaatatatgtggtatgaccatttgagaaaaggaatgctgaaactcactcaaaaagataacaaatgataaatntgctttagcttctctattaactcttcctttgattatcaatacttctgttaggaaagagcacagatgttcaaagagaactcataatggttcacataatatgtaatctaattgaaggaaaaatttaatttaatttaccggttcccaactggatcatccttgcggccaaacacatttatggcatgctcaattatggaagtaaccttctctcccatttcaatagcatgaacagaanagctgcaccagaatgttcactgtcagagaaacaaaagatagt

SEQ ID NO: 61055 - DNA, 469 bp, Glycine max
  unsure (1)..(469): unsure at all n locations
atacantactcaagcttacaagtgagcttccatcaagtggtattagagcacaagatctctttgttgttctccttaaacctccattaatattcatctttaccttctcctccatcgatgattcttcatttttctccatgtatctcctcacatgtcttgtgctaaattctgttaacatgattctttagaatttacaccgattaaacttgctatagaagctagatctgattctctatggttcaaattccttgttctttgtcttgaaccatgaattgtgctgagtttaggttcctttgagtcttgtcttgcaactttattggctgaaacctaaaccataaaattcttacaaacacattaaagttgaaaaaaacctcacaaatctatagtgacttgttcacctattgtagttttgtcaaagaagtcatgtctagacatgaaacttgtcacataagatttcttatgttgtgctgaa

SEQ ID NO: 61056 - DNA, 342 bp, Glycine max
acaaagaataaagatggctatgtggaaataactctctaataccatcttcaaggaattcaatctaaactaggaagacacttctcaaaaactataatacttgtgtgaaacgtgatgaaaattctaccttttgacttcacgagaggggacaaacgcccacttggagggattatcttcatcgaactctatgagagagagatttataatcatcttcagcatttctcgtaagcacatggtttatgcgcccatagttattgtgtagctgctgtagtttatattattctaatatgactctttattgctcttattaaattcattttggcagatgtagctgaatttattata

SEQ ID NO: 61057 - DNA, 260 bp, Glycine max
  unsure (1)..(260): unsure at all n locations
agcttgagatgaggaagtgttgaaaggtgaaacttcctttttttattgttgaccacagagtggtacctggagatatgtcgcgggggtcacgagaccttggggacgtcaggtggggtgctattgcccaaaaccaagcttgaccaatcccgacccaacccgngcatagtcggtcagagagaacctgtgatgtacctaagcaggcgagctcctggcagttatcagataagaggaaaacaagaccactaagcaaggatgcttgt

SEQ ID NO: 61058 - DNA, 452 bp, Glycine max
tactaagcttgagaagtggtcttacatgcccaactctcttgaatggcatttgtattgattgttgtactatgtgttgcatcttagtcttcatcatttcataggtgcatcatgcatcgccatgtgggagttagaagaaagtttctaaagttagaaaatttattctatagttaaaactctctattttaatcgattacaggctgatcgttatcgattacacaagtgcttgaagcttgcagagaagtgtctcatatcagtttaatcgattacatgcttatcataatcgattacatggttctttctgagataatgattgatttttcaggagtctttgctttaatcaatcaccatgtgatatagttgattacttctctcttaaaaagtgtttcagaagtggtcaagaacactgtaatcgatcacattgagaatctaatcgattacatggtccttgaaat

SEQ ID NO: 61059 - DNA, 288 bp, Glycine max
  unsure (1)..(288): unsure at all n locations
atgttcatcttctgacccagtatctttatctttatctgacgacacactnagaagagataccttagtaaagcctctaacacactctctctatatgtagcgcgcgattccatgtcactagagagtcccaccaccgatcctatagatgaatgtctctcataaaaatagtatagccgccgattctagatcaaacacatgagatgcgtaattcgctacgcatgatggggatccaatatctatagtggtactaatacacactaagaaaatatgctttggtcctgcaacaaactc

SEQ ID NO: 61060 - DNA, 261 bp, Glycine max
attgccttcctcgcccaataatatgaccagccggtgaggtgctctacctcttgtgacttccagctattacaagaattagaccacagaatttctaagatggccaaatcacaggaattataccacacaaaacaagtcgaaaatggggtgggtggagtacccaagaattgtttggaagtcaaagcaataatctcggctggttaaggcgaatgggcgccgttcatagacattctcacgcatttgatcttcggaggagtcctcttt

SEQ ID NO: 61061 - DNA, 137 bp, Glycine max
ctatgtacccgtggtggaccacagtgtgttttgtgtattagcatcctcagatcattgactcattatacctccgtgagacacgctaacgccattttacttaggtcatttatcgcttaactatagaaatgagatcaaat

SEQ ID NO: 61062 - DNA, 447 bp, Glycine max
  unsure (1)..(447): unsure at all n locations
tgcaagctngtagggaaaacgattgttcaccgttatttggtcttgggtttcactgtattcaaatcattcttcttctttattttatttacggtgcaaaattaattgcggtcactccatccacattaaaatattcactttntatttaccaagaagatatagaaggttcattttggttaagatatctttaggttcattaagatatagaaggttcanagcatttagtcttttaagaattgttgcaacttgcttctttgtagttccccccacatgcaaggccacanttaacggatgcattagcagtaaaatatgtactaccttacactggattttctttangaagcatggnaaattatggttccatctatgcaagacaagatgcatnacaggtttattgnaccaattaagtcaactacaccattcgcaaggtaaagtttctttgattgcaac

SEQ ID NO: 61063 - DNA, 482 bp, Glycine max
  unsure (1)..(482): unsure at all n locations
agngctgaccgttaagcgaggtgatgtgctggacttatcttgtacgctaagcgagatgtcccaatcttcaactttttcttcaaggctttttctttacgttttctcatcaatcnttctctaaacacttgtaattcttcttcttttaaatcctgttggtaaaaaattaacatgatattaaattcctcattatttcattaaaaacaatagtaaattaaaggaattctaatcattattagtcaaaattgactatcaattaaacttanaattcacagntatcacatgaccgccaccgcaacaccaccatgattatcaactgccgtcatcgntgtcactaatatgactgttgtcgttatcattgctgccacaaccaccattgtgaccatcgtcatgaacatcgttgttgtaccaacatgattgttgcatcaccatcaccaccatcatggtgtgagcgacgatgatggtcatggcgacaatcatgatag

SEQ ID NO: 61064 - DNA, 368 bp, Glycine max
agctcatctctcttttacaacacataaacttttctaccagcccaacgtgcctactctactttccatattccgacctgaatggggaagaagaaatctataagacactgagactatattgcacatgcatgctaagcctcatatggatgtggatcttgcttcaaagtgtagttaatctaaatacattgctcctcaatggcttacacattctcatatcatgaaaaaactatggaccgatggtaagccacacacttactatatatcacacaaaaaccctattataaattgaaatgtaacatacattcatcatatgtactgtagtcactattaatcagaataaaatcactagtacaaattatatatgcttactt

SEQ ID NO: 61065 - DNA, 415 bp, Glycine max
  unsure (1)..(415): unsure at all n locations
ntgtacaagaatgaagtattgtttcattatttacccttactaatatacaataagtatctatttggctttatttaagtgatgtctaatgctcttagactttatttttnttacatcaccgaaaataagtgaatgattactaacaagggttaaattggtatattaataaaaaaattatagccccatcaaaccaactagtgtagaaatatttattaattggtccatgtaaatatgttacaaatgtcttattcttatatattaaacaaaaggaaaagtaacaattaaaaaaaaagtaatcgaaagagcctctattttgggaagaaaaagagtgcgccaaaactctcttactttatatatcatccatctcatattatatgaagcataaggtgtagacacatgtgtattaacaagaagaatg

SEQ ID NO: 61066 - DNA, 411 bp, Glycine max
atgaactgaaatgatctcatcatatttgattcacttgcatttatgggttgtcttaaatgtttctagctcttacaatataaatgttttttttagtcttacatttatgaaaatgccttatatataaatataaatataggacgtatttatttttagactagaatataattttggctcctcattaattgttaagtttagttttataagttcaaagtatatttgctatattaagttgatctttccgtcaatttataagactaatttgatctatctaatggcatctaaccatggttaatcaaattgatgagagaatcattgtgagttaaagtaacattctgagatcttaaaatgaattcttgttatacttgagagatgacattcttttaaatattagataaagactagattatattt

SEQ ID NO: 61067 - DNA, 321 bp, Glycine max
  unsure (1)..(321): unsure at all n locations
agcctctcaagagacctactctctgtgactgttttcaagacatagtcttcttggctgcatacactgaacacaatggaccaatgttccttgtgttcattgcaagaagaaagatatgattccttggtgatcactaaacacaagaaaccaacgtcttttaaggtcattgctagaagtgggtagtactttctggttgttatcattggacacaaggtaccaatgttccttggggatcattgcaagaagagggaataactctttggttgtnatcactgaacacaaacgagggaagtcctttgaggttcattgcttgcaaaagatttt

SEQ ID NO: 61068 - DNA, 460 bp, Glycine max
  unsure (1)..(460): unsure at all n locations
aggatgctntagtggagganaagaaagagagatgggtggagcacgacattgaaggaataaaagagggagagaagtggaactttgaagtgtatctcataagactctcatacatcanagttacaacaagtgttacacatacttctatttatagactaagtaactttcttgagaagctctcttgagaaaacttccttgagaaacttctttgagaaaacttccttgagaagctagagcttagctacacacacccctctaataactaagcttaccttcttgagaagcttctgtgagaagattcctaaagaagctacggcttatctacacacacccgctataatagctaagctcacccncatgccaaaatacatgataatataaaataagtcccaactacaaagactactcaaaatgccctggaatacaagggctaaagcctatactactagaatggccaaaatac

SEQ ID NO: 61069 - DNA, 469 bp, Glycine max
  unsure (1)..(469): unsure at all n locations
agcttaagctccttcatctgcacaatggctcttaatattngcagagtattcttgtggaaccttcacctgacgaagacactgacaaaaacttatcttctcctttttggacacagtatgacaagcagggggcatgtaaattatcttcccatcagaccttggatgcaactgtgatcgtatccgcatctcagctagatcttgacgggtattcaagccatccttcatcttgccttgaatgtaaggagcatcctaatcacattgtcacatacatttntctccacatgcataacaatcagacaatgtctaacgtctagatcagaccagtacgaaagatcatagaacatggaactcttcttcatatgcaagtcatacttttatacttcttctgggctttccaagacagtactcaagtgtagacatgctgtatacctgctcacattcaaggtatggtgcaatatgtctcttgctacat

SEQ ID NO: 61070 - DNA, 399 bp, Glycine max
gacactataaaactcagctttcgcaagctactgtaaatctggacctcctctggtttaactctctacgaggccattgtctccctcatccattattatgatcagccattgaggtgcttcacctttggggacttccaactatcacccatggtagaagaatttgaagagatcctatgatgtcctctagggggaaggagaccatacctcttctcagggttctatccctcatcagctagaatatttaagagtccatatcttggcgcatgaattataccacagaatgcccgtttataatggggtggttggaatatcgatataatatttggaggcaaaagtgagaatcttgtctcgtaaaggcgaatgggcccctgtcatagacattctcgcactggggatcttcac

SEQ ID NO: 61071 - DNA, 92 bp, Glycine max
  unsure (1)..(92): unsure at all n locations
actcactgcaagctgtacctctttcacaatcagaatacggcgagctcttgtttctttactgtacccatctctaatatatcnatgcatacatg

SEQ ID NO: 61072 - DNA, 366 bp, Glycine max
  unsure (1)..(366): unsure at all n locations
gatgttctcctatccaaggctggtgaagaaagagttatcagtagattataggcagacttagtggtatacaccccacctaggtcagctttccataacataacatctttaacatatctctgaatgtacatggaattgatctcctccataanattcacagcttgatcactctcataatcaaacagattcctccgncacttgagattccaactccacctatcttggtcaaaagtcctcatcatagaaatgagatcatcttgcttgtcattgatgagaaacagctgattgtatttctcgtggagagtaaaactcttctctatccacttgtcttccagaataaactttatcccaaacccaccttcatctcat

SEQ ID NO: 61073 - DNA, 136 bp, Glycine max
tgatgaagatggtccaacatcttgcaccccgtatgtttctatgcctgatgttgagaaagatgttccaacatcctcctgcccacatgatgaagtactctctttcccccgccgagagagatcaacagaggaagatgat

SEQ ID NO: 61074 - DNA, 431 bp, Glycine max
  unsure (1)..(431): unsure at all n locations
atcctctgagtcacctgcggctgcagcttctacattcaatttcagctttcnatatattacgggactctttctgtcatcctattaaaaagttattgtaggtcgaatctgctcagggcttcagtattccatctcgagcgtctcgatatattacgggactcaatcggacatccgagtacaaagttattgttgtctgaatttgctcagagcttcggtattccatatcgagcatctcgatatattacgggactcaatcagacatccgagtaaaaagttattgtcagttgaatctgctcagggcttctgaattccatgtctcgcgtctcgatatagtacgggactcaatcagacatccgagtaacaagttattgtcgtctgaatttgctcagagcttctacattcactttcagcgtttcatctattacgcgactcat

SEQ ID NO: 61075 - DNA, 186 bp, Glycine max
cacatattttctcgtgcgatggtcctattttttcgctcaatgatccgacgctacaatcaacaatactttctcgagttgatggtccgtattatgaaactcaatgattgacctaccatcaacacaactttactcgagcgagacccaaaatgaagctcagcgaagatactttgcaattaacacagactt

SEQ ID NO: 61076 - DNA, 353 bp, Glycine max
  unsure (1)..(353): unsure at all n locations
gtcaccgcggctgcaaccttcatcttttacttcattatctctataaaattgtatttaacatctgatacgaagggtctatggcattgtcattctttaagcccaaagagctttcacatgaggggtcatcctaaatagaaatctatcatgcatcttcacataatagtttaagctagctattangagagttggtccttcacatatgtnaattgagttatctgtgtattagatccatatggctaggaataaagttataatcccaatatcccaatctagtccaattgaaatatctatcacaataaagaacaattaagagagggttcgctagataagagagagaattaacatcactatct

SEQ ID NO: 61077 - DNA, 335 bp, Glycine max
  unsure (1)..(335): unsure at all n locations
tcgcactcgagaccgtgacagcttgccaccctacctatgtatgttttatgagtctttcntctaaatacctaggtacgaacttatgctcactatanagactctcttgttgttcttctgcaaagaccttatctaggtacatttcactttgcagtccgtttagggtgctcattcgtgctcacagggtctaattttgattgangtaaatcgtgcttacttngccaagtgttaatgcatttgaggctttgacgccacaagcagctttatatataaatgtgcaaataggtgtgcttaatgtatattgcctagagcttttccttcgcagcatattcatatgt

SEQ ID NO: 61078 - DNA, 238 bp, Glycine max
aatggcgcaaaacacaccaaatgattatcacgatggtaggttcatatctcacaaggaaaaatcatacttcaaaactatcatgacatgtaacgaaaataaggatttaagtctcataagcaagaactttattttctaaccatacccattatctctcaacatttctataatcaaagaaaacattgcaagcgtgcgtgccactatattgaccaatatttacttaaatccacacactacatca

SEQ ID NO: 61079 - DNA, 312 bp, Glycine max
  unsure (1)..(312): unsure at all n locations
catttngcattttgatggtggatgcgtgttgtaacaacatgatcaacatgtatctagtggtctcttcttcgatggacaagtgcaatatgagatctttattcgagattgtttagtatacaccttgtactttatntttacctcttaatacagattttggcacgtaaaaaaaatatctctcacattaagaatactaaaagttaaagaagttcttacgagcagatttaacagtgtgaaatggtcaaactagaaagtgggtttctatttcttttatatagataacacgtttaaaaaagatatatatatatatatata

SEQ ID NO: 61080 - DNA, 336 bp, Glycine max
  unsure (1)..(336): unsure at all n locations
ctctctgacantgattctttgtttcttgttgcccctaatntactttngtggtttgtttatanatattacagaataataaaaattattaaatcccaatggttgtgaatgcttttttttgaaaaaatggtttctgatgtttttccttcataaatgaatcagatggtatttctggtaattccttttaaatcgggtatctggtttttcttggttttcttggtcttccaatcttgcttggtgattaatcggtagttatgggatgttaattggaagtgtaggttatctgtaaggaagaattntagtgatttcactatgcctgggctctatagtgtcatagca

SEQ ID NO: 61081 - DNA, 355 bp, Glycine max
  unsure (1)..(355): unsure at all n locations
tctacttttgtgtgtgttacaagatgtcttatggtgtagctatctttcgggtacaaaggcaaaggtagacctccaactagttctggaatcaacccaacctctctccttgcaaaaaatcaaattgaattttagtaacagaagagacatcttaatctttgctcatatcccttacctataacctcatagtatgattcatcggctttattcccttgtacagaattntctaagacctcgtaatcttgttagacaattttgcaagccaactaatactcttcgctcctagacacttctatacgtcaatgatccgctccaacctgctttgtatnttgtcatcctctacaatgcttctttaacc

SEQ ID NO: 61082 - DNA, 396 bp, Glycine max
tgcagctcaaccaagcactaaatcttgatctaaacccttattttggactttcaagttgagagtgaaatgaaaggggtaattggacaactctacctaacagttatatcttatctaactcgctcaactggttatacaaacttaccaatcaaattgatctcacaccaatttacctaaaatggtctgtttacttggcactctatctattgccagctaccttctatagtctaatgatttcaactagatactccttacctcaatccataatcaattggctcacactaagctatctttcatctacactcatttattttacctagtacttccttatttacagttcatacattcccataactcagctatataacctcacgatggactgctaacaactgagtactg

SEQ ID NO: 61083 - DNA, 150 bp, Glycine max
tcagaatgctggagtcagtaggccagacacacccgaaactttgagagttacatctattttggtgccctttccatacttaaggtctgggcagatccctgtctgcaaccacactgactgaagggaaattggctagacactttttggagaaac

SEQ ID NO: 61084 - DNA, 161 bp, Glycine max
ctatgctcggggccacatggtggatttatctcgtattactttatcccttgcggctagcattattagcatctgctaccaaataataattctcacgtgatgatatcgactggaaagattcacgcgctctgcactgaataaagagtatatttatataaaacctt

SEQ ID NO: 61085 - DNA, 115 bp, Glycine max
tgttatggagtctgtgaacacactaagataattactccttttttctaatttggccccccttctcttttcctcgttttctctgagatctccactttatcagtactggggaactctc

SEQ ID NO: 61086 - DNA, 286 bp, Glycine max
atacccatcttgccccctgctcacctaaagatcgtccccctgactacccaccgacatagttgcatatccgcttcccccctgtaaaattgtccttccggagataggaaatgagcctgaaaaggtaaagcatcaggctggaattccatttcgattgcggttatgttggccacttgctcctcaagtcaagacaacttgtatcaagacactgtcaaggcttcgtgttgcaaatggggtttcgacaaagtgtgctttttaaagtgcggcgcttctggtacttgacttccac

SEQ ID NO: 61087 - DNA, 264 bp, Glycine max
acgtacggaacgttcgaagcgctcgcttatatttcttcctgaacaatttttcaacaattctaagaagagagtgcccagggctgacccttctcttcattctcccattatacaaatagggagtgggtgcgccactcgccagcgagcatgtgcttctcagagcacagcttctgagaatttctgaagcccatggggctggggctataaccctttttatatacaccctttacttttggtatctttttctaagtacgaactacaattcca

SEQ ID NO: 61088 - DNA, 306 bp, Glycine max
  unsure (1)..(306): unsure at all n locations
caccgcagctgcgtgtaaatgtccattactattggctttattntaattcttttttttttcnntttctgcaaagggtaaagaaaggcttcacaacttggtttatggtcactaatgctggcgtatctggcttcctgttctggtgaatgtatcgtctcattccacactacaccgaacataagtgaagctggggctatgatgactactacttattggtgcctactgcccttcaacggaaccgctgcatgctttagatcgcaaccaaccttgcgcgccggctttttatttatgtgaggtatatcatttgct

SEQ ID NO: 61089 - DNA, 195 bp, Glycine max
tcagcttctgaagccctcttttaccctctttgcacgaaaaaaaaaaattgttttttagtgaagccattggatggtcctctacactgatgccgcagcgattaagatcccggtccgactcaattgcctatgtgatgtatacattactggcgcgtttcacgcggatggaaacctgcgtaccactaatgctgagacatc

SEQ ID NO: 61090 - DNA, 187 bp, Glycine max
  unsure (1)..(187): unsure at all n locations
taatatctagatgagatcacatctaactcatatctagataagataagatctaatttnatagaataatatagtctgccctcttcaaggccaagcccaattctagattctagcccaatgctagattcaagcccaatgcctcattaaattctgaagatagattaaaaacatctaactagctgaatgggcc

SEQ ID NO: 61091 - DNA, 338 bp, Glycine max
  unsure (1)..(338): unsure at all n locations
attgatttcctagaaaagaaaaatgtatttgcagacaaaaataattatagtaactaataacaaaacacatgctttttanaagtaaaactatccataatgttcacgaaagcgccacaattntcaaagtaaatctatgactatattacaaccagaagaattcagctgcgtaatcaacactacaccttatatntatcctgattttttaggtagagtggtagagcaccatgcccacccatagaatgaccaaatatagaagcccttgatgttcaaggtgtggaaaatatcgctagaangcttggcactccttgcacatagtatacatgcgccattcttcattc

SEQ ID NO: 61092 - DNA, 210 bp, Glycine max
  unsure (1)..(210): unsure at all n locations
ctgcttaattacatgatgttgattaggatgtagtttatgccgtttgnttaaaagaggcccctggaaactaacttcaatttgcttccagaatggcccagaactgcctttaagtcagaagacagcaccgaagacattcctcgagatacataccgttagacctgcaccacaccttgagcatagatggcatttcggacacctcactagacacat

SEQ ID NO: 61093 - DNA, 263 bp, Glycine max
cttaattggagtcttgtctttacagaactagttggacattctgtttattatgtaaacagcagtgtagactgcttcatcccataatgtgttaggtagtcccttctccttgaacatcgatctagccatcttcataactgtgcgaatctttctctcggacactccattttgttaaggagaatatgcgactgtaagttgtcgctcaatgccttcatcctcacaaaatctttcaaactcgcgagaggggtactctttgccatgatcac

SEQ ID NO: 61094 - DNA, 251 bp, Glycine max
tcaccccataactccagctcttcataaaattaacctaaaataattactggaactccacactcttatactactcactcttgaaacttctaaaaattctaagactaactactcacaccctttatactaccaccctcaataaacagactactcccccctttattaaccaccctgcaatcagaatcaaaattcctctcaaactttatgctaatcaggttaccttttttatggcatctgccacaaaaactttattt

SEQ ID NO: 61095 - DNA, 239 bp, Glycine max
gatcattattagactatggttgcgctgtgtgtaaatgagtgtgaatgtagattatcttggttttcatcatggctgcctattgaattatgaactcgagtaattgtaatgtgagaataactagctcaacttaattgatgggtgaaaattatgatagacaaaccccgagtttggacactcgattgtgtatagcgtgttagtgacaacggatagagatcacgttattcataatcaactactct

SEQ ID NO: 61096 - DNA, 447 bp, Glycine max
  unsure (1)..(447): unsure at all n locations
acttgaacccattaaagaccacatctttagatatatatatctttcctataggtgaaagacacttaaatcctttgtgagaagtagaatatccaagtaagacacgctcatgagaccgaaattcctagttttgactattgtagggtcttaagaaaggatagcatgaacatcccaatgaatttaagaaattataatcaagggtatgtttaaacatagtagtaaaaggaacttcataattaaggatgaagtggcaacctattaatgagaacaacaatcgttgtaattcaaatttcctaaatttgagtggactgangcctgtttgagagaagaaagtccaatctgtaatgtgctatgttagattctattacccacnttatggtgagtatgaggacaataaccattgaagaattcatgacatctttacctaactcccatcaattgacacttcag

SEQ ID NO: 61097 - DNA, 365 bp, Glycine max
tctttttttatctgagaaatagtggcctcacacatacagaaattcagaatgcgtttttaattataacaaattaactgcccatgcttgattagggattaagtataatattaattaaaaattctttagactatttctttttagatatctatctctagataaaataatgtgtaaaaattgattttttataaaatatattgaatatttataatagatactttattatttaatcattttttaaagtaagcaacattattgttgaggcctgattattcttactaaattctataagtatgacaaaatttttaataaaattataaggtatttgaaaaatactctaaacttatataccatgtatataaaaaatt

SEQ ID NO: 61098 - DNA, 454 bp, Glycine max
  unsure (1)..(454): unsure at all n locations
tcatatctatggagcatnttcttgagcaagtagcctggccttgaagctcaacttcattggtgagacccaacgaggctgcttcgcttgagcccacacctgtgcaagtcaatttagagccagctaacccacaatcttcagtggtgaatccacctttcttcgctgagcttgaagcaggtccaccatctnctnctctgattgcatttttgacacatcatcatatgctcctcctgattcaccagttgtagaaacagctgacctccctgtntccccattggaggaattgctgatctttttgattcgttatctggagaaactgttgctctcactgatttctcaaattaacacgtnttgacatttgttaatctggatgtcacttnttgctctttgggttattaattataatatgggtnntcgacantatctcctttatattnatatactctactagtttctt

SEQ ID NO: 61099 - DNA, 260 bp, Glycine max
cattaccactatgcctgagtactccacatgaggcttaatgttttttttttcatatattacatttttttatttatccttgcaaaaaaaatgttgcctacaaaagggtattattttcgtcttaagcccaacgagggaccctgggcgcggaatggcctgtacttgtgcatggtcaatccgacacctttttagcagggagtgtacaatctcccatcctttgtacaaaacttgcatgggcaagtatagctcacctttactactta

SEQ ID NO: 61100 - DNA, 297 bp, Glycine max
  unsure (1)..(297): unsure at all n locations
atcatatccctctccatcattgggggcgctacttgagctatcanattcctcactcttgagcgtattctctgaaagatttgcgtgtcttcatacagatgctctgtagctgcattctcatccgagctatatcacaattgtatcgatactgcctcatgaaggcaaccattatgtccttccaagaatggactcgggaaggttccagaattacataccaagtgacggcttgcccataagaatttctagaagaacagcatcacaattttcatttctgagatgccctattttatgttgacatct

SEQ ID NO: 61101 - DNA, 104 bp, Glycine max
tattgatatgtcaccaacctaaaagacattcagctcaagcaacaacacacaaaacttcaattagtctcaaaatttcatcttttctctctctctttaaaatttta

SEQ ID NO: 61102 - DNA, 170 bp, Glycine max
  unsure (1)..(170): unsure at all n locations
cctgaatctctggaacttcttctcttcttgttccatttcttttcanagnnntctgggtctaaccgtagaaacttgtgctattcattcttttcatctcttatcccctttgccaaaaagaattcgccgaggactaacccgctaaatttnttttgtatctctctttctccttt

SEQ ID NO: 61103 - DNA, 292 bp, Glycine max
ttaccttttaagaatcaccccattcttttttggatatttttgtatgtacaaacttacaattcgtacatacttgttatttctaagtacgaccttcggtatgaatactctttttacttcgaatgtcgaactacgatgcgacatactctttgattcgctgttatgattacgatgctacatgttctttattcgctgttgactactatgccacaagggcagacctaacgtcacaagtgatgcatacatggctgacaaaaggtacatttattattgtcttccatatctgcatactgtg

SEQ ID NO: 61104 - DNA, 344 bp, Glycine max
  unsure (1)..(344): unsure at all n locations
tgccctcccgtagggtcttctctgctggtaagtgacccanctttgtttctttgttgtgtggcatgaatgcgacgcgttgctaccgagttggcatgggcgtgtgtgcaaagattgccctttcagaggaagaagatggaggtgtgggtgaatagtgtttaccggcttccaacacagtaatgatctgaatgagttcatcctatttggtggtgacatggagttggttggaggctatcctgactattgcttcttctatgcatccattctgctttatgtcgagatgcttcagcctcggtgacagtgctctacgaaagcacccaattggtatgtttcttatattcaatgac

SEQ ID NO: 61105 - DNA, 289 bp, Glycine max
  unsure (1)..(289): unsure at all n locations
cacaaacacaatcactctttcttccaacttagtaggcctcattcttttcaagagtcttatccaacttggaccttttacgtgcttcatttagagacttgcttttggccttatcatatgatgcctacttttgtttgctcatatacgtcaagttggtctatgtgagggttgagaggtttgaggtggaatggcaaggaaagtgacggttgacgtgtaggggntttaagaatcgcatcatcagtatctcggttgatgtctatgtggtgagggaggcgtacgatgaagttgacga

SEQ ID NO: 61106 - DNA, 346 bp, Glycine max
  unsure (1)..(346): unsure at all n locations
acatcgagacgattttggacttgctcattctagtcaaagaagttatagtcaattataaattggctccagatcatacagtgacgaatacatctgtaatgggtgaaccatgtatctgcataatataaantcacataacgtggttttgagacaataaaacacattgtcatacatatgaatcagtcagataacagtcaatgtataccgatgctctcatatgtgtgtacaccacacacaacgtcaaacatatgaggctataaatctaacattattgcgattaatatgcccaatagtatacctataccttcggtatataataaactaatgatccacgaatgcctcactatat

SEQ ID NO: 61107 - DNA, 283 bp, Glycine max
  unsure (1)..(283): unsure at all n locations
tcttccattttctttggttcatcctcttganttgagtctcttattaccatgagaggttaacttacccatgtgtggcggcttagatatcaaaaactatgtgatgtaatgatctttgctatccatctaatggtatttcagaattattgctctctntctatggttattggtttggttatgggttgaccacccatntacatgtatcttataaaatttcaatcattggaagatgtnttactctaagaacttgangggaacttctaagtacccatatctanggataata

SEQ ID NO: 61108 - DNA, 296 bp, Glycine max
taactactctacttatttttttcgacaactcccgtccattttccctcagcttttcacgtctctcatgcgcttaagttaacattcctccctaagtaggtctacctattttcttatctttatggcaaggaaaactctggctggtggtttatggttgtgccagtaaacacctttcccgatgcattttctcgtgtgtgcctgagcgcggaaatctttttcggatcaaccttatctggcttctgctgtctgtacttataaggatctactcccagttaactctttcatatcatcacaatttt

SEQ ID NO: 61109 - DNA, 263 bp, Glycine max
ttctcacaaatctttttttttatatgagatccccacttataatagtttttaaagtgaaaaaacacttcatcttctttactagtttctgtaaagtatcttacttgctttagtgcttaactagaataaatcattccatcctattttgctgaacttaactggactccattttttagtttacaaattgtgtctgttatttattataatacaacatgtaattttttgtaattctaactttttgggggaataaaattgtagaagattct

SEQ ID NO: 61110 - DNA, 171 bp, Glycine max
aagaattcatcaaaacaagaaaggaattcatcaagagccaagaagaattccatcaaaatggaaagaaaagaaaaaaagaaaattctgcagatcagaacaaaaatgcgaagtttgacgcatattacatcaatgccaagacaagagaagaactactaaggcttcttatgcaca

SEQ ID NO: 61111 - DNA, 370 bp, Glycine max
accactaacaactgccctaaccccctgctgttactccataatttattctgcaataactgcttaaagagctacatatggtcctaaatcactacagattcagttacgattaacctctttgtgcctaactatggtttccaaacatcacaacagagacagaccattgaacaatggaatttcatcattaacataccacagagacataccttcgatggaagcgcagacacgaactccacaaacgcgaactcgacaatgtggtagcgagacggaagcgcacccaattagtgacaaaacaactaggccaaagagaacatgcctgggagacctttcggactcttccttctactttctcatctgcaaaggacaaatgtaa

SEQ ID NO: 61112 - DNA, 147 bp, Glycine max
  unsure (1)..(147): unsure at all n locations
cctaacatttcccttacacatatatacccaatcttaaccacaagaaatgatattangccatcgttatttccactctcccttctcattttttatccgcaaacttccctctagacacactctcattcctttcttcatctcatgtaacgt

SEQ ID NO: 61113 - DNA, 492 bp, Glycine max
  unsure (1)..(492): unsure at all n locations
actccgatgtctgattgttttcctcatatatcgagacgctcgaaattgaatgttgaagctctgaccaattcaacgaaataacttttactcggatgtctgattgagtcccgtaatatatcgagacgctctanattgaatgttgaacctctgagcctaatcaaacgacactagcttatactcggatgtctgagtgagtgccgtaacatatcgagacgctcgaaattgaatgttgaacctctgagccaattcaaacgacaataactgtttactcggatgtctgattgagtctcgcatatatcgagacgctcgatatagaatgttgaagctctgagccaattcaacgacaataactgtttactcggatgtctgatgagtgccatatatatcgaacgctcgaattgatgttgacctctcaccattcaacgacataccttttactggatgctgatgagtcccgtatatatcagacctcaatatgatggtgaactctga

SEQ ID NO: 61114 - DNA, 241 bp, Glycine max
  unsure (1)..(241): unsure at all n locations
taaatattatgcatagtagtcttctgctctattactttcgttccgggtcatgaaatagaccgccaactacattaacattactctaaaattcatttggctttgacacacatacagattctacanagaaagcccacttgattgggatagacaatacaaatcattaaaggattgctcgaagattattatcttcataggattacgactgcctggcatatacatatgtctcaagcagcatgtccct

SEQ ID NO: 61115 - DNA, 280 bp, Glycine max
tctcttgttagagaatatcgcttcacacttctattatattagcgtaatgtaattactgaaatgtgaccgcaatttatctaccattcatctgatgtggatgcaaaaatatctcatagaatcgtactcactcaatatcacagcttataagaccaaaaacatcataaaaaaacaaacaactgtgtgataacattttccaattaaaacaatcatactttcccgcttacctgacataattagagaaaacccctgcccaagggtagtctagactttatgatggcga

SEQ ID NO: 61116 - DNA, 344 bp, Glycine max
ttccccattcgttttttgaaattgccaaagcacttactcttgacatgcatataagaaatttaatctccttcaatctaagcccattaggtatagcctcattcaagcaagagagtgggtcgtggagcgaccaaccttgatctcatagctcagtacctctctctatttgattcccatacctgactaagctgcaagcataatatagacgacattccgtcaacatactatccactagagtagacatgaaggaatcctcagaaaagaacagacattccaccatgtaatcctgctaagactttgaagttatgcctgaaatactctcttacagtcttcttgaacatacacta

SEQ ID NO: 61117 - DNA, 514 bp, Glycine max
  unsure (1)..(514): unsure at all n locations
atccttaagcacctgggctgcaagctattcaggacagttattatcatgcacagcctgcatgagttgtctcacaatangccaatcatatctatggagcantttcttgagcaagtagcctggcctgaagctcaacttccattggtgagacccaacgaggctgcttcgcttgagcccacacctgtgcaggtcaatntagagccagctaacccacaatctccagtggtgaatccaccttcttcgcctgagctngaagcagttccaccatctnctcctctgattgtcatntttgacacatcatcatatgctcctcctgatcaccagttgagaaacagctgaccccctgtttcccaattgaggaattgtgatcttttgattcgtatctgagaaactgttgtctcactgattcccccattaaacacgtttgacattgtaatctgatgtcacttttgctttgggtatatataatatagtttcgacatattcctttattattcttactgttcttatggagtag

SEQ ID NO: 61118 - DNA, 248 bp, Glycine max
acaaaattcactatgggacttcgttacttgaaatacaccatacagcaactagtttgcaaaatcaacattccacatgttggctgcaacgtactattggaccttcatagtattaaaaaagagtgtgctaatgtacatacagactttattacctcttggaacaaaatacatgatgtatttcatgtttcactgctaaaagaacatcatggtgctcacatagcatcacaagaactaccactgtactatgagga

SEQ ID NO: 61119 - DNA, 325 bp, Glycine max
tgatggaacttttcaggtcttggatatgattttatctttgcctataggttggaccttctagaagagtatggatttagtgccactttaacattgttatctaattccttgtaccggtggagctgatactgatgaggaggaaccaatattattgaggtcaaatcctcttcaaggtggatgagatgatgcaatcctccctaggaagggaccagtcactagagccatgatcaagatgcttcaaaaggaatgggctatagctgctaaagaatgtcctaaggttctcatgaacctcagggtagatttctgaacccacgggcaaggttgggtc

SEQ ID NO: 61120 - DNA, 283 bp, Glycine max
  unsure (1)..(283): unsure at all n locations
ttttaatttaatctgatatgtgacatcatgcatcatctgtagactacgaacattgttctaacgttagaaacatcctcagtgcataaatctatgtgttaattcattaccttctatctgtcattgattacacacgtcttcttcgaagcttgctgagagatattcgctctgggttaatcgagtacccaatatccgtaatccactactcttgttcttttgagaccatgtcntgtttcttcggtcttactttactccatgtatacgacattgtaatccactacatcat

SEQ ID NO: 61121 - DNA, 369 bp, Glycine max
  unsure (1)..(369): unsure at all n locations
actactttttaatatattggtgacaaactagtgtgaaatagtgaagttaagcgatgaaaatataaatctgatttattaaaaatatatacaacatgaataattatcgggaaaaaggaagaaatataaaggtaaaattacggtttaaaatatactttaatagtgtttcnaaaaatacaaaagctactacaaactcttaccaacatccaatgagtttcccgtacaaaaaaaactaaactagtaaatgcttatcatatagctacttcatctaactaaataactcttatacttcttgaattatatagtcaaaatctagatcaatatcatgtaggcttcaaagtactaaggctaatctcttcatataaaaaaaag

SEQ ID NO: 61122 - DNA, 344 bp, Glycine max
cagctgacttgttgactctgatagataaagtcagttgttaatctaaactccgtttaccatgaattcgaatgttagattattttcaactttatttcattcctctgatgcaacagaatctcttcaagcttgaagtggtctccacacatctcagtttgcgcggatattaagaatatatacctaattattacaattagtataatttagttattacacgtagttaggtaatacacattagcacaagttaatatttatatttcagcaaatctgattgctcgtttaagcttatcagagaatattcactcttctttctctatgtcctccccaacctgactttatataaaagt

SEQ ID NO: 61123 - DNA, 433 bp, Glycine max
  unsure (1)..(433): unsure at all n locations
ccactaaccccagatntagccttccaatccctcanaacctcacacttgtccactcacatccctaccattctcacttttaaccctaggttaactcttcccatcatctctaccagttctccaccaacaatntcagcacacaagcatcacatagcatcattataaacccctaaaacagaatgggtatatgtggctcacatcaaacatgacaagtgtagcatgctttcaacaaatgtcttcacaaataactaccataaggcataaacctagtagaactacccatcctatcntccaaaaacccaatacccacgaatatcatgtgagaagaagtctacccanacctgaaatttgagtcccacaatgtgaagtgcgctccacactcgaaatggttcctttgcgattgagtagaatgggaacaatttggagcttatggcac

SEQ ID NO: 61124 - DNA, 54 bp, Glycine max
ctattatgtgggtcattaagtctatcatatgctgacaatgggccgagaagccca

SEQ ID NO: 61125 - DNA, 457 bp, Glycine max
  unsure (1)..(457): unsure at all n locations
atttaattattatgttcatatatatagtgcgaacatgtatgaatagtgtaatttgatacctttagtttaattggctccggtacaaatttttgtaatagaaatatgtgtgttggaatggcttcacacatttntgaaagcaaccaagtgaattctgaaaggaacctagtcaagatgcttgctattcactaccggccatggagttcttcatacccctgtctactaactttaactcaagtaaattggaagtttgatacatttaagttcagaaattctatctagtgtactctgagatgaattcatattatattttgtgatgtcgactttgcgtgaaatcttagtcataacgaaatatttggtccccaattatgctgactaaaagaatctcgattaatggtaatatttggatttgttggccattataccttatttactagcggaagaaagacaatagtcttcg

SEQ ID NO: 61126 - DNA, 89 bp, Glycine max
atggttctacagcatcgacattctaagtccaacaaggtgtgcctgaaccatggtggtttacacataataacttatacaggtaacacccg

SEQ ID NO: 61127 - DNA, 279 bp, Glycine max
  unsure (1)..(279): unsure at all n locations
aatgggatcattttaagggccaacgccttataatgatcacctcttanagtaaaaaagaatcacttgataagaaagaactacgtaggtctgatttcctcatcgcaattgaagatacgtaggagcataagccccgcttttgtcgaccaccccaagagatcgttaatggtccaatgccttatacgtttctctccttttaaaaacaagagatcgttaatggtccaacgccttaacgtttctcacctttcaaaatcaaaagaaccgttaatggtccaacacctt

SEQ ID NO: 61128 - DNA, 325 bp, Glycine max
ccgaccacgcactaaaccaaattatatctatcttccttcaccgggattgtatttagacatggaaattatatctttatgctggttgatgacaattgatatattatgcatggttatattttaaatcaaatgtcattgatatagaaactttggaataacttttaagatatttctaatgaaagatagtactttgatgtgctatcttgaaacattagatgctatattctgctttagtgaaaggaatactgtatgttcatcctgaaaagcatagtgtaattgacccttactttgtagcaaggaaaatggatatcaacccatgtatactatt

SEQ ID NO: 61129 - DNA, 345 bp, Glycine max
  unsure (1)..(345): unsure at all n locations
gctaccatntgattancacataagcctgtggattngctgatgtttgacacatatcaagagtgacatcatattggtctatatagttgctaaccttagtaaacaccagtccatctatttttgcacaaacgtcactaagattaccttgtattggttgtctcctaattgtgaaatagtagcagactctggtgataagattataagttgaatctgaaatcagtccgtgggaccaaaagaattcaactttggagttcaaatcagtatcaaattccattagaggattgcctatctgcacatatatgaacacgttatatgtttcacattaaaatgagttcttatgttgtaatt

SEQ ID NO: 61130 - DNA, 252 bp, Glycine max
  unsure (1)..(252): unsure at all n locations
tagagcttagctacacacacgcatctaatactaagctcactcttcgttgagangatacacttaaatacaataatatagaccctactacaaagactactcaaaatgccctgaattacaacgctaaaaaccctatactactagaatggtcataatacaatgcttcacaagaaggaaaaacattatctaatattcatcaagaagagtggatacaacctcgacccatgggctcaaaaatctaccctaaggttcatg

SEQ ID NO: 61131 - DNA, 332 bp, Glycine max
  unsure (1)..(332): unsure at all n locations
actctnntttctctntntctctcattttctcttcattcttcttcctctcttcactntnggtttttcctttctctaacacanatttcatggcttntccattggtgatgatcatggaaggctaaacacttaatcaatccaaggatccactcatagcaaggttgaaattgagttctggctntgtatctctaatctttgtgaatgttcatctttttcttcaatcctatntttgatnttcatgattatgaatatgcttacgattcgaaatggattangtatggattcataagtcgaattgagttctagttttgattttcttcaatcctggtcgttat

SEQ ID NO: 61132 - DNA, 257 bp, Glycine max
gttcacccttctacacttcctcatctcaagcttgtaggattatggggtacccatcacatgtggtactatgtggcggtcgggcgatggtgacaacatggtttacacatacaaaatgcgcgcatatacccaccataccctgttgcccacctccatctgagctcacgtactctcacgtagcccatatactcgtttctctcaacaccgggtcccaatcaatccttccaagctgtcacaacatcctagcgaaacaacattca

SEQ ID NO: 61133 - DNA, 340 bp, Glycine max
actttatgcgaacaaatcaacattttattttaacaggtcctctatttttcttcgaagatctacatcaatttatttcccgatcttcatgcactattgagattggttctcgaagtgaaaaaagttaattcttcaattggtgcggccttctgcttcttcatttgatctaggtaaagccacccaataattagttcaagtctctatgtataatgttgcaatctcgctacttgtagaataaggtgtggggttgataggatacttggctacatctcggcttctcaattggtatatagacatgaattactaaatagtatttatataaatatataaatatattacatta

SEQ ID NO: 61134 - DNA, 361 bp, Glycine max
  unsure (1)..(361): unsure at all n locations
gatgtggacccggcgatgagaggaactaggagttggctatgtacgtgtacgtgagctaaatgtaaaggtgggcaactggggatggtgtgcgtatgcctgtgcttgtggaaatgggttgtgaactgaatccgtgagttgtgaactggccattcaggactctatagtgataattntccttatganattaattaccatgaaatgaataacagtgcgaanaanaaagaaaaanaaattcccatggtttctgctatntaatntattactattaatccagtcattattcagggacgtcacaaggcttatgcatcatgtcttaagggattcatangtagattgtagttgttatttgatgatatttagt

SEQ ID NO: 61135 - DNA, 335 bp, Glycine max
  unsure (1)..(335): unsure at all n locations
cagcattattgttcttacatatttagaaaccaaaaccccaacaatccatccctggtaatgtggttatttagtcctacttctatcaagttctaaggcaatagtacatttcccaatgctaaagtcatctaactgtacacacaaatgggtgatcaaaccaagagcatgcanaaattaagcattgaaagaagcattgaacacnatanacacaattatntagatattnaagtattacattagttggttcttagaaatccccaacaagggtgtntagccagccattacagaaaaaccctattacanatgagaatgatagtacagagtaattgtccttacac

SEQ ID NO: 61136 - DNA, 404 bp, Glycine max
  unsure (1)..(404): unsure at all n locations
agatttctttttttcccttgtagtgggtctgattgngaatctcacttaaatttgagcttaatatgtggcatgcattgtgaatcacatttttaatctttatncagctaagtgagttgtttatgtatgtngtanggcctttcaaggagaaacgaagcaatgagcttanattctaatagctcanaatcacatataattntcacatttgtcattgagtctttgtgtaaggtactggtcaaatttgtaattctacctaacaattaccagcagtgtgtatggaaaattgtgtntcctaagattcaaccaggttatatttctctgtagtctatgctaacatgatttttaaatgatgtgcaggaaccacaaggttcaattctaaaactacagatcacttatgatctgtgatg

SEQ ID NO: 61137 - DNA, 219 bp, Glycine max
ccttatctgctggggctcttccctttatcgtgcgatgaatacgcaagctttatacataatgtaagatgtaggttgatatagcacggcaatgaatagatatgatatgcatttaatgacctttgagaataatatacagacaaaatgtttttcattttagctacaacggaccatatcagtggcattgtttattctatgccttttaggtgaataatataaatc

SEQ ID NO: 61138 - DNA, 465 bp, Glycine max
  unsure (1)..(465): unsure at all n locations
cttctccactcattgatgtcgaagaattgcttaatgtttatggtatgtnctccatcaatatgaatggtggtaatctccatagagcagatgctcatctcttggtttgtacctttcagaagacatggtctgagttttgaatagggtttacgagagaagctcttggttgttctttctaatacatatttgagagagatcaatgtggtaactagaacgtttctcttttgtattgatatcaggggataagaagtcattgagtggtttcttcgctatatagggattaaataactcattctcatggccacttagagacataccattgatttcttacttagatgatgcattctttattggtgatgatgatcattattttcacatcagcaacactgttaatttgagcttgacatgagtgtgatcacaatatttactactttctttcaaaccttccagtgtttaaaaattttttct

SEQ ID NO: 61139 - DNA, 117 bp, Glycine max
  unsure (1)..(117): unsure at all n locations
atgcaactgcttgacaatatgacngagttactatgaacacgggtctattatttattgtgtctatctccaacacgctctaaatgaaactatagtatactctgtgagcatatatacaac

SEQ ID NO: 61140 - DNA, 307 bp, Glycine max
  unsure (1)..(307): unsure at all n locations
agaatgttgttgtggaaggcaactacagctgctgtatacagagaattcttccaccaacacataanggaccctggaagtgttactattccttggttcaatcgtgaagtcacttgtggaaaggatcacattgatttgggagcagtatcaacctaataccactctctatgtgtagaaaggtgggagagttggaaatcatgcccacgagaatgactttacaacttgctgaccgatccatcacaagaccttacagggtaattgatgatggtctgataagagtgaaacatatggtctttccagttgttttatg

SEQ ID NO: 61141 - DNA, 329 bp, Glycine max
ttacatacttaacatttctattcgtggatctaattctaattacatagctgtgatttggcttctatgacaagaaggcctcagagagccccttttgcggagaagctattagatggcttattatgtaaccacatttatttggagtagttacgctactaacacaactgaatatgttgaactgatggaagctgatactttgcttgcatatggcattaattactccactttgttgcacgtgggatagatgaggttcttactaacctgcagggattatcaccacgagtcaacactgtctgtttttagtttacaactaaacattatgcctattactg

SEQ ID NO: 61142 - DNA, 365 bp, Glycine max
  unsure (1)..(365): unsure at all n locations
attatatttagaccaaattcaatataacattttgccattatgagtcaccattatntgattagagaattttctcngaactattctaattctttctaaactttagctttaaaacttaagagggtaaccatggtaaggtatcctatggtaacatctcattttctaccatttcaatagcctaaaaacactacccaattacaccaacaaaaaataacatttgctaccacacacacatggannaatggagatgtatagttgacataagtatctcatgatntcttcatcngtgtngtcttcaagtgcttcatcaacaatatgtngtcaaactatatcgaagntagaagttcaagtcattttatgagtgagtg

SEQ ID NO: 61143 - DNA, 457 bp, Glycine max
  unsure (1)..(457): unsure at all n locations
gacattaaacataatgcaggttcttattatacaatatactaagtcggactgtgaaacatagaggtaattactcacaatgttgtctgatatttcttgggctgttgtagaggtcatctgcccatatcgctgtgtgtgggccatcttccacttcacatgtcttcanacggtggatggtgggtcaacacttagtgataaagtttcactagactatgcttggtgttctcgtgtcttctttttctagtccacttagtattcttctagcagttcataacccctacgagacagtaagtgagggcagncattgtatttntgaatatctaggccctttttgcattccttacaataaccaaaaattttgacaaatagaaataataatgaagaattaattttactgaaagactaaatcctgcagtagggttggggctttacaatctgccatgtgtgataatacaactac

SEQ ID NO: 61144 - DNA, 284 bp, Glycine max
tctttcagcgacagatacaatccaggttggagaaatcatccatatctgagatgggcaagtcctccacaacaacaacagcctatccctcctttccagaatgctgctggtccaagcaagccatatgttcctcctccaatacagcagcaacaatagcagcagtcacaacatagacaacaagcaactgaggctcctcctcaaccttccttagaagaagtagtgaggcaaatgaccatccaatatatgcctatttagcaagagacaagagccgtcattcagagtctgac

SEQ ID NO: 61145 - DNA, 363 bp, Glycine max
  unsure (1)..(363): unsure at all n locations
taagtcacctgcggcatgcaagcttcaattacaacattatataggaagagtgctaagggattctcttgtcttatactccttngnggcacgaactatgtcgtgaggctgtcattcaccaatactagaatagatgcagatttcatacacccttcaatccatttgacccatgtggggttgaagcttattctctntaacatgtataatagaaagtcccatgaaaccagncatatgccttctcatagtctactntgaagacaaaggcagaagttggactccttttggcttcatcaatcacctcatttgctatgagtgcactatgaagataatgctaccttctatgaaggcagagtgggcttcatctat

SEQ ID NO: 61146 - DNA, 435 bp, Glycine max
  unsure (1)..(435): unsure at all n locations
taataatcatttaaaaagcatatgggatcaatattgatgtgttcattgtgaagttggaagggtgggtagccattaatgggaccaaaaacttggatttacgaatataattntgtgcagaacttttagctcaagctacattttctagctttagctgaattttgacaaaatagagcactatgcgaatttagttgtaccacgattattagctcaagctaattcaattgaattggactgctcgatttagctagagttgaattgttagctaaagcttaattcgaaggaatgagatgcacaatctagctaaactaanatttagttaagctaaatntctactgagataaacatttaaaaattttattttaccttgatggttcttgagtgtttcaaatcaattcaatgtgatataatggtttataactgcatccctatttcttc

SEQ ID NO: 61147 - DNA, 331 bp, Glycine max
gtataccttgcgttctatacttcaaccacttgtgatagactctgatgacgccattgctactctctctaagctccttatcttttctatccactctattccatgctctacggagttttgaagtattctttgcattggcttcattgaaacctcgtgtgatgaaaggtgtgatgatttcctacgacgacgcgcctctcataaggtagtctaattgtcgtatggccagcacgggattataattaatacaacccctcgttcccatcaaggggaatatgtgaatccttacacagcataaaatcctacccttcttctttcaccatgggactaactaatg

SEQ ID NO: 61148 - DNA, 273 bp, Glycine max
caccctctataactaaataacctctctgaaattattactgttatataaacacaacagacataatccaacatcaaacactattactaataatatatagatatctatcaaggtgttacaactcttccactctattagaaatatcattctcgaaatctacgttactcatacagagatggataagcttctcgcatttgactttctaattaccacatgacatcatcttctgatgcacctccgcagatcaccttgaccaacagaatctctttccctctt

SEQ ID NO: 61149 - DNA, 414 bp, Glycine max
  unsure (1)..(414): unsure at all n locations
aacaagcttataacaatatacttgtccttcacttaattggctgtgggctnggcgatcacgatcaacaaagtactttcggcacctgctatatgttgacttgaccaacgctattatgggtatgctgcgacaatccttcaacactntattcacacattctgagagggttggtgtcatgtgaccatatcttcgtccagatgtattgtaagccatgctccattnttcctttgaaatgcgatcaatccatgttgctatggctggactcaattagacaaaattttctaagttttgatcaaacacatgctcgcaaggagtgtacgctgcatcaagtttggtaccatcaaaagttgttggagatatgaaagagaaaataaactcatgtataaaatanaccttacccaaattcttgaacatctc

SEQ ID NO: 61150 - DNA, 255 bp, Glycine max
  unsure (1)..(255): unsure at all n locations
gaattagaagggtcattngcctgtctctntagaagttcaatccctgtcatgcccaactttttctctttcctgtgttcatgacaaaactgaaatctaagaataatcatgattgaagatacttccacgttccaacatcataatgtttgagaatcacatattgtgtttaaattctaggatattgagagtaattggtcgtctcaattcaatgttaattaattgacctgtagaatttcatagcatagctaatctcacact

SEQ ID NO: 61151 - DNA, 298 bp, Glycine max
  unsure (1)..(298): unsure at all n locations
acgcagctgcagctgctttcacatccgtgcctgccgaaccaacagtttctatgatgttgnntatgcnccgctatgggatattggattatcatggtctttatagactcccctgcatttgatcgtgggtgatcctgtgatgacgcaacccttgtctggagcaaatgacacagtaggtgcacgataaatttgtgaagaccggcaagcgcctgagacattggattatttgggagagagtgggtttgtaatcactctccatagggtatgattctttgttgattaagatgtatcctgtttattt

SEQ ID NO: 61152 - DNA, 507 bp, Glycine max
  unsure (1)..(507): unsure at all n locations
gatagttaaagtattagtcattggacgatactgcctttcatctaatnctaagaagacaagtgctttagcacttgactcattgtccanaggcaatggaacaattattcaattctcaagtattaaaagtaatcatcagaaagtaacattcatggttcagtaagcaattcgtcccataatgcacaagagggaagttntagattgtcttgtcttgacattcttcattctttttgtcctatgctattaatgttgtatatgaattgacactaaaagtcagctttagcacaacgcgacactgacaagttgtacttctctgaagatacgctgcagaagaatatttgtggtccccacactttctttgcacagtaacatgcctcgtgtaaatgcccaagctataagcacaactaacttggatctctcacggatcgaagctcgaatcttataaagcngaaatgccctgtaagtgttgatcataagatattgaccaaacacatatttgacactgcatta

SEQ ID NO: 61153 - DNA, 317 bp, Glycine max
tcgatcggatcactaatgtgagaaatgttcggaaaatcagccaggctcgacgctcggacgtcggggatccgagatttcccgtctcgcgctcgcctatcgaagtctgaacgattttcatcttttttcctaaggccattgtccggcttatttattcatctttcgccctttgcggctagctttatagcgttttcactataaaaaaaaaatgcccgcttctattacacctatttgtaagaatcacgtcgcagcggctcttaaccaaatggaatattttatatcaaattttttaataatcaaacatcgcgttcttgattctt

SEQ ID NO: 61154 - DNA, 312 bp, Glycine max
ttgcctcaatgctggtggggtgctctttggcaatttcacgtttgttttgcatgactggctcgcaaggtgtataccattatccccaggatgaaatccattgcgcggctggtataaattatctcgttctcactttgaagataacatgagcagaattggtatgaatatgattggtactgttgaatgtttggtgtgagccttgaatgtctttcagactatttgattgagctggtgtgattaaaaatcccttgaccttccaaaaatatataaaaagaaaattgccgttgacgaatgtgtcgatatactcacttaatg

SEQ ID NO: 61155 - DNA, 270 bp, Glycine max
  unsure (1)..(270): unsure at all n locations
tgtccgattgattttcttgattattctattcaaagatattttgattattctattattattttctcaagatatcttgattatcttattattacttttctttcntttggttaaccgacgttactgcgtgaacaatccgttggatttatttaaccgtgattaacgatattacaactcaatgatcgggtgaattcattttatttttattacgtgaaaaacggcttatataattgttaagcacgtcaatagggtacaaaacatacaaatgaatga

SEQ ID NO: 61156 - DNA, 304 bp, Glycine max
  unsure (1)..(304): unsure at all n locations
agtatgcctgagtcattcatccctatgagatgtttttgtattattgttgatcagaattgccattccttggattatatggttgaccaagctatgctttacaaataggtcatcatgtcaattgaaatatggatgtaccgtcttgcaaatatgggcanaagatgaatcgaggcacatcacttgttcgtctactgccaacatattangatattgatgtcttgttcttccagttcacttgacaagatgtatggacattgtgataattaaattgatcaccccatatctttgcgtaaaattcgcaatactt

SEQ ID NO: 61157 - DNA, 170 bp, Glycine max
  unsure (1)..(170): unsure at all n locations
aactgaacttacgtactctcacgtaacccatattctttgttctctccacccgngctcccatcaatacttccaagcttcccatcatccaatcataacaacattcatacatctcaagctatcacagcctagccaaacatagctaatgcagaaaactcttgtcaacacatcaa

SEQ ID NO: 61158 - DNA, 264 bp, Glycine max
aaaagccattttcggagtcttggagtctccttctactttcgggcgctctaaatttcacgtaagggtggacttcttctcacttgaaatttgtgggtgttggcgttttgtgagctatgatgggtagttctactacgtcattgccttaaggtagttgttgtgaacgaacttgtgaaatcatgcttacttgacattgttgatgtaaaataaactacccatgctgatttaaggtttaataatgatgctttgcgatatatgtatgctaaa

SEQ ID NO: 61159 - DNA, 216 bp, Glycine max
gttgacagccactcagaatcttagaaactttcaattcagtagcctattcaagggaacataatgactgttcacacattggccaccttatttgtcaatctatctgacttaacaaggtatccattgggctaaatgactaaacgatttggcaaccctcaatgatctgaggaataacttagtgaaacagactggttcaactattacaacattttttcatgt

SEQ ID NO: 61160 - DNA, 333 bp, Glycine max
  unsure (1)..(333): unsure at all n locations
tgcagctccgtttcatatggagcgctgatntatactggtctctatcagacatccatgtataaaattatggtcaattcaatntgctcacagcttcgaatctaaattntgagcgtctcgatatattacgggactcaatcagacatgcgagataaaagatattgttcgttgaagttcctacgagctgccgatttcaatgtggagcgtctcgatatattacagaaaccaactggacatctatgtataaagttattgcgacttaattagctcatgacttcgcatctaaatttggagcatctcgatatattacccgactcaatcagacatctcgagtga

SEQ ID NO: 61161 - DNA, 262 bp, Glycine max
gatctagcttgaccatcaacacatgactttatcgagttgatgagcccacatttggacctgaattgatgtgactgtggatatcaacacatactttttggtgtgatgacccgacaatgaacctccattaagtgatcttactatccacacatacttttacgagttgagagccctacatagaacctgaatgaagtgagtcgaccataacacatactttctgagcgatggcccattttggacctcaatatgtaacctgccataacaa

SEQ ID NO: 61162 - DNA, 251 bp, Glycine max
  unsure (1)..(251): unsure at all n locations
atcagaatggtcaaaatcanaatgttcaaaataataatgctcaaaatcaccaataacagaatgctcatgatgctcacaaggcactaaatgatgtctaaataatctatgaaatgtcctatctatctcagaatcaaagggttgtaagtcagatggattgtctctagtcatacactatattcagcatgcacagctagttgccttcttatgcaagtaacagtgtaggtttgaactacaactaccattaaatgata

SEQ ID NO: 61163 - DNA, 192 bp, Glycine max
  unsure (1)..(192): unsure at all n locations
gcagctatggtcgatggccaaatcttgattatgataatgtctganaacctaaatagggaacttgacccattaaagacaacatctttagatatatatatctttcctataggtgaaagacacttaaatcctttgtgagaagtagaatatccaagtaagacacgctcatgagaccganattctatgttttgacta

SEQ ID NO: 61164 - DNA, 244 bp, Glycine max
tactgccgatgcatagataacgaattagtaataaatttaattaaaattcattaaatctattcttttagaatctatttatgattaaataagattaaaaatagattttaataaaattaatcgatattatattaataaatacattttattatattaaccaatttttaagagtaaagcaacctatattggttgaggacttgattaattcttactaaattctataagttatgacaaaaattataaataa

SEQ ID NO: 61165 - DNA, 295 bp, Glycine max
  unsure (1)..(295): unsure at all n locations
aagcagaataataatacacgtgttcaagagatanganaatagaataaaagtcctgtcatgggtcctgtggtcctggagaggggtcatcctgngctgctgcataatccatatatgtggcctcatcctcctcctcagacagctccagcacatgtgcagccaccggtgatgcctgctgagaagacaactctagcccatgtgtagtccccggtgatgcctgtagagtcatctttggagtagcctctataagtgtttcctgagcagctagatcggtctccggatcacacctttgaatatc

SEQ ID NO: 61166 - DNA, 272 bp, Glycine max
  unsure (1)..(272): unsure at all n locations
atacttagtatttattacctacacttaacagaanatacttataacattaccaaataaccattaattgggagaggttgatacaatttatacaagttttatacacaaaagttagtcggtttcactgactaacacatacatgttcatagtccacacatatcttntcatacaagacacctattcactaaatatagctntaccatgtaacacaagttccctgagagtcaatactcgggtcttaccgttatactacttgacgatctggtggacttgcg

SEQ ID NO: 61167 - DNA, 320 bp, Glycine max
  unsure (1)..(320): unsure at all n locations
caccattggaaccaacccanagcttcctctccatcgcgatcatcaccgcttccagcttgtcctcttccctaactgctcgtaaccaanaatatagctcaatcttggtcaaccagtccattggatcctcaccgttgaatatgggcaattctaaattcctccaccggttggccgtgtgccctgccgtaccttcatcccctccgatcgttaatgtgcccggccaaccttggatcatcccttcgatcgagctcagctgcaattccaccgcttcgcgaatcttctccatcgctttcttccatagcttcatgcgtgtctccattctt

SEQ ID NO: 61168 - DNA, 414 bp, Glycine max
  unsure (1)..(414): unsure at all n locations
gctggtacctcttttactcataagaacaccggttgatttcttgtggtctctactggtttaccgcatcttctanatatattcgatgcatacatgtggatgggcttataccatgaatgtctgccagggtccagcctatagccttcttatgcttcttgagaactgataacaacttctcctcttgctcatcaacaagggaggcagatataattactggataactttgctatcatccacagtagcatattttaaatttatggcagacgcttaattctggtgtggatgctggatagtggtagaagagatggtctctatccctgtcctcataagaaagtcagaggatgtgtacttctgaacatgggtatttatctacttataattcactctagagtaaacatcactgactgaatcatataa

SEQ ID NO: 61169 - DNA, 279 bp, Glycine max
  unsure (1)..(279): unsure at all n locations
ctcatcaatatcatatccaaagaacgtgaatggctcaacaactcacgtgcctattagcaatttataggagcacatgtccttcaatattattgtgatgatgatagctgggaagagatttggaggggacacatctaatcaagaagacaatgaggcatggacgctaagaaacgctatcanagatgccacatatctatgtggtggttttgtggcagcagacgctattccatctcttaggtggattgatntccaagggtatgtgagtttcatgaagaagactaa

SEQ ID NO: 61170 - DNA, 274 bp, Glycine max
  unsure (1)..(274): unsure at all n locations
acacactttactcctatccatccaagctatcttcttctcttcttgattaccaccccagagaaaatntctctgaatggtagtgagcttcgttaatcactgctataagagcccttaaacatagacatgtattacaagagcagagctgcttagacagcattaattagagtgattatgccagccattgatatacttctctgcttccatttggtcaatctagtctcgaattagctgattataggctgccacaccaccttctctctcggattgacaccta

SEQ ID NO: 61171 - DNA, 370 bp, Glycine max
  unsure (1)..(370): unsure at all n locations
gaggggggagcacgaaattgaacgaataaaagacggagagaagtacaactctgaagtatgtctcacaagactctcattcatcacagntacaacaagtgctacacatgtttctatttatagactaggtagcttccttgagaagctctcttgagagaacttccttgagaagcttctttgagaaaacttccttgagaagctagagcttagctacacacacctctctaataactaaactcacctccttgagaacgtttcttgaaaagattcctatagacgctagagcttagctacacacacctctctaatactaagctcttctcatgagatgagagctagaactaactgctacccctatatagctaactccccc

SEQ ID NO: 61172 - DNA, 478 bp, Glycine max
  unsure (1)..(478): unsure at all n locations
atccttaagtcacctgggctgcagctataacatcganataataataatggttcttttttggttatgataacataatagattattcaatatttacttttatttaagggtgtaaattataataaaaaaacatatatagttgagtattagaaacttgtggtaanagttaacaacatagatcaagagggtgtaaananaacatcgtagattataagtaatccattggtggtaatgtaaagcgtatattttgtacggatataattccgaccttggcgtcagtggtagagcggaggactgtagttggtatcataccanataggtcggagcttcgaatccggcanggcagaatattggtttntggtcattattgttagttatgccactttgaatatgcaacctgttcgacctatntgcatttgcaggagtttnttatttgatcaangggaaacactctatctanagataaaatataatcactaaa

SEQ ID NO: 61173 - DNA, 286 bp, Glycine max
atagtgaaaaatttggataggggattcgttggacgacagcagaaatttttaaaaatagggacccataaaagcttccaaggacaaattgaattaatccaatgtgcagctgctgctgattgcattcatatgctgataacaagcatttttacccataaagaattattattaagataattgttttttaatatatgttatattcaatactttattaatattattttatttttccatcaatcactgtattgtactttacttatacattgttacatattgttgtcttatctat

SEQ ID NO: 61174 - DNA, 301 bp, Glycine max
  unsure (1)..(301): unsure at all n locations
tcagcttcttggaaacttcctgagagcttcttgagaaacttncttgataagctagagcttanctacacacacccctctcataactaagctcacctncttgagaagcttncttgagaagattcctaaagaagctagagcttagctacacacacctttctaatagctaagctctacctcttgagatgagaagctagagcttagctacacacnccttataatagctaagctcaacctcatgacataatacatgaaaatacataatagtccctactacaaagactactcataatgcctcgaaata

SEQ ID NO: 61175 - DNA, 305 bp, Glycine max
  unsure (1)..(305): unsure at all n locations
tgtaatcactacacanatactgtaatcgattaccaaagcagaatttcagaaaatattctcatcagtcacatcttnttatgtggttcttgaatggctatcacaggcctatatatatgtgacttgagacacaaatntgctaaagttcttgagaacaaaaaggtcttatcctcttaaaaagcaaaatcgttttatcctcttacaaattccttggccaaaacacttgtgattcaataaagaattatttgagtgctcaaattggtcaatctatctctttcaaagagattacttcttctcttcttctttat

SEQ ID NO: 61176 - DNA, 394 bp, Glycine max
  unsure (1)..(394): unsure at all n locations
ctctcaaagagactgttcgattaanctgagaatctagattgtgggttgatatatatcttngaaaaaccttacctattcgttcttaacaccgattaagaacatccgcttatatcaatcaaagttctttcaaaattctttagaaataagaaactattatttgggcccttaagatcaattccacagccaatatgattacaaaactcagagtaatagagaatatgagaaatacataagactttatactggttcagtccaatctggatctacatctagatgttctaaatccttctagaacttccactatacagaaaacataagggcaaacatatttcacacacaattctttattacaaacaaatcttctcttgaatctacgagaaagattagcttgaac

SEQ ID NO: 61177 - DNA, 531 bp, Glycine max
  unsure (1)..(531): unsure at all n locations
tcttcnggccattcaaagttctccaccacgtgcgttcggctgcttatcatttttatcttccacccgagtcacagagccatcccatcttttcacatttccgctcctttgcatctaccatggaccanacactctcacataatcacctcccttccaccctcatttgcactaaacctcaattaaccaacctttnctcccttggctaacatgcccatctggattcctgacaaagacataaccagttcgaactcacttgtgtcttccccacccaccacaaacaggttactttccttngtcctctctcctcaactttcaccaaantcaattctatcacaatcatcgatntcaaagtcattggccctacataacctctccaaactgacacatgtattccattatcacctaccccaaccacacttgagtctgcatacccactaaccaacccacatatacctgnctccattgaccttgacgacaaggtcctctatggtcgaagcattaatatgacaacacactcgtgaggccatcaccatg

SEQ ID NO: 61178 - DNA, 308 bp, Glycine max
gacataaaacatactattgataaaacatctattgctagtggttgtaaagaccaaccttctcctctgctgcaacttactacttgcattttactggttacccagactatctaatcatgtctagcggagtatctagtttttagagggcttattgaagtaacctgcttaacagtcctgattcatctcggatcatcgttatttaatctgacattgggccttccgcaacgactccttgacatatgttataaaagtaacaacgactcaggaatcaccatgtaatatatatttacaggcttttataacattaatct

SEQ ID NO: 61179 - DNA, 324 bp, Glycine max
  unsure (1)..(324): unsure at all n locations
acatgcctcatgacaccnnaacacacttattggagaatggtggactngatcttttatattgtgctgaaccatggctaaaagtcactaatcataattagtgaaatattggctccacacatcaatntcacaatcagtgacatatgaatggaaatctaaatttccctccaggtgtctgtgacacttaggctataaaaagaagtcatgtgcgcgcattttatcaactctgatcattcgagaattacacttcacaagtcagacctcatttgaggcacaaaatatagtgttccttctctacctctccatcactcatcttctctgtattca

SEQ ID NO: 61180 - DNA, 398 bp, Glycine max
  unsure (1)..(398): unsure at all n locations
taccatatcttataatatttctgtcatcctctttcacaaatacacattagcaactaactgagtgagacttgactctcttctccatacaatatgtcaaaaataatgttatcgatgaacattttgattgatgatttttagtacaaaatgtacatgaataaatgtatatcatttatgaatactgttatttttgggtgacaatgtttatttacaagcacaatatatttgactttatggaagacatgtgtggtttatgaccgaaatactttggtacaacacatataggacgaaaacccctatataatgcatgggatttaccgtaacataacaaactatctatattaaacagaacacactctcttttccaacatcnacaatgtatacagacttttacattgact

SEQ ID NO: 61181 - DNA, 441 bp, Glycine max
  unsure (1)..(441): unsure at all n locations
ttgcctaataagatgaatattttgattctctgcttcgangaattctggtgataggaggcctatggaaaatggagggaataataagaagggagaaacccatgtgtggctgctgttcctacatggccaaatgttccattagcctaacaatatcaatactcggccaatattagtccttctcattacccaccaccctaccagccaagaatgcccaatcatccacaaaggccacccccaaatcagtcgcaaaatccacccgatgcaccctcaaatcagcctgcaaaatcaccctctcagtctttggaaattcatattcgaanacctgcacagtttcttttactgnttcttcctcacagggcatgacaaaagacaacaatagacacctttcagccctacactatggcaatgagaggtgttcgcagtccgccagtgtactgatcacac

SEQ ID NO: 61182 - DNA, 262 bp, Glycine max
  unsure (1)..(262): unsure at all n locations
tctanactntgtacaagaatgaagctctgatccactcgctgtcatttggcctcttatatcttaagaaggggggggtgaatgaagatattctaaactgtttcccctaattaacaatctatgtcactcttactcaagtgatgaatatccttaatgacgatcttcttaaatattaattcaaatgaagcaacttgaatatgaatataaagcaataataaataaaggagattaagggaagagaaaatgcaaactcagttttatactg

SEQ ID NO: 61183 - DNA, 358 bp, Glycine max
  unsure (1)..(358): unsure at all n locations
actctcagccacttatgatagccgccgatgatcccattactgcttccnctaagctctctgtcctttcttcacgccgcatcccatgccttgcgaactccttggagtaccctcgcgttgtggtcactanaaccccgtgcgatgaaaggcgtgacgctntcgtctaatggcgcttctctcatggngtagccaagctgtcttatggcgaggacnggattataattaatacaaccccttngtnccatcaagagaacgatttgacattcttcgcatgaagatagaatcctgattcttccttccttctagcgaggagactcaataacagacgcncctccatgctagccaagagtnggcccagttc

SEQ ID NO: 61184 - DNA, 468 bp, Glycine max
  unsure (1)..(468): unsure at all n locations
attatctaagtaatcgantaaagtgttcttccttatatctggaaataactcaagaacaatgtaatcgattagatgctcttagtaatcgattaaagtgttcttgttcacttgtgaacaataaatgagagaaaagtaattgattaatccatttggtaatcgactaaagcttagactcttgaataaatcaatcattgtctcanacaacagtgtaatctattacaaaactacagtaatcgattaaatcgatatgagactcaactctnttagctttagacaacttgtggaatggattatgatgaagccgtaatcgataatatagagagnttttgctgagataaaccttttaacttaaaactttcttcaacaaccatgatatcatgatcaattagatataaattactagatgcacaccagatcaccatacaatgccctaaggagtatgctgttaagtaaccatttctaactctt

SEQ ID NO: 61185 - DNA, 343 bp, Glycine max
  unsure (1)..(343): unsure at all n locations
atgacacatatgctnnaatgatgactcggatactttatgccaaactggtcatgcatgcacctatgtggatgctcaagtgtcaacattttactggcatgtgatgctatggctcaagattcattgcctctatattaaatcaacccaatggttccaaaacatgctcttatatccatatgtgcattcatgcgagtccattgtgtgcgtgcgggaaaattatcacagcattcacccttcangtgacacacatttttcaatactagctatatcagcgaatttctttaagaagagtggagcatctctttagagcatgtggctctcactagacactgatcttcttattctc

SEQ ID NO: 61186 - DNA, 425 bp, Glycine max
  unsure (1)..(425): unsure at all n locations
gatgcgagagaaggccttanggttctcatgatccttanggtagatttctatctcatgggctaagtatgagctcgcttatcttcgtgcatattagattaaggtttaattattntagggccttgaatttanggtccacaatatatgtaagggaccttagaaatgtangaattttcagccatttgaatttatggcacctagactatgttttgtattaggggtagttttgtaatatcacatgcattaatgaatattngatgtgtgtggttggaaataaatctaattgaattgngagaagcccaatccaattaaatcttagaggggganggtgagcatttgcttctagacctcattgccacatcatacagtcacaatttatgcatgtcctttcatgcttacacgcctcatgacacctaaatacacttagt

SEQ ID NO: 61187 - DNA, 220 bp, Glycine max
  unsure (1)..(220): unsure at all n locations
tctagcttctcaaggaagctntctcaaagaatgttctcaaggaagttntctcaatanagcttctcaaggaagctacctagtctgtaaatagaagcatgtgtaacactttgttgtaactctgatgaatgagagtcttgtgagacacaactcannagtcaacttttctccctttnttttcctatcaatatgtgctccccccctctctctttctctccctctt

SEQ ID NO: 61188 - DNA, 410 bp, Glycine max
  unsure (1)..(410): unsure at all n locations
tatattaaacatttgtgtacaaaagctgacaagcaagatgtcacagtagttatatgtccactctgtgccaaaggagtcgcctagttcctgatcaagatccaaacataacttgngagaatcatgtcaacaccgagtgcgacccatcgaattacgagaaagtcacanagaagaaaaaatgccctgtccctggatgcagagagatattagtattctcaaacacaattaagtgcagggactgcacagtagagcattgtttaaagcatcggtttggacctgatcataaatgtcctggtcccacaaatgtggaatcaaagttttcattcatgaatctcttgaatgggagtataaagcaggagtccaaacccaagtcaagcgcaccacatcatctaatggagtacagctttttatgc

SEQ ID NO: 61189 - DNA, 384 bp, Glycine max
tgattctctacatgcctcttaagtgcggatgaccaatctgtatgccatacttgacttcattttctgacaaatacatgggaggataactggttcttgacggtcatcgtacattggctgtgactgtgccttataagacttacttctattgcaccacatacacttgtaattacatgatcttataccactgctgagtataagtagagcattcctctcacagtcttttcaacagagcctcagactcttccttcaggacttcctaagctctcatgtaatactgtgacatgtaattcccagaacttgatcttagttcggacgcgtcctatccattcttcttacctaggagagaaacaattccctgtgtagaccccatctctccgtaattac

SEQ ID NO: 61190 - DNA, 242 bp, Glycine max
gacacttaattgtgttggatctaaattctggtatcttcttttattgtgcactatatctaggtagatgtaatgttattgaactctcaatgcatcacctacacgatcctacgtgatacctctaggaagtctgacacatgatacaagcgaaatcatctgacatcatgtggtggtcacttactagttttggcacaccctaaactgtaataggaacatgtagctgttttactaaatcctatatggca

SEQ ID NO: 61191 - DNA, 295 bp, Glycine max
  unsure (1)..(295): unsure at all n locations
ttctcatgaatacttctcgtcggaatacctacatgntgtaacttagctgattgtactgaacacattccatccgagattcgaccgataaggacttactcgacaactatcatcagtattttgctcgaacatcatgttcacttagcttattggcctataaacatactgcacctgatctattggcaaatcaacatatttacactgacttacaacttaccatcatanggtacactgatttatgatcttgacagcatagactacctacaccttataaactggcaacatcatgttccttaac

SEQ ID NO: 61192 - DNA, 183 bp, Glycine max
  unsure (1)..(183): unsure at all n locations
aacaacatgctcgcaagatcaaagaacagctcangtgaatcagagaacatacatctcacagactcaagatcaagccgagagttcaagaatcaagaagaattcacgactcgagatgaatgcctacacacaagaatctagattcaagagtcgagatttcaagaatccatccatatcgagactcaa

SEQ ID NO: 61193 - DNA, 295 bp, Glycine max
  unsure (1)..(295): unsure at all n locations
agagaagntcaagtccatagccatcanagtctgaagagagtatgatgaactaatggactgttatatgtgcaccgatgtaaccatggtatgagaaaccaataacgcccgataggaagaacacgaccaatacatagtttgaggggctntatatggcatcaatactgagctcagacttcgaagaggtgaaaggaatcatcatgtgtcacatgcatgatctggaatgacgagctatatgcttgccttangtctagaagaaaattgtctcatcacgntaatgtgatactgaatggaatat

SEQ ID NO: 61194 - DNA, 404 bp, Glycine max
  unsure (1)..(404): unsure at all n locations
gagttctctcacgatgttgatgtttatccatgttctcagnatgaaaatgagtagtggaatgctcaanatcacaatattcagaatcaccctcaacagaatgtcagaatgaccaggatgcacactatgcctaactaatctatgaaagggtctatctatttcacgatcaaagggttgtaaatcacctgtattgcccctagtcttgcactatatgcagcaaatcatgtatttctcaaacaagcaccactggtaaaaacggngtaaaactaggggtaaaactacaactatactcanacgatatccaaatgagctaanaatttgtgagcaacactctataacatgttgcttccacttgattcacaagcaagtctcttatcctatgttacgagaagttatccctaaacatg

SEQ ID NO: 61195 - DNA, 501 bp, Glycine max
  unsure (1)..(501): unsure at all n locations
acttaattactcttacaagaccgctgtttggtttnttccaaccagcttgacttaggaccactggtcaactgtttacccctatttacacccttcttgttaaaaataacataccatgtactttgactgtgctcaccantctctttgaataccaggtgaatattcaaaatacatcatatatgtagtgaattaccttggggatgtaatactctacatttttcataaaataatgattatgtctccacccacacatggtgtctggtaggatctattgtggctttgcaagtaaaaatgctgaatggttctatgaaagttaaccatcagatgcaaatgtctctcagtgtggtgttgcaatggacatggctataaaattgcatgcatgaataaatcttattgtttctatgtgtaacatgacacatgtatgaagtataatatactatgctcataatacttctattgtgagaatgacatacatgacttatgtcgtatttaacgttatctcat

SEQ ID NO: 61196 - DNA, 319 bp, Glycine max
  unsure (1)..(319): unsure at all n locations
agcttntgccaaagattattggcattgatcacgctcatgcatacgcatacacatgtatatttgttatgttgtgacangngcaggatcgctttatgcaatagtcatataccgagccatatccaaagacagagacgaatcacgtaagcggtaacgcggccacgatttgctgcgcaatgtcatttcctactnttaggtacttaaggatgggcacgagtggaggctatgcccatgatcaatggatcatcgtcccacgtctagctccggacaagtgagaagcgctactgngaggcagcctagtatactctaaattcctacttat

SEQ ID NO: 61197 - DNA, 499 bp, Glycine max
  unsure (1)..(499): unsure at all n locations
atctctgagtcacctgcggctgcagctttaactcagctaatcttacctacanattgagatttattttacantaaactaagaagaaccatntatataatatgatatctcacattaagtacaataatactcaaagaagaggatgagaattaagtacaataatacataaataagaaaatgagaatgggaacaaagataacatgaacttgtattgagaagaccaacaactatgtcactctaatttcactcttctcttggaagtcagagataatccaatgaagttcaatgatctttggggtatgtagtggaaagaatgatttaaacactaaaagcacttcatccatggctacacatacaangggtaataacataacaatatataatttattaaagaaacgtggaggacctagagaanaaaaatcataccanataacttctttggttcatnctctgacagtgttgcaccaaatgcattgaagttctttgagtatgtacctatata

SEQ ID NO: 61198 - DNA, 268 bp, Glycine max
  unsure (1)..(268): unsure at all n locations
actcttatactcatatatagaatgatatctatctcttttatgatatatcctctccatcccncattaatcaatgcatgcatgaattgcattcttgtgtgttctcggagcttactgtcttgcttcccctagggcttgaatatataaccatatttcctttcactgtcttgatgtaaaagcaattggtgagacttaattaattaacagctctctgatatgtgatatgtacagagagtagtattaacgtggacttacatgatgatagaaatca

SEQ ID NO: 61199 - DNA, 338 bp, Glycine max
  unsure (1)..(338): unsure at all n locations
tacttctgtacaagaaggagaccgtggagtatcatgaatagggtntcataatacagtctggcaggttggcttctttatgaangaccttgacttggngtctttcaatcccttcaaggatgtgaaggatggtgtcctagttgatgaggaatacattgctgtgaggagaaggttgttatgaatgcaaggtgtgccgacaaggcatgatgctgngtctatgtgctttgtttatcttctttcttcttctcaggattgaccatgtatgctgcgatatgtcatatatgtaccttgctttcacnctctgacttgggagtataatagtcgtaggatgacaatcttga

SEQ ID NO: 61200 - DNA, 423 bp, Glycine max
  unsure (1)..(423): unsure at all n locations
acatgatntatccctanatggcagcannactatttctaatcattggcatttgtaatgtntcaagaccaactgcacagggagttttattctaaccaacatctgtaaattatttgttttccataaatctaactgaattcatatattctcagaagcatgcttaaatcattcagaanatgttctaattcagaattcaaatctctttcatacaaaagtngtaagtgtcataaaagtaacttattactagaaccaatgtcaatgcaccagaaacttctcaatcattgtggaaaacattcactgagtgttaaagcatgtactattacctttgtcangcanaaatcttccactgatatatctatctgagagaaattgcagcttcacaagtgcactgtcagaaattcggactcccatgatgtagtcatacct

SEQ ID NO: 61201 - DNA, 554 bp, Glycine max
  unsure (1)..(554): unsure at all n locations
gtttccactatgctctngtgtggtgatacaagctaccaaaggagagagcaagaatngaagagcctatgacatgggcggagatgaanaggatcatgacggagtggtatgtgtcggctagttactcaatggattngaaattcaagctccaaacactaacgcaaggcatataggggggtgaggagtatntcaaggaaatggatgtgctcatgagtaaagcatagattgaataagatgagtangtaactatggctcgatttcttaatggttcactaatgatatccatgatattgttgagctgcangagttngtnatatggatgattctgcttacatagcattccaagtagagcaacaatgtaaaacgagatgagtggcttataggaagtttaccaacttcggttcttctagttaaaagacaaagctaagaaagatggtgctggactttagtagttcacacctctccatcaaaactactcaagtccaaaagaacctctnatgagtaaatgtaatgttagtccacgctagaatatctatgatgctacaaactcatgtcta

SEQ ID NO: 61202 - DNA, 441 bp, Glycine max
  unsure (1)..(441): unsure at all n locations
tcaccttctggtcctnctcatagnntgtgcattagaaaacatgctctattntcatcttccactccaagtaggcctccggatcattctttcctttaaatggaggaatgtngagtntaataccatcaattcgttntgtgtaggaataccatcatccnctcttctcctcctttcttcttcattatgatctctanttctccattgatccaacctctcatggagcgcatcatctcgtttcattaacctctccaaatgttgcatcaaagcttgcatttggaatngcgaaagccccactccatcattaggaatagtacctgacatctcanacaaacaaatcanacgtaacaagacaattatagttgctggttgaatacctcacccactcaagtgtatcacacaatttatggctttctctaatganacactctttgcttttaccactct

SEQ ID NO: 61203 - DNA, 519 bp, Glycine max
  unsure (1)..(519): unsure at all n locations
accatggtgagccaataatataccggccctaagggattttctggccatagcatgcccattggcatgtgtcccanaggaaccctcgtggatctcctcaatcatgaagttcgcctctttggcatctacgcatcgtaggagggtcatgtcgtggtttcgtttgtacaggatgctaccacttacatagaaaccagtagccaatctcctcaacgtccttgtgtcattgtcagaaattcctggtgggtattcttgttctnacatactgctgatgtcaaatccacggttcccatcctgttctcctctattgataacatatgccgcctgcccgagattgaatcgatgtacgagatcccgtgtgggcaagtgaacatgatgcagggtggtagtgctcaccattgatctcttctgagatgtgtgaagaatatataagacttgctactaagatggattgtatgataactcgaacctagttcatctcttaactgcgatacaagctatctcatatctagagttactaaatca

SEQ ID NO: 61204 - DNA, 406 bp, Glycine max
  unsure (1)..(406): unsure at all n locations
ttggtcttcgccagtganaggatcaatgtgggtccgataagaggcaaattttatcatcctactaggacgactgagaaaactgcggcatataaagagggtgaggatgagggagaaacccatgctgtgactgccttcctgtacggccaaatntcccaccaaacccaacaatatctttactcagccaataacaaactttctccttacccaccacccagttatccacaaaggccatccctaaatctaccacaaagtctgtctaccgcacttccaatgacgaacaccacctttagcacaaaccaaaaacaccaaccaagaagtgaattttgcagcgagaaagcctgtagaattcaccccaattccagtgtcctatgctgactngctcccatatctactngataattcaatg

SEQ ID NO: 61205 - DNA, 454 bp, Glycine max
  unsure (1)..(454): unsure at all n locations
catgctgaatttctaattagctatgtctatactctgcttgacatangaaagcgtcatattntattctcttgacttgaagtccaatgaagagagtcaatnattccatcatatacatctcagagtatttttgcatagagctaacatattccttacacatagctttactactatcaccagagagtatgtcatcaacattaattcgcacaaccaacaactctatgtttgatctcttgataagcatgcttgtcatattacctcttactatgattgccaactatgaaagtgctcaatattcatacaaaatctacgtgcttgtttcaccatacagagtctgttnagcttctaacatgatangatgttcgaatctacaatacctgaggttggctaccatatctctcttcatgatacattgagaaagcgctctcacatcatttgaataacctgaatcataata

SEQ ID NO: 61206 - DNA, 340 bp, Glycine max
  unsure (1)..(340): unsure at all n locations
tactcagcttatgaatcaccacataataactaccctccattatatagaagcatatgtgctttattacatattagtcacaagtcatcanaacacacatcatttgtctaagttacttgcatctagaaatcctaattctcttctatggtgtagaaagagtctttggttagtggctttgtgaagatgtctgcaagttggtttttagtatctacaaatctttaaaaatacagtcacttttttcctaagactaagtgctaattgactaccaacacttatcaagatgagttcttattaacatacaaggttctatcatatcaacataactttatgtgacatacaatat

SEQ ID NO: 61207 - DNA, 461 bp, Glycine max
  unsure (1)..(461): unsure at all n locations
ttaagcaccgagctgcagctctaggaactccanttataatagaacatgtgtacactttgtgaactntaatgaatgagagtcttgtgagacacaactcanagttcaacttctctccctttttcttncttcaatttcgtgctcccncctctctctntctctccctctntcttttcctccattgaagcatcctttccaagcttcttatccaaggctcatcttggtggtgaaactccttcttgcatggcttattccctagtggatggcgcctcctctcacctcttctcctttgtcttccgctgcatctccatggtggaaaatcaccattaaaggacctcattgaagctcanagatccagtctctatagaagccncacaagcaangcttcatcaacaatgctctgagggcaacaatntatacacanatcatcgtatgtgaagtaagtcttagaataatngactgac

SEQ ID NO: 61208 - DNA, 386 bp, Glycine max
  unsure (1)..(386): unsure at all n locations
tctaanaccttaaaaattttgatagatcaacttactaccaaactatcataattaatgattaaactaatgacacaaataatatatacttatatantttatgttactcatgccagttatataattcgattatcaacccaccgattcaatgactcattatctcaatcaatctagttntttaaacattccatanctattttaatttaacattggtggagggtaaactatagaaggggattttctttntactggacgataaggagaaattgaatgcatttgttatgtagccaaaanagtatatagacaaacaaatattaatatagaataaagaataaaaatanatatttgataaaacatttttaataactaaacagtccatcacactctta

SEQ ID NO: 61209 - DNA, 363 bp, Glycine max
tatgaccaaccaaatggctatgaagatctgagatcatccacgtcgtgccatgagctgtcctacataatttcttctttattgttatcgacagcagatgcactagaggtgtaacaactcgctcactgtcatgaattgagatgcttcaaatgcaagtgccctgaatggatctgtgcactcttctcagatcttactcaagtcactgggtgcacatgacactccgtccactgcatggagtatacacttctggatgtggacagactgaaattgatccttggatctctatgaagtagtatgaactgcctgtcctgtgtcttattccagtaaagatatatgtctggttggatagcatcatagatcctctct

SEQ ID NO: 61210 - DNA, 127 bp, Glycine max
tgcgcacagctcaccaagactctttctctaagtatcactactacaacaacaaccttgtaacgtggcatcattgaacttctcgaaagccacccttctcacaacgttgtgaaatcatctgtcacacaaa

SEQ ID NO: 61211 - DNA, 420 bp, Glycine max
  unsure (1)..(420): unsure at all n locations
catctaatagtntcactgggaagttaccagactacttgtgctatcatgggatgttacttagcttgtctgtntatgacaataatctgagtggtgagttgccggaatcactatgannatgagtggtttactggatttgaaagttcacaataatgagttttctggtaacattcctagtggtctttggaccatctttcaattgacaaatntcatggtgagccataacaagttcactggtgtgcttcctgaaaggctatcttggaatatttcaaggtttgagataagttacaaccagttctctggtggaattccaagtggagtgtcatcatggactatatcggtagtgtntgatgcaagtangaaacaatttaatggaagtattcacgacagctaacagctctttctaagtaacaaccttgttgt

SEQ ID NO: 61212 - DNA, 326 bp, Glycine max
  unsure (1)..(326): unsure at all n locations
aactgacacatatatataaacctatattataaagtgcactacaagcacgagatgataatataagtgttcacaagacacgacaatatgataaaagtctgtcatgggtcctgtcgtgcataagggacataatccatagctgctgcatcatcctcctccttagagagctncagtaccagtgttgtcactgtggatgcctgcggagtagagagctccagcacaagtgtggtcactggtgatgcctgtggagtcgtctctagagtggcctncgcagtgtcctcctgagtagctgtgtcagtctctgcgtcacactctgcatgtctggctct

SEQ ID NO: 61213 - DNA, 279 bp, Glycine max
  unsure (1)..(279): unsure at all n locations
agcttatcctcggatccctctggtggactacgctgtaattatatagcactataatcacatcataattaagaactaanaaacatgcaatctatccctagcaatgcagttatctagccctgctctatcaagttctaaggaaataatacacttcccagcgctaaagttcctaacagtacacaccaatgggtgatcaaaccatacgcatgatacaatgaagcatctatagaggcagtgaacacgtaagacacactgaattagatatgaatagtgtttacaaca

SEQ ID NO: 61214 - DNA, 323 bp, Glycine max
  unsure (1)..(323): unsure at all n locations
catgccatatattcacatatatacataccgttgaaacgtattctccatgctactatgtgcaaggtattcctcatggggcagccaaatttaaattctaataataaaccctcaaacatgtcctaatattcatgcctttnntacattaaaaccaaaatttagattcctaagcataagtcatgcttccttgcattgaaattaagaagcttgngttcctatgcctagaattgcattcggactctcatcttaaatnccttcatgtgaccctatatatataaaacagtcccactatcacaagcttacanaaccatgctcatgtgtcattg

SEQ ID NO: 61215 - DNA, 523 bp, Glycine max
  unsure (1)..(523): unsure at all n locations
gctcgggttcttcgccacactggccgtattcatattcacctgacatcaattatgtgtgctcttagaagtttgacaatacatacatcaacactctttatggaagtttggagagctaaaagatacatacaaaatatagcattccacccaatcttcaaatntgtatcttaacatagatcgatagttatcaagtaaatggtacaggtatgcaactcgtaagggtgagaagaagctcatcacttacaatgatttctntaaagagaatctagtatgcangaactattatatgacactgagtttgagagaacttataactataatatttnagcaatgttcaaaaatggcactggcgtgatctggcacacatcatggtttagagttctgtgactcattcgactcattgcccacatacccacattgtcaaattctcctcatcaagattgacacaccgcacccagtgcattaaaccttgatatggactatctatctttaatatgatgcaaccattgtcagacgcatcactata

SEQ ID NO: 61216 - DNA, 312 bp, Glycine max
tactaagcttgatagacatatgcttctctggtttgtttgtttcttttctcttcatatattacaacaaaatctaagaatacaaacaaggaacagaattcactttactcattcaaattcatatcatatttgcaaggaaatgtcagatattgcagaaatttattcatcatcaacttactcgtctttgtactgctgaatttcaccttcaggagaatctccagatgggaaaaggtcaataacagacatcgatggtggatcagtctgttgcaagagttctttctttttcctgatgacgcaaaaataaaatcagaacct

SEQ ID NO: 61217 - DNA, 356 bp, Glycine max
  unsure (1)..(356): unsure at all n locations
atactcaagaagtgcatactgagcagacaacacaccaagccttgtgctgtgcctacgacaccacatccacaaaccaccttccaggcaatcaaacccaaaagggtacccaaatgatcaccaccacaacccaagcaggcaccctggacctctnttccctcacagagtcctctatagagggtggcggatntggcgctagcggcggacaaaccttgatatatgaagtgctaggcagcgaaagatcatgatatccactaacanaatcttctgatttaatacacactgccncgagccatctgacaaggaagtagcagcanaacaggcacctcgaatcganagacaattcgtactacatgctg

SEQ ID NO: 61218 - DNA, 499 bp, Glycine max
  unsure (1)..(499): unsure at all n locations
ngctgcagccttcagcatacaagaatttaagtntatccagaaatccaaccgatttatgatatttaattaaattctcacaattgcaaaatgataattcttgtaaaattgggacaccatataggtcaggttctctcttatatattgacaatcattaaaattcanaactctcatcttcaaaaaaatctggcnaanaatacaaaanagagaaagaaataggagtcaaacaaagaatattcaaaataatttattgatataaagtaaagaagagaacttgtatgcttaccttcttcgacttgagcacatcaagagacattaagcaactataaggaaacttcagtatgacaagtntcttgngattgaaatcaattggtanagatggtgaagggtatanccttcattctaatactcttaaactattcngaagatgtatgggaccntcatgaagacaccacttctaataataagtgttganggtatcatcntctgaatgcactcatcc

SEQ ID NO: 61219 - DNA, 202 bp, Glycine max
ctatgacattgagtgcattggagagtcttgagataggattggagactttaatccttagtcttatcctgagaatctcttaacactctagaagagagtaattcatcatcattatcatatatctcaattcatcaacatatgtaagaatgcagtgctcaatgctatgcaatgcaatcaatatgcaatatgcaatagtgtatattct

SEQ ID NO: 61220 - DNA, 98 bp, Glycine max
taatagagggagatcagtggaactttgaagtctgtctcacaagactctcattcatcacacatgcgacaagtgttacacatgctgctatttatagacta

SEQ ID NO: 61221 - DNA, 321 bp, Glycine max
  unsure (1)..(321): unsure at all n locations
gagaagagannaatgaaggatngaagaaatacaagtagtgtgtatgtctcttctatctctagaacctcacaatcactcacagactcatttcatgctctcaggatggcttcctcttctcgctcagtttttgccagtcttctcacagcanaagccctcataactctntggaacttggatcttatgtattttcattcgcacgccttttattcctttcgataaagtgtaatctcnggtaccaacttttcccgggttacaatccttttccaaanaaatatgcttgatagaaaatgatngaaagaaaaagctaaaagaaaaaaaagc

SEQ ID NO: 61222 - DNA, 128 bp, Glycine max
acaggatgttgtaaatctatatatgccgactgttcatgtgtaatcgattacactggatcggtatcgattaccacagcctatcctaggctatgttcttacgacagtatctatgttatgctagaacacat

SEQ ID NO: 61223 - DNA, 504 bp, Glycine max
  unsure (1)..(504): unsure at all n locations
aatgtaattctaattctatcactggttcttactgtgtgtatattatgacatggcatatcaactcgctacttcaagaaaaattatagtaacattaanatgatatgggtcccaaaaggatcctcatttatactaacatgcaaggacccaataaaanttgngtacctaagtcaaaaacttgattatgcaggtatctttgagaaagaagtggtacatagatagcggatgctcataatatatgactggagatgcatcaatatttacacacatatctccaaagaaaagcgggcatgtaacatatggtgacaacaacaaatggtagacttcttggagtggtaaaatacgtacaaattcttcatactccattgaaaatgttctacttgttgaaggccttagcacagcctgcttagcgttagtaactatgtgacaacgctatctaaatcatttgatctcacaatgtttataaacataactgacttaatataagcatgacgactagagtcatat

SEQ ID NO: 61224 - DNA, 411 bp, Glycine max
agcacgagctgcagcttctattattatagtagaggaaaatcttcttatatagcaaatatgatccatcatcaaaatagtacatattaatatgtactcaaaaaaatctttctaaaccttaacaaaagaaagtgtgaataacttattatgaaggttttaagattatctcaagggagaagtagttaagtgctattttaaccatccatgtctcattattttttatattcatccgataagaactattaatgctaatgacattacccttattattttggtagttaacttatatcaaagtcatatcttcatctattttgtcattagcttattttaaaaatattagcttattattttgagccttgtcttatctattttttcattaacccatcattaatacccctattcaaaagttttgta

SEQ ID NO: 61225 - DNA, 342 bp, Glycine max
  unsure (1)..(342): unsure at all n locations
gctgacaggaagtcgtcctgagagctcgagatgagtctgtgagtgatcgngacgttctantatgtgactatacatcctcgccgctcttatntcttcaatccttcatttgtctcttctctttgatgtagaggaagcttcccattatggagagctaaatcctttgttggttcttacttgtaagtacttgatgtaaatacctgtatatctatttaatgatgttttatgtgttctctgtgctatcagtacgtcatatcaatgtgtttttgccttgatcacgtatatgcatgctttgttangatcattcaacaatggatactggtctgattcttagaactngattgg

SEQ ID NO: 61226 - DNA, 380 bp, Glycine max
  unsure (1)..(380): unsure at all n locations
gcactcgagaagagaaaggggcctatgctntacttgtgatgacaagttttcccctagccatcgttgtcctaaaagcaatattntgttccacagtgggaagaagaggatgaacctgcattacaaccagatccaccagacgaggttgagacagctggtgaccctagtttgcaagatcatcatttgtcttataatgctctanaaggctcatcaagtcttggaacaatgaagtttcaaggatcaataaatggattgggagtgcagattctactacataatgggagttcagataagttcctccagcctagactatctcaatgcgtgaagtacctatagaaccaattcctatttcagggtttggtggatatggaaatgcttgactg

SEQ ID NO: 61227 - DNA, 355 bp, Glycine max
ctatttattttttcagtctttattgtgtgtttgattcaaacaaaaaagtataaaaattcctatgatgcttactttcaataaaaaataatagctacatgtttgtccctcaaattttgccattctgacagtgtatgcaaataattatatggcgatccaaataatattttaaacccacttgaaatatattacattctgtaatttattactgcgagttaatggatgctctgtcaaagatcagacaactttattccgtgacataataccttaatgaggagagctgcttgtaaccaccttatttttggaacaattgattaattgcttagacatcatgacaaaattggattgtctgtattct

SEQ ID NO: 61228 - DNA, 261 bp, Glycine max
  unsure (1)..(261): unsure at all n locations
ggctatcgcaatcttgtgtaatcacttgatcaccgctatactcgctaagcccagaatgcccgcttagagcgaagtcgcatgaaatttaagctaccttaggctatcaaaggagtggccagcanatgagaaagatactgatactcagagctctctaatgaatacactccaagtttgagcatctcttataagggaaaccactctcctctagccactcatccctattgctttatacatacttcttctatttccatccacatttgt

SEQ ID NO: 61229 - DNA, 350 bp, Glycine max
attagcgctctagtgataactaacagactctactccaagggatccaaacatggtgagtgacttatttgaaatgcttgtttacaataaatgaacggtgggttctccaacagctagatatgctaaaacataccatgggaacgacgtgcctaagtcattatgaacatgcattatgtatatggacacacaaatacccctagatgttgaaatatgactaaggtcaataaacatctttccgaacatataaaacttcacaacaattcactagcactcagtgttacctagccagtgcggaggagtgtcattcttttgcctctgacttaaagctggaattatctgtcgatatacacttt

SEQ ID NO: 61230 - DNA, 282 bp, Glycine max
  unsure (1)..(282): unsure at all n locations
tcgggggatggggggccccaaacgcttatctaanaatgaatctatccatctcccactaaaacacaggcagcgtattaagaacatgtatacatgcacatgcatatgcatatcttatgatagcaggagcacaatcatctcaggccataaacaaaagtcgagacaagtcaatggccgatatcgaccaaggtaacacgatgaccggtcacgactgggccatagtatctggctcttacttgctggagctgcnggatggaagccactgaatgatacgatcatgatcga

SEQ ID NO: 61231 - DNA, 276 bp, Glycine max
ctgagaccttcaccgtgaggggaggctgcaagatcctgtggaggatggggccccttatgttttgctagcatgcagcttgcttgactactgaggccatctccagcagaggggaattattttaagcacgggaactatgctcactcgtaggtctctgtacaagcaaattgagattgctcacagtaattgtttaaaactctaaagtgcctgaccgaggacatagcctgaccttatcttatggacccttactgccgccttgataacaaataatgcgatgat

SEQ ID NO: 61232 - DNA, 353 bp, Glycine max
  unsure (1)..(353): unsure at all n locations
gcttctattgctcttatacatctttacttgngctatctcagaccttctattttttttgtttaacatttcgcatacacctccttcaaagtgaagagtgtagcctctctccatcatttgggccatgcttagaagattctctttatgctgggaactagtgagacatcatggatgagtcgcgtacctttatttgtcttcaccatgacagtgcctttgcctttagattcaaccacacttctatgtgccactctacctgtgacttgtgcagactcatcaatacatctgataactagctcatccttggccatgtgattgctctctcactatccgagtaccatcttcctcgctttcttata

SEQ ID NO: 61233 - DNA, 213 bp, Glycine max
agtattatttgttttaactttctacttatagacactatcaatccaattacacatactatattcagatactgacatatgccatgcttccaatattgactgtacagtccatctaccgtgatcatccggtagatgcacacccgagagcatcgatactatatgaacaattttgaatttgtattagagactctgcaagacaattgttttgctcccaat

SEQ ID NO: 61234 - DNA, 414 bp, Glycine max
  unsure (1)..(414): unsure at all n locations
atatattttaaagatatattatgatatagaatatacanattaaaaaaattatattttaactatttacataaattatatttgctaaaatatataatgagccttaaggtatataaagaagtctttacgcaaaccatattaattaagaactacatgtgaataaaataaaatcattaggaataaagattgaaataatttataataactatattaatacaagggtctcaattacatacgaatacacattttttaacattatgatgaacatatttgtcttgagttcaaataaatgcaccgacaaatgaggatcttgtctaatgaatcaatatgatctcatcaccaccatgactgcaacttaagtaaaagatatatctaacgctttttactattattgtaaatataaaaataagcagacgg

SEQ ID NO: 61235 - DNA, 406 bp, Glycine max
  unsure (1)..(406): unsure at all n locations
tttagagagcatttagcattctcggcttagctctctcattangngtccgactatgacatttatagcttatacgcaaataaataagtggatgtaattagcgtgtttacgagtgccccacgacaatagtagagccctttgtaatataaacatatatgagagcttgctaacacactttntaattcttagattcattctcttcctctccccccttctctctcttgaatgttcttgcttagntcttcattggagacttctatgtagggcagaactcttgatcaattcaaggatcctatagctngtggttagatttgatgccctatttaataggaatccgttcctcttttctttcattttgaattgactctgctgagatagtttgcaatgattagatatatgatattattgg

SEQ ID NO: 61236 - DNA, 330 bp, Glycine max
atataacgatatgttttaggccacttacatttgaggagttcactgtctatcgtaattatgataagttaacagatatcgtcatgatttgtgtttgaggatctgccccctgacttcacgatggcagataaataattggagattgctattagtctagggggcttgacctattgaactggtttatagttatgctgctgtgatagcactttgagcgaaaagaagaacggctgcaatttatcataatgttatataattttaaaacttagatatgaacgccacaatatatatggttactcactctctctttcgagattgtggccttctacctttaaa

SEQ ID NO: 61237 - DNA, 395 bp, Glycine max
  unsure (1)..(395): unsure at all n locations
tgcanaacatgctgattaatcattctaacaatcactatcaagtattctcaaactaaatgcaattaacataaaattaataaggactgggttttctcccagcaagcgctcgttaacgtcattaacttgacgcatcttactntatgggtctggatcaaatntgtgtcccaccttcaaaaccatctcttcccatactttatttacctctgaacaaacattctagttgagcgaatgcttntcttcctcatataagtcgaaacagatcttntgatcagcaattcccatctcaangctttttctttccatgtccactacatagctagcggtcaacatgaatggacgacccaagatcaaagggatctcagtatcctcttcgattgcatcactacaaactcagc

SEQ ID NO: 61238 - DNA, 246 bp, Glycine max
  unsure (1)..(246): unsure at all n locations
agcactgagctcagctgtctaaaatagcttgagttcgcttcattctacttattttgatcatttacgccaanccttaaatgtccctctatataaaacaatactcgtaanaatactacggggtctgatttatcatgccagaatgacgctacatatgatcatagggaacacccttgctaccacataaaggagaaatattaataatgtataacatgattacngcataatattaacgtaaactcaaatcat

SEQ ID NO: 61239 - DNA, 439 bp, Glycine max
  unsure (1)..(439): unsure at all n locations
tcaggctgctcaattactctaggttgctgcatggaagggcaaaggtctgtatggtggccatctgggttaccaagttaaccaatgcatccagttntccttcaagcttcttagtctcagatgatgcagctgagtttgtagcaccttatgcactcctctaatgactatagcatcatttctggcgctaaactgttgggagttgaaagccatcttctcaattaaattcctggcttcagcaggagtcatgtctccaagggctccaccactggcagcatctatcatacttctctccatattactgagtccttcataaaaatattggagaagaagctgctccaaaatctgatggtgagggcaactggcacatnagtntttaaatcgctctcaatactcatacaggctctctccactgagtggtctaatacctgagatatcttcctga

SEQ ID NO: 61240 - DNA, 358 bp, Glycine max
  unsure (1)..(358): unsure at all n locations
catcacatataacatntgatgctacacaagttggnaaatttcaatttgtagctgcacttatgaagtcttacctcttatntaatagtgggaagtggatgacaaagaccgaagcataattcacattgctgttatacatcggcattctagcatctatagtctaatacacgaactatgcttcttcaaggaattcatagcatactttgaagacgatgaaggagacgaacatttgcactatgctgctaagctgacacncctctgataaactgtggctaatgtctcgagcagctcttcacatgacacatgaattattatggttcaaggtatattctccattactcacaataactgtggtactcat

SEQ ID NO: 61241 - DNA, 484 bp, Glycine max
  unsure (1)..(484): unsure at all n locations
ccttagatactcagctngcttctcacaacataattgcatatactaatanatattaatcttattatgaattttttatcaattaaataaatagtgcttgattaaatagaaataatagctttttntatagtcttacagtaatctcttctttngaatgataacactttttcaagaattataaatcagaggatttatttgttttgtaattgaagacaagtaattacaattcgcttaaatgataaacaattatttctaatgataatatattatgcatgtttcaaccattgacaaaacttataaattatataacgataacagacacttatcaatgtgatatacctctctcaaaatttgttgacacatataaacatttaacatataataattgtcctaattattataacattcgatatattatcgattttatattttaggattaaattatcattattttcagatgtatggagcgagtaaaatgaaagtaaaa

SEQ ID NO: 61242 - DNA, 185 bp, Glycine max
gactaacactgagcgcctgagtgtgaccggtaaaacagtttttctgatctactcatgagggccaggagtggtatcccttggagggaactgtggccatcccacgcacagacctggaggccctatctacactgaatagatgtaagtaactctgttatctacacaggtctgaattgccgggagaactg

SEQ ID NO: 61243 - DNA, 532 bp, Glycine max
  unsure (1)..(532): unsure at all n locations
ctaagctgcttctcagccatagccaagatgcatcaatgtagcanactctaagacattntgttctattatttggatattcaacaagaacatcctatttctcggcattggtacctcggtgattagattggttctcccatctccgacgaaatactggaatctttcaagtgaatatcatagacttttttgagtaattttccgaaactcaaaatatagttcttcatatttaggacgcagtatacatttgatatgaatntatgtcttccatccttcacacgaatcaagatcttacctctttcttttcaggaatcttggaattatcaccaaatgagacattgacacttattgactcatcaagatctatgaacatgcgtcttttttcttcacatatggttgctcgcccactgtcagagaccatgtgttttttggctccttattatctcccgtgcttgacactgttcaacttctatcttttgctccatagtagtactcctcactctatcttgcgatctcatctaaacatatggcatctcta

SEQ ID NO: 61244 - DNA, 190 bp, Glycine max
ccataggtcacatgccttcacataactacaaacgcgcaatcaacatatgaccctggtgacatagtcaagtaaatgaatattttatgatgtggctatccatacataacatttctataatgttgtaactttactacaaatattactactcattctttatgtccagcaaaccaagtttcacttcaactacata

SEQ ID NO: 61245 - DNA, 249 bp, Glycine max
  unsure (1)..(249): unsure at all n locations
aaacttatgaagttcgtaacgatactttgtttctttctcgaatggtacggaaccttgcggatacataatcatccnctttttgattacggaatgtgacggaacctcactaatcatccccttttttgtttccggggtgcacggaccttacnngatgtgcataatatnttctttttgtttcggcatgtcccggattcacatattgctaatgatggggccaacacctacaaggacatacaaatgtgatgtatc

SEQ ID NO: 61246 - DNA, 415 bp, Glycine max
  unsure (1)..(415): unsure at all n locations
agcttataagcgcgggtctgngagacgaaggtcaagtggtctcaatataccaatattatgttcctagtacattggatntggtacgaccttgccctcttgatntccagctggggaattggcgagtggaggaacgccccgcatctacgcagcgagcataatgtanacctttacggttttaaaagctgtatagntgggcctaagctttagagtntctcttctggtaaggctttgtgtattctgttttttaaattaataatacaaggatctttcttcatttgtttctacgtctctacctatactcattcatatgcatgcttacttcttttctgaaacggcagatccgatgacgagtcctccgatgtactaatacctgtacccacctatcatcttctacaagaaacgagtccacggagga

SEQ ID NO: 61247 - DNA, 179 bp, Glycine max
cactcacatctttcggattctgcacaatctgtgaaggcaattcgtcagaatattgcgactgagcttggttcaactgagtagccatttgccccatctgatttgtaaaactctgaatggaggctctcgtctcttgctgaaattgcatattctagatggtcatctgcctcactaactcttct

SEQ ID NO: 61248 - DNA, 407 bp, Glycine max
  unsure (1)..(407): unsure at all n locations
taccttctctttatgcncttgctctccttctcatctaaccactaaaggaatatttatgaaaattctatccctatgcccaaatcaccttcctcatatgggcttgcaacatgctgccaattaacaagatgatccctccttgaatcacttgatttctggttgccaatttgcatagtgcaataatagtgaacgctgattttggttgaaaaacacttataatccttctggtgtgagatttcccatattttctactgcatgcttcatgttaagaatatcgcagtagtataatatactattagctttatatatatgggtcttgctaacgagagtccaatgccctggttaaggaattgatagaggaaagattacacatcatatgggagtgcatttaaatcataagagagcatata

SEQ ID NO: 61249 - DNA, 414 bp, Glycine max
  unsure (1)..(414): unsure at all n locations
tctcataactaagctcacctncttggagaagctccttaagaagattcctanagaagctagagcttanctacacagacctctctaatagctaagttcacctcattgagatgagaagctagagcttagctacataccccctataatagctaaactcacccctatgccanaagacatgagaatacaaaaaaagtccctanctacaagactactcanaatgccccgaatacaagactannaccctatactactagaatgggcaanatacaaggcccanacgaaggagaaacctattctaatatttacaaaaataagcgggctcatacttagcccatgggctngaaatctaccctaaggctcatgagaacnctagggccttcccttggatctctagcccaatctactgggagtcttcta

SEQ ID NO: 61250 - DNA, 394 bp, Glycine max
  unsure (1)..(394): unsure at all n locations
ttgcggatntggtcttcgccggcgaaaggatcanagtgngtctaataagaggcatttctaatcatcccgctntgatgaatggaaaaactggtgcaaatgaagaagatgtgaatgagggaganaaccctctatgattgtcattcctacatggtcaaatttcccatcagcccaacaatgtcattactcagccaataacagtccctctcacccaatcatccatataagccatccccaaatcagccacaaggcttgcctgcttaccacacccccaatgcccaaacaccacctatagcgcaaacaaaaaaggaattntgcagcacaaagcctgtatgattcaccccanattccggtgtcatatgctaactngctcccatatctacttgataatgcaatg

SEQ ID NO: 61251 - DNA, 447 bp, Glycine max
  unsure (1)..(447): unsure at all n locations
accttgagctngaccgttatagtanacaagccaagccgagccaagccttacatatgtcgagccaaaggccctcgacgagcagctcggctcattgccacccctaattgctacgaaggcttctttgaagtccttacatgtatcaacgtacaggcaacgtctatatggactcacgattcctgatgtntactggatgccttatggtgagcatcgaggagtttgtgagtatgattngatatcatgattctctggtcatctacgatggtggcccattgtcgtgagacaccgaccagagagggtcatgcaacaattcggatacgtcagaagtattctgcagaggctcaggtcangttgtcattgaataatgacgacaggtggatgcactactcagactatcttgcaccagcatggcagaattgtgtcgtgccaggacagtgtgcattcgactac

SEQ ID NO: 61252 - DNA, 392 bp, Glycine max
  unsure (1)..(392): unsure at all n locations
agaatgaaggtgtaaacaaaaattgtgaataaatggactgtgttttttataacaganaatagaacttatatacatatgataacatgccttctgttattaacaaaataacagaaaaataactaccaaaggttgccagctaacgccccctaactaaccaactaatattagaccacatacaacaatcttcaccttggtttaatgcttagttagaaccagtaatattcaacaactataaacaatagttgaacttgtcatagggtaaaacanttgtgagcatgtttgcacgcattctcatttgtagatatcttctcaataacaacaacttcactcttgatcatatctcanatgaagtgatacttgacatccatantgcttngtatatcataatgcac

SEQ ID NO: 61253 - DNA, 350 bp, Glycine max
aatctagctgtgagagggaataatgtaggatgcaatcggttctcatttaaagttgtgtttgttcatgtggagactattggtaagaagaataactcatactcatgccagcagttgctgttagctgacacttcctcacataaattgactgctcgctagttttgatatatatcatactgatcttggatctcttgcattaacttttatcagtagagacaacatgtacattttggtgatcaatcacatcctttgatagtagtctgctgatatatgtgtaagagctgatactttcttagactttgctattgaagaaaagactttctttctatctacgttgaattgtgtggactgtg

SEQ ID NO: 61254 - DNA, 452 bp, Glycine max
  unsure (1)..(452): unsure at all n locations
gtcccttacagcttaccatgtcaaggacaactctccatanaacttaagctaatatatagaatcttatgagtgcgttgaaatctgatcaaagataccatattattcatgttagagacactataaatcaaagggaagcaccttctttcggtcggaagcatgagcatgctatataccaatggccacaagcccattaaataccacaatgatactagcacttcattcattctgaaaccatcatctcctttcagagtcaggaagcttttcaagacatacgtgtgcctcgactgaatgaggaaaaacaaaagtaacctcactgattaaaaacaaacggaaaggataaatcacggtatggtgagaatggagatagaagctgctaaggctactttggtgctctcacaagaggaccacagagtatgctgaatacctaaagatgtacacagcctaatcctaca

SEQ ID NO: 61255 - DNA, 292 bp, Glycine max
  unsure (1)..(292): unsure at all n locations
taagcacgcgctcactgctgactgccttgactttataaattgtttccaattttcttaggaaagatactatgaagaactggtaacttataattgatcagatatggaaattgatcttacttggtatttatgtatactatggttctagtcattgaagccaatacataaactgtataaagtttatatgatattcacatgaatgctagagatactaatggttggtgccatcccgtcttctttcttcatgaatgacttgantatactgagtattcatgaaaacacattgtatacttag

SEQ ID NO: 61256 - DNA, 304 bp, Glycine max
  unsure (1)..(304): unsure at all n locations
tcttcttcttctaaggacactactactatttactgggtatttcagcacnctctttgggactcctatgagctngtcacagtgtccagaaggattgagactgtgttaactctgtataacccttctgatgagttgtgtggttcgcttcaatccatcataagcgcaagcctgagagtaagaatagtctcacgaacctgttcaatcttatgtcttctaggagatttaatgcccacaatactccacaccanagataatacatgactcttatcttctattatttaatattcatcctgatattatggattac

SEQ ID NO: 61257 - DNA, 224 bp, Glycine max
  unsure (1)..(224): unsure at all n locations
taagcttgagagatctacaactcgcgtacctatcaaggatatcaccatcaacatcagacaattctttttctgtcttgggctcaacaaactgacaaccctcttacttgtcaaggctactatgctccacactaaatttctccttcgacatatacaacctcttctcctcgtgagctgactaacagcttacgnggcttatgtgctgtctatggcgcacaaaataaacg

SEQ ID NO: 61258 - DNA, 469 bp, Glycine max
aagcaccgagctgcagctagacaacatatccaatataaatatatttatttttatatatatatataaattataaaaatataaagtctataagttcttttgtatgtgcggatcaaaaatggggctcatcaagatcaaaaacaccatgtctactaatatgaacatacggtatctattcaatcacatatttagtacacatcctatattatgattcaatcacatatctactagtacacatgtatatatatgattaaatttcagactacagtacaacacctattgtatgatttaattacatacaacggtactacttgatgatatggtttgaatgcaaattaataatatataatatataaatgataatctaaatgattttataacttaatatatgttggtgtcatgtgatcacatcatataaaaatatctatatcagttgttgatgctctatcaacaatcatacaagacttagtta

SEQ ID NO: 61259 - DNA, 331 bp, Glycine max
  unsure (1)..(331): unsure at all n locations
tgtaggattatggngtacccatcacatgttgtactaagtggctgtcgagttattgtgcacatcangctntcctcatacacgatgcgcgcataaacctaccatcccctgtngcccacctccaactgagctcacgtataccacgtagcccatatactcggtcttctcaacacacggatcacgtcaatcttctcaagtctccacaacatgcaagcaatacgacattcttactgcacaagctatcgcatccaagcttaacagatcaaatgctgaaaactntgctcaacacactatcccatatacatggtatctcactgagagaccacagtaacat

SEQ ID NO: 61260 - DNA, 225 bp, Glycine max
  unsure (1)..(225): unsure at all n locations
attgacacactcagcactaatcacctgcacatgaggtgtgatgaanacctctccctcttgcagcttcagctgtgcaatcacatgcttaacttcctgaccacgngtgaaaccaccgaccttcactntcttttgtctcttcttggcttcatacatatcttccaagtaaccaagatagtgngtttcttcttcagccataatggatacaaatgaatgaacctaaattct

SEQ ID NO: 61261 - DNA, 534 bp, Glycine max
  unsure (1)..(534): unsure at all n locations
ntgctgggtcaatcacaccttntactatgactngatcatntcccaagcttgtctctactgactctactcctgcatagagtatcattattaattactaaatgttaacatgtcatatgttgctcaccaatgactaaatatntattagagtgtgctatcgcaacttaaagataaagtatatagatcaattaaattaaaatttgatcatgtgtgtaagtttaatataaaagcacgagttaaacactgaagtgtcttcttaatttataatactaggtaagatagaccctaaataaacagttcacaccatggatcgatgatattaaatattaatctcaacatcatataaccctcgtccccatatatcaacattgattcatagaaaatcacgtagttattaacgtatatatatggcgttgcactctgataatattaatcctcgaattatatcgacgaaatccaccctttcgtcataagctgatgaaaactttgaagctccacacttttgaagacaccgattacgcacatatatgattctac

SEQ ID NO: 61262 - DNA, 191 bp, Glycine max
  unsure (1)..(191): unsure at all n locations
cacaagcccaacccacaagaacagctagactctcctaccattcaagatgtgaggggccatacataagtccagaccatagcactggttcacattgaatcaacttcatcacacataattaagtccattacttccttgaatgaagacaagtgagaacacaatctntcttgcactctacctgngtcgggtatcac

SEQ ID NO: 61263 - DNA, 286 bp, Glycine max
  unsure (1)..(286): unsure at all n locations
tgtggatgttcttcaatatgctgacgatactatattctttggagaagcatctatggcaaatgtcaaaactgtgaaggttactctcnacgagtttgagctggtttctggattgaaattaattttgctaagagcaaatntggagctcgtggtcaatctgaggagtggtgtcttcatgctgcanactacctcaattgtgctttgctccaatttcctttctttatntangtattccgactggagtcaatcccaaaagaaaggtggtgtgggatcctataattaggaaaat

SEQ ID NO: 61264 - DNA, 93 bp, Glycine max
tttggagtatatataaagactttatatacacaactacccacatttgaataaacctccattcattcatccccatttctaactatataactaaaa

SEQ ID NO: 61265 - DNA, 447 bp, Glycine max
  unsure (1)..(447): unsure at all n locations
tactcagcttctagnggcccagggctgaaaatactccaaagcgacccttttgctcttctttttaatatattgcgcatcttcttctgaaacgtcacatagccctatggattgcacgacaattagtgttaagcactcaattctgctaacatgaatccaaatgttggcaaacgatcgtccctagacgaaattagggtataacaacattaagattagagatgcataaaataggctaaacaaatatcaatctatttctagcaatgatttcatttagatgccattttcccagtttatagaatataaccatgtttcaatgcattatcccctaaacattacatgaacatggatgatcagaccataatccatagagagcttgaatatattcaatagagagttctgagactcggtgtgtctttccttttgcttctactcctttataggcctaagtga

SEQ ID NO: 61266 - DNA, 301 bp, Glycine max
  unsure (1)..(301): unsure at all n locations
cgtctcggatcttaagcaccgagctgcagctgcagctatatgatgatgaaataactcattattgtaataccttgtactcatgacaataattaatgtgaaatttataattacacaactatatttacatgtcaacataaattgatttattattaagtagtgaaatagagaactcagcaaatttgaatacattctccattcggttatcaccagttcaactataataactaatactatgctaatctgaacataanatgtaaaatacatgattatgtttcatatcacagctggagttatgattcta

SEQ ID NO: 61267 - DNA, 351 bp, Glycine max
  unsure (1)..(351): unsure at all n locations
ctaccatacatacnttgccatgaagctttagtcaaggaaaggaacccacaaatgaccaataatagggtgttgaaagagcataacaagactntccttaattgatttaagacataattnttggtgaaccataatgaattgaaacgttaaggaagttagcagatgggcctaaaagaagtgttataacttggtaaggatacgatatcaacaagtattcgttctacacgaaatcaaaagacaacaagagtataatgcanaacaatggtgtaagtctaagtgctgaatctcaacactttgctactatacatgatgacaatcctcatgtagcttcaatgcctctacttggagtcattt

SEQ ID NO: 61268 - DNA, 478 bp, Glycine max
  unsure (1)..(478): unsure at all n locations
cttagatactcaagctttccaaggcttacggtaaaatctgggacctagccatggtagaagtctccatatatgctcttgcctccctcgcccagtattatgatcagccgttgagatgctntacctttgcggacttccagctgtcacccatggtggagaatttgaagagatcctacgatgtcctctagggggaaggagaccatacctcttctcagggttctatccctcattagctagaatttcaaagatagtccaaatctcggcgcatgaattagaccatggaaagaaagtcagaaatggtgtggtttgaataccgagaaaatgtttggaggcataagcaagaaccttctcatgtagaggcgaatgggccccgttcatagacattctcgcactggtgatctatcgacgagatctctttccaaatatggatgggttggtgcgaatagcagcgattgacgcttntctcgcctagcatgaccac

SEQ ID NO: 61269 - DNA, 466 bp, Glycine max
  unsure (1)..(466): unsure at all n locations
cttaagcaccgagctgcgcttctagaaacttctgaaagcttctaagaaaacttcttgagaagctntcttaagaaaacttncttgagaagtttctttgagaagctagagcttagctacacacccctataatggctaagctcaccctcatgacaanaaacatgnaatacaaaacatctactcaagactactcaaatgcctaaatacaggtaaaccctatctataaatggcaaaacaagccaaaaaaaacaccatcacattacaaaaagggaccacctggccaggctaaaatacctaggtatgaaactacgctcttataattacccatccttggaccttgtatggttgtactgccttctagacatgatattataccatcaatttcagagctctgtaattcagcgtaatagtatgctcataacatcatgaagatacatcactgcaactcgtgtattcacttcaataaggc

SEQ ID NO: 61270 - DNA, 450 bp, Glycine max
  unsure (1)..(450): unsure at all n locations
cccatcacatgtggtactaggtggcggtcgggcgatggtgcacaacaagttntccacatccacaatgcgcgcataaacccaccatcctctgttgcccacctccaactgaactcacgtactccacgtagcccatatcctcgtttctctccacccgggtccccatcaatcctcccaagcttccacaacatccaatcaaaacaacattcaaacagcacaagctatcacagccaagcaaaacagagcaaaggcagaaaactctgctcaacacatcaaccaaaatcacagctnttctctcttaaggacgcacaagaacaatacttcgatccaattcgtaaccgttggatcgactgcaaaatttactggaagctatagtgcataaccacattggaccgttggatcgatagcaaacatccgaactattctgactactcttccacagcaaccacacac

SEQ ID NO: 61271 - DNA, 70 bp, Glycine max
gtgtggtcttgacagaacactaacttatactattgacatttttttggagatacaagtgatgattatacgg

SEQ ID NO: 61272 - DNA, 320 bp, Glycine max
  unsure (1)..(320): unsure at all n locations
ctaagcttaaccacactacaatattcttcataatanaactagttagacatctcanaagccatctttttcctacggattcaaataaactgtacaatatgggatgtacaagctaggtgtatgataatgtcacacaaagaagtcgaggggaacaatctggttgcattactgctattgaattagaattgtcaaactaacctcctaagtctaattcaaatatacaaatcacgtgggatatcagaatctggtttcactctatatgacacaataacaaaattggctaatacaaactggactntctgttttgattagctggaccttgt

SEQ ID NO: 61273 - DNA, 244 bp, Glycine max
  unsure (1)..(244): unsure at all n locations
ttctcgctgcagaatcatttcttggttggcgctctngagttgtgctaaatgtggtgttcgtcactggaagtgcggtagacagactttgtggctgacttanggattgcctttgtggataactgcgcggtgggtaggagaaggtttgatattggctgagtaatgacattgtagggttggtgggaaacttggctgtatatgaatggcagtcacagcatgggcttctacttcatacttaccctcttca

SEQ ID NO: 61274 - DNA, 417 bp, Glycine max
  unsure (1)..(417): unsure at all n locations
attaatattataataatagcggtttataggaacattatctttatattgtaggacacagagtatcctctattaacctagataaacacgatccaccgtgtactctgatagacggngtttatcaatntctctgatttctcctattttaacatggtatctagatcttgacatatgaataacaaacatcgcgccccaccactgacctaatgaaaattctactacaactactaaatagtcttccgtgcacccaaactatgggccatggggtgcaagtgccataatttagtcatattatgatatcatcatcagcataatctatgtcttttcaatttcattatggataacacgaagtgtggtgtaattagaaaatacaggactatgtacttcagggatcaccattatgcacactgttcgagacta

SEQ ID NO: 61275 - DNA, 572 bp, Glycine max
  unsure (1)..(572): unsure at all n locations
gcgacctatgatactcagcttgcttctacactcattcaccatttcagaccacatatcttcanattaacaacttgataatcacccaacatgactntcttgaagcatttcgtgaatgtcaaaatatggacattagtgtttgcattangaatcaaggccatgcacatagtctatggttcacattgngaaaaactatcttgattgcattctttattgctaaatccctattagttatgaccaagatcaatggctttcctttcgttgattgaaggaattgctctaacaaccaaatatatgttttgtgagtntaattagacacaagagcaatgccaaaaacaaacatttgattgtgtgttgtaacaccaaagaacataacaaatgggcaaagtacttattcttgcagtaagtcacatcanaaccaatcatgtcgcagaatatctcanaatctaattgtgttttcaccgccacacaaaaataaatgctgcaatctaccatcaatatcctatgtgtgtcttacanacatcataaggtctatcttttttaggccattcagaaactntaacacactagtaaca

SEQ ID NO: 61276 - DNA, 96 bp, Glycine max
aaaggggccaatgagcaaaggaaagtgcttagtggctccaacttttctaagtcgcaggacccgcttgttgacagcctctgaaactttgaaactctg

SEQ ID NO: 61277 - DNA, 213 bp, Glycine max
gcaacatcaaccagctgagaacaaaccccggcccacaaccctacccacatttctttctatatacaccgcgtccataccaacaagcactaccctagacctcaacccacttgagaagaccttggcgggggattgttcctggtgacaaggtacagcccctgaaccgatgattctatgcatacaagaatcaaacttgtggagtctgggccctcatac

SEQ ID NO: 61278 - DNA, 418 bp, Glycine max
  unsure (1)..(418): unsure at all n locations
ctcagcttgtcgcaaatactaaaaccgtntaagggccagcgccttatactgtcctctttgtcttttgatcgaggccgtacccgaatcanataaacatganaatgcagtaactangaagtgatcctangtcgttcccaacgagcagtgacaaaccaaatgttcataatatacttgcagtaatagtaacgattgcggggggttgttntctttgtgattaaatagcagaacaagaaaactggaatacgaaattactaatattaataacgggttgtttcctttgattcagaagccattctcttatcctgcgttatggagaactcgtccgtaacagtcaaccactttattcacacctatttcatattactaagcgaaaataacttaggcttgcaatacgagatatggaccacatacaccactt

SEQ ID NO: 61279 - DNA, 420 bp, Glycine max
  unsure (1)..(420): unsure at all n locations
gcgacctatgatactcagctgtcacttttgagtactcngacagccctagttacttaattggtgcttttaaactagactttcttaaacacttaacaaactataaaaggcttaatgaaaggttatgatttgtttagaagggttgtaataattaaagcatcaagggttgtggactcaacanatttcccataaaataagatgtaaaaacaattatcatagagacattggagaacattcaccatacaaggatagagagcaaatatgaactaatcaaactgaatggtacacatactgaaataataagggactaaacaataaatatctaaacttcatataaccggttaaaattacctgctacaacaagtcaattntggtgattcatcgtgcactacccatttcanaacatntctaacacttatgatg

SEQ ID NO: 61280 - DNA, 442 bp, Glycine max
  unsure (1)..(442): unsure at all n locations
gatcactctactggttccttgaacctcagtgtatccacaatgcanataacaaacgtgaagatcatcaacattacattcaaacatgggtcaaggaatcacaatgagaagtgtacttgggacttacctaaatcagtaagttgaattgatgttgcacaatatggatattatgtgaattattggtgcctaactaatgtttntcatcttcaaggcacattancaacttgttgttcggtgtccacgggacaatgttgttgtttggttttgttctttgcgtaagaagcctgatgttaacatcaagactgtagtgaacatgttagttttaacattaaaagtcaattgaaatatttgcagatgtacggaacanaacaatgattatttgattatattcgttaacatcatctttaaaatagtgcaatgaanacattaagcactactttggaag

SEQ ID NO: 61281 - DNA, 421 bp, Glycine max
  unsure (1)..(421): unsure at all n locations
gttatgtaaaagtcatatcattgagtgcactatcaacccctttacatgacattgatcacttataaagcccactttacgtttaccctggtactaaacatgggtcagcatcatatattangtaaatatggcaaggtgatatttataactatctgagtctagtataggataaatgggcatatagatgaaaggtggaaggacacttatctctatgatgtagaagggcaaattgttggctttacatattaaaaagactgccctgttgagtaatgtgaaactagacgagaagaggtgctaattctatggtgggctctatgacaaatcataggttggataatgtaacaaactggtataggttaanataaagtgaaaaaaggaatgcatctacctgattaaagagaagacaaacacggatcattttata

SEQ ID NO: 61282 - DNA, 471 bp, Glycine max
  unsure (1)..(471): unsure at all n locations
ntatgcatgagtgtccacatggatgtgtgctatgaatcaatttgcatgaaatttatatcatcatcatcttatgtgtgtcatggaaatgatctaaggcattcccataatcctgaaccacttgctaaacanatatcctgactacgtcatatcccaccatccgtaggccttttgagccannacctcaacatttggccataaccttgacctaggatggaaatntccaaccttaccattggaagaaagaacaaaaggatcttcacccctaaaaaaaacttcttttaccttgngttataaatgtgcttcanaagaaaagaagagaacaaggaaaggaagatagtcagccaatcaaagatcggagaaaagcatacaagaaaaatagtagagagaaaaaataatatagagaggtttctttgactagacaatgctgacaatgtgcganatgtcaaagaaaaaaagggaatagtacataac

SEQ ID NO: 61283 - DNA, 270 bp, Glycine max
  unsure (1)..(270): unsure at all n locations
taccacactcactgaggttctacacttaaacaacatatgttatggtggcattgaagtggtgacagtttacatgtatatgtttgaaaggatggacataatattataagaacgcgggggggaggctaatggagctataatcttataatgcaactatcttattgattagcatttgtaaagaatttcttacaccttccactatttcttgcatgacctaactcttgtcaaacacgctctcattctttactgacctgtntcacatcaggtttactg

SEQ ID NO: 61284 - DNA, 483 bp, Glycine max
ctttcgcacggaggtccgattcacgggcatattatatctagactcaagaaattgaacaatggaagcttttgagcaattcaaatggtcataactcttcgcacggaggtcagattcagcgcataatatatcgagacgcacgagattgaacaacggaagctctcgagaaattcaaatgctcataacttttaacacggaagtccgattcaggcgcataatatatcgagactcacgatattgaataacggatgctctcgagacattcacatggtaataacctttcactcggatgtcagagtcacgtgcttaatatatcgagacgctcataatttaacattgaatgctatcgagtcatctagatggcataactttcacttggaggtcgactctggcgctaatatatctagacgcacaaaattaactacggagctatcgaatattcaatggtataactcccacttgatgtccattgcggacatatatatt

SEQ ID NO: 61285 - DNA, 399 bp, Glycine max
ttaagaaccaaaaactctatttatgaaacgaataattcatacggcctaacctgacagacatttcaagaaatacaagcataaatctcacaatattaaacactgaagaaatggagagattctccccaacttttgaagaataataaaacgttcacaattcataggctaatgaggcatattacagatgtataacatcgttggtctataatcacatgtagtttccacgttacagagaactaaaataatagctgctatcctaaacctattgctattttacacgactatcaacatgttgtatgggaacaattatgttcttcattactatctcaaaagacatacttctccttttcgcacaatgctgactatatttctgctatctgtttgaagtgttcatgcgtgaat

SEQ ID NO: 61286 - DNA, 360 bp, Glycine max
actcaatcacctcgctcaacttaaatcttcgcttgccgtttaattttttccttgcaaacttgccttcacagccgtatggccaaaaatgtcaccctacattttttcagggtcatatggggttgcaagccctagcatcttctcctagcatgattatactcaaaatggctacatcacaaagccaggttctacctaggagattgacctggcacaagaccctacttgcctataatatgttattatttgctgttaggcccatatgagaggactaaatcagatctccctgattagcccaacagtttgttaggatttgattcatcataaattggagggatggaaaattattatggacccaacataatt

SEQ ID NO: 61287 - DNA, 450 bp, Glycine max
  unsure (1)..(450): unsure at all n locations
ntcctctntatttcgttcattntcgatntctcttcttccgcctttaacgcgcttttaccgtntatttaagccgctttctcacctaataaatgataaaatgaatntcaaccgatcanttgtgttgtaatctcatctatcacttntaagatgaaatctaaccgatcgttcacgctataacctcggttaaacaataaacagtaaataataataaaataatcaaaatatcttgagaaataataataaaataaacaaaatatctttgaataaaataaaacaaacaaatcaatcggacgttttttctttggaaagttccttgaatgaattgattaataaccaaagtgaaactaagactataatagactcacacatcatgtttgttcgaaaacactattaaccgtttaatgttcacgccttatacggtcctctctgctgttatctgttaacatggac

SEQ ID NO: 61288 - DNA, 457 bp, Glycine max
  unsure (1)..(457): unsure at all n locations
tactcagctnattctcctantatccaactggtgagggtcaataaccttgctctagatagaattatatatataacacaagcgagtgatggcaaccctaactttntcaggcaagatcccacgaacggccactggcaaaagttgtctattaatacccgacaatcatgagagttgaggccaaccaatttcaaatccttaattgacataatgctcttaatatttgaagagtatccttatgggactttcacatttctaagacaatgacaaattntttttctctgtcattgacattgtgtgacatgttgggggcatatacgttcgatcatctcatgaaactatatgtatctggtctcgtatacccatggaaccacatcttgacaaccattaaaccatcctttgtcttgccttaatgtaaagaaggtgccaatcnactatcacacacattttcttctctgctaat

SEQ ID NO: 61289 - DNA, 385 bp, Glycine max
  unsure (1)..(385): unsure at all n locations
ctcacttaannattattcacccaacttttttttttctgctacctggacaaaaactaaggtgagatgaagggccaattcccacacatagaccattctaaagttgctaggtattggccatcactactaactacaatccttaatataaccaaatatttgcatcacttaaggttggcctgtttgtatatgaccctaattgacaaggcgcattagcccttattggcaaatcaccacactgacttttctgaactggttgataaatctaggacactagtagatcattggacttactaggctgcatagctcattctaaagaactgcttgttgtctgctcaacatcttatgagactactgtgtaagtgatctgtattaatcttggtatactcac

SEQ ID NO: 61290 - DNA, 298 bp, Glycine max
  unsure (1)..(298): unsure at all n locations
tctacntatgtggcagggcgggccttcttcactgtcttggtctccacgcttatctttaccactgctcttccttcccgcgatgcttcttttatgttcgcctgagtgggcttatagcctacaccatacttnccacgattccttgtgcatttatcaagctagatatgccgccgctgactttgcctaaacacattacgggttcataaccgttccccaacataactcgggccatcattactgctgcatcggacagacaatgctgtccagataatgagtccacggaggaaatgctgaccacctc

SEQ ID NO: 61291 - DNA, 331 bp, Glycine max
  unsure (1)..(331): unsure at all n locations
actatanaanactcaaccttaaggagtactatacanatatcccgcttanatagtgctcaggatctatgatgtctttctttcccaattctactctatagtatgcttcgtctgaggtactanaatcgcacgctcgcagcccacaacccatagatacctcatggtctcatggtcttaagacaccgaggagtttaagaattgaagattcacctaacacactcactctgacacgttgtgaataattttaacatttcaaacgaacttcaacacaactgttatgatcccaatgccattgacatgcctgaacatcctcgcatatttggacacatgtcac

SEQ ID NO: 61292 - DNA, 249 bp, Glycine max
  unsure (1)..(249): unsure at all n locations
gttctgagagaatcttgtgtgtgaagatcttcagagacaagaactcgaagcggaagccatnttgagagcttgagatgagttngcgagtgattgtgagatcctagacgtgaaggagacatcctcaccacttgtgattntgcaatctttcatcttgttcttctctgtgttctanagganggtttcagactatggaaagctaatcctctgtcggtcttccctganggacctgatgtaatatactttatctat

SEQ ID NO: 61293 - DNA, 408 bp, Glycine max
  unsure (1)..(408): unsure at all n locations
ctaagagtcctctctcaaggtggatgttgagccatgttctcagtatgaaaattaacagccgaatgctcaaaatcaaaatattcagaatcaccagcaatagatactcagaatgctcanaatgctcaaaatgcatagaatgatcaggatgcacactatgcctaactaatctatgaaagattctatctatttcaggatcaaagggttgtaaatcacctggattgcccctagtcatgcactatatgcagcanatcatgtatctctcaacaagcacctaacaaggggggtaaaactacagctatactcaaacgatatccanatgagctgaattttgtgacaacaccctatnatatgaaagatacacannaaattcaaaaaaaaatcactactatgaaactacctaaaaagtta

SEQ ID NO: 61294 - DNA, 391 bp, Glycine max
  unsure (1)..(391): unsure at all n locations
ngtaaccactcatctcgtccaagccctcgaggaagagcacncagcacatgatntatcatatgctcnctggtaaacatggcagcggcgtttccattatgcccatcaaagatctgttaaccagaagagacagtgaccatctcatagaatgaagtgcttcaatccaaaaggacattcattntagtctgaattctgaaaaggctgctgccacaccccaagagtaaaaagtaacgcataatttccacgataacaagcagaacaaaaactcagcaatctccagactactacttattaatctattatatatatgatatatcatgcattcgtagaggtgaanatataatctgaaacagaaacagtgaaaaataccgcatataccgataatgatgatgaa

SEQ ID NO: 61295 - DNA, 309 bp, Glycine max
tactaagctgaccgatgaagatgcatcttcttcaccttagtcattctagacaccatttcattgaagtgcatatccacttgcaattccaaggtattaaacctctcaccaacaaaggttttgaagaccatcaaacctttccataatcttcgaaagaagagaagaatcttctccttcatgtccttcttcaccaacatttctagcacccttctttacccaagagccatcatgctcctttttataaccaaaggatgctatgaatgaagcgcctataaggaatgatctcttgattggaacataatgttcaaaatc

SEQ ID NO: 61296 - DNA, 151 bp, Glycine max
tggtgtgaaaaaaaatgaccattagtaattacctccattcaccttatttattattatgaaattaaaattatttatccaatttggctgccgtgagaagccatttctttacaccaaatttaccccaaaaattgtgataaacaaaagattttgg

SEQ ID NO: 61297 - DNA, 326 bp, Glycine max
  unsure (1)..(326): unsure at all n locations
ctgcagctgatggatgttaaagggctcacaatttcacacgtcaagagccatctgcaggttggtgttaatctagctgcttacaaaantatttacattaatttcattttccttggtcaaagtaaacccttatgttcacaactcactaggctgttatttggggttccctatattggtatttctctttttcaaaaacacatgttccgacgcccgagaggtgatcgcttctgcagaccaggtaccaaacgctgttgatataatatgaccttctttatactgcagaacacgtgtacaactaatagggttagtttctttgatcatggcgcttc

SEQ ID NO: 61298 - DNA, 201 bp, Glycine max
  unsure (1)..(201): unsure at all n locations
agcctcatggtgactcaagagtgattcaaagatgttttgatgatnaccaagatgataacaaaagatgatgacttaggtgatgacaaaaagctcaaagggccatccaagaataagttccagatattccagatagaatccagaacactttcagattcaagaggaaaaggtgattccagaaatcagaatccagattcaagagat

SEQ ID NO: 61299 - DNA, 434 bp, Glycine max
  unsure (1)..(434): unsure at all n locations
actaacagaacaatttatctgagcacatgcatctaatcaagtgacaagacaacctcaagaagaaagagaaccaattggacaaattctaaggaagaaccatccagagagttaaatcattgaagatccctcaaccaaagttcaaacaagaggatttctcatacaacaatgttacatagctctcatttagaaatggaacccaaacatattgatgatgtagtggaagatgagaactgggtaaaagccatgtaagaggaactngaacaattccaaaaaaaaatgatttctagaagctcgtagaactaccactaggaaagaaagtagtgggtgctaagtgggtgttcagcaacaagctaaacaagacaggtaaggatgtgagaaacaaggcaagactaattgccaaaggttactcataacaagaaggaatagattatact

SEQ ID NO: 61300 - DNA, 387 bp, Glycine max
  unsure (1)..(387): unsure at all n locations
atttgtggtatgatgatggagaagcggtacttcttggaccttgaatgctacaacagattaacgaacaagtgaagttgattcgagaaaagataaagcatcttaggataggcagaagagctattatgatagaaggaggaagccactagattntcagggaaaggggaacatgtgtnttttgaggggtttctccgtaacccgagttggaagagctctcaaggctaggaagttgacacccaagtatctaggtccgtattagattttgaagaagaatgggcctgtagcttatcatatcgccttacctccgagtttatttgaattgcatcctgtgtttcatgtctctcaactgagacggtacaacccagatccatcacatatacttgcagtgga

SEQ ID NO: 61301 - DNA, 763 bp, Glycine max
  unsure (1)..(763): unsure at all n locations
agctcgaacaaatgcaagatacatcttcttcaacctctgtcattcttgactccatttcattgaagcgcatatccacttgcaattccaaagggtcaaacctctcaccaacaaaggtttgaagaccatcaaactttttcaaaatctttgaatgaagagatgaatcttctccctcatgtccttcttccccaacatttctagcacccctctttattccagagccatcantgctccttatattacccaaaggattgctttgactgaagcgcatataaagaatgatctcttgattgaacataggctcaaaacatgangatgtgaatggttaagaaaaggtacanaagaggataggcatgggcttcatcgcatgctatgctgcaattaacaangtgccatcattgaacctacaaggccatgaatgattttctaaccgcaggtgaatgtgagaaagcacataggatgagagtgttttacacgacgagaaactctcattttgttgggaaaacccggggggggggggtttttttttttttttttttttaaaaaaaaaaaaaaaangcccccaaaatttttttttccccaaattttttttttttttttttttttggggggggccccccccccccccttttttaaaaaaaagggggtttccccccccttttttttttttatatataaanatattttttnttttttttttttctttcttttaaagataaattttttttttnggngggggggggggggggggagnaaattttttttt

SEQ ID NO: 61302 - DNA, 374 bp, Glycine max
  unsure (1)..(374): unsure at all n locations
tacactgttatttgagacaatgactaatttagtcaagagtctctgctttaatcgattaccaagcggagtaatcgattattatttctctctcattaagttgtttagatgttaacaacaacgcactactatcaaagttatttactacgacgtacccacaaggaccatcctcaaaaaattccatagaatctttaacttctaactcacggatgtactttaaaaaacgccttgaaggcacgggacttctctttttatttatcttctgggacactgctgccctcatttccccnnaactcattttcttttaaaggagctctctccacctcttgcgtttcttctctggcgagacacatgggggagttttatggaaaaaagtt

SEQ ID NO: 61303 - DNA, 180 bp, Glycine max
gcatatctaccccttttttgaaagtgcctgggtaagcccaaatcatgtggtaccaaagaaagggggcatgacagtcattcgaaatgaaaagaatgaccttatctcgaccaggactgtgactagctggaaaatatgcatatattaccacaagctcaacgaagccacaagaaaagaccattt

SEQ ID NO: 61304 - DNA, 446 bp, Glycine max
  unsure (1)..(446): unsure at all n locations
tactcgagctcggcactgctggaggcattattttcttctcttccatatgtatgatggagtggccacatgctgatcctcacgtgttgtgcatttatatctgtgctgatatacgaaagacaaatctttctctctttcactctagaaagtcatgcagcgggtcccacatggggatagtgaaagatcatatgacgcaatatacattgcccacgattactctggagtctatatacttgaacctaaggaaggtggngatattaatctctggaatagaatcttctgattattggatatttatttggacccttcctatatcttcatagcattgatgcacgggatatagaggcttctatagactttgccctcaacatattgaccaatataacgggtgcttgatgtgttatcataacagagaattgatgtacttcctcatactttcagataaagtt

SEQ ID NO: 61305 - DNA, 381 bp, Glycine max
  unsure (1)..(381): unsure at all n locations
ggatcttaagcgactgggctgcagctttgacaactcacaaagttgttatcaccctncaaaggtctctatgtaagcctcaagactctcttgttgtgcaagcccttcatcatcatagccatctgagatgctctcaacttcaatggaagtgaagnttttgtttctcatgttcttccaattggacacaacagttacaagtgttaccttcactcctctcttgcccaaacgcctggagaactgaaacataagaatgaagtgtgccttggcctgtgaagggtaggacaggacagagagcagcatgggtttcctttgctcttcatttctgactccaacgttgttactccttcccacctgatatgtgtcattgtttctgtacatgtgata

SEQ ID NO: 61306 - DNA, 481 bp, Glycine max
  unsure (1)..(481): unsure at all n locations
ntcttaacaacctcatgatggtataatggcattcctaactctttcatgcagtgacacgcctnccttatctcgcctacagactcatactcctccaacagcttcccaatcatgtccttgacatcctcaaatgcccatcctgacctgctactccctccaccaccccaacacctcaagattcgctccccagcaagtctagcctttagcaatgactttgtcattcgaagcactttgctcccaactgaacctggccctaaacactgtgttcctatctcttcaaggtgttgtggggccaggacttcatccaccactgctctagtctaaaacatagcaagatccttcacaacaacaggatngtccagagcaatatcatctgctgactctatncacatcacanaaccactcacaacatcatcagctgggaaacacaaagacgaacagcacacagaagccatttccttctctctattcttcctatccattg

SEQ ID NO: 61307 - DNA, 190 bp, Glycine max
agcttgaccaatcccgatccaacccgggtatagtcagtcagtgagaacctgtgatatacctaaacaggcgagctcctggaagtcaaccgataaaagaacaaaaaccacaaagcagggaggcttgtgtggtggctggccaacaatgagtcttgagtgagatttgggatatggcctatggtaatcgattacc

SEQ ID NO: 61308 - DNA, 379 bp, Glycine max
  unsure (1)..(379): unsure at all n locations
atttgctatatataggggaagaagtgaagaatatnagggttcagccccttaggcacttctctctctctcgaaatttctgaggaaaattagttccgtgaagaaaatccaagccgaggcgcttccgtaacgtttccgtaacgtttccgtgagtaattacgcgaccgttcttcaagattcatcgntcattcttcgttttcttcagtcttcaatgggtaagtacctcaaaccaagcttttcaattcattctatgtacccgtggtggtccaaattttggttcatgtatttntattcccgttttcatttactttntatacccccttttgacgtgcttaagccatttatttaagtcatttctcgcttaatctaanaataaaataaa

SEQ ID NO: 61309 - DNA, 201 bp, Glycine max
  unsure (1)..(201): unsure at all n locations
caagcttgtagttgagccctcttgaccctggttgaaccttgaaatttgtgcttcattgaatcccatatattttttggcgngtccctcttgaggagtggttcaaggacttcacgatctattgtctagaaaagataattctttacctttaagtctttcaacttttgctccttgatcaatatgaattgtgcctccgtaggctct

SEQ ID NO: 61310 - DNA, 466 bp, Glycine max
  unsure (1)..(466): unsure at all n locations
ntgttgagatatacanaatattcatggctcttaattaatcttatctatctanttgcttatacattnggaataaatagctgttatgataaatagtataatctcataataataaattggtagacgtgtatagtaatattgtttgtgcttcaagctntaagacttgactttggatgaagattgaagaggatatagtacatataaaatacttaagtataagtatcaattaaatcttgagaaaatattaaatntgttaaatagtatgaagtatataaatttatcaaagtttaatttttcaccatttaattntaattaattattttttacttgttttattagtatgtggcaataatttatgtgattaagttnttattcgaatatntttcatcttattagctggtgtttttttacantaattagaacttctcgattcttgccactgtatttnttgaacaaaagcttaattacc

SEQ ID NO: 61311 - DNA, 219 bp, Glycine max
  unsure (1)..(219): unsure at all n locations
agcntaacaagctnntttatagnttgagcttgatcttnttatctaaaaaagacttntaaaaagcttgagcttggcctttatagtaaataagccgagccgagccaaactttacatagaccaagtcaaaggccctcaacaagcaactcggctcattntcacccataattgtgtgtaatggtaatctaaagaggggtgtccgtgtaataagttctaatatga

SEQ ID NO: 61312 - DNA, 444 bp, Glycine max
  unsure (1)..(444): unsure at all n locations
tactcaagctngtagagntgagtctcgtattgggttaatcaattacatatatctcacaatcaattacactgttattngagacaatgactaatttagtcaagagtctctgctttaatcgattaccaagtggattaatcgattattatttctctctcattaagttggttagatgttaacaagaacacactactacaaaagtcatttactacgacgtaccaacaaggacatccttcaaaaaatggcatagaatctttagattgtaagttcaaggatggttattttaaaaatccgtctttgaattggtatggttttttctctttcttatcttatcttctcgggtacactgctgacccttcattntcccctgacctttcattttcctctctaattggtgcctttctcccattctctnttgtcgtttctctctctggcagaggacgacat

SEQ ID NO: 61313 - DNA, 367 bp, Glycine max
  unsure (1)..(367): unsure at all n locations
tgatgcagatgggtttgtagctacctcatgcactcctctaatgactatggcatcatttatggcgctaaactgctgtggaatggaggccatcttctcaattaaatatctggcttcagcaggagtcatgtcttcaagggctccaccactggcagcatctatcatacttctcttcatattactgagtccttcataanaatatttgagaagaaagctatctgaaatctgatggtgggggcaacttgcacatagtttcttaaatctctcccagtactcatacaggctctctccactgaagngtctaatacctgagatatccttnctgatgtttgtgtcctgaagcanggaaaaattctctaagatactctct

SEQ ID NO: 61314 - DNA, 199 bp, Glycine max
agcttgagataatgaagtgtagaaaggtgaaacttcctgcttttatttggtgaccacagagtggtacctggagatatgtcgcggaggtcaagagaccttggggacgtcaggtggggtgctattgcccaaaaccaagcttgaccaatcccgacccaacccgggcatattcggtcagtgagaacctgtgatgtacctaaac

SEQ ID NO: 61315 - DNA, 459 bp, Glycine max
  unsure (1)..(459): unsure at all n locations
ngagatgatgaagtgtngaagggtgaaactttctgctcttattgttgaccacagagtggtacctggagatatgtcgcggtggtcaagagaccttggggacgtcaggtggggtgctattgcccaaaaccaagcttgaccaatcccgacccaacccgggcatagtcggtcagtgagaacctgtgatgtacctaaacaggcgagctcctggcagtcaacagataaaaggaacaaagaccacaaagcaaggaggcttgtggtagctggccagctgtgaaacttgattgatatgtgagatatggtctctggtaatcgattaccaagggtgggtaatcgattacaaggcttaaaaatgaagacagggggctaagatggtctctggtaatcgattaccaggggatgtaatcgattaccaggcttgaaaacggagtcaggaagctaagggagcctctggtaatcgat

SEQ ID NO: 61316 - DNA, 103 bp, Glycine max
aaaaaaaaaaaattcgggggtttttttttttaaaaaaaatttctctagggggggacattttttttacccctttttttccaaaattttttttaaaaaacccctt

SEQ ID NO: 61317 - DNA, 313 bp, Glycine max
  unsure (1)..(313): unsure at all n locations
tcgtgctcatccatcgatctctcattgatgataatcgtgatgctgaanatatcaatcctgattatgaagcttgggaagttcangatcagatgttgcttgtttggcttcaatcgatgatgtcgaaattttttgttttgattcactcttatctggtttgggataagagtcatgatcattaccacatgcatacacatgctcgtgctatgcagatgttgcttgtttgggcttcattgatgctgtcgaaatttgttctttcgcgtgttattggtttgattcactcttatcangtttgggataagattcatgatcatta

SEQ ID NO: 61318 - DNA, 143 bp, Glycine max
taagtaggaaggacctgaaaaataaggggaagataatatttgatgtggatatcccatggatagtggtttcaaaatataacttatacagcatggtagcacaaatatagttcaaatggctgaaatattttacttcttagaattca

SEQ ID NO: 61319 - DNA, 395 bp, Glycine max
  unsure (1)..(395): unsure at all n locations
ctaaagacataactagagattcagtgcgtaagcacattacatcaatggtgaaatacctgctggctaaaggggatgaactatacagcaagaatcacatcataattgacatatgagagactactattgagggcgtaaatgagactggtctaaaaattagaaccagatgttacctagtgaaacacaatggatagcctacaactcggatttgacttatgatgaaatatcaaggatggctagacttgtttatctcttttagaacataattatttttctttatgaattntgtcataaataacactttaactntatcaatataatatttgataatgattntaatactagatagatatctaaagaatgccaaatgagcttaacatgtgatatgtaaatttttt

SEQ ID NO: 61320 - DNA, 172 bp, Glycine max
  unsure (1)..(172): unsure at all n locations
actagatgccttggntattctggtaacccaactagccttgtataaaaaatctgcacctgtcgccagactctgtggtttatgctcctctggcgaccaccacacagacctttgcccttctcaaccttatgctacaaacatctacaatagaccttctcaacctcagcagccaaat

SEQ ID NO: 61321 - DNA, 474 bp, Glycine max
  unsure (1)..(474): unsure at all n locations
aaaactcctcaaacatattctaatactcatgcaccttttacattcaaaaccggaaacttagattcctaggcttgagtcatccttttggcactttagtctagcttctacaaactacccacacactcacaatgcgcacaatttatttcgcaagctaagttccacaaaatcatgcgcaaatgccattgaggcatttaccgaacacttggtgggcgtatgtntaagcatgaaaatcaagggaatggnggcaatgtggcatgccccattatctcagaacgcaccctatgcctaaggccatcctctacaacccctcaattcaacaaaaacaagcaataattcatggataattccctcancgtttgagcaaatacatgcaacttagagcaccaaaatatatcaatggaaagccaaagagtccaagaatgaagtacttacctgttggagatgaataatagagcanaatggaatcaaaaacgt

SEQ ID NO: 61322 - DNA, 162 bp, Glycine max
gggggagcactatttgtatgaataaaagagggagagaagtggaactttgaagtgtggctcataagactttaatgcatcaaaggtaccacaagtggtacacatgcttctatttatagactaagtagctttcttgagaagctttcttgagaaaactttcttgag

SEQ ID NO: 61323 - DNA, 396 bp, Glycine max
  unsure (1)..(396): unsure at all n locations
ttctcggtggtgaagctccttcttccttggcttattccctagnggtatggtgcctccctatcctcttctcctttgccttccgctgcatctccatggtgaaaaatcaccattgaaggacctcattgaagctcaaagatccaacctncatagaagctccacaagcaagcttccatcacgatgagtatactgatttccaggaagaaatangtcgccggcggtgggcatcactggttacccccatggccaagtttgatccagacatagtcctcgaattttatgccaatgcttggccaacagaggagggtgtgcgtgatatgaggtcctgggtaagggtcagtggatcccgtttgatgcagatgctatcggccaactcctgggatatcctttattgctgga

SEQ ID NO: 61324 - DNA, 190 bp, Glycine max
atctgtctattgactagcatttctaattgcaagcttacattcttgttctttctttgtctagcatacacacttgctcaaactcatgataaaacacaatcttcattccaatcatgcattcaatccataatcaccatttcaaaactataccaaaactgcaatttcaaggaagcaagttaaactattctatata

SEQ ID NO: 61325 - DNA, 703 bp, Glycine max
  unsure (1)..(703): unsure at all n locations
ccttagcaccataacagaataataaagcatcaccaataacaaagcatccttactatccccttggctctctcctcatgtaaccctcttctggaaaataaattgcacaacaatagttatataaccctcttataaaaacaaaataccccattntatatatgctcttaagctcatcctttgaaatttcatgccacaatgaaatttagatgccaatcaaattatcaccttggaattgcccatttagaaaactctccaccttgaaaaatgtttatcgtctaatatcccagaactaaatacaccacacataaacataagataacctgggcaagacaccnccattatataaaaataatatattttattttaatggcagtatgcaacaccactctccgattggacaaaaccagcaagtggaccccacgtaaagcttgcaaaatacttttggggttttttctcccaaaaataaaaaaactctccatgggtttgggggaaaaaaaataaaaaaacaattttctctcttgttttttgtgttaaaaaaaaaaaggcgcccattttgtttaaatttttttgtaaaaaaaaattttttttttttttttcccccttttgcccaaaaatatttttttgtttttttttcctccaaaaaaagggggggggaaaaaaaaaaaaatatattattttaaataaattgtttttgtttttttccccc

SEQ ID NO: 61326 - DNA, 162 bp, Glycine max
attggttacatatcctctggcaatcatatataccctggacagagaacaatgtggagtctaatgatggctgtgattccaagttggagatctcaaaagagacttgtttcaagaagagttcacaatgttgcagaaagtcctttaaactcttcccaccatttctaa

SEQ ID NO: 61327 - DNA, 227 bp, Glycine max
tttttttttttttttaaaccccccccttttccccggaaaaaagttctctttaaactttttaaaaaaggggttttttgaaaaagggggacaaccccccatgtggggagggttttttttttattttcccccccctctttttctttaaaagaggggcgggggaacaaaaaaaagatgtgttttttttgggggggcgccccccctcccccctttttttatttggtgggggg

SEQ ID NO: 61328 - DNA, 415 bp, Glycine max
gaaagagggaagagccccccttatgaatagctggagaagagctcacccacagacctgataaagctggaatatgctaggagaaaaaaagaggggacccaattaggtatcaggaaactgactgagggctaaaacttatcataagacacagcgtcctgctctataagacaggagcttctgaatgttctaaaaactcctgaaactcttgaaaacttttgaaactaactactccacccaccaaacaaccactctgaaactctgaagtaactactcccccattatacactactctagagtgagctgtcccacctttaaaaaaacttaaaaaacccttttcccctctttcctttgggcccaaaaattccctcttggaaagaatttccccacaaaaaaaaaaaaaaaaaagggagcgtttccc

SEQ ID NO: 61329 - DNA, 410 bp, Glycine max
atgctatgtgctcgcgactggtccctctgctttcttcgcagcttgagttcactattgctaccccatagagctccgcgaaatatattccggccatactcattcttgcgagccctcttggtctcttgttcaagggctcttgcgtgtattgcattctcttcccgtaacccggcacactcctttcgaatgtgtgttgcggccaacttgaacttctccttggaagaattcgcctttctaactcactgttgagagcttggacttcttcgtcctcttacggtgcttcaaaactctcttcgctgacgacttttaacttggtgagccaatctatacctcgtatatgaactttcagccattcatggtagccaccaatgatgccattacgaatgcctctaagttcttgatcttttcataac

SEQ ID NO: 61330 - DNA, 211 bp, Glycine max
agcttgtgcgaatcttttccttttggtcgtatgatcttcatggttaagatataattcattagtcaaggcaagggtggttggttttgtctttatcgggtacccaaattgtcgtcgagcgagaagcgggttgtagcttattccgccacgcatacccaaaagaggtacgttgggatattcaccacaactcgcaataatctctccaacatcacta

SEQ ID NO: 61331 - DNA, 429 bp, Glycine max
  unsure (1)..(429): unsure at all n locations
atgcattgttatagagacttatgctcaacaaaaagctacccttcttaagaactttcatggagtggaaacaaactgaaagatcttcaaaaggaattgaaggagcttaatgaacttcacaatcatcaaatggaagaaagatatgatctttggagagagtgtgcacaagcacaaaaagaatatgatgaactcaaagtgagtaaacacaatctttgggtggaatgtgaagaccacaagaaatttgcaagttttctgaaagatgagtntctgaagcattaagaacttgaaggtcaacctcaagatgttgtaaaacttcatgaggaaataaaaaccttanagactacattatccaagtttgtcaatggaacaaaaaaacttggataatgtgatagtggatatggtggaatagtcactttcagaagggaatcaaaa

SEQ ID NO: 61332 - DNA, 459 bp, Glycine max
  unsure (1)..(459): unsure at all n locations
cagaaactgctggtaatcgattaccatatatgtgtaatcgattacacagngcanactttgaattcaaattttaatagctattgtaaatcagttttggccactggtaatctattaccaaagagtaaatttgttgaaaaagactttntaacttaaaattcttggccaaaccttttgctacttcaattggaattcccttcctatntaatataccctttctaaaactctaaagattgtcttgatcatccatcttgaatatcattaatttctttgtcttgaataaagctttgagacgcatgtgatcctttggcatcatcaaaacatcagcttaatcctttgtctacaatctccccctntttgatgatgacaatccctgaaatcaagacaagctatatacaagatgatagcacgttcacacaacccttactccccctatcttttgccatgtatgcctaatgataa

SEQ ID NO: 61333 - DNA, 221 bp, Glycine max
tactgggttatgatttcactttatgtgattgtgaaacaaaaataatatatgttgaatatttgttcttgttcaggaagcaatatcaaagtccaagatcatgaagaagcaattgagacaaaagtgaacttactaggacttatagtctacttatattttggattcatatgccatatgaagttggagtgcccaagcctgatcatatataattcataagggggtaa

SEQ ID NO: 61334 - DNA, 221 bp, Glycine max
  unsure (1)..(221): unsure at all n locations
agcttattcacgatcgnttttccattaatgttcttatgaagcatagatgcatgattgattcaaacatctatcttagatgcaatttgcaatctgaatggatcatccatttgctcaaagacccaatatgtggacaaaaacaactaggctaaacttttagcttaaccactatggattggcttcaattcaacctgcaagggaaaggcaaccccctctcagcccct

SEQ ID NO: 61335 - DNA, 440 bp, Glycine max
  unsure (1)..(440): unsure at all n locations
ttcaaaaacttctcaagaagctatctattctataaatagaagcatgtgtaacacttgctgtaactttgatgaattctattgcgctgaattttattttcttggttctttgtctaactcatttgttcatgagtgtatgaaattcttttagcctattatttgatttgagtcaaatctttcatgttaattagtccttaacatgttcatgcanaattattagagagtctttgattgtgaaccttttcttgaacttttaggtttccttatgattgtgtctattgtgaatttgagttttggtgattgaattgctagctgaaatgttgatcctaagtgaatattgaactcctaaaactgtggtaaacaatcctagtgagttcaacatacataggaagggtgaaagtaagcccaaggcaatcaatataccatgcttaaagaaacaaatc

SEQ ID NO: 61336 - DNA, 329 bp, Glycine max
tacaaaactcgaccaatgttgccaatgtcatccttcaacgaagttcggctaccttagaggaaaatgggtaaagacataagaaagctctgaacacaattacatctgtagaagctatggtcaacaaatggaacgttattgctcaaatttgtagtgggtgagcatccctagtagccagtgtcacggcaccctggtgaagctctaggttaactaccaattgtgctagagtaatgatgcttcgctaattacaagcacaagattgacggtgacaggtgcttgaagctatcaagttgttcacgagaaaagattggcagcaagggaccactactgaa

SEQ ID NO: 61337 - DNA, 433 bp, Glycine max
  unsure (1)..(433): unsure at all n locations
tttctgatcattttcttatctntgaaagtaatttgttcaatactttctcttccaagagaagttcattgttcaaaaactagtgctattcttcttcttcattcacttctccctctgccaaaagaatagaanaactaaccgcctgaattctttggtgtctcccttctctctttccacagagagattcaaagggattaacgggcctgagaattcttttgattcttcccttccccttaaacaaaagatttcaaaggactaaccgcctaagatatcttttgttntcccttacaaagattcanaggactaaccgcctgagaatcctttgttctaacacattggagggtacatcctctgtggacaagtagaaggacatttacttgtgttgttatactgagaacaagagagggtacatctcttgtggatcacgtcaagtgga

SEQ ID NO: 61338 - DNA, 192 bp, Glycine max
  unsure (1)..(192): unsure at all n locations
ccattttatcatttaacacaagttgagttctattcagaaaattagagcttatcttttttatcttagcgagagcgattctcctaaattcttgagtgattcaagaacaccctggctgtatcaaaggactttcacaacctttgtgtgttgccctcgctggaaagagngattctttccttcctatcatctccaccc

SEQ ID NO: 61339 - DNA, 228 bp, Glycine max
  unsure (1)..(228): unsure at all n locations
caagctntttggagtacaaacatgggaccaacttttttatttaaaaaaaggttgtatctagtcaaggtctgagagaccatacaagtttcctagcgatctctaattatgggggccattaagtctatcatatgcagacaatagccgagaagcccatgaatctcttcgagggtggagtaggtgtccgccatctccttggccttggctaacaagcggtgaagatcttgactc

SEQ ID NO: 61340 - DNA, 455 bp, Glycine max
  unsure (1)..(455): unsure at all n locations
tcttagagttgaccatagcttaagtgtccatagaagctattgcatcactcacccaatactacgaccagcctttgaggtgcttcacattcggagatttccaattagtaccaaccattgaagaatttgaggaaattctaggatgtcttctcgggggaagaaaaccatatctttcctccgggtgtctcccctctttgagcagaaatgcaactgtggtcaaggattcagcaagaggtttggaccgcataaaatagactcgaaacggcatagcgggcctaccacggtggtacctataagacaaggcgaggggtatggccaatcaaggagattgggtcccgtntatggatgtgttagctttgctaatttttggggtcgtcctctttccaaacgtggatgggttggtggacctagcagcaatcgacgctttccttgcctaccaccatagcaaggaaagtccg

SEQ ID NO: 61341 - DNA, 591 bp, Glycine max
tttttctctcaataaactgggggtgcttcaaactaataaagcttccctaataatccttcactattgtgtgatttgatatcagttgctgaagttgctatttccattacaagagagtgtgagtttttgtgcttatatagattaaaaagcgaggcttcggggggaaaaatggacgcttatttgatattttaaaagggggttggacctggtggatgcaaaggtttcatttcaccccccactcaatgcccaaaaatgtctctttgctttatgtttcaatttcatgagggctaagaggtgagtagttcactattagaagatagaaggtttagcacttgacagcaaactgagtgtttgattagacttactggtcgtgaaaacccttgttattgaaacaaacccttttgtggaatgagggtttctctaattttttttgggtaaaaatgttgggggttattgtggccttataataaaatacaaaaggggtttttttttataccccccaacaatttttaacttttttttaaaagaggggggtttaacccttttaaagggggggggcttttatcccccccctttttttttttatttaaaaaa

SEQ ID NO: 61342 - DNA, 360 bp, Glycine max
  unsure (1)..(360): unsure at all n locations
ttctaaagagagagaagtgcctaatgggctggacaccctttcttcttgcattactcccctatttatagcaaaatatgggaggaggttggcgcccagctcgcccaggcgagctcaacttcgccaggcgagcagggttgcttcctccagaagcaaccgccttctggaggaatattccagagggcccaagtgggcctgggtgctattagcacccgcattnttactaagtacaccaccctctgctgtttttggtgattctttcttcgtaaagttacgggaacttacgaagttcgtaacgatactctgtttctgtccgtaatgttacggaaccttgcggattacataatcataccctgtttgact

SEQ ID NO: 61343 - DNA, 511 bp, Glycine max
  unsure (1)..(511): unsure at all n locations
agtgagttgtattcaaaaaactagagtttatctctcttatcttaatgagagtgattcttctaaattcttgagtgattcaagaacaccctggctgtatcaaaagacttttacaaccttttggggcgtgcctcgctggaaaaagggatatttttcttcctttcatcttcacccttgttctttaaacccaatatccnaaaaatcacctttggcccaaatttattgtggccatactctcttttacctcttcaataaggattctgacctaatgattttaaacagacttccctcgttggacacctattgagcctgagttagtatgcattttatttgcagcccactacaattactccttctcttttgcagacactttaacccaattcactattctcttctataatcgcttcatagtatctacactataagccccttttttgtgcccctttgggggggggtttttattattttaaaattcccccctgcgaaaaaaaaattatattttggggggggggga

SEQ ID NO: 61344 - DNA, 345 bp, Glycine max
tcataagttattacgtttgacttgtgctataactccccgttaaatctctaacgtctcgatataataaagggctcaatcggacatccgagttaaaagttattgatgtttgacttttcttagagcttccggtttcaattgtgagcgcctcgatatatttcggggctcgattatacatacgagttaaaagtatttgtcgttgatttttctcagagcttccgttttcaattacgagcgtcttgatatactacaggacacagtccgacatccgagataaaagctattgtcgtgtgcttttcttagaagcttcgttttgaatttcgagcgtctcgatatattaaagggctc

SEQ ID NO: 61345 - DNA, 219 bp, Glycine max
  unsure (1)..(219): unsure at all n locations
agcttcctcaacatccaagtaaatcaacattcaaacagcacaaactatcacagccaagaaaacagggcaaaggcagaaactctgcccaaaacaccaaccaaaatcacagttttttctcactttaaggccccaagaacaattccttcgttccagttcgttaaccggtggatcgactcgaaaantttactggaagtctctagtacataagcctaccatttt

SEQ ID NO: 61346 - DNA, 458 bp, Glycine max
  unsure (1)..(458): unsure at all n locations
atgctgcannacattataatagacctcctcagcagcgaaatctacaacaccagaataattatgacctttcaagcaatagatacaatccaggttggaggaatcatccaaatctgagatggacaagccctccacagcaacaacagcctgtccctccttttcagaatgttgctggtccaagcaagtcatatgttcttcctccaatacaacaacagcagtcacaacaaagacaacaagcaactgaggctcctcctcaaccttccttagaagagttagtgaggcaaatgaccatccggaatatgcaattttagcaagagacaagagcttccattcagagtctgacaaatcagatggngcagatggctactcagatgaatcaagctcaatcccaaaattctgacaaattgtcttcacaaactgtgcagaatccgaanaatgtaagtgtcatcaccttgaggtct

SEQ ID NO: 61347 - DNA, 287 bp, Glycine max
  unsure (1)..(287): unsure at all n locations
acctctaagacacctgcggcatgtcagcttgtcacccagctctcccaggcgagctatggtgctttctccanaagcacagccttctggaggaatcttctggagggcccaagtgggccttggtgctatttgcacccccatttttactaaatataccccctgcctttttttggtgattcttttttcataaaggtaccgaaacttaccaacttcgtaacgatactcgttttcttttcgtaatggtaccggaccttgcggaataacataacatgccttttttgacttacgga

SEQ ID NO: 61348 - DNA, 421 bp, Glycine max
  unsure (1)..(421): unsure at all n locations
gctgagagagaagcataaaatggagccacctcgctaactcatgagacatcccacttgtttgtctcttgaccaaaacctatttcaaaggttgagaaatgggccacaacctgttagacaaatgacctcagataacttaagaaggggggttgaattaagatattgcaaactatgtccccaattaaaagtctattttaatttcaatggcaagtacaagttcccttaanaatgaactcttaaataatgattcaaataaaacaatctgaatataaatgcacagcattacgaaataaaatagtttaagggaagagaaagtgcaaactcagatttatactggttcggccacaccctcgtgcctatgtgcagtcctcaagcaacccgcttgagagntcactatcttgataatacctttacaagttctaac

SEQ ID NO: 61349 - DNA, 585 bp, Glycine max
  unsure (1)..(585): unsure at all n locations
atttatgaaacacaatttcatgatgtctatatctgatcctggaaaaataaggtttacattatcttttacattggtgttttgagaatngagatcggtaggacctacactcggtattgaaataatgcngcagcacttacaaattatttttcaataacgagttaaacttttcagggggaataaaaggtatttaaacgaggtgtaagcctacaatagtttgagaacgtgtaaataacctttttaatattattttctaaaaaattatggtttattttttataaaattgattttatataaatggagagggtaaatactaaataaaacaggattagtttatatgaatataaaaaacataatatatattagtttttttgaaaaaaaaaaaaaaaaaaaaggggggtttttaaaaaaaaataggggggggtttataacactctcttttttttttaagagaaaattttttttttatataaaaaaaaagggggggggggggggggaaaaaaaaaaaataatattttttttttttcccctccccgggcaaaaaaaaacattttaagagaataaacgtgtgtttgttttttatttttt

SEQ ID NO: 61350 - DNA, 478 bp, Glycine max
  unsure (1)..(478): unsure at all n locations
ctatacaccactcaagcctatagcatanacacaagaacatcaatgattgattaaatggtaatcaacttatcaactattcgattgaatggacttataataaatgtaactattgaaattgaagttaaactattcaagtttgagccaatctacaattattatataaatcatcaataacaattcacaactactgaataatagagagcataccaattcttgataaccctttgaaatatccatccaatcgaaattagtatcaatgttctaaagaagataataaataaattacaataatcttaaaacaccaataatgtggattggtttagtagttacaacttcttgtgtcatagtgcatacttggatttgtggtcaatatttgataatctttaacttaactgtagcaattgaaaatgaaactcaaacaactcacaaccatgataacacaccaagtgtaagcattaatgttcaatagatggtatat

SEQ ID NO: 61351 - DNA, 460 bp, Glycine max
  unsure (1)..(460): unsure at all n locations
ggcatcttcatcctcatcatctcttaattttcgttagaactgtaaactngctaaggggttcctttttatgaactctgcccccatggttgcctttgggagaaggcaaccatggtgtagtgaacctccaattcattgcatattagaaaaataagttttaaggctttttaacaaactattttgtgaagatgtggcattttcatttgcatgcatgtcttcttcccttatttttgctgtgtttntgtcttggaagaaatcctaatacagatgagacactatcaaatttttcttaaatttttaaaaaaaagctttgattctcaaaatttggggctatgagaagggagaggttggctggcagactatgttctctagagtagtctcactgattcaagtctataataaaatctacctattggatgttcattaaatttgtcttggtntagtctaaatacaattttcaaca

SEQ ID NO: 61352 - DNA, 242 bp, Glycine max
  unsure (1)..(242): unsure at all n locations
aaaaaaaaaaaaatcccgggagaaaatatttttttgtggggccccccccttcnnnnttttaaaaaaaaaaattttttttttttcacaaaaaatattttggggggggtttttttttttttatttttaacccccccgggggggttgtggtttttttttttttttccccacccaaaacactttttttttttttttaaaaaaaaaaaaaggttttttttttttttaaaattcctttttttcccccc

SEQ ID NO: 61353 - DNA, 448 bp, Glycine max
  unsure (1)..(448): unsure at all n locations
cttatgattgataaaactaattctcataagttaggtagaggatgaaaaatttgtcagtagctcaaacttatttagtcaacttattaaatcatatatgtttggtaaatatgtatatgtgaatagttaaaaaatataaaataatctaaagaaacatatttatatgacatctgtatattatatttaatttaattttatgaataaaaaaatattcntagatattatactcttaggttttcgattaattttaaactcttggaatttttatttatatataagttattttaattatattgttaatctcagtcattagatttttatattatgtatgcaactactactcttatcctatatcttaaaatatttttaatcaagtttaaaataaagtaaaaaagaacatgtagttaaataaacattatacccgcattatattatgttaattagtatcata

SEQ ID NO: 61354 - DNA, 194 bp, Glycine max
ttttgggggcccccttttttttaaaaaaaaaaaaacctttttttgaattttttttttggaaaaaaaggggaaaaaaaaaaaaaaaacctttttttaggggcgggcgtgttgggagaaattttctttttttttaatccccggttttccctcttttttggtgtttttccaaaaaaggggggggggggaagaaaaaa

SEQ ID NO: 61355 - DNA, 476 bp, Glycine max
  unsure (1)..(476): unsure at all n locations
cgagtcattcatccctatgagatgtcgatttattatcggcgatcagaattgccattccttggattatagggctgaaccaagctcatgcttttacaaaaaggttcatcaagtcaagttgaaatatggaagtaaccgtcttgcaaaatttgggcaaaagatgaatcgagtcacatcactgcttcgttactgcaaacatattaagaatattgagtccttgtaactccagttcaccttgacaaagatgtcatggaccatgttgaaaattcaaattgattcaaccccatatcctgcgtaaaaattcgcaatacttcaactgtacatcattcgcatacatccatgcttttcattggttgcattgctcattgcattctttccttgaaaaataaaataaaatagaatacaatcaacttaatcattgttatcanaaagaataggacacgctctacggcgcccttaccgaactcgtgctagagcta

SEQ ID NO: 61356 - DNA, 231 bp, Glycine max
  unsure (1)..(231): unsure at all n locations
agcttattntgattaaacttcacgtgatagtatgtttcttagtattcaagaaatgaatcatttgcatccaaatggatggaagtatggtatgttgggttttcctcccttccatagtccataagtaatctttttaagaattgatcttatgtaaattcttgtttgaagataacatgcaatattcattgcttcaatccaaaagtgcttagggggtcaaaatatcattaaacatgg

SEQ ID NO: 61357 - DNA, 406 bp, Glycine max
  unsure (1)..(406): unsure at all n locations
ttatgggaggaggttacatgccatctttgctntaagagtaatgtcccactaaaactaactcttcaaatggttgccttcgcaggaatggcaccgaggaagctngcctcaaagaggtccaggaaagacaaggcggccgaaggaactagctccgccccggagtacgacagtcaccgctttatgagcgttgtacaccagcagcgtttcgaagccatcaagggatggtcgtttctccgagagcgacgcgtccagctcagggaggacgagtatactgatttccaggaggaaatatggcgccggcggtgggcaccactggttactcccatggccaagtttgatccagaaatagtccttgagttttacgccaatgcttggccaacataggaaggcgtgcgtgacatgagatctt

SEQ ID NO: 61358 - DNA, 131 bp, Glycine max
gcttgatatatacattctccccctttcttaagcaaattcttaattcttcttgacatcatcaaaatctttatgatttacaagaaaagcctccggcacgggctgaaaagcttgagtgatgtgcatattggtgg

SEQ ID NO: 61359 - DNA, 433 bp, Glycine max
gggtagtctaagagaagttcaagttcatagtcatcaaagtctgaacagagtatgatgaactaagggacgttagtatggtcacagctgaagccttggaacgagaaaccaagaaggcttcgaaggaagaacacgacccaaacatagttgtgaggggctttatagggcagcaatagtgagctcaagctctcaataggtgaaaggaatcatcacgggtcaaaggcatgatctggaaggaggagctaaaggtttgccttatgtcgaaaagaaatttgtcccaacagttaagcgagacttgaaggaatatgtgggccatcatcaataagtgcaaagagaagctaaatctagcggcgactcacgagcaaaggctagaggatgagtacgccaagatatcatttgatagggatgcacgggatagggtaattgattcattgca

SEQ ID NO: 61360 - DNA, 137 bp, Glycine max
tcggacatccaagtaaaaatttattgttgtttgaactaactaggagcttccatttttaatttggaggccctcgatataataccggacttcataggacattcgagaaaaaaattattggcggttgaatttgataccaa

SEQ ID NO: 61361 - DNA, 438 bp, Glycine max
aagtgagtaatgagaactactcgggtattcgactaggccaaataccaaagtatttatgagggcacctttgtgacaggcgatgagattaataattatattcagctaggccgaatacttgagtacttagaagggcacctttgtgacaaggtgatgagtacttgggtagccgaataccttagtacttagaagggtcatctttgtgacaaggtgatgaaagtactcaagtattcaactaggttgaatgcctgaatacttagagtagtcacctttaatgacgcggtgatgagaatactcgggtgtttggtttggctgaatgcttgagtacctaaaaagggtcaccttgatgacaagtgatggcaatacttatgtaggccaaatacttgagtcccttagaagaaatccctttgatgatgaggtgatgagagtacttgggtattc

SEQ ID NO: 61362 - DNA, 174 bp, Glycine max
gatcttaagcgacgcggctgcacttttgattggcttcccgcgttttgatttgtggtttaaagagcaattgacatatgcttgaacatgccaaaaaacttggcaatgaaatgggaaatgaggaaagccagctggacgcatctacagcagttccctaccacaatattctagcataca

SEQ ID NO: 61363 - DNA, 445 bp, Glycine max
  unsure (1)..(445): unsure at all n locations
acttctagatgctgttatacttaatgaggatattgatactttaaagacaatcttaaatntgttagaggaacttataatcttaacaaattgttaagatataatagatgtcccacaaacaaatatggtcataggtatgagggacaaatatatgttcatgatgaggaaactattgttgttattttgtggcaaataagacatatcatgtccaagtgtagggacttacctaagaaaggtgtttccaatacattcaaaactaacaagaaaggacccaagaagattcgggtacctaaggataaggttattcctattccagatgtctttaataacaagaaagagacacgaattatggtacatgaacaacgactgcttacaacacatgacaagagaaatgtgtatgttcaaatgcctaacccttgtacatggttggaatgtaacttttggagat

SEQ ID NO: 61364 - DNA, 102 bp, Glycine max
agataaatttcggcttataaataatagctaggggtttatagataatggtagagataaatatttacttatagatgaaagggagaaaataatcataccttgtag

SEQ ID NO: 61365 - DNA, 748 bp, Glycine max
  unsure (1)..(748): unsure at all n locations
agcttgtgcgaatcatatcactcctgcattttatctctaccatgcattnttctttctttacccactcctcacgtttggttttttagggaaaaacaccataactaaacgcgccacaaggcattcctatcgcaccagatccaaatctataacgatgggtgatcaagaggagacacaggaacagatgaaagccgacatgtcagctctgaagaacaaatggcttccattgatgaaacccaggttaggatgaagcactctatggaaaaaaatgtgccaccgttgccgttgtagttggctgccgaacaaaccaactctttggcactgccacatcctcctcacatagaggacaggaatgaccacttggccgatggcgcctactggatcaccgacgctacctatggtgcgctatacacaccgttgagagagcgcattgtttcctctgagaactttacaccggagcaaagacctaactagtgaggatgggaggttttttttttttcccccccccaatacccccccgaagggggccgggggcacccccaaaaaaaaacggtttttgtgcttttttaaaccccccaaaaaattttttgggggaaccccccaaccccaccccccctttttttatttttttttttcccccccccccaaaagggggagaaaaaccgcgggcccccccctctttttttttttttctgggnnccctcccccnnntnnngcccccaaaaaaaaaaaaaaaggggggggggggggc

SEQ ID NO: 61366 - DNA, 330 bp, Glycine max
acttctgcttttatttatagaccacagtggtgtcccggagatatgcgtcggggtctagagaccttatggacgtcatgggtgggtgtctattaccataatctaactattacccaacccgggcatagtcagccattgagaacctgtgatgtatctaaacaggcgagcttctggcagtcatcagattaatggaaccaagaccacaaatcctcgaggcttgtgtggtggctggtcaactgtgaactttgatagatatgtggtacgtggcctctggtaattcattaccaggaggggtaatctattactaagctctaaaatgaagactggaagcta

SEQ ID NO: 61367 - DNA, 391 bp, Glycine max
  unsure (1)..(391): unsure at all n locations
agcttaagacaaatcttgtatctgggggtgtcatggatttggaaggtttttcttcgtggggtaaaggtggngttattcaaatcaaaggaaaatggaagtctttggtaatgctgggaaccaagcaagaaaatatgtacatccttctaggatccactgtgacaggctttgtctctactatttcaaaatttggaagccatgcgtctaatggctcatttgataactatttgtggtatctgtgtgttggaaaaacccgaattctagagggggtgaaatatatctttcaaatgttacccattcattttagagattaattaacctaacccacattgaaccagggttctcaaaactaatgataatatttttatcaatgaagctatgatacaaaatctat

SEQ ID NO: 61368 - DNA, 168 bp, Glycine max
taaatttggtttaggtaaattttaggcggacttctgggctgctaactgtaaattgacccaataagatgttgtgctatcaatcctgttaaaggttgctaggcaataaactttcatattaaccaagttatagagtgcttatcaataaaccaaaactactttgaatagaca

SEQ ID NO: 61369 - DNA, 615 bp, Glycine max
  unsure (1)..(615): unsure at all n locations
ttatcaaactatgataatttccctttgagagaccccctgggttggcacacaaaaaaatcttttgatatggtactccccctggtttacattggtggtttatggacaatgaaaatatattttattataaaagtggttataaaaacaaaaaaatgnncaacaatataactttattttcttcccctttgcaccttaaacaaatttgatgagagagaagatgtccactgtgcttgttggataaggaacaaagcttaacatttcattaataacaaacagtcatacactcataatcatcatctaattttaataataataatacatactattccatattttttaaaatcaatcataaacaaacattaatcattaattaattttccaaaaaatttttttaccacacaaaaaaattttttataaaaatatttttttaaaaaaatttttttttataaaaaaaattattttttaaaaaaatttttttacaaaaaaaattttttttcccaaaaatttttttttttccacaaaaaaattatttctcaaaaacctcttttttttttttttgaggggaaaaaaaaatatttttttttttcccccccctttttttttttttcccaaaaaaat

SEQ ID NO: 61370 - DNA, 107 bp, Glycine max
  unsure (1)..(107): unsure at all n locations
gggggggggngttttaaaaaaaaatttttttttttnncccctttttttttttttgggggtttttaaaccccttataaacccccccccaaaaaaattttttttttttt

SEQ ID NO: 61371 - DNA, 344 bp, Glycine max
accacctatcaaagactctttgtcaagcactgctctggtacctgcctcccaatctttatattttgatggtaaacttttgctgaagagaaccacctttccaactataacatttgattctgttgatccaagaagtgcgctctcaacaatcataataagatcatcatcttttcttctctacccgcgccgtttattcatgatggcaccaaacaaccccatgagaatacatctgtgcggcaattgaacaatgctgggtgcttaaacttattcttccaggactgagacgattagcttgtgcaggggttcaaggagacacgagaaaggatattgaaaatgaatgcgcaaat

SEQ ID NO: 61372 - DNA, 213 bp, Glycine max
  unsure (1)..(213): unsure at all n locations
agcttgcgaaagccaccttcacaatcaaatattacaagccacatagntgatgttgcatttatgaatatcaggggaaagattgtgatgttgcatcaattaatcgnggntaactcttctctttggttcttctatttcactgattgagagttcaagtatggagatcactaaagttagttcgatcctaattggtggggtattggttgtgtcatgtat

SEQ ID NO: 61373 - DNA, 346 bp, Glycine max
tgaacttctggatcccttgtcgtggcttcttggagggtgaagcttaaggagaacccaatctcctatctggtagttcacttcgcgatgtttcccatcaacatggctttttatagcagcttaagccttgagaagcttatttcgaatagcttggaaagtgttatccctatcagtcaacatctctttaatggcctcaatgttcgaagaccctggtatatattctggaaagtaaagggtttttggcataaggcgacttcataaggagtggctccagttcccgtgttccatgaagtattgtgggaccattcgacccacgggaggagcttccctcacaagcttggccggcgat

SEQ ID NO: 61374 - DNA, 202 bp, Glycine max
  unsure (1)..(202): unsure at all n locations
atgctcagnnntgaccgacggaaggagaaatgtattatccttgtgatatcacgttttttaatggccgaaactggtccttttatttttttttcatgaaaatacaaaaattccaacttttaatccatgtgatactattntaattcttaattataagatttaattaatttatttattaaaaataaaaatatatttatttaaatta

SEQ ID NO: 61375 - DNA, 432 bp, Glycine max
  unsure (1)..(432): unsure at all n locations
ataggagaaggtagaaagattgtttaataaggagtactattttgatatcacattntgttgcaaaatgattttccttcttaacaatcttcttggaggaatccttttcctctttttccttccccttggcctttgaagacgaggccttactatccttctttttctttggggtttctagnttttctttctcttatctttcaaagntaggttatccttggccacctgcanaggtgtttgaggatgcaacacanatttagtggccagatgggtgagggtaatctcattagttaggccattgtaaatgatctttctatcaaattgccatggccttactaaactaatatgccctgtcttcatgggaactatatcacaattaacttcattcttatatgtcccaatggagaaaggtaccttcactttgtggttaacaatcat

SEQ ID NO: 61376 - DNA, 435 bp, Glycine max
  unsure (1)..(435): unsure at all n locations
gagctatggtgcttcctccaaagggcaccgcttctggatgaacttcctggaaggcccacgtgggcctggtttctatttgcacccncttgttactaaatacaccccctgcctttctttgctgattcttttttcataacgttacagaactttacgaattccgcaacgatacttattntccttccgtaatgttacagaaccctacagattacgtaatcatcccttntttggctttcagaatgntatggaacgtcacggattgtgtaacaatgcttcctttngatttctggcatgttacgaaacttcacggatcgtgcaacaatgctctcttttgacttctggcacgttatggaacttcacgtattgtgcaacaatgggtgccaagtacctcgaagcggtcaaccaaaggttgcatgccatcaaacagtgctttcccga

SEQ ID NO: 61377 - DNA, 212 bp, Glycine max
gcctgctaatccacctgaaattgagagataatgattatgaaacacacaaaatggaagtactaagtatttattacctatacttaacaaaaaatacttataacactacaaaataaccataaattggaagagtttgatacaatttacataagctctatacacaaaagttagtcgtattcaccaactaacagatcccgagggcacacaccttatac

SEQ ID NO: 61378 - DNA, 412 bp, Glycine max
  unsure (1)..(412): unsure at all n locations
gaatattaggacatgtttgagaggtttttattataatttaaatttggcttccccatgaggaatacctttgccctaggtagcatggaaaatacctttcaacggtatgtatatatgtgaatatatatggcatnaaaatacgtgcaaagtgtgtgaatatatggcataaaaatacctcgcanagtgtgaatgtatagcanataatgcatttcaaaaatctgtatatgtaggataggtagcgtaaaaatgcctttcaaaatatgtatatttgtggatagttagcataaggagcctttcanaaaatgtacccatgtcaaaaatggcacgggaatgcttcccaaatgaatgtataatgtggaattgcctttcaagtgtagataaatgacatgaaagttccttctcataaaatgaaagt

SEQ ID NO: 61379 - DNA, 717 bp, Glycine max
  unsure (1)..(717): unsure at all n locations
agcttgcttctacatttagctcattccttatatcctaggtaagtaactctatacttttttacttacattnttttagaattacataaattttaatcatggatatatttctttttaattggagatattatagtcatgaatggcttagtgaagattctaatcgagttcctccacatcaagatatggaactcactcgtgaaagattaaaatgcttcatgaggctcttctcttatgtgggatgtaagagaaaagggaaattggatttgccacttcttatatgaagagaagggttgatgacctgatcttaaatgaaaaggcaatggatcaaagcttgtggctgtcatgcgtaagctcatactcaagggtgcctagcactggaaactgtcattctgtgggaggatgggctttcttttccttttagagacgatgaccctagcggaatttttggttgctttgttttaggactccatttcgagaaaaagggaggcgggaagaaaattttgggggggcacccccccctctgagggatgggggggggttttttttttaaaaaaaaggggggggggttttggttttttttttgggggggacacccccccccatttttttggggggggggggggggcctttttttttacaaagaaaaaaaaaaaaagagggcccccctcccctttttttgggggggggggggggggttttttttttttttttttttgtggg

SEQ ID NO: 61380 - DNA, 468 bp, Glycine max
  unsure (1)..(468): unsure at all n locations
cttctatggaggctgngatatttatcttctatggggtcctttaatggtgattntccaccatggagatgcagcggaagacaaaggagaagaagtgagaggaggcgtcatccactagggaataagccatggaagaaggagcttcaccaccaagatgagccttggacaagaagcatggagaggatgctttaatggaggaaaagaaagagggagagaaagagagagggggagcatgatattgaaggaagaaaaagggagagaagttgaactttgagttgtgtcacacaagactctcattcatcaaagttacaacaagtgttacacatgcttctatttatagactaggtaacttccttgagaagctttcttgagaaaacttccttgagaagcttctttgagaaaacttccttgagaagctaaagcttagctacacacacccctctcataactaagctcaccttcttgagaagc

SEQ ID NO: 61381 - DNA, 168 bp, Glycine max
  unsure (1)..(168): unsure at all n locations
tgacgctgcaagcttctnncccaattntttataaatagggggagaagtgaagtagaaaagggttcaagccccttagcacttctctctctttcgaatttgcttaagaaaattggtttcgtgaagaaaatccaagccgaggcgcttccgtaacgtttccgggagtgattt

SEQ ID NO: 61382 - DNA, 448 bp, Glycine max
  unsure (1)..(448): unsure at all n locations
cgctcgctaagctaattgtgcaaaaaagaataggatatgtgttcactcgctaagcgcgtggctatcatgcttagcgcatgagtagattntcctaaggcacgttaagcgagtcacttgcactaagcgctcagtctgactttcagttntattttctgctttttaatttgaataaattcctgtgtaatcttgtgttttgattcttttgtattgcagatggcttcccgtaagagaaaagccatagcttcaatgtctcaggtcgggtatgatagatcaagaattatatcacaggaggcctgggaccattacttagataatgtgcttgccaggaacattcttcccaaaagaaatgtcaagttgtatatcaatgagnttgatgatttcagaagagaattgattagaagaaattgacataaacagttcaccaacttgactganggaagcattgatg

SEQ ID NO: 61383 - DNA, 401 bp, Glycine max
  unsure (1)..(401): unsure at all n locations
actcagcttgctatactcccaaagacttctgctggggtgcaagtcttttcaacccaatagacatggctttgctgtcagctgagaagcaaggcatttttgtagttcaagcagcaggaaatactggaccatcaccaacaagcatgttctccttcagtccatggatctatactngtggtgctgcctctcatgaccgggtttatagcaactccatatttcttggaaataatgtgaccatacctgtagttggtcttgcacgtaagtttttgtttctcaattcctcgtaaatggttaaccttataagaatttatnttagactaactcaccagagggggggtaatgttacggactttaatgattggactttctcttttgtgttgcccaagtagtgaagatcttcaatg

SEQ ID NO: 61384 - DNA, 480 bp, Glycine max
  unsure (1)..(480): unsure at all n locations
agcttcaacccatcagaatgatcttggcttacactgcacatgtcagaagcactagcttgtccatgacctgtggttatttcgaacttttcagcaaaaaattcattgctgggctttctgctgagggaagaatatcttattgctcgctaaagggacaccctgaattctttatcactcctttttgacaaacgagagcatgatggacctggtcaagtccttttcaccaatctagaaaatttttttttttgcgttcattttactgccactcaattacaacataaatgtaagtaggaataatgcggatcagctttttccagaagaaaaaacccattacgctataaaacactgatatccaaaataatttcctttaaaacccttttttaatttggaaaaaacccaacccccatttcaattggaattaaattccgccccccgaaaaaaaaaaatttttggagaaaattttttaaaaccnctttttttttt

SEQ ID NO: 61385 - DNA, 386 bp, Glycine max
  unsure (1)..(386): unsure at all n locations
tgtattaccatattctaaacagaaaagagaaagtatgatagatgttntttgctctcgctattaacaatacatatttatttcatataaaacttttcttttattttattagctacaaataaattagaatatacctttcatatttagaaaaaaaattatgagataaattatttgaattaaaaacggcatctgtatgcttcttaatataactttggtcaggtcgtggtatgttagattaagatgagaaactcgtaactcactatcctttgttaacgccatcgaatctgaaatcttattgagtataaatgttgtcttgttaaatttttactgcanattaatcagcaatcattatgccttgtccttgatctatttaagggcatctaattttc

SEQ ID NO: 61386 - DNA, 727 bp, Glycine max
  unsure (1)..(727): unsure at all n locations
agcttattaaatttcttgcagattgatggttgtataatacccgttgacccttgnggttgcaagttcctcttatggaaaattaactatactccctcaagattatcaacaagtacctgtgttaatgttatttcaaatgctgtgtcgtacaccattttggggatgatgtatttcttattcttttttaaattatccaagctttgtggaagttaaatttttagcagngtgtgaaggtggaattgcaaccacacacctggttattcntaagtcttacccttgtctggaacttatcaccctgaacttatacaagttgatctgtttcatttgctacaccaaactttttctacaaatgataattgaatgactgcatagactatgacgtgaagaatgatcattgtcatcttaccagaagaaaaaggtgaggttattaagtctcatgtatcactataaagataagataactgcatctgtctctattacttgagttaaaaaattaaatattttggggtttttaaaaaaaaaaattttttttatacccccccccaagagaaaaaaaannttttttggagaaaataccctttttttggcgacacccccggattattttttctttgtgtggggggcaacaccacaaaaaaaatttttttcttttttttcccaaaaccccccccttttttttgggggggtttttttttttttttttttttttaaaaaaaaaaaaaaaaaaaaa

SEQ ID NO: 61387 - DNA, 450 bp, Glycine max
  unsure (1)..(450): unsure at all n locations
attcttcacatgggcttgtccatccatacctttgattacattatgagagntactgagaatctcaatgcgaagtatattaagggtatggngcctctggtactgtgtacaagtgtgctctatagaattcccggccaattgcaattaagcgaccatacaaccagcatccacacaactcaagggagtttgagacagaacttgaaactatttgccatatcagacacaggaatcttgtcactttgcatgggtatgctctaactcctaatggagatcttcttttctatgactatatggagaatggctctctgtgggatcttcttcatggtaatattcactcaccttgaaataactccttggaattnttaatgtgaatgaaatcttgtcttaataaaaaaaaacaatcgagaatgtcctgaaattgaatcttctcagataatgatgcttactcttaac

SEQ ID NO: 61388 - DNA, 193 bp, Glycine max
ttatgtatcaaatattattttgaaataaagactcctctgaacaaaaataaagtgggaatagattcttaactcattttttaaaattagagatttttttatgaattttgttcttagctgtaaaaaaatacatgcatactatatatttgacacgatcctttctattattaccatcgtcattatcatagtgattacc

SEQ ID NO: 61389 - DNA, 340 bp, Glycine max
aacgctttgaaacactctctcttggctgcctcttatcttaatctatagcacaactcgccttacctttacgcttcattactgccgtatattttatatttcaacattatgaaatgctctgatataatgttagcaactgttaagcgaaaatgttcctctttctgtaatacagaatacatggtcttcaatatgcgaagatgtcgaaagagttctgagccatgcatcttatgtgatagatgcagtttacacaatccaagagagtcatgttattactgcctcaattgactgcacaatcaatgtctgttactaggcattgtacttgaaggtccttgttcatctggtg

SEQ ID NO: 61390 - DNA, 276 bp, Glycine max
  unsure (1)..(276): unsure at all n locations
ctttctgaaccgntttttcccccaaagaaggggggggggggggtttttttttttttttttttttagcaaaaaaaaaaaaaaaaaaaaaaaaaaaaaaccacacccccgcccgtgtcgctttttttttcttttccttctcttcccccctcctccccgtcggcggggttgtgaaaaatattaaaaaaaataaaatttctttctttctttcccttctctctctttccttctttcttcttcttcttcttttnntcggnnnnnnntnnttttttaatcatt

SEQ ID NO: 61391 - DNA, 425 bp, Glycine max
  unsure (1)..(425): unsure at all n locations
atatctgtgtggtggttgtcataggagtataaaccacagagtctggcgacaggtgcagatttctgattcatggcaagctgagttattattttgaccaaggcatcaaattttcctttaagctntttatttttagtagatgaagatgaatctgtggccacctaatggactcctctaacaaaaatagcatcatttcttgcactgaattgttgggagttggaagccatcttctcaatcaaattcctagtctcagcaggagtcatatcaccaagggctccaccactggcagcatcaatcatactcctctccatgttgctaagtccctcatagaaatactgcagaaggagttgctgagaaatctggtggtaaggacagcttgcacacaatttcttgaacctttcccagtactcatacaagctttcttcact

SEQ ID NO: 61392 - DNA, 182 bp, Glycine max
agcttatgggtttgcgatttccacaacccatgaggtatgcgaattgcctcaaagaaatgaactaagcagcgacaaacaaaaaacgaaccgagaagggtgcttcatggggtgtgaatgccctacaaatcatgcgacaacttggaggtcacctcgaaaaatccataagcttcgtgagcttcgtg

SEQ ID NO: 61393 - DNA, 206 bp, Glycine max
  unsure (1)..(206): unsure at all n locations
agctngaagtagtggatgacttcttgatttatcgcgagataatgtntgcaagtctgaagaagaaaatgattaagggcaaagaaacaatgaaaagattcgcagacaatcatcgccgcgacatcagcttcaaggtaggagactgggtccttgtcaaattacgaccccatcgccaaacttctgtgaaaggtgaatcctattctataatg

SEQ ID NO: 61394 - DNA, 425 bp, Glycine max
  unsure (1)..(425): unsure at all n locations
attcttagatagacaactagcatatgctagcccataaatagatagtgcatagttattaaacacttttatagtttacaaaactatttttatgttaccataacattggtgagaagtatctatcgactttggcaatgactaatttccaccaaagaatctatttggtcaaccttaatagagtctttcttgtcaaacatattttttcacccacaagtcgaacttgaaaccttggttatgacattcgaattcaatatcacttcaaaccaacaacttgatgtgaaaatgttgtgaatcatgcaacgtttgatgatgccaaaaagaatttacttgataatggttgttatcatacaaaagggagaatatgaatatatgaatactcgatnttgatgatgccaaagtataatcaaacaagattgtttcacaaacat

SEQ ID NO: 61395 - DNA, 636 bp, Glycine max
  unsure (1)..(636): unsure at all n locations
cactgtcgattgagtggtagcgcctctcattcgcgagaccattacgatttggttcggtgttaaaaataacgaaactttcaaaaatttaccatagagatttgagaaaggtgatccaaaatttttgaagtcaggcattcgagagtgtcccgagagcctacccttcggacatacatgcatcgcatttgctatattacatacacacacctggttacttattcaatatggaccgatttttgcaacaaccacttttataaaaaacagttttataaaatagacagtaaaacttttgaatcccccacatattaaaaataatactccttataaaaaaactacttatggtagaaaaaaaaaatttttttaaaattattttttttcccccccactttttataatttttttttggggnggggaaananaaaacccccccccctccttcttttttgtttccccaccaaatataaattttatatattttttggggnaaaaaaaaatctctccccccccccccttttctaaaaaaaatttttttttttttttttttttataaaaaaaattttttttttaaactcccccccccctttttttgttgtgggggggggaagaaaaaaaaaaaaaaaaattatttttttttttttt

SEQ ID NO: 61396 - DNA, 422 bp, Glycine max
  unsure (1)..(422): unsure at all n locations
tttttgacttttctagtnttttcttatcttttaccataattgagttagcttctgccatagcnattgtggcctaacatgctctttataaatttgtatgctataatggcatttaattatatagaggataattcaatgaagtattactatgccttgttatttctcagctgagtttaagttcaacaattgatatctatccaatggctttcacgggcttcagatntttttaaaacagtttgtttgatctgcgatggaattgagttataataataataacttatatggtcttatctgaagttaaacctagattttcagaacatataaggcatttctttttttaaaaaaaaataaaagagaactgactcctgaggaacaaccagtttgagttgcttattacaaattatagttgtgggcattattatgtt

SEQ ID NO: 61397 - DNA, 274 bp, Glycine max
gaaaaaaaaggggggttttttttttttccaaaaagcccctttggggcccgcgcaccccgaaaaaaaccctgggggaaatttttttggttccacccctttttggagaaaaaaaattgaaaaacctgggggggggcgccccccctccccccaaattttttttaaataatttttttgggggggggtttttgttgaaaaaaaattttcccccccccctttttttttttttccccccctttttttcccccccaaaaaaatttttttttttgtttttttt

SEQ ID NO: 61398 - DNA, 358 bp, Glycine max
  unsure (1)..(358): unsure at all n locations
ctatgctcttgtgtggtggaacatgctacaaaaggagagagcaagaaatgaagagccaatggttgatacatggacggagatgataaagatcatgaggaagcggtatgtgccggctagttactcaagggacttgaaattcaagctccaaaaactaacccaaggcaacaagggggttgaggagtatttcaaggaaatggatgtgctcatgatncaagcaaatattgaagaagatgaggaggtaactatggctcgatttcttaatggtntgactaatgatatccgtgatattgttgagctgcaggagtttgttgaaatggatgatttgcttcacaaagcaatccaagtggagcaacaatta

SEQ ID NO: 61399 - DNA, 619 bp, Glycine max
  unsure (1)..(619): unsure at all n locations
tatgtttatttgtattggcaatggggattactacgacaacatattgttngctttcaaccacactatgcctcatgcaaccctacactagcattgatgtcaatgcacccttttcgattgcatttagtgtcatatggtgggattaggctaagtacaatttttgcatgggtgccttgaaaggaataccatggcggtgttggtgagtgtttggggccaaccttggactcttaacacacatgaaccaccctggtttcccctagtgagaacccattggacgatatnaatgcatgatcctatggggaacctcggtgagatgcatttcatgaacttaaatttttcaactctgcaaccccacttttaattcttgctgggggttgaatcttaagaggacacctaggggcctcaacaaaaccaaaaacaataatttatggtttattgtcttcggcatccattaggctttgaagggataaattatttgttcttttgcttttttttttttttctttaaaagagaaaatctttccaaaattttttttttttttttataatgtgtgcaaaaaaggggaacaccccctctaacctttgtttgggggggggggggggctccctctccttcttttttt

SEQ ID NO: 61400 - DNA, 426 bp, Glycine max
tatgtatccattattatgtatcttgttagcttcttcaacagcttgatttatccataagttaaacttaaagcttaattgatcttacctttctattaatttctactataaatgcttgctaaaaagtttattccaacagagcccaagtcatgttcctaattcaatgtacatgttctttatgtagaaaggatagagatgctttgcaatatttgttttaactatagtttggttacttggaagaatataataccagaatgtgtagcaatattatctccctccacatatttatggatagacttgttttcttcaaataaatatttaaattttcctacttatcttgcagaagaatgtactctcttaaagctggaatttatgataattctctgtttgaactataaagaggagatctgaccacagtatgtatcttta

SEQ ID NO: 61401 - DNA, 226 bp, Glycine max
  unsure (1)..(226): unsure at all n locations
gatctgtaacctcctgccgctgcagcttgattctaggaatcacttggactagactcacccaccggctatcagaaatggggtagatgattccaacttgcaagagcttggtcacctcctttntcaccacatctaaaatgatggggttaagtcgtcggtggggcttgctcactggcttaactccatcctctaaaaagatcctatgcatgcacgtagatgggctaatact

SEQ ID NO: 61402 - DNA, 487 bp, Glycine max
atcttagggaggggacccgagcttaatgctgatgggctttctttgaagattatgattgttaacatgaacactctagctcagacatggagcgttcattccttttctaacctcattcttagctccaacacatctaatgtcaccttggatagagccaagttgatttatggtattattatgaagatggatatgaacttatggtacctcatctcccaccagatctctctgattccacaacatgatacatccaaacttggattccctgccttgatcacagctctatgcaaggccagaggagtccagtcagattctagatccctagagaacttgagccctgccatcaacttggcatatattaagaataaatgttggaatcttgatgatccaacagtgacatatagagggccaacgatagccatgggtaacagatcagaggtccacactacttgagcaccacatgagacactatgcttcttttcttccatagctc

SEQ ID NO: 61403 - DNA, 163 bp, Glycine max
aatgtataacaataatatggccacgtgatggagagagagagctgtctgaaaagctttttggtcttaaataaaagggctttctctttttctattattttatttaagcaatgccacatgtctccatttgaatggagcaaaaagggcccactttccctttttgact

SEQ ID NO: 61404 - DNA, 604 bp, Glycine max
  unsure (1)..(604): unsure at all n locations
aaatcttcaaaaacaagtcacctgaaaaattttgactgttggaaatgtatttttcgaaatcagtcactggttatcgattaccatttaggtgtaatcgattacacatccacaaaggggactcttcattttgaattttgaaaataaaaacgtttaaaagctcttgtaattcaataacaatggttgggaactcctccccctgggtgaaaaaattaaaaattgttaaacgaaagttgtactcttgatatttgaaatttaacgttttaaacactgggtatcaattactaccttctgggatcgataccaagagcaaaccctcggaatgatttaggaaactcttggcactcatgtttgagacttntatactatctgatgagctcctgttctgaactgagctgatctgactgaaatctgaactgatttgaactgatttgagttgatttgaaaacttgggaatttttctttttggaaaaataatctttttgggggataattttttctttttgggacactcttttttgggaaaattttccttttttgggcgcctttcttcttctcccacaaaaaaatcaacccccccctcaggggaaaaaaaaaaattttttgt

SEQ ID NO: 61405 - DNA, 184 bp, Glycine max
  unsure (1)..(184): unsure at all n locations
agcttctgttgttctatttcgaacgtgnttatatattatgcgccttggtcggaccttcaagttaaaagttatgaccatctgaatttctcgagagcttgcggtggtcaaatacaagcggtttatttatactgccctgaatcggacctctgagtgaaaagttatgaccatttgaatttcgcgagag

SEQ ID NO: 61406 - DNA, 437 bp, Glycine max
  unsure (1)..(437): unsure at all n locations
agtcttcactattttccatcatgaagtagatatactaacaaactacccatcatatctcccagaaccccatacccacgaaatntaagagagaaagaagtccacccaaacctgaattttcgaagtcccactcgtagccacgcactttacgaccccgaagatgctctcctttcacgatttggggcagaaacgagcaccaaaggttgaagctttgtgtggagcttcaatggtgaatgagggaggaagatagcaacttgagggagagggagggctgtctgaaatttctgttntgctgagtgaggagagagaaaagcttcttggtcttaaataaaagggtttcctctctttctanttatttattcaagctctgccacatgtccctatttgattggagcaaaaagggcccactttctctttttgctgggacgcatactcagtca

SEQ ID NO: 61407 - DNA, 626 bp, Glycine max
  unsure (1)..(626): unsure at all n locations
agcttgcacccatggcaatgaggaanaactgtattctcgttaaaccttttgatttcggctccttttcatggagtgccctgtagcatatggttaatgatgtaatcaaaataacattaggggatataatagaagaaccttcaattaattaattggttactgctgttgcgtaagctcttttggagaagatactgattatttgcctatatgtcaattctacagtagacaatgaatatttgcaccatatattaaatatctttcttcacctggaccttacaactttaagtatgctttcttgaaagagatattacacgctcagatgcgctaggtcgtgcatattacatttgtcaatgcatatatgtaaaataatgtttctgtacaatacagcttgaatactatcattagtcacgcagactattctctttatcttgtgattacttcgataatctttgcagagagaacaccccctttatagagaaatctatttttctttttgtgaggacttttttntnaacnnttgtaaaaaaaaaataatttttgtgtgttttctgccccccccccaaaatttttttttgtttttttatttgggggaaaaaaattcttccccccactttttttgttttttttaa

SEQ ID NO: 61408 - DNA, 445 bp, Glycine max
  unsure (1)..(445): unsure at all n locations
aagttgtatgagagtgccccacagttctcatgcatgtcaaccccaccacacaacagaatacatctctttggtaccaattctcctcacatatcttcattnttatttattntttcttcctttgtcaaatcatcttgtcccctataataaattaataatcaccaattagctggcacagcaagtattttccgtgcttctgtttatttggaaataatttgaagtttcgaataatcagctgtcggtgtttcagctttagttcactcgtaacatttaaccataggttttctacacattatgttgaggattgcaccaaaggtgaagagctgttgggtgagagacactgctttctctcacgcagaagtgtgaagtgctgagacatacagaaaccttcaaaagctagtggttgaattctctctttccttcatatactaanggcttacgatcaaac

SEQ ID NO: 61409 - DNA, 461 bp, Glycine max
  unsure (1)..(461): unsure at all n locations
gattactttattatttattttggatcaagntngaatatagggggagaaagaaaaataaatgtgagacctttttcccctttggaagaactttntataatattttataaatgttgttaaaaatacttttaattaatatttaaaattttattcttttattaatatatatgtaatgggtagagggtgtcacaggagaagaccactggatcatccaagatgtgccccatgtacgtatttggagcagggatgctgaagaaccttcgcatatattcggcagaagtcatcactaagatgcatccaatattgaaaatagaaggtgcatctttttcacatctataacttttgagaatgacattcgtggcctttttcttttcttcataaaaaatgcaaccattatgtaattcctaaaataaatactttggcctcattttctcttctaagattggttcatttttctttttcta

SEQ ID NO: 61410 - DNA, 153 bp, Glycine max
  unsure (1)..(153): unsure at all n locations
gcatgcaagcttgaggagacactgaactagtntatgcttatattcatgtctaaataccggagcacagaagcctctattaaaaacctggaaattcaagtgggacaattaacccaacaaatgggtgaaagacccactagtatcttttgagcccat

SEQ ID NO: 61411 - DNA, 348 bp, Glycine max
  unsure (1)..(348): unsure at all n locations
ctttaaaggaccgtgcctgtcaaaacgcccgtcaaggagggttggctcttgtacacctacaactttgccttatgcacaacctgtagcattgagcagcctgaaacttatgcttganatatttacaatagacctcctcaaccctagcagcaaaatcaaccacaggagagcaattatgacctttccagcaacagatacaaccctggatggaggaatcaccctagccttagatggtccagccctcagcaacaacaacagcagcctgctccttccttccaaaatgctgctggcccaacagaccataattccttcaccattccaacaacagcaaccaacccagaaaccagcaac

SEQ ID NO: 61412 - DNA, 709 bp, Glycine max
  unsure (1)..(709): unsure at all n locations
agcttctcctgagagacattgaagaagaattgctagttagacatagaccaagggacacttggaagagattcttgaaaacttattttccttagaattagcttatcaccaagcagtaagctatttgtagcttatnttaattaagtntcaccaagaagtttatcaaaataagtttgggtagcttgttttactaacaattacaatcaagcctttaggggtttttntggataaacttatctaaaacacctttttgagggaaaaaaaaggaaaatcaaatgagctccataagtaaaatagcttgataactaacttgagagctctctgcaagactgacgagatcccccatgccatattattggccccgaattaaggggagagagtgtctcttttctgtcagcaattcttctctttaacttgacacgtagggacttagctattgggaagactgactttaaaatacatatttnggaggttcctttattttttaaaaaagaaagggcgccctttttgtggttttttttggggtgggacccgggggtgggaattcccctcgggggcctttttttttggcacctctcttggccaaaaagaagggggggggggggggggttttttttttttttttttttaaacaccccccccccccccggggggggggggggtggtaataataaaaaaaaaatttttttttttgggggggtgtttttttttt

SEQ ID NO: 61413 - DNA, 368 bp, Glycine max
  unsure (1)..(368): unsure at all n locations
tatgancacatatcaacagagctgcaatatgtctacaacaccattgcttctgtcttttcagatcgtgttccatttatggatgaagaagatgatgatggatcacccaggccttcaagaaaaaatgccgagggttccaaacaaatattccaaagcctcccttaaagatttaaaaatgttatatcacagcagcagccacaggaaatttatttcagaagcagcttgcaaacagctttgttgtccgaagtttctaatctagttgagcacacaaggcacttgagagttgacagctctaaactattcggttcacaactgtgaaaggttgtaaaactctatatattcatgtaggatggaactgtagcaataaggat

SEQ ID NO: 61414 - DNA, 226 bp, Glycine max
gatgcatcagatttgcttattatgctaagggaattgaataacttattgtacttatactgaaataaatatattatcatttttacttatatgaggatatgttaatgtattatgctggaaaatcaaaaaaactagtaaagatgcccaaatattctgaaaaagttgtaaattaacataaatttgtggtttagaaatatttatcaatttaaatagctttattcttaaattg

SEQ ID NO: 61415 - DNA, 102 bp, Glycine max
  unsure (1)..(102): unsure at all n locations
agaaaagtactanttaacatactttcaggtacttctatgtcttggcctcatgttaggggtataacagcactgctcaagtctttgcacaaagattggtcccct

SEQ ID NO: 61416 - DNA, 445 bp, Glycine max
  unsure (1)..(445): unsure at all n locations
aataatatagcatttttgagcaaaataattgtcatcgcatgtgacgtgaggtgattataaagatgttcacatgtgtgaaaactcaaacagagtcaatcaattcaataggtcgatttaatttgaagttgataaactcattcgatcaatatgataacccgttaatgtgtgggatgcttaaccggctcacgttttttaagccgtgatccaacctcaatttgcattgatctgacatttatattaaattattacatatatatattaaattattaaatatataatattttattttttaaaaatactttactaaattattaaatcaaattattcatggtttttattatattttcatcttgagtttatttatattcttcatattatcgtattagtngagttnttttacaaaataaaatatgggatatattaggcattatacaattcattctat

SEQ ID NO: 61417 - DNA, 786 bp, Glycine max
  unsure (1)..(786): unsure at all n locations
tactccttcattgttctattaataatttctccgatatattaataattctntgcttttggtgctgggttactttactttaaacttcccccatatacacaaagaaagacataagtgtctgaattaattacctttaattagggggagtagtttaatttcttactatggagatgaccttaaagaggaataccatggggaatttgttttcttttgtggggggctagtttcaacctaattaagggatcttttctttataaggtttctttcttctttattctgcctttgaaccaccataatgatttattatactggccatttggctcaatactttgccttcccgagccccattatgcctgtctttctgccttagtagcgaacagacactgtatgatattcatcttttctatattcagtataatccggctggtgacctcacggaaaagacattaccctttacacatgtaaagaataatgacctcccccggggggagttttttgggaaaaaaaataaaaaaaaagggggggggcgggggggggaaatttatttttttttgggagggggggggtgttttttatcaccctttttttttttattaaaacccccgcccccgttntnncccccccccaagaagatgggggaaaaaaatttttttttttttcttttttctcctcccataaaataaaaaagggggggggggtggggggggcccccccccccctctttttcctttttttaaaaagagagggggggccccccccgcccgggggggtggtgtttttttttttttt

SEQ ID NO: 61418 - DNA, 473 bp, Glycine max
  unsure (1)..(473): unsure at all n locations
tctctcggtggtgaagcttctccttccatggcttattctctagtagatggcacctcctctcacctcttctcctttatctntcgctgcaactccatggctgaagatcaccatttaagtacattagtgaagctcaaagatccagcctccatagaagcttctcaagcaagcctcaattataagtcacattaaaagagaaggagattcatgatgaatttccaaatgaatccttgttgattgtgagagagcacccttggtttgcaacatagaatatttcaaagaagttggtgtcattcctaatgatctcaattggcactaaaaggaagaagtttctccgagatgctcgttattatgagtggggtgacctatactttgttaaacttagagcggataacctattgaggcggtgtgtaaccaaagaggagcccgaaagcatattgtggcatttgccataattttccctatggaggacacta

SEQ ID NO: 61419 - DNA, 191 bp, Glycine max
  unsure (1)..(191): unsure at all n locations
gcgctgngatgctttttatatgaaacgcgngatcttattccgctgngtatattcccgtaccctgttctgtcttcacgcttgtcaagcaaattccacagctactctggtcaaccataacaaatcacaatcattgaatactccatacatgggaatcttaaaaagatgaaagaagcatgacataccctcgaatt

SEQ ID NO: 61420 - DNA, 371 bp, Glycine max
  unsure (1)..(371): unsure at all n locations
tatctgacttgtgtatttcatttcttaggttntaaaagatcatattatggaattactatccatgagagctccagctgatgtctctacaattttggagccagagaaagaagagatatctttcaaaactaaatctttctgggatgtggtagtcccctcctattcagaaattcacctcatggaagacaagagcatacgtgatggcggaagcgagagtccaagtagtaaaactgtgaagccgggtcgcattaatgttgtcgccgctggtctcatccttctaattgctggtgtagtcggatctgtgctattccccctgaaaggttgaggggtttatactatgatttcctcttcttcaaggacacacattctcttag

SEQ ID NO: 61421 - DNA, 173 bp, Glycine max
  unsure (1)..(173): unsure at all n locations
acctctcatgcncncttgccgaatcgtagccatgctcttcagctttttcattctcttcctcctcataaaggacataggcgctgtagtagtgaatcccctataggaatcactgattttattcaatctgtccctgagtctggttcctctaagacttggagcgactggtaaaaatt

SEQ ID NO: 61422 - DNA, 384 bp, Glycine max
  unsure (1)..(384): unsure at all n locations
cgtcttcgaatgcgaacctacaactactgttctccagtcatcaccgtcgcaggaatcgtgtgcttctaanatggtggacagagaccgtcgtagactggtttgatgcctatgacgacgtctcattcaaagtcggtcttgcagcgtcgttgaactccgataagcaccgacgttgaacgcgttttttgtagcagtgtctatttctcttaagtcaacctctccgcttncacaatacaaatacatgatgaatccgaacataaatagaagaatgattatcagagcaatgtggttcagtgtttcgagataaagaattgtcatgaccaccaaccatacttcataattgtgaagaacaagaaataaaccaaatagaagagtgatccatatcaa

SEQ ID NO: 61423 - DNA, 719 bp, Glycine max
  unsure (1)..(719): unsure at all n locations
tgaatagctacactcccaggatctttatgcttaagtggaagaatcttttggatcacaacactataatttccttccactatgatggtttcctgatgaatgtacttgtgcctccttgttaacatatctttcaaaaaattggagtagagtggcatctgctgcagagcttctccaaagggcatgggaatttcgaagtttctgaaatattcaaaattttttccaaaggacaatttttttttttttgaaggaccacagatatggtcttcacactttgccaagcctttcactctaccttcgtgaaactttttttctctttcatttctcaattcattctttctcttttttctttttggtctcactttatcggacatattcttcctttctgattctacctaatatttctaccagactgtttaccatgtctgcacatattttatcttatttaaaaaaacccctttttttttattttcccctaaaaaaaaattacaaaaaccctttttggcgaattttttgtgtcccccttttttagggatattttttttttttttccccggttattttttttttttcttcccaanaaaaatattttttgtgggggataaaaaaatttgtttttaaaacctttctttttttttttcgctctttttggggggcccccaaacatttttttttttttttcccccccccccccttttgtgggaccccctctcttttgggggggg

SEQ ID NO: 61424 - DNA, 379 bp, Glycine max
  unsure (1)..(379): unsure at all n locations
ctgctggtagttattaccatatatgtgggagcgattacacagtacaaaccttgaattcaaattttaatagctggtgnacatccagctttgggcactgggaatcaattacatcctctggtaatccattaccaaagagtaaattggtngaaaaaaaccttttaacttaaaattcttgcgccaaccttttgcttactcaattggaattccctttctatttaatataccctctttaagactctagagactgtcttgatcatccatcttgaatatctttaatttctttgtcttgaataaagctttgagacgcatgtgaaacattggcatatcaaaacattcagcttgatcctttgtctacaatcatcccctctttgatgatgac

SEQ ID NO: 61425 - DNA, 218 bp, Glycine max
  unsure (1)..(218): unsure at all n locations
tcttcttctctcttgctttctcacttctactgctttgnttcccttcgttattnttttcaactttttctttttcttcattttatttttctttttctacctctatttctttttcttggtcgcttatttctttctcctcgaccattaatggtttttcactctcttgactngncatatctattacctcctctttctttntcttagtgccattctttacaaca

SEQ ID NO: 61426 - DNA, 743 bp, Glycine max
  unsure (1)..(743): unsure at all n locations
ctgcagcttttatttatatgatgcgctgatttgtagctacctcatgcactcctctaatgactatggcatcatttctggcgctaaactgctgagaattggaggccatcctctcaattaaatatctggcttcaacaagagtcatgtctcccaaggcttcaccactggcagcatctatcatacttntctctatattactgagtccttataaaaataatggagaaaaagtgttctaaaactggatgggggggcaaccggccaaatttcttaaatcctccaanactatacggctttttcactgagtgctatactgaatatcttctgaggctgtgtctgaacaggaaattttttaaaatacttttaggcatccactctatgactggagcaggaaaaccagcttgcactcttatgatgagaagctcaaaattatctctgcttggggtatngacaacaggaatttcatgtgcgtttactgaggggccctttttaaaaaactttttttttgggaagcgccccaaatgggaaattttcccttccccccatttttttttttaaaaaaaaaattttttttggtggggaatatatttcttttttttttttttattgggggggggtttattttttttggggggggggaccccccccacaaaattttttttttttttttttttttttgggggggggggggggagaaaaaaaataaataaaaggggggggtgtggggggggtgtcctcccctttttttt

SEQ ID NO: 61427 - DNA, 458 bp, Glycine max
  unsure (1)..(458): unsure at all n locations
tgcttgagaagcttctatgtttgctggatctttgagctttaatgaggtccttcaatggtgattntaagccatggagttcaagcagaagataaaggagaagaggtgagaggaggtaccatccactatagaataagccatgaaggagaagcttcaccactaagagagtgccttggataagaagcttagagaaggaagcttcatggaggaagagactgagagagagagagagagaaagagagagagtgtgaatcgaaggaggatagggatagaagttgaactttaaagtgtgtcacacaagcttcttattcattaaaggtatgacaagtgttacacatgtttctatttatagcctaacacatgggaagctttcttgagaagctangaaggtagcttccttaggaagctagaggagcanagctttcttgagaagtagaggggggctactcatacccctccat

SEQ ID NO: 61428 - DNA, 687 bp, Glycine max
  unsure (1)..(687): unsure at all n locations
agctctggatgttgcggacaatacctatgttgagntcntcccaatacatacgagagagctaatgccttcatgatggtggctcagattatgttatgggatggatatgagcccatgatgggtttgggcccaaataatgatggcatggggactttgttggaaggtgccgaatatcatggaaggttcgggttgggttacaagcctaccaatactgacaagagaagaatatatttgagaagaaaaaaaaatttcttggtttttttcaagggcgtgaaccgtggaaaagagggccctattctcccatagcagaacttttgaggcggattgatgttgtaccaactacatgtgaagagaggcatgagactgcaatggtgagcctgtctttgattacttgaaatgcaacatgacactcagatttgttaaatgaggacgaggttaatcatgtcgccagtaagagatttttgcgggcctttttaaattttaaggggggagtgggttttttttaaatatttttaaaacctttccctttttttttttattttaagaaaaataattttttttttccccttttttttttttgtgaacaaaccctcctctttcttgtttcctccggcggggcatagataaaaaaataaaacttttttttttgggggggggaaaaaaaaaatacttttaatttttttttttttt

SEQ ID NO: 61429 - DNA, 377 bp, Glycine max
atgaatatggagaagcagcatgtcttttagataaacaccactatatgctagcttggatcacttcctagaatacattgacaaatgattggattataagttgatatagtttatatagtaagttagcaaacatgcttgaaatggtgaaggttgattaaaatgagacgacgtgtcaataaaattactaaatctagctaatgtgcactaaatttttggtgttgccttggacaatagaaaggcgacagttggacctgattgaatttactaatgaccaattggttaatgctaattattagaaagtcgatattaacagtgagatagatatgtgatattattaacaggggatggcatgattgggaataatagagcttgatatgtga

SEQ ID NO: 61430 - DNA, 267 bp, Glycine max
aaaaaaaacccccccccaaaccttgttgtggggcgctttttattttttttttgaaaaagaaaaaaaaaccccttttttttacaaaaaacttttttttttttgggggtggaaaaaaaaaatttttttttttggtgagaaaaaaacttttttttttaaataaaggacacccccccccgcgcgtggtgtgttggggtcccccccccacattattttttttttttatttttgtggggggaaaaaaaaaaagaacccctctctttttttttt

SEQ ID NO: 61431 - DNA, 130 bp, Glycine max
tttccgtctattatatatcttatttttcggctcatagatgggtatagagaaatttaatcaatagaccccctctatattttgattgaaagcacacttttttaaaatgctatagaataaaaacattatcatt

SEQ ID NO: 61432 - DNA, 378 bp, Glycine max
  unsure (1)..(378): unsure at all n locations
atatatctactngtctatgactcatgctaaaatcacatcagattgaacaaaggtgacacataatgctattattaggacctgtaatattgacctatattagaacacacattcaatcacatatgtgatgtattcggaaattgaaaaaataatactggtaagagagagaacatatatagaagaaaccatagaattgaggaatcatatgttctttaaatattattgcgagatattaaagagagagagacacgtatgttggtatgtggatctatataaaaattctatcttaacaacggaaacaatgagataggaacatagatatgtgtagaagcaaagcttctagaattattttgatgatgccaacgaattatatagatcatt

SEQ ID NO: 61433 - DNA, 132 bp, Glycine max
gctgaaacacatgctaccactacttttgagaagccttcacggtggttcatataaacctcatcctctaaatcactattaagaaaggctattctcacatttctttgttgaacctaagggccaaatgagccacta

SEQ ID NO: 61434 - DNA, 440 bp, Glycine max
  unsure (1)..(440): unsure at all n locations
tacacacacccctctaataactaagctcacctccttattaatagaagctagagcttagctacacacccctattatagctaagctcacccccatgacaaaatacatgaaaatacaaaanaaagagtccctactacaaagactactcaaaatgccctgaaatacaatgataaaaccctatactactagaatggccaaaatacaaggcccaaaagacggaaaatacctattctaatatttacaaagaagagtggatccaaccttgacccatgggctacaaaatctaccctaatgttcatgagaaccctagggcctactttagtagctctagcccaagcctctcggagtcttctatccaataccctgtgggggtaggattgactcatcccctccaccttggaaaggatgtgacctcaaatcctgaggttcttcatactctgggc

SEQ ID NO: 61435 - DNA, 217 bp, Glycine max
  unsure (1)..(217): unsure at all n locations
taatgatagaatatcttatcttatattttgataatatattctatcaaattctaactgattagctaggttaagaatactgatagaatatcttatcatatattttaataatatattctatcaaatacaaactgattagttaggctaagaatacttatagaatatcttatcatattttctatcacatatgtatttttatggaaggntattttaccaattg

SEQ ID NO: 61436 - DNA, 394 bp, Glycine max
  unsure (1)..(394): unsure at all n locations
tataaccgctgcgagttgtataaatctaagactaccatgattcttagtcattctcatgacatatactcgtagtggtnttatctatttntcttggacatataaacataagttttttcatataaatattagttggaatcatacgactattntagactacatgataaaataacgcaacgtgagagggtgggagacacgaaataaaatattattctagatacatacacatttattgaagagggaggaagattacatcaatatttattatattagttaacagctagagaaagaacaaacaatgaaaaagatatacctcttgtttaattataatctgataaattggacaaaaatatcatataagagatatttaatagatgtttaaaataattagatactt

SEQ ID NO: 61437 - DNA, 471 bp, Glycine max
  unsure (1)..(471): unsure at all n locations
ctgatatgaagcaacgtatttaaaatcatggataagatagtaactgctaacataaagataacaccactaacagatcatgactagagaataggatcaaaactgctttatcctatcagtcaacatgactntttattttcctaaaaaatagcaaaagaatcttatctactatagtttgttagacagtttcaacagtcacatcttaacaattcaaaacaaaattgtgataaactcatcccttacatctaagtgactcccatgtgtagtccaacagtagtagtggcatctctagttgtttcttaagtttcctcaaactattgcttcggntgttctgctagggttttcaagcattaaagagtagcagaagggatttgagcctccatttctctatctctatgcgagggacgtgtctctctccacatacaantttgactaatcccaatgatggagatatgcgcaaatgaattcccaaca

SEQ ID NO: 61438 - DNA, 493 bp, Glycine max
  unsure (1)..(493): unsure at all n locations
cttaattatctttgcatgcactgctattaatctgatttatatataatccacgtgtaaaagtatttatacgggtcatgttatactggcggttaccatctatttgtgccgtttgtttttctttcccaccatatgatgaaatgggtggttaattaaattaatttaacctatctgttattttaattttaaaaataagaaacgagaagtttattaactcctatatgaggcctaaaaacttggaaaggtttgacttttttatttgtatattaaccgttaaggtcttttattttataatgagatacctttttcaactttaatttaaaaattaatatggcaacttatggatcttttatttcctggtctttttgaaaacactcatacttcttgcttttaaaaaagatttttttatttttttngtgttatttttggtttgagaagagagatattttttttctcttctatacaaaatatcttttagtagtccattgtttttttt

SEQ ID NO: 61439 - DNA, 411 bp, Glycine max
  unsure (1)..(411): unsure at all n locations
cttaagaagatgtaccttcccacttcacatatgttgtacactcatatcctggggtctctgcatgtaactcagactctatgctcgctcttgaacgatatattataatttatttgccgttcagaanngacagatctcttcatttcaagtttgaatatgtagtggcccctatctcatgtgttggtgatcattcccaagaaaatgaatcatgtgaattcccatctttctcattagggnttaacttttgatcctgtcacatatgtgatgtgaaagataatacagtaaaagacatgtgaaattaacatattaatttcataccanattattgctttcaaatttgattccttttatttacacattaatatgtcatattatctttacatgattgcttgcgagtctaaagaaataacgaca

SEQ ID NO: 61440 - DNA, 208 bp, Glycine max
agcttggttcgaggtacttacctcgtgaatatcgaagaacgatgaagaacggatgaagaacgtcgaagaacgggtgaaacttttgcgaaattcctcaccgaaaacgttacggaaacgtttcggaagcgcctccgcttagattttcttcgcggaaataatttttcccagcaaattctaaagagagagaagtgcctaaggggctgaaccc

SEQ ID NO: 61441 - DNA, 364 bp, Glycine max
  unsure (1)..(364): unsure at all n locations
agaccattacataccatccatcattgattcaattaattcaataataaattgtttcacgggttgccaaatgaagacccatatgtgcacctagccacatatattgaaatattcaacacaattcgattggctggtgtgcctgaagatgcanatcgatcgagcttggtttcattttcattgtctggagaggctaagaggtggcttcactcgttcaaagggcacagtcttaagacctaggatgaagttgttgagaaatttttgaagaaatatttccctgagtgagaccttagaaagattccatggtctattgagaaagacactcactcatggattctcagaaccgattcaggtcaacatntttatagat

SEQ ID NO: 61442 - DNA, 765 bp, Glycine max
  unsure (1)..(765): unsure at all n locations
agcttgcttgtggggcttctatggagggttgatctttgagcttcaatgatgtcctttaatggtgattttccaccatggagatgcagcagaagacaaagaagaagaggtgagaggaggcgccatccactatgaaataaaccatggaagaaagagcttcaccaccaagatgagccttggataagaagcttggagaggatgcttcaatggacgaaaagaaagagggagagaaagaacaggggcgagcctttaattgaggaagaaaagggagagagttgactttgattgtgtctacaaactctcattatcaaagtacacaagtgttcacatacttcttttataactangaacttcttgagagattcttaagaaacttcttgagaactttttgaaaacttcttggaactagactaactctccaccatttagactaactacctctgaaagtcctggaactaactactctacccttaaactaacccctctgcaatcttgatcaaaaaaaaaaaaaaaaaatttcccccctttttttttttctaaaaaaaactttttttttttaaaaaaatgggtgccccttttaaaaaaaaaaccaaagagggcgttataaaaaaacccccctttttttctttaaaataaagaaaaaattggggggcccccaaaaaaattttctacagggggggccccccccccctctattgttaaaagggggtgagaaaaaaaaaaatctcctcttttcttcttttttttctaaacacttttttctttgcc

SEQ ID NO: 61443 - DNA, 234 bp, Glycine max
agcttatacatgaggctcgtattatttatgttgcaaacaaacacaaaggcgggatttgggttgtgtgtgagattaacaaggattatgggatcaatatggtgactctcatatccaagcaattactttctacattttgaggaagaaaatttattggacatgctataccatttatgcgagccctatgcctacctttgggaccaactttggagtcatctttgtatcttggcacatgat

SEQ ID NO: 61444 - DNA, 289 bp, Glycine max
  unsure (1)..(289): unsure at all n locations
gagaagctagatccttatctacccacacccctctattaactaaatttacctcctttgaaataattacggataaaataacacaacaaatacaatcaaacatcaaacataattattaatatatagatatatatatcanggtgttacaggccctacaatctgtacacattctccacgtaccatcctttntgggcaccaacaacattggcacaacacatgggcttaagctctcttggacccaaccctcctccaacaattctgtaacctaaaactctatctccttagtctcatg

SEQ ID NO: 61445 - DNA, 199 bp, Glycine max
  unsure (1)..(199): unsure at all n locations
agcttgtttgaaggacaaattctcattattcaaagcttgcaggaactagttcagcagaggccaattatgagtgtagagcagttcattgagaagatggcctggcttggagcccaaccttcttttgtgggggataatgaaagttttacagcccangcacctcaacaacatgagccagaaccagaaaacgatcactcatctg

SEQ ID NO: 61446 - DNA, 478 bp, Glycine max
  unsure (1)..(478): unsure at all n locations
actaagctagctgaattagatcgaattaagttagcttagctcaaccttggccagcttagcggaccaaatcagccttagatgcaagggttgggcactaagcgcttgagactcgcagcttatcatatgaatagagatgcgcttagcacgaggcttgcgcttagcgaaatgactgcttttcagaaaatatntttctaagttattttttagtcctttttccaagaaattgaaacccttatngtaaacatccaaagaatggctgatatactcctatctacagactatatagcaagttccaaatgatttaaatgcatganaacaaagataacataatntaaaactgggttgcctcccaggaaacgcttctttaacgtcattagcttgacgcataacttattacctttaaggtggcatgaaagtcacaaagaacacatcttccttgaagtttcgccttntagctagaaattccatgaacttcata

SEQ ID NO: 61447 - DNA, 726 bp, Glycine max
  unsure (1)..(726): unsure at all n locations
gctttatgatgaatgaacaatacatgttctcttttccacctgcctcgaattcatnttttctggtatcccaattgaattgtaatatggaatatcataattatgatagagaagggatcattttttatattcttaaatgaaaaaaaatttgaatctgggcaaattttcatcatttcattttatatataatttggatctatctactgttttgttgcaaattccttcatttgaagccgatattaaaaatctttttatttattccctctcctaatagggatttcataccatgccgatcaggttaaattcatattattcattataaagaaccagaaatctattcatgctaaatggatcatgtgtattgacaagatgganccaatattggatattttcattaactcaaaggaattgaaatgcttgggatgaaatgaatgaaaatgtttaattctgatgaaaagcccgccgtcatgtatactaacttttcacagacccgcgatatttaattnccnnaaaaaaaaaaaggggggggggaggttctcaacttttttttttttttttctccccccccgcngcgcccctcctcgtggggaaaattataaaaaaaaattttttgggggcccccccccctctttgtggggggaaataattcncatattacccccccccagggggggcgccttttgtgttctttttttaaatttttctcacttttttttttttccccccccc

SEQ ID NO: 61448 - DNA, 299 bp, Glycine max
  unsure (1)..(299): unsure at all n locations
agttttgttgatatatgaaaantggangtggaagaggagatgagtnataataataataataaatgtaatataaaaattaaattaaaagtagttatataatggtggttgattggagnttgggtggatatatatatggttgttaggtantgatagntaaatatttagaggagaaggtggtgaataatttaattagtgatatagtttttgtnttaaggatnttanngaatttatatgggttgtaatttgtaattgtagtataatgaaatattgttttgaagaatatttgtgaggaaaagaaa

SEQ ID NO: 61449 - DNA, 167 bp, Glycine max
tatgggagtcttgaatgtattagcccagagagcatcatccagcttcacagcctaatcctttcttgatgatgcgacaatcttctcaaggattcgctttaactctctatttgaaacttttgcttggccacttttctggggatgataaggaggtgctatcttatgtctga

SEQ ID NO: 61450 - DNA, 426 bp, Glycine max
  unsure (1)..(426): unsure at all n locations
tatcctgtatctgaccaggctntaaggtaatcgaatacagtcttgtgtaattgattacagcctgctattttatggtgatcaattacagggagtggtagtcgattaccagaccttataacatagctttttctataaaaactaaccattgtttactcataaaacctacacactcattgtaactattatcaacaacaatcaaagataaaaaaaaacatcatatacttcttaactacattcatcaagcacaattaaaagtacaaaaacaatcatcaaaacacaaacaaagacaatcaatgacaatcatgaagccacaatcaataataaccatcagaaacaaactcaatcataaagaaagaaaataacaatcaatcgagttaactatttatctaagtcattgatatctaanagtcctaattctcttctaat

SEQ ID NO: 61451 - DNA, 438 bp, Glycine max
tacatcctatcgactaagaataatgccctcatatacaatcaaggtagccttcattatatagattatttacatgcaccttccatgtgtatttgttatttacatcacacacgccgtcttggctgtaataacattacatgcttactccaatcacttttgaggaaccaaaaaaactgcacaatgcgctcatccttgtgatatactaatacccattacatatacacaacttcatcgatagaattcatgacctaccgtacatcaatatacgagcctacaatatcatagctttttataaagtattttgctacctaaatccaccatgcaaattcaaaccatatttcctttgttgactaaaattgtattcaaataacaaggtatatatttctttggaagatgtgctctttcacatacatgcacatatatattatatttttgtgagac

SEQ ID NO: 61452 - DNA, 414 bp, Glycine max
  unsure (1)..(414): unsure at all n locations
acaactctgcacatacacaaattacacatgaaaacaccatccgtataagccagcctatactgagctcacgtactcccacgtagccgttaatctcattgctttcatcacatgngttccatctgattctgctaacgatactactttcagacttgatgaactatctgaactcatctaatataggtgcagaggcataatactctgctcaaaacacaaaccactaccacgagttttcttactagataccccaataacagtcccttcggttcattcggtaccaggggatcgatagaaatgttctggagctcctgtaataaattacatgtaccgtggagctgtataaagggcaacccatatgtactactcttccaaccgtaataccatattttcgacaaactaaatccgttgacattaaca

SEQ ID NO: 61453 - DNA, 465 bp, Glycine max
  unsure (1)..(465): unsure at all n locations
gcttggatgtggtaaggatgggccattgatcttttgctttatnttggaagcaacgggtgcaactccgtgacccgaaaccacatgacccatgtactcaacttgtggttgggcaaatgaccatataaagaacttgagcacgaattggttgtgaaggagggtctcgaatgctcgctcaagatgaatgacatgctcatgcaatgtacgactataaattaaaatgtcgtcaaagaaaacgatgatgaatcgccggagggaaggccggaaaatgtcattcatggtggctnggaacgacgaaggtgcgttacacaaaccaaacggcatcactttgaatacatagtggccgtggtgagagcaaaacgcagtcttggccacatctgattcatgcatccatatcttgatatattcttgcaaaatgtcaagttattgaaaccaantatcgcctcccaactcatctactaattcgtc

SEQ ID NO: 61454 - DNA, 526 bp, Glycine max
  unsure (1)..(526): unsure at all n locations
ctcagcttagtgccttaatttgaagcatatttgacattcccataatgtattccctgacatttcttttgcctcgatagntcatggaaatcaagttctgaaggagagtacttgtttccgccttatcgcttttgccagcactttttaattcaggaagaaaatcttaggcactagttatatcatctaaaacaatgctcctaaagatcttatgaatgcgacgcttaatgatcataagactcatgcgatttgagtgatcccacttctcatgaagtttcctctgttaagagattgtggaattcgtaagagaagggggtttctcaatccttaatgcaaggtctagatccatgcagccaagaacaatatgaatgttctatnttcagtccttaagatttgcaccattaagaactggaaccgaattctattagcagatatagacgcaacatcggtgtagatcaaaataataaaataagctcacataacatgcatttatataatgggttatctcatctcaagatatctagagcacccg

SEQ ID NO: 61455 - DNA, 416 bp, Glycine max
atcttgatctaactattatatagtaagaaaatgatgacttttaaaatattatttaagataattaaacattaatttattataaaagacagaattagactattttaacaatatcctatgcattaaacaattaaaactcgtaaatataagtgctctagagttattatcttactcattatactttccatgggtaacctacaactatgactaactcattagttgctgtcacatgaatttcatattcagctgttgagaggtgacagaaaaaaaagtaagaattctggtgtgggcttgtgggtatataattcatactcagtacaaatatatggagaattcgaaagagaacataaactactcgctctagacgacatgcaacatattgttaagatataccacataataatgaaagaatgagagat

SEQ ID NO: 61456 - DNA, 355 bp, Glycine max
caagcattaaataacatgatcaatgtgcagatgcaaatataacactatatagtatatgtgttcattttacctctaggagaacattctttgactcatccaagacaatgttatcaaagatattctcaactactattttgacattatcttcatactcgttccaagttagcaaacacgttagacatgataaactaaattaatatatcatcagtatggcggaaaaagtaagaaacttacacttccacgaactggatctgacttgttaaaaggttttatctctgtctcaaggaaatcgttcccaaatgcctgtggaaaaatgaagatcacaatcttagtctatatattgctttcaaacatt

SEQ ID NO: 61457 - DNA, 391 bp, Glycine max
  unsure (1)..(391): unsure at all n locations
tctatatatgtatacagatatttgaaacgttgatctgttgacctttctcatatttagttaattcatcttactaagcccggttatattaaaatttagaacttaaactcttacgagccaatcattnactttctctaaattacttcgaaacggtaatgctctatcatacaaccaccttactgtcaatttatgtccttatgagtcatcatgttgcttagcgaaaatcttgcttagctgatattagtcactggattaagattgcatgccatcaaagatcatattcattacctcctgggctagaagaagcaaatttgtgtgacatggaatggttgggctatgacttgatctaccttctattatgaacctcggctacaataatctgcttctgtgccct

SEQ ID NO: 61458 - DNA, 446 bp, Glycine max
  unsure (1)..(446): unsure at all n locations
aactcagctcnacagttggttgaatcgattaaatagagagttttttctttgaagtaatntatctaacttagaaaagttccttcacctaaactatgatgatgcatgatgcaaaacatatatcaaatgtactaatatccgtcaatcatgataataaccaatacaaatgccactcataggaattaagcatgtaatagtcacaatttcttttaatacatcacttcaagctttaaccttaggagttttaccatgttgctcccnctatctctaacagtgttatggcatataataaatatatgtttgaacaagctattagtgctatatggaactgagtaagaacctgctgattggctattacataagacataccaaagatacatgggtatgccacattgaccctcatgctgagtacaatgttcaacaactttgcgaaggntaatgctggggtg

SEQ ID NO: 61459 - DNA, 431 bp, Glycine max
  unsure (1)..(431): unsure at all n locations
gcaagctttngtgtgctttatttaactgtgttatatgtaatactgttgtctatttcgcattctttacactgcattctaaacacccacgggtttgagtaaaaaaaaaaaggggccctatacccgggttcatgggaatttaaggagtggaggtgaatctatcatcatgctangtctccgacttgcttgataatagtgaaacctcgtctagagctttctctctttataatgtgttgtcgctggtattccataccgccacaatattattatcttgagtgatgatacctctagagaatggccgtgtgagttataaattgttgggaagtagttattagagacccctatatattatccaataggttcccaaataggggcaaagagcaaacacgcctccgtgccattgttctcattcatcttttgataaataacactag

SEQ ID NO: 61460 - DNA, 475 bp, Glycine max
  unsure (1)..(475): unsure at all n locations
acaaaagaatacacacacatgacctctatttatagtctaagtgtcacagaannatggagggaagatttgaatttctattcaaatttcacttgaattagaaattgaatttatggagccaaatttcggagccaaaatttcactaattatgattcgtgaattttagctatggttcaacccactagtccaagatcaagtccaagattctccactaagtgtgcttaggtgtcataagacatgtaaagcatgaagtatatgcacaaagtgtgactatatgatgtggcaatggagtgtagcaaacaaatgctcacctccccgtctaaaatttaattagattgggcttctccaaattcaattaaatntattttccaacacacacatcanatattcatttaatgcatgtgaaattacaaaactacccctaatacaaaaactagtctaggtgccctataatacaagggttggaaaaatctacatt

SEQ ID NO: 61461 - DNA, 404 bp, Glycine max
attcgttgaccacagagtggtacctggagatatgtcgcgggggtcaggagaccttgtggacgtcaggtggggtgctatcgcccaaaaccaagcttgaccaatctcgacccaacccgggcatagtcagtcaatgagaaacttgtgatgtaccttaacaggcgagcttctggctgtcaacagataaaatgaataaagaccacaaagcaaggaggcttgtggtggctggccaactattaacttgaatgatgtgtgagagatggcctcttgtaatcgattaccaagggtgggtaatcttatacaatgcttaaaaatgaagacaggagactaagatggtctctggtaatcgactaccacggtgtgtaatcattaccatgcttgaaactaagtcacgaagccaaggagct

SEQ ID NO: 61462 - DNA, 411 bp, Glycine max
  unsure (1)..(411): unsure at all n locations
acctatagatctcagctttgctgttatgaagtctagagagagaaaggtcctagttccatagaggtttgagagaatttgnttgtgtgaagatctacagagatgtgagttccaagcgcaatctcgtcttgaaacttgagatgagtttgtgagtgattgtgagatcctagaagtgaaggagacatccttcccacttgtggttttgcacgctttcatcttgtcttcttttggtggaaaggaggttccgactattgaaggtaaatccttttggatctccttgaggccctgtgtaatattttctttcttggaaggaggttattgggcctttgcgcttctgtttcattccggggctttacttagaactaatgctgctttgtaggcattaacagggaatgtcgatttaagcctgtatcg

SEQ ID NO: 61463 - DNA, 414 bp, Glycine max
  unsure (1)..(414): unsure at all n locations
cttacaatgttgcacagacatcaagaatgccttatacaagagaattatgaaagactacaatgagtatccaacatcattatgatgaagaacttgactcttataactatatattagaatggaatttatattggttcaaaatgctccttaaagacaacaacatattcttccatattctgtcacccatatagaggacgcatcaaaatactgaggttgaaagtatctcaatttccatatngtggtatacaactaacgacacaacaaaaagtgaatgctaactacattggaagatgcataacgaaaaagtcgtgaatgttcttgagaagatctggtgtgcaacatcacaaggaaaactaaagagacttcttgaagtatgaaccaatgacataacactaacacaacaaccaccttcacatg

SEQ ID NO: 61464 - DNA, 322 bp, Glycine max
acacttctcacaacaagttcaaatcaacaagtgtgaccctcattgttgttactccaatctactactgaatctacatgctggctatgtgatgatattatagtgacacggaataattaacctttatcaatctctggttccaactcaatttgagtctctctcaagattgtgtgaacatgatactttatggcattgggtcaattctagcctgtggttcactattctcactcatcaactatatttgaactattgctgaactacacaataagccatctattcattccaggtggtgctgaataacaaacagacatgatctcctgtcttc

SEQ ID NO: 61465 - DNA, 477 bp, Glycine max
  unsure (1)..(477): unsure at all n locations
tctacttatgtggcagggcgggcttccttcaccttcttgtcttaccacgagctntgactaccgctctttcttcccgcgatgcttctctttatatctgcctgagtgggcttatagcctaacccatacttcccacgatttcctatggcatttatcaggttagtcatgccgtcgttgtctttgcctaaacccattccgggttcgtaaccgttccccaacataactcgggccatcattactgctacatcggacaggcaagcttgcccagagaaggagtccacggatgaaatgcttaccacctcacaagactggaaagcggtttctaatgattcctctgctgcctccacataaggcatagaggatgggcagctcgccaagatgtcttcttcgtctgatacgatgaccagatgcccatccactacgaatttcaactttggtggagtgtagatggaacaactaccactgagtggatccactgac

SEQ ID NO: 61466 - DNA, 421 bp, Glycine max
  unsure (1)..(421): unsure at all n locations
cgctgcacttattcaacatgattatttccaggacaatttgttgaagctgaaatagactgttgaaggtttataaattggtgccatagaaactgcctagtgcaggaatcctttcacgaggtatattgtaatatagtagcgcggaaatacctgcaagtgtgtgaatatatggcataaaaataccttgcaaagtgtgaatgagtagcgaaaaatgcctttcaaaatatgtatatttgtggataggtagtataaggagccttattaaaaatgtacccatgtcaaaaatggcacgaggatgcttcccaaatgaatatatgatgtggaattgcccctcaagtgtatatagatggcatgaaattttcttttcaaatgcaaatgtgtgcatgacgtgagattggctntccaatgtgcatatgtgtataaa

SEQ ID NO: 61467 - DNA, 320 bp, Glycine max
  unsure (1)..(320): unsure at all n locations
agtgtactagatgactattgccccatcctatctatctngaaagaaatgcattaataacttctcgtccctggaatatgcacccatcttacgacaatacatntttaagtgattcttangacaagtcatccctttgtacctatcgaagtcaggtaccttgaacttcggtgggatgacgacgtccgacaccaggcacatgtcggtcatgtctgcgaacggataatcaccgaatgcttcaaaagccttcaacctctcttcaatgagatcgagtatcccctttccttctgctactgtgggtggccctcccacagacagaaacattg

SEQ ID NO: 61468 - DNA, 453 bp, Glycine max
  unsure (1)..(453): unsure at all n locations
agcttaaggtctatgagagcatttatncatttattaacctgcactncnacaatcatacacaccccatacttgccttttatataagcactcaactatatattatttatttgcaacatacacacttattaatttcatggttttttatgttngaacacaagatatactaagacattatgtgtatatacagaaaaagtggtgtatgctctttactttgaccgtgtcaatgtttacccagtgcctcccccaaatttggaacaaatatatcttgataattactcccccacatttgggacatattagctctaaaccatgtttcctgtggatgatgctcttctacaacctaagtcaaggtagcaagagaataacactgtataggcttatggttcaatcaatcaataatttatttagctcagactaagtacaagggataatttattcatacacatggtcagc

SEQ ID NO: 61469 - DNA, 198 bp, Glycine max
agaaaacctctgtccaaaacacctaccaaaatcacagcttttctcacgttaagaccccagtaactattctcttcgtccagtccgtaaccgttggatcgactcagaaagttactggaggctctatacatgagccacatttgaccgtgggatcactatccacatgcagacttattttgactacttttcacaaccagcaat

SEQ ID NO: 61470 - DNA, 523 bp, Glycine max
tactaactttcttccaccacacctcgataacaaacgccttgaatttctatataatgctcaaatagttatgaggaatcagataaacaatacagatccaattgtctataatataataagccaacttagtccaaaatatatggcatgccaataacaattacaagatacttaactgttagtattatatataggaagctaaattcatccaaacacacgaactaatgaaaactataaatctgaactggataagtataacaaaacaatgataataaaaaagaaaagttaattgatagtgacataattacttaaaaaattatgtattgttaataaaatattctcattgaaatattacataatggtttatgattccagctctcatctatcacaataaaataaaagttcttattcatatgtacatatagagaagctcatgtacaaatacttaattactgttataaataaatactataacatgagactattaaatcatatcttaatgatgaatatattaaaagactacaataca

SEQ ID NO: 61471 - DNA, 391 bp, Glycine max
  unsure (1)..(391): unsure at all n locations
tttgaagggtatgaacaagttgaaccattccaaacagtaacatcttgagccaagatctttgagtgagaaatctgattttctgcttaaccctctctgtgagagtgacccacttttgtgtgtgcttgtaaattgtaaaagactttagatagaagtgagatattntattcctgaatggaatccctctttcgaggtgaagacctatattntgtgcaataaacacatagatcctcattnttttttgtaagtctagtagtggctggaaaattngaaatccaatggtgttgctagtctagttgaggctagaattgaactccagttggagaactgacagtntgctgaaacccagtggatgctggtccaacagtggtaggttgtcttaacaaaatctcat

SEQ ID NO: 61472 - DNA, 437 bp, Glycine max
  unsure (1)..(437): unsure at all n locations
ctcattaaaagatgacttgcaaagtaaatgaccggttgaatctttattntacattgataatccaagattacagcacanacgatgggttgaactttntattttacaatgataaagtgagattatggcacaaatgattggttgaaactttnttntacaatgataaaatgagattatgatgcaaatgatcagtcgaaaatcgctttacacaaagaaatgagatcattgatggtagaagaatgaatatgaagatttgaaaagcaacaaaagggacccctaagggtgcatagagtgaattcaaaacttcaaaataaaaactaattggtcgatgaacgaagaacgaatgaagaatggtgaagaacgatatatgaatcggtcatgggtgcgantcgaaagcgtctcggcctcattntttcttcttctttctcctctctactcct

SEQ ID NO: 61473 - DNA, 319 bp, Glycine max
cgaacgatgaatcttgaacaacgggtgagaatcttctcgtaattactcacgaaaacattacggaagcgcctcggcttgtattatcctcgcggaacctaatatctctcatccttatacagagagagagaaggcctcaagggctgaacccttttatacttcacttctccccctatttatagaataatgggggagaagcttgccacccagctcgcccaggcgagcaaggttgcttcctacataagcaacaaccttctggagggcccaagtgggcctgggtgctatttgcacctccatctttactaaacacacccctctgcct

SEQ ID NO: 61474 - DNA, 314 bp, Glycine max
gctgaattggaggttgaagtgaactcctgctttttttgactccatatggacctggagatagtcgcggggtcaggagaccttgggacgcatgggtgtgctatgccataccaacttgaccaatcccgacccacccaggctaatcgtcattgagaacctgtgatgtacctaaacaggcgagcttcttgtcattcacatatatatggaacaattacctcacagcatggaggctcgttgtggctggcctgctgtgaatattgtgggatatgcggagtatgggctctgggaatctaatacaacggtgagtaattcgatac

SEQ ID NO: 61475 - DNA, 351 bp, Glycine max
gacatcttttcttttctaactcttatttttggcgagaatactagtgctatcaacaaacgcccaggtccactcttgtggaatataaacctcatgtccaccctttgtagctctttacaaaaccaagctcccctagtcacttactgcacagccacgacgaccaccatcaaggggccagtcaataaaacgaactaccactagactgtttggatagatcttcaattaggtgaaagtcatacgccttcctcataaccatcagaggagaagctttataggcaaaactgtccatcaccagattgagcaacaagaccctcatgcaggggctgcaatactgacttctcataaccatcatag

SEQ ID NO: 61476 - DNA, 86 bp, Glycine max
agtttatcactggcccgtgtgctctctcacctccaactagctgtcatcgaaatacgggtatctatcgattttttttccatatactc

SEQ ID NO: 61477 - DNA, 366 bp, Glycine max
  unsure (1)..(366): unsure at all n locations
gtctcatttattaagagaggactaacagctccaacactaacgatagataaaatctcacgatccttacaatattaaatgtgtatctcattccatattctcaccctacaaattaagaatagcaacataacgatcttaggatagggtaatcgtatcacccgatacatgcactctttatcacatacattcccaagctataactcccaagctaatntcttgtacaaatattttgaaatactcatgctaactngagtttgggtcaacatatttgaaggaccttaattgtgaacccaccaaataaatagttaatttcttaaaatccataaatatcacaccatatctctcgtgttaagggataacgaataaata

SEQ ID NO: 61478 - DNA, 355 bp, Glycine max
  unsure (1)..(355): unsure at all n locations
cccacacttgcaatgtggtgtttcaaagaatggatataaatcccgcctataactgtctcttgggagaccttgattcatgcactgagagtgngcccttcaacgcttcaccagaaattgaagttcgcagtgggtggacttttagtgatagtgtcgggtgaagaggatatgttagtgagctgcccctcctccgcaccgtacgtagaagcggcggaagaatcattggaaacggctttccaatcctttgtggaggtgagctgcgcctcggaggaacaagtccgtcgctaccttctctctccattgtggcataatggtggacgtgtatgctangaacagattgacccggaatgggctacgc

SEQ ID NO: 61479 - DNA, 352 bp, Glycine max
  unsure (1)..(352): unsure at all n locations
agtctaagagaagttcaagtccatagccatcaaagtctgaaaagagtatgatgaactaagggacgtcagtatggtcacagctgaagccttggaacgagaaaccaagaatgctcgaaaggaagaacacgaccaaaacaagttttgaggtgctctatacggcagcaatagtgagctcatactccgaagaggtgaaaggaatcatcacgggtcacaggcatgatctggaaggaggagctaaaggtttgccttatgtcgaagagaaatttgtcccaacagttaagcgagactgaagggaatatgtgggccatcatcatataatgcanagagaagctaaatctagcggcgactcacg

SEQ ID NO: 61480 - DNA, 352 bp, Glycine max
  unsure (1)..(352): unsure at all n locations
tgactggcctcaattagtgttgatttgaggaagatgaatatggctccacgaactggaatgaaagcaaagcgacgctgatgcatggttccanaagaacttgcttgaattgaaaacatggagaacacgttcaccaaactaactttatcagcactgcgtagcttgaagaaataggggagaagctcaactgtagcatttctcattgctctttgctactaggctntgcactgaagaggatggaaataaatgactgcctacgactgcaccaatagtctcagatacataacttctggttatctccattatttatgttattaaaagaataaccagattaactgattgcttatacaagatc

SEQ ID NO: 61481 - DNA, 323 bp, Glycine max
gttagggttagggttatctcccaattcgtcttgtccggttctcgtaacgatctaagttattctataatccaaaacatttcggcaccgtcatacacatcatggagtatgaatttaactattattaattatttatttcgggttaaacgatttgcatgacagacaaccttcgtgaagaggcatctcactgctgaattcgagaagaaatatgaacgtgagattctttctctattattctattaataataatcttttatttgggtttatctcattcttttgccgattatgcttaatctgaatcagcgaccatcggtgtggatgttcat

SEQ ID NO: 61482 - DNA, 365 bp, Glycine max
cttgcgcaagaatttttcacaaatatgctcgtatcgtgtttttgtttcttcgatggagagccactcaatactataaaacataagactcacctacatcaataatatctgttctgtgggcatacaattgtatatcacgaatccatgacagtgcattcttaaaagataacgggtaaatgctgtatattagccgggtgaaatactagtaataatatatatatatatatatcgtaaataatgaatttaaaatcaacttcattaattcctaaatgatactctctaatatctaatgtaatacaccgtgttatgaatattctccataggaatcaaattcatgcaagaactatatataaaataattttctaata

SEQ ID NO: 61483 - DNA, 408 bp, Glycine max
  unsure (1)..(408): unsure at all n locations
gagattagccagtcctacattcgagggcaacctccaccttatgacgactatcccgggccagacgatgaggaaggagatacccatcttggcctcctggctcacctcaatgatccgtcccctcatgaactaccccaaacgaacataatccgccatatctcggcctcacccacacccgtaaaagaatctgttcccttctcggaagataagggaaagattgaggcgcttgaagagaggctaagagcagtcgagggccttggcaattacccattctcagattataacgaattatgtctcgtgcccaacatcgtcatccctcctaagttcaaagtaccagactttgacanatacaaagggatgacatgtccaaaaaggcatcttctaatgtattgccgaaagatgggggcgtat

SEQ ID NO: 61484 - DNA, 295 bp, Glycine max
  unsure (1)..(295): unsure at all n locations
actatcnncantcaactccaggaatctccctcctaagaatgctgtcacacacctgattggccctctatggcccactaaaactgccagacacgtgtgttgaccattttgttctttaacccaaaccctgctcggtgagtcagccgagcccctcactacatatttggccacacttgccagacacaacacttgtatgcgtgtgcccttggattgagccaacgtattgtaactgcccgaaaccaacccttgtgcagaagtgattgtagcatcagtgcatcaccgtacaaaattccgcttt

SEQ ID NO: 61485 - DNA, 395 bp, Glycine max
  unsure (1)..(395): unsure at all n locations
tcagctgtgaaacgtcactccatattaataaaatgttaattatttgttcgancatgtactgatagcacttntcacatccaatactaaaaccagaacatacctggtcttaaatgcatattgtattgtttggtaagacgttatctaacagtgaatagttgaaagaatggataaagtgactgaatgatgaactcggtgttgaccccaaatattgtttcaagtacaatttctctaacgcaaaaatcaacattctgtgtttcaaaatataaattaaacaatcaacatgtcttaacacactacaatttgcttctgtaagggctatttatttatacatactgttaagactttcattctatgtcatatacaactcacataaccaaattaactactattggttc

SEQ ID NO: 61486 - DNA, 440 bp, Glycine max
  unsure (1)..(440): unsure at all n locations
attcaattaagaaagagaaatcgcaaagagaaatgtccgactgagttttttggtttattttactanaagatantttntgattattatattattnatttacctctttntggtttccaacgtggttacgacatgaccgaacggtcggatttcattttaacagaanataacggatattacaattcacatgatcggtggaaattaatttatttttgattaggcgagaaaatgacttaagtaaatgactaatacacgtcaaaagggggtacggaaagtaaatgaaacgaaaataaaagtacgcgatacanatgaggaccactaagggtacatagaatgaattgaaaagttcgatttcgggaacttaccggttgaagaccgaagaacgacgaagaacgaacgaagaacggctgaanatcttcgtgatatcacccacggaaatgtta

SEQ ID NO: 61487 - DNA, 393 bp, Glycine max
caataatagtataataccaacatggctcctgacagaacccatctgtagaatatgagcaagcatgagcacgagtcttttaaagaatatgcccaatgatggaaagatttggcagcgcaagtggccccttctcatggcgagagggagatgatcacgatgatattatatacactgctagtattctactatgagaagttggtgggttatatgttcgctagcttaccggatttggtgttcgcgggagagaaaattgaatatgcttgaagagagggaagtttgattatgtcttcttctccggcaccatatatatgacgactacaacagctgtcgcacagagataagaaggggacgcccacgccgtcaccttgacacctgcttggtaaaacctatctagtc

SEQ ID NO: 61488 - DNA, 333 bp, Glycine max
gtaaaatttcaagcaaacaaagcaccaaatattccaatgcatgaatatatattcatgcagacataatagtttcgaaataaccatattttcacataacatccactattaaagggagaatctaacttccaggcacataatttcaaggattttcttaaacattcttagcatacaaaatcacaggatatagaagccaagaatatcaatcaatcatcatactcacaaatagttctatacaaaagatatgatgagcttgcctcatgtgatgctaaaaataacaacagcttgaaggaggaaagaatgaagaaatttagtctcccgaacataactttggac

SEQ ID NO: 61489 - DNA, 426 bp, Glycine max
  unsure (1)..(426): unsure at all n locations
tattgaaggaaaatatacggctagagtgaactaatatgccacgatgaaaatatcttcctacatatctatttaaggatactcctgacttaagttgggtggagttcagtgagtcaccctatcgtaagcattggtggctaaaatctaaagtattctgctcaatgttntcttggtcattgaattagaatgaagcactcaagccttaattgatttgcaactgatattttgccgcaacacctaataccatttgacattataagaacaatatctttgtattccatttttgggagggagtctggtcaggtcaactgctaccacttcttgtgccgtatacatatcatgttccagctagaaaaacaaatcgtcactgacttttctttagggnacaagtactaaatttatgagatggaactttctacgattcttgta

SEQ ID NO: 61490 - DNA, 337 bp, Glycine max
  unsure (1)..(337): unsure at all n locations
tatattatgacgaatatatggacatattagacacatgacaagtataatttgtttttttttacctctctaatatatcctcagtttgtaccatttctccacacagtttaagttgagaattaattttcaatattgcaaagctatacttatgatttgaaaatcttgcaaacacaaatgaatccgatttntttttttttttanagggaaagcacatgaatctgactatgtatgtatgtgtntttttctttctctgccgaatcatatatctcttttagacacttcaaaacaagaattataattttcattgtaagatattcaatcttcaacgcttttttaagga

SEQ ID NO: 61491 - DNA, 340 bp, Glycine max
ccaagctttctttacatcaattgtctctgactaacaatctatacaagttacattcttgttcttctctgctaacaaccacactgcttaactcatgaatagaacacaaacccatcacaatcatgcgttcattctaataatagcatcacccatatcataaggcactaaagtgctcactgcctgcattctaacaattaactattcaaatcttcgaaaaatccacccactccctagaaacatcctggtataaataacggaaatttgtcaaacctatttatatttccccaagcaaatgcctctaataacattttaaaatgtttactgggagagatggacctttttt

SEQ ID NO: 61492 - DNA, 184 bp, Glycine max
aatacttatttcagaggcactatgccgctctcatgactgcagagagaaaccccctgcaaaaatatccttttgtataacacccttatgcacatgaccagtttattgagaccagagcttataagcttctatctaactttcaaccaaatctagtgtgtaatatgagaagccaccattaatttattct

SEQ ID NO: 61493 - DNA, 498 bp, Glycine max
catcacggaccttagatactcaagcttagagaatatggtctatgaaaatatatatttggatatttatcgcagaactctcttcaaggaaaaccatatatttctaacaataacattcttctcctattgtataaaacaatatcaataaatagatttattgaacgaggagggatgaaattatttcaagaataatatctactctgtatttcaaccatccattttttaaaattccatacatcttatagaacaagtatggtatatacaaatttataaacaaactacctaagttacccttgaacctagagaacccaaatattcttcacttgttccgtgaataaaaaatacgtaaacgtcttttcgtatacacttatttgtagaagaatatttactggtaccatcttatattgcttaacatgtcaacattcaataattttattaaattatcgttatctagaacaccagcgcacccttttctccttcgcgacgattgaatatattatc

SEQ ID NO: 61494 - DNA, 313 bp, Glycine max
ggcgatcaaaattgtcattacttgtattataggggtgaaccaaacctatgcttctacaagaggggtcatcaagtcaaaatgaaatatctaaataatccgtcttgcccaattgtgtgcaaagacaaatcgagcctcatctcttgcttcacctactgccatacagatttaggataattaatgtccctgatacttccaatttcaccttgacatagatggcaaggaccatgttgcacatctaaattgattcaccacatatccttgcgaaaaatacgcaatacttttactgctcatcattcgcttacatacatgcttt

SEQ ID NO: 61495 - DNA, 327 bp, Glycine max
cagccaccgcttttgagcgttgacaccatcatcgcttctaatccatcaatggatggtcgattctccgggagcgacgcgttcatctcacggacgacgagtatactgatattcaggaggaaatacggcgccggctgtgggcaccactgtgtacttccatggccaagtttgattcataaatagttcttgagctttatgccaatgctcggtcaacacacgaaggcgtgcgtgacatgatattctgtgttatgggtcagcggatcccgttcgatgccgacgctattctactcttcctgagatgtgcgaggttttggaagaggccactatgct

SEQ ID NO: 61496 - DNA, 193 bp, Glycine max
ctatctacagatggcttctagaaagagagagagcattggaaccaggccccaatgtcagtatgacacaccgagattcgcttcattagatgcttggaccagatgcactgatcatgttgcgcgaagaaacactctacctgacaggaaagctgagctatatcacactgagctagatgactttaaggccgagctggag

SEQ ID NO: 61497 - DNA, 265 bp, Glycine max
ggcatcacacatacaacacccaaattgctacggtatctttgcatggaacgcaaaaattacttgttgaacatggtatcatcgtgtttacacacacacctaattacgttaatattgccgctgatacaatgatgaatacttaaatgaagaacaaacatacatctaaagacccatctgttccatgttcatacaaatttacgacatgagacacctatctgagaatagctatttacaacctcttacacgtgcctactatggtcgaatgata

SEQ ID NO: 61498 - DNA, 356 bp, Glycine max
  unsure (1)..(356): unsure at all n locations
gtgtgacacctcacttatgagcaactggcttgcatgatgaccaatggataactaattntttcgccaccagcgtggtataaaacatgcaaaacactgttatggtaactaaccttctttctcactccaccttgagttattactgacttgaggataggagtgcatgcaaacaccccaacaccaccatcagaaccacttgatgccaccatactntgcaattggaatcaccatcgtaagtcaactctatatcagaatctctcattgaactgaatctcccatttcttgaatcgaacaaaatgtataaaaagaaccaaaccanacttctaatttgatntttatataacgaccggaatgaatgt

SEQ ID NO: 61499 - DNA, 481 bp, Glycine max
  unsure (1)..(481): unsure at all n locations
caagtgttgttcgggtagcttctgttaagttgttcggagtgaacagtggacatacttttggtttcgcacgtgacgtctgacgtgttacgtgaggaaagcctctgtatttgataactctgtcatattctaaccattagagaatgcattaaagaaaaatattatgtgttacccggtgattcaagtgtgtgcggtgccatcacgacactcatgcatacgtgtcacttgtggagtgggcaactattggagatgtgatgtgtgggtgagtaaggattcatcgtggtgcgacatattagggctccacttcagctctcgccaattaccaaagagtccatctcctctttaaatggagtggacatnttacttgtagccaccgttactatgaaatattagacttctttctcctgaaatcttctttcttatgtgctagcttcatgagagtcccttattttctctttcttctcccttaactttatgatcttca

SEQ ID NO: 61500 - DNA, 416 bp, Glycine max
  unsure (1)..(416): unsure at all n locations
ttggagcgtctcgatgtttatatgactcaancggacatcctttgatatgtattgtcgtttgaatttgctacgagccgtccgtttcaatatggagcatctatatatatttccggacacaaccagaccttctgtataaagacattgtcgttccaatttgcttcagagctcgaatttaaattttgagcggtcgatatattacgggactctttggacatccgagtaaaaagtattgtcgttgtattttctgcgagctccgtttcatcttgggcgctctatatattacatgactctccggcacttgtgattaagaatcgcatttcaattgttaagctttagttatttttggggtttgaatattccaattcattaacatctgagtaaagtattgcgtttgatactacaacccctttttcttt

SEQ ID NO: 61501 - DNA, 259 bp, Glycine max
  unsure (1)..(259): unsure at all n locations
ctcgaatattaccggactcatcctgaaatccgtgtagaaagtntntgtcaattcaattttctcagagcttcggatctaaattttgagcgtctcgatatattacgggactcaatcagacatccgagtaataagttattgtcgtttggaattgatacgagctaccgttttcattttggagcatccttcgataaatgacgacactctgtcgcgcatccgattaaaaagcttttgtcgcttgaattttctaagagcttccgtt

SEQ ID NO: 61502 - DNA, 431 bp, Glycine max
  unsure (1)..(431): unsure at all n locations
nttagaaggctatcctagatgcaatctaaatgctttattatgtgcatggatatattacagatgtgcatgaagcaacttccttaacaaatcttacttatatatggcagttaaatacttcttcttatgtatatatcatttcaaatatagtactaagaaaaacattaaagtgacaatttactgatattgaataaaagatcttttcttgacatgataaataacagataatttacttattgtctacaagattctttattcatttcataactctatacaaaacgattcaatcatatatgtcatgaaaaagataataaacataaaacaaatggtgtttcaaaaaaattacagcgataatttatacaataataaagtaaaacgagcaatactgttcttttgtcagagtaatgatcgataagactaataatgctagagat

SEQ ID NO: 61503 - DNA, 351 bp, Glycine max
gcagctttggctgctagtaagcataggattgttatttcttcaagaaagaagatcagagatgagaattcctctcagtttgaataaaaagatgaaccattcttaactataaatttgaaactttgatttctctttcatataaaaagtgagagctttggattataattagaatgtgtaagatatctaaattaaaaaaaggcgggtgaatcacataataatttaatttattaaaagataaattgcgtaatactatttaaattgattttaaaacaaaattatcaatgattaatgataggtttataaatagacaattaacaagtgccaatagtctttgtatccataataggctctata

SEQ ID NO: 61504 - DNA, 216 bp, Glycine max
tgaccacttctgctgtggggaaacacatcggactctctgtgtgaccctataaatgatcgaaatcattcatgatcttatatatatcaccttgtttctatcttgtaccaaatcaaatcccgccatgaaaagtctggtgatgacatacataattactgatgcccctcctgtaatttcaaaacctggtaacctgtccttatcactttgtaaacaatggtt

SEQ ID NO: 61505 - DNA, 366 bp, Glycine max
  unsure (1)..(366): unsure at all n locations
aacaaaagcgcacaacggaatccaaaaatgcgaaaaaggatgaccctagggctgcaaattcatcaatcccgtgggtatggcttttgaaaggggggaaaagaagtttntaaacgtaaaaacgccccccctttcggcatttttataatatggtgcagggggtggctccgccaggcgagctaacctgcactattttgttttttttgttttttgttgaggggaacattaaccatgttccctctcttctcatggattaacattttgcctaacttgaacttacttaggttagaattaggcggtgattacttattataatagtacccttgtcctttttaaaacaaacgaatattaaaagaaagctgcaaatac

SEQ ID NO: 61506 - DNA, 387 bp, Glycine max
  unsure (1)..(387): unsure at all n locations
atctgggacctagccatggtagaagtctcatataggtcattgcctccctcgcccagcattatgatcagtcgttgaggtgcttcacctttggnngacttcagctatcacctatggtagaagaatttgaagaaatcctatgatgtcctctagggggaaggaaaccatacctcttcttagggttatatccctcattatctagaatttccaagatagtccaaatcttggcacaggaattataccacagaaagcaagtccaaaatgatgtggttggaatcccgagaaaatatttgaggcaaaagcaagaatctatgcaggtaaagacgagtgtgccccgttcatagatattctcacactgttgatcttcgaggagtctctttccaatgtgat

SEQ ID NO: 61507 - DNA, 428 bp, Glycine max
  unsure (1)..(428): unsure at all n locations
agctntcacatatttgatactatctctaaattttntccaaagcatgctcgactactttcaatgcttcttgaacaatcaaatttaatatgtgtgcacaacaacgcacatgaaagtgctcaccatcacataccaaccctttttgcaaaacaagttgactttttataagtttttgcaacacatcattagcaaaagcattatccaaagtgatgctgaaaatttattctctattccccaatcattcaagaaaacaaaaacttttttacacaactcaaaaccaatgtgaggaggaggcatatggttgaaataatgattnttctttgtaaattccactttgaatcaacataatgagcagacaagcaaattaaaccctcagtattataacttgttcgtaaatcacaagtcaaagaaatactattagggatggaagc

SEQ ID NO: 61508 - DNA, 321 bp, Glycine max
  unsure (1)..(321): unsure at all n locations
ctattttctatanaatctttgacctgatttggtctaatatgtggtatcattgatggatcttgcagacttggtattctgcttctatattttccgatgaatggctctcctactccttcctccatgatgccaccgcctacctcgcctttgcattaaccgacctatccttctttctgtatgttnttctcaatttcaatctgagctcgctgaattctgatnttgaattgaatngatctgaatttgaacggtggtagattgctttctacgagagacattgtggcactggttgagcatagctcccctnttctcttttgcgatgccaac

SEQ ID NO: 61509 - DNA, 483 bp, Glycine max
  unsure (1)..(483): unsure at all n locations
atctctcagtcacctgcggcatgcagctttaaaaatatataananacttattttattgtcaatctaatgaaatatctggcacaatataacctatatctttctttatagattaggagaataccaatcattttagtggatttacaattgcatgagatcttatatctacacgtttttattattgttttatatatacactttttcttttctttacaggtttttgagtaaaatattgagattataaaaactctttttcttctttctttctcccactctatcttttcaacaaaaaagtaaggaatatagccagagagatacatgactatggacattgaataacattattttgtttcaatctataacatagtttctgaagtgttgttggcccatgccactaaaacaaaattccaaattgcacaagagaacgggatatttttttaaanaaactnttgtacatgatcaccaactcgtcaatttttgagaagc

SEQ ID NO: 61510 - DNA, 458 bp, Glycine max
  unsure (1)..(458): unsure at all n locations
gatccaacactacaagaataggcttcgttttgaatagccatacctctttaatgtacctgatggttgcgggctccaatagagaagggtcatacagagagtaacaagacatcattgattgcagcttctcaaacttcnngttcacgtcattccacgggattgctttgtccactactggaatccaaacgagttcgtattgactctctaatctggttgaatcttgacgtgactcttggtacatttgttcaaatatcacaagctcttgatcggngacattatgtacgtctgttatatagagcagcacaattnntcctctcatcaccctcatgcttacctgaagatatatacctagaaggttggaacaggaccaccatgtgtctagatgatttgtctcaattttatcaanagctttgagcacatgtttcggatcaccttaaataatctaaatcacagcttgttga

SEQ ID NO: 61511 - DNA, 434 bp, Glycine max
  unsure (1)..(434): unsure at all n locations
tgtaggatnatggcgtacccatcacatgtggtactatgtgtttgtttggcaatggcgcacaacaagtgtatcacatccacagatcgcgcataaacccaccatcccctggtgtctaccttcaactgagcttacgtactcccacggagcccatatgcttggcttctctaaacaccgggaccccatcaatcctcccaatctttgtcaacatccaaggtactcagcattcaaacaacacataccatcacagccaatataacagggcagaggctgaaaattctgcctcaaacaccaaccaaaatcacagctgttctcacttaaaggccccaggaacaattccttcgttccattctttaaccgtcggatcgaacccaaactttactggaagctctatacataagcctacatttgacgttgggatcactagcaacatgcag

SEQ ID NO: 61512 - DNA, 271 bp, Glycine max
aacactgagagcaacttactttatcaatgttttttgccacaccagacccggaatgcatgcttaagaaacagtcttctttaaaaaaagagcactgctgctgttgcatgctaccactggcggcacccccccaaataataaaaagagggggggggggagattgcttatctacgctattaatagaacccctcgtttaagaagacggcttactaaagctccacactatacatcagtctgactcaatgtacacactaaacttgtctgaccagacccc

SEQ ID NO: 61513 - DNA, 51 bp, Glycine max
tgtaggatatattttaattggatatgtaccttaagctttgttctccatatc

SEQ ID NO: 61514 - DNA, 496 bp, Glycine max
  unsure (1)..(496): unsure at all n locations
ttaagtcacctgcggcatgcaagcttacatagccctcatcttatactaattctaacaaaacataaaaaccctaaatatctaaagctacagttaaagtcttctaccctaaagttaaggcaagaaaaagagaaaaaggatcaaggaacttacttggatggtgtatgatngatgcttcanagtaaaaaattcacaaagagagaacanatgcaaaatgtgcaaattnttggagagaaagaatgtagaggcgaggtttttgtaatctggaaaatgtgagtgtaactgctgttacactcactgaagcagtttctatactttcgcttagcggaccgctgtgctaagcgagcaagagagacgtttggtttcttaaccaggctcacttagcgaacatgcgcttagctgacgtttcaaattcgattntttttttaacagaaactcagcttatcatgcgagtaagtccgcttagcgaggtctgcagattagaaaagctgcaactctc

SEQ ID NO: 61515 - DNA, 459 bp, Glycine max
tgggagagatatacaaacattgtagtgcctataacactactatcaaagaggaatgtggtagtttattacaccgagtttgatgagttcaatgaggaactcgagagaagacactgcgatgagaagttaactgattttgctgacaatagcatatacattgctattatgaaggaattttacgccaacctctatgacctcaagggtaaatcacttaagctggtgagggtgagaggtcatctactgaaatttgatgaggataccttgaacacatttttggagaccccgataattatggaagagggggagaatctgtgtgcttattccaagtttgcactcctgaggcctgatcctcatgaggttgctactaagctctatatccagtgaggggattcgagctaaatgctgatgggcaacctttgaagatacggaggaagaacatgaccaccttagctcagacatgga

SEQ ID NO: 61516 - DNA, 132 bp, Glycine max
  unsure (1)..(132): unsure at all n locations
gcttcctatagatatgatagagagggttcacatctataatgtggacntaccatacgctagaaggtttatgagtatatgcataccgatatcaatttgatactagtggccatgcgcactatacttttgcgtaaa

SEQ ID NO: 61517 - DNA, 505 bp, Glycine max
  unsure (1)..(505): unsure at all n locations
tctagctcactttggatctgaccttgtccangattttttgtctatatagaggggtcttatgcttcttccatatcgagaatccttttgaagtacaatggttttcctaatgatatgaatcgaggctcacaccagtaatgtggacttatcatttacttaaagaattaggattccagacaaggagatattaccaccatatacatcttgataacacccaatctttgcgtaatataaattaaaaaagattctatttacaaataaatatgagtttatgaaaataatgagactttcataattaaataaataagaagaaataattttattaattaaaataatgattttaaggtaaataaaataattatatgtncttataaaatacaatgaatatntaatctattcatttgattgggagtaaaatatagnttatctttataaaataatataatatagacgcatagagtcaataatatgttgagagctaatagttctaatagagaatactacgtcc

SEQ ID NO: 61518 - DNA, 275 bp, Glycine max
aatactgtattatatcgagacgctcgaattgactatatattgagacgctcgtaattgaaaccaaatgcttcaagcaaaatctaacgacaataactttctacctcgatgttcgaatgaatcccatatatatttcatggacgcttcggatttggaaacataagctctaagcatattctaatgataataactttttactcggatggccgattgagtcctctaatatatcgagacgcccgtaattgataacggatgcttctagcacattcaaagacaat

SEQ ID NO: 61519 - DNA, 370 bp, Glycine max
  unsure (1)..(370): unsure at all n locations
cggagtaaaaagttattgtcgttagaatttgctcagagcttctgttctgaatcttgagagtctcgatatactacggaacacaatcggacatctcattaacaagtattgtcgtttgaacttgctcagagcttctgttcttaattacgagagtctcgatatattacgggattcattctgacatccaagtaaaaagttattgccgtttgaatatgctcaaagcattcgttgtcaattacgagcgtctagatatattacgggattcattcggacatccgagtaataagttattgtctttttattttgctcagagcttctgttntcaatttcgagcatctngatatattacaggactcatatcgacatccgagtc

SEQ ID NO: 61520 - DNA, 423 bp, Glycine max
  unsure (1)..(423): unsure at all n locations
catattaaatatattagaaactaagaaaaattataaccacaaacaagggaatataaacctcacccactttttcactataaggaacaaattgtaccaaagctgaaggatgccatcttactgctgacgctgataaaggatcacatatttcaatgcttgtaacctatgaagaaaaaacccacgagtaaagctttacattatgcataagagtatgaacaagacttgtgaattgtacaacaaaatactgtcgtggcactaaattcatgtgtgaccttgctggcgtatgacttcacatttaccacatcagcaacagaagaatcttccaaacttgttagcttcattgcttccctagaatgcaacagctgtatatagaacaaggggatattatctgtgcaatngagcaataactcttaaatgtgattcata

SEQ ID NO: 61521 - DNA, 432 bp, Glycine max
  unsure (1)..(432): unsure at all n locations
gcttgaagctttaaggaagctacatgaagctntctctgtattaatgcttcccagccttcgataaccattggatcttcttataatattgtctgcagcttcacaagacaactttccataatctgaccgttgggattntttagaagatgtctcgagggcatgcgacgtttcccgttctgagagcattgctcacttgtgcgttttgagccttgttgtccaagtagcttacgaaaaacgccatttcttcttctttctgtcttccaaaaccatttccaatgtttcaagcttcttctccatcacccacagccaccattagccaccacaaaccgccgttgttctccgttaaaaccccacaccgagaggaacccttcaaccgaagcgaaatctttcaactttgcttgcgattgcggnagagaacgacactctaatctgacc

SEQ ID NO: 61522 - DNA, 407 bp, Glycine max
  unsure (1)..(407): unsure at all n locations
gatggcgcctactctctcctcttctgctttgcctcccgctgcaatctcatgttggaaaatcaccatcgaaggacctcattgaagctcagagatccatcctgcataatatctctcacacgcaagcttccatcaagtagggtgcatgaagtgagattcttgtgaggagccgccatgccaacgtgatgacttggggattatcttgggagagagttgtgttctgttaatcaacatctccatagtcggctcatgattccttttgttgtatatagatgttaatcatatatttatatatatgtttgaactgattcactcttcatatatgcatgatgtgttctgaactactatattaatattcatgtatntggttaatattatgatgcatgtcaggtgacatatctctgtatata

SEQ ID NO: 61523 - DNA, 391 bp, Glycine max
tgtagctaacctctagcttctcaaggaagtgttctcaaagaagcttctcaatgaagttttctcaagatagcttctcaatgacgctacctaatctataaatagaagcatgtgtaacacttgttgtaactttgatgaatgaaaagtttatgagatacactctcagagcgtccactttctttcctcttttattccttcaattacgtgctccccccttctctctttctttgtctccattatagcatcctcttcaagcttcttatccaatgcaattcttggtggtgaagctccttctttcttggcttattccctagtggatggtgcctactctatccttttctcctttgccttgcgctgcatctccatgatgaataatcaccattgaaggacctca

SEQ ID NO: 61524 - DNA, 167 bp, Glycine max
tcaccggtagatgtctatctaacacttactcatcgacatatttcagtcgtgatataaggatagtatagtattaacaatggtctgtgacagtcgttatatggccccaactgatatacttcagccgacattgtgcaatttcttctacaaacgctggccgataatgattt

SEQ ID NO: 61525 - DNA, 467 bp, Glycine max
  unsure (1)..(467): unsure at all n locations
ctcagcttgagtgacatgtctctttaataggaggattgcctgtctttaaaattctagactcttattcaaaccctgtagacattcctttcttgaactctaaagggattcggcatgagcaccttnattccaaacccttgagacatgcctttctcactctgctttctttcctttttcatgtaatatggctaagtacgagtaccaatccatcaaaagagaaaacagttgtcaatgttgaagtggcagaagatagggctcctcctcctcccatcaacactgagtccgacgagaggaaggatcttagtttctcttctcaagatgttacaaggaagaagcaaagagtggctactccatcatcgattatcgctccctctcccatcgagagccactcaatgttcctttctatgaaggacggtgagtattctcattgcgggaaggatattaacccttgcgctctcatctgcgctcta

SEQ ID NO: 61526 - DNA, 467 bp, Glycine max
  unsure (1)..(467): unsure at all n locations
gcagcttcaacacacacacaaatctatgtgttcaaacccctcaaataatgggtttctacgtntgatcagtgatnattataatgagggtaaatttgaagcaaactctcacctcacacatgtgcataacatcaatctanactngcccaaactggatttacacctaaaattccaccaaatcaaaatttgactcttcaacacccaattntgccctagaaatggctcttggttcactctggtcatttgtttttctctctagctcagcctaacctttctcacatgttctaaatgaaatntcaagctagtattaactcactctaacctccatntaccacagaattcagacttagccttccaactctcaaagtctcactctttttccactcataacatcacattctcactttctaaccttgngttagttctacccttcatctctaacagaattccatcagcaatttcagcatata

SEQ ID NO: 61527 - DNA, 430 bp, Glycine max
  unsure (1)..(430): unsure at all n locations
ngctaagccatggaagctcctaatatgacccacacttttttttgtgggtcattcttggaatggccttgatatctcaaggtccactnggactccatttctaccaactacaaaccctaagtaaactatattatctaaacaaaatgtacacttctctatatttgcatagagggtgtttttcctaaggaaagaacttgcctgagatgtcctaagtgatcatctaggctcctactgtacactataatatcatcaaaataaacaactacaaatctacctatgaaatcccttaagacatgatgcataagcctcataaaggtgcttggtgcattagtgagcccaaaaggcatcactagccattcatacaaaccanacttggtcttgaaaaccaatttccactcatcaccctctttcatcctgatttgttgataaccac

SEQ ID NO: 61528 - DNA, 465 bp, Glycine max
  unsure (1)..(465): unsure at all n locations
gtcctctttcgtctggaacatgggtataggcaatgcttccanacactttgaggtgagagatcccgggcttccttccactccatgcttcttgtggtgtcttctcatgcacgcttcttgttggagaacgattngttaggtaaactgcacatgccactgcttcagcccaaaactccttcngcatctttttgctcttgagcatgcttcgcaccatgttaagtatggtccggntctttctctctgctactccatttttttgtggcgatcttggcactgtcagtgggcgacggattccatggtcttcacaatatttgttgaacttatttgaagtgaactctcctcctcgatcagatctcatggccttgatggaaagaccactttctttctccacgnagggcttgaacttcttaaagttttcaaacacttctgatttctccttcaagaaataaacccagngttttctggaat

SEQ ID NO: 61529 - DNA, 507 bp, Glycine max
  unsure (1)..(507): unsure at all n locations
gcttagatgctcttgttgttaccaatggctttattacttactgactgtgattaatgagtattgatttatatgctcgttatgttcatgataggtaaaccttagattctcgttggagattgaatacaatgattcttggcggatagttgcattaatcgttgtattgaatcttgaattgtccatttggatagtttaggaagagtcatattcttatagtacataggttacttcattntcttaaatatgatgaaaatttggttagtgcattnttctttgttctccgggtgcgtacttgattgtggttggaattttttcaccgctntcatgtgatgtacttggagatcaatgcgaaatgctanccaaaatttatcacatctaagaaaagaaagttaacctttacgtatgaatgtactataaaaatatgtcttnctgaatgggatanggtcacacctttaagganaaanatgagggtntcatgcatagaataactntgtgactatncacatagta

SEQ ID NO: 61530 - DNA, 282 bp, Glycine max
  unsure (1)..(282): unsure at all n locations
ttattgntgaccacagagtgggatctggagatatgtcgtgtgggtcaagagaccttgtggacgtcaggaggggtgctattgcccaaaacctagcttgaccaatcctcacccaacccgggcatattcggtcagtgagaacctgtgatgtccctaaacaggcgatctccttgctgtcaacatattaaaggaacaaagaccactaagctaggaggcttgtggtggctggccagctgtgaatcttgtgtaatatgtggattatggcctctggtaatcgattaccaa

SEQ ID NO: 61531 - DNA, 383 bp, Glycine max
  unsure (1)..(383): unsure at all n locations
ctatttccgctcctgagtatgacagtcaccactttatgagcgctgtacaccaggagcgcttcgaggccatcaatggatggtcgtttctccgggagcgacgcgtccagctcagggacgacgagtatactgatttccaggaggaaatatggcgccggcggtggacatcactggttactcccatggccaagttcgatccagaaatagtccttgagttttatgccaatgcttggccaacagaggagggcgtgcgtgacatgagatcctgngtaaggggtcagtggatcctgtttgatgccgacgctatctgccagctcctgggatatccgttagtgctggaagagggccacgagtgcgagtatggccagaggaggaaccggtctgat

SEQ ID NO: 61532 - DNA, 496 bp, Glycine max
  unsure (1)..(496): unsure at all n locations
gatcttaagtcacctgcggcatgcaggcttctcactaagttgcctgatgcctgatatgtctttctgatggcagtggtcctagatgaagggaagaatntctccaagaacaccctcttaaggtcatcccagctgaaaatagacctgcgagtaaggtagtatagctaatcttttgccactccctctatagaatgaggaaaagcctttataaaagatatgatctttcctggacatcanggggcttcatggtggaacaaacaatatggaactccttaagatgcttaagaggatcttcacctgcaagaccatgaaacttgggcagcaaatgtattagtccagtcttgagaacatatggaacaccctcatcgggatattgaatgcacaagttttcataagtgaaattaggtgcaatcatctccctatgagtcctctcacgaggtggagggtgagccatgttctcagtattataattattactgtgatgctaaaatcagaatat

SEQ ID NO: 61533 - DNA, 369 bp, Glycine max
cttgatagctgagctcgataagacaagagtagcgacggtttatcttgttgtggcacccactagagttaggaaagaatgtgacgagctaatatatatcaacatgaccaccgatgaagcgctatagcgggaaatgataacggccagataggaagaatggagcatatacaagttctaacgggatttgttaggctacaattatgagctcaaacttataaaggctgagagagacaaattaaggatggagagcatgatgttagaggataagttaaggagttgtcagatgtgatcgaagccgtaccctaatcaaataaacatgaaaatgcagtaactaggaagtgatcctatgtcgtttcccaacgagcatgataa

SEQ ID NO: 61534 - DNA, 395 bp, Glycine max
  unsure (1)..(395): unsure at all n locations
tctttgtctttgaggcttttcgaataagaaaggatgggcctaaggtggtatgaagtggctgaaaattactanaatatttcttttcattttctttcttaccatcttctctacaataccattntatagctagtctatttgcggctgatgtaaatttcatgtaggacttttctctaaaagcataacaatgaaataaattacccaaggcataaaaagcccgaggttgaactcaagtatgctctcaatctgtctctctctacttcattgcacatatgctccattatattgtttcccttctatattttctatctaaatctaattgataatggaaaaccaaagattaaaataaattaccccattcaattccacattttccatttttaatatgacgattctta

SEQ ID NO: 61535 - DNA, 446 bp, Glycine max
  unsure (1)..(446): unsure at all n locations
tgtagaatggctagacatgatacatgtcagggtttggtttgtttcaaggataaaagggatgccccacattatttccatgacacanatgcaaaaatgatgaattggaaactttatgcaaaactggtcatgcatgcgcctatgcggacgctcaagtgtcaaatttttatggttaggtgatgctagggttcaggattcatttcctctaatttaaatcaacccaatgtttccaaaatatgttcttttatcaatttgtgcattcctccaagtccatttcgggcgtccagggaaatttttacagcattcacccttcaggtgtagacacgttttttcttcaaaaatcggntatgaatcaatgaatttntttcanagaanagttggaaatcatctcttttcanaagcatgtcggttnttagctagacaacttaatttctctttttccacctttt

SEQ ID NO: 61536 - DNA, 159 bp, Glycine max
aaagcgtacaacttaccgtaaatgaaaaaattgatctataatgtttctatgcctacttagaacactctgagcctattaattatactatcttttctatattattattgtatgaaaaagaactcctatttacttactgccaaagaataacagcatattttt

SEQ ID NO: 61537 - DNA, 330 bp, Glycine max
  unsure (1)..(330): unsure at all n locations
ttttgattcatgacactcatagagactagacttntcttatattgtgtaacatgataatcattgttctacaatcccatcagcatttgatttgataaaacctatactgattaactttgtaggaacattatttgaacattaccatcagacttattctcatatgttacgaacaagctttttatatggatacttatgataataacaatctaagtccaatacccattggtgataatgttgttatagtttttcaccgaaaccaaattgtctttatattaatagtcgtttctaacaacgacaacaattcaatatttctttgctttctttggaccattc

SEQ ID NO: 61538 - DNA, 408 bp, Glycine max
  unsure (1)..(408): unsure at all n locations
agctngtagaatggctagacatgatacatgttaggcttggtntggttcaagggtaaaagggatgtcccacattatttccatgacacaaatgcaaaaatgatgatttgganattntatgcaaaactggtcatgcatgcacctatgcggacactcaagtgtcanaattttatggtcatgtgatgctaaggcttaagaatttattcctctattttaaatcaacccaatgtttccaaaatatgttcttttatcaatttgtgcattcattcgagtccatttcgggcgtccggggaaatttcacagcattcacccttcaggtgtagacacgttttntttctcttcaaaaatcggtcatgatcaatgaattnttttttcgaagaagagttggaaatcatctcttttcaaaagcat

SEQ ID NO: 61539 - DNA, 473 bp, Glycine max
tgaccaatcccgacccaacccgggcatagtcggtctgtgttatcatgtgacgtacctaagcaggcgagctcctggcagtcaacagataaaaggaatacatgaccacagagcaaggatgcttgtggtggctggccagctgtgaattttgtgtaatatgtggattgtggcctctggtaatcgattaccaagggtgggtaattgattacaacgcttaaaattgaagacagggggctaagatggtctctggtaatcgattaccaaggggtgtaatcgattaccatgcttgaaaacgaggtcaggaagctagggaagcctctggtaatcgattaccaaggggtgtaatcgattaccaggcttaaaaagggaaatgggagatggtggaagcctctggtaatcgattaccagcttgtgtaatcgtatacacagaggaatgcgtcactagtcatcgattaccacgcatgtggtatctatta

SEQ ID NO: 61540 - DNA, 418 bp, Glycine max
  unsure (1)..(418): unsure at all n locations
acatgctctatttcatctcccactccaagtaggcctccggatcattctttcctttaaatggggaatgttgagtntaataccatcaattccgttttgtctaagaacaccatcattccctcttctcctcctttcttcttcattatgatctctattctccatttgatccaacctctcatggagcgcatcatctcgttgtttcattaacctctccaaatgttgcatcacagcttgcatttggaattgcgaaagccccactccatcattaggattagtacctgacatctcaaacaaacaaatcaaacgtaacaagacaattatagtttgtgtttgaatacctcacccactcaagtgtatcacacaattatggcttttctctaatgagacactcttgctctttaccactctaattccncttgag

SEQ ID NO: 61541 - DNA, 415 bp, Glycine max
  unsure (1)..(415): unsure at all n locations
gaattgagaataaaaatcagaagacatannagttctcttggtctagaagtcagatgcaaattcagtagaacagataaatatatgatgctctaatttacaaaacgaaataaaataaataaattgtctttcatgttgattgtaaaccttttgagtttggaaacttacacatcctggtgaagctgacaaatgcagtatatgtagctgaagacaaggcacgcaaaagatacattggcaaaactcggattgccctcattttccaattcatatccattgatcttgttgtcataatagcataacctacagcaatgacctgaaagttgaaaccatcttaagcaaaattcatttatataaacaccctcaataatcaataagaatatattaatttgtcagagaagaatatttaaattcaagtaaa

SEQ ID NO: 61542 - DNA, 445 bp, Glycine max
gcttaacctcatcatctctcacagtctttatatttgggagccaatccaatccttgtgtccggactctcagccacttatgatagccaccgatgatcccattactgcttcccctaagctctctgtcctttcttcacaccgcatcacatgccttgcgaattccttggataccttggcttgggtcactgaacccgtgtaatgaaaggcgtgatgctttcgtctaatggcgctcctctcatggggtagccaagctgtcttatggcgaggacaggattataatttatacaaccccttgctcccattaagggaacatttggaaatccttcgcatgaagatagaatcctgatccttcgcatgaagcaccttaggggctggtcataatactgggaaagggatgcaatcggttccatggagacttctaccctagctatgtcccatatcttaccat

SEQ ID NO: 61543 - DNA, 327 bp, Glycine max
  unsure (1)..(327): unsure at all n locations
atcgatgtgggtcctataagtaggcaaattgatcatcctactangacgactgagaaaactagggcaaatgaagagggtgagatagagggagaaacccatgctgtgactgccattcctatacgaccaagtttcccaccaaacccaacaatgtcattactcagtcaataacaaacctccttcttacccaccacccagttatccacaaaggccatccctatatcaaccacaaagcctgtctaccgcactttcaatgacgaagaccacctttagcacaaaccaaaaaaacaccaacaaaaaggaattttgcagcaaaaagcctgtatggtt

SEQ ID NO: 61544 - DNA, 223 bp, Glycine max
ctttcatcttgttcctcttctttggcgtaaaagaggttttctgactattggaagcttaatcctctgtttgattatccctgtggtacctgatgcaatatattttaatctacgcatgatgttttgtgtgtttctgcgtttcagctttcttacaggtgtttctcctctatacataatgctcgctcctcgggtcttatcctggaatccgttaatttatgtcttaact

SEQ ID NO: 61545 - DNA, 220 bp, Glycine max
tcttcttgatatcatacaaagtctcatgatcccgacttcgttgtggatgatgcatctatgaacatctattcattgggctcctaattaaagtggacaatggatgatatgccacaagctccttgcaatctattcttggttcttcctactctacggcgtgagattatgaatgacattctatttcgggggctcctaataaaactcgtgaatggatgataggata

SEQ ID NO: 61546 - DNA, 300 bp, Glycine max
cttgggtcttttatataaatagaagttctggactcatttcgttatctagaaaccatggggtggatccaagtgctccgatcatccatttgcatactcatgtgttggtggcatactcaccattgtttatttctttaggaatttcatcataactaataaaacaccaaggcacccctataatactcgatccagacaaatgtataatgaagacggcgtgcaggaacagatgaaggccaatctatcggccttaaaagatcaaatggcttccatctcggaggtcatgttaatactccagataaccat

SEQ ID NO: 61547 - DNA, 410 bp, Glycine max
  unsure (1)..(410): unsure at all n locations
tggtctttcattgatcaatcagaactagctctctttggataatattgaacttgacatggtactccacataaanatttcttttttatattattctttttgactactgtggtttggaagtggatcaaccctgttgctacagntgtttcttatcgtctaagatgaataatttatgtaacactgcaaaataattatagcattgtgtatgaaatcacacatatactagtggtataaggtggcaattttcacctctcaaacttgcttttaagaattgagtaagacctaaacctgaactctaatatggcttcaaaataacagttgttgttggctattgcgtcacatgttattaagctgttatcaaacctccccaaaagcctaattctcaaagccataactgaacatccatcttcaac

SEQ ID NO: 61548 - DNA, 422 bp, Glycine max
  unsure (1)..(422): unsure at all n locations
nggtcacctagaagaaggcgaagctttgtaccgggcattactttccatgaatcctgataattataggcgatctctgttgccacatatattttangtttaagtatctcgattgattagtcattttcacgtggttttttctctgatgttgntatttctttttgcacctttcttggttctcaacaaaattgctctgttcataaaagttccattctaattactcattgtgtttcaaatggtgagattgagatgaacgcatgtattctatggtatattctcataaaaaaattaccgaatagttcttgttgatgttttaaacatcggacctgtcattaaacttcctattctgctgtttatttaaacttattaaccttattgactgtatgttttgattgttatgccttcagaagcatgctgttctgtgt

SEQ ID NO: 61549 - DNA, 266 bp, Glycine max
ctttactccatttaattttctgcttttatgaagaaacttattatctgcattacttgtgctttacaaaataatgtgccttctgttgctatagaatgtttatggtaatgtagttttgtgagtcaaaatttaacttctaatcaaaacaaggtgtgttttgctaagtagacttctatacactagagtggatttttcaagaccccgtcccatttatctggttatgtgtgtaaagagcctgacctgcaatgtcgaatattatttttgttgtg

SEQ ID NO: 61550 - DNA, 404 bp, Glycine max
  unsure (1)..(404): unsure at all n locations
tatgaaatngagatgcccatttattcaccatntcctagttaaccatgcattaggtaccatgttcaattattttgtcttgttggtgtgtggtttttcttatttttagaaatgggtttatgatcccaacatggttggctcatggtgcctaacacatgcaactaagaatgtagtgtgaaatttcacgcttcccctcttttggttttttagaggaaaacacatggatgagcaaacatgataacaaatggtatgcaattntgtagatcaaaaagtttgttgaacgcatatgcatgatgatgccatgactcatgcaaaacttgaggctggaatatgataacggacaaatgcatgaacgatatgttcattatgatgtatgaagagatgcttatgcgatgcatgatatgaat

SEQ ID NO: 61551 - DNA, 429 bp, Glycine max
  unsure (1)..(429): unsure at all n locations
gtcacctgcggcatgcaactgacagccactgttagtatatatatactatatctatacattttatggcatatgaatgacagtatgaagtggcataaagtgcttagagagttccctcgcatgtgaaaaatttcaaaagaaaaggacttatataaaagggatatacaaccagattaatactttcaaagaaaagaatgtnttgtaagacattttcagacaatttaaantattttatttggctatattagtataaatcatgtctaattcatatattttttaatattatgttcttttttttcattttcttttgatatactttgtggtttaataacttgaattcaatatgatnttgtacattacttatacaaaattttataattgggttttttggtagtatttcactaggttttaaaacaattaattggttaagat

SEQ ID NO: 61552 - DNA, 390 bp, Glycine max
  unsure (1)..(390): unsure at all n locations
catctacacaggtaatgtacaactntgtaaattattataatgtggtaacanntttaagtttaacaattgagtatatgtttaagctctttgcaggtaacgaaagggcaatagtcttgtttctgctctttgagtctgctctcttgttggtactaatagggctcgtaagattctgctgtacattctgggcaaaagagaagcttaaagatcaaggccttggaagcttccttgacaagagagttagtacaaaattgtgttgtttgctcttgttcttctttcccttattctctcttcttatntattactcattgtttntaaaatcggaccagtctggtaactccaaaaattgacttttctctatactgatagaagcaggtcaaatcgacaaaaact

SEQ ID NO: 61553 - DNA, 481 bp, Glycine max
  unsure (1)..(481): unsure at all n locations
agcttctcgatatattgngcgcctgaacaatatcgaaacaagacccgaagacgcatacaagaactaaacatgatgttaacaaaaacgcagataacagaacaaggacaaaacacgaacctggacaaattacaaagaaatataatatgataggatataacctgtatcaagacccgaagctctgataccagatgatgtgaaacctgagtacgagcggatcgttagatacaggctacggaggtttggatgacgccacctccggtgaaggaagataagtcatggtagacgccacaaggattaccttgataagtctgataattggttcaacaaggaacccagagagaaactctcacccaattttatcaaatgcccaanagttnttttctattcaaaacagaaaccaatacttatagtgtagctgaacaaaaagataaaaatagacatggaccttctaaacagtgtgggccaaaattacaataaaaat

SEQ ID NO: 61554 - DNA, 211 bp, Glycine max
  unsure (1)..(211): unsure at all n locations
catagcgattgctacttgcttatcgccgncggtataatacgttctccaattttaattaatgtgagtaatctcgttataccaactacagtactgttcattcattntatactagaaattgacaaaatgtttaattataaagaaatgacatacatagcagatacataacttggataaataatatatactgtattacttaactatttatttttaa

SEQ ID NO: 61555 - DNA, 281 bp, Glycine max
  unsure (1)..(281): unsure at all n locations
gctctacataccacatgtcgggagtcatattgccatagcacaggacgcacctgactctgcgcacctattgcgatactctctagcctccaacataatcgcattgcagaagcacccatcttaacctttctcgtggcataaccaatacgcctggagctatcggcctttacaccaccagaccctgccgtatactgatgggntccggacggagcatatgatacttactcgccggtgctgcattaacaccacatatggtgcacatctcatgcttatcagctgagatg

SEQ ID NO: 61556 - DNA, 352 bp, Glycine max
  unsure (1)..(352): unsure at all n locations
ctctgaagtctgaactcttagaagaatagctcagactataacctagcgacataagaactaagaagagaagataactgattgtaggagtgttaaacatacaagaaattaatgagtatgtgtggaacactacaactcaaaagtcataaccattcagtaaatccagagagatataacattgaattcaattaacaatggagaaaggggaagttctcatcatcttacaataatntaatccttgattagaaagacgtactagaatccagcaatggtagaaacaactaatatccgttttgcagaaactttccaagatagtaactattaaggaagtgaaaatgcaaacttttccactact

SEQ ID NO: 61557 - DNA, 396 bp, Glycine max
  unsure (1)..(396): unsure at all n locations
attatagtaaatctcggtggataatatttcgtttattctgcattagtctattttagactgttatgtcgattgtattaaatgaattcaatttactacttccagatatctgataatattgtgttaattgcattaaatatttggatgaatcatgatatacaatagtagttctaagagaaaaatagatcaaatttaaatgggtaacccgttagtccaaaccattcatgaatgggttaagtttcaaaaaaaattatgaaagctaaattgaatcaaaccaatcaaacttgattgagttgggtcctgaatttggcaaanactgatctgaataggcccgcaaacacccctatctagatagtggaacatttactttaacaaaacaattgaagattatantttgta

SEQ ID NO: 61558 - DNA, 207 bp, Glycine max
aataaaaagtcttgtgtgtctcaaataatctaatgtagattaaattaaagtttgaaactctgtagtataccttattcatcaatggttaataagatctgaatgagaatcattaattcaaacctaatagtaccttagtcctttttttgcagccagctaggagaaaaacaataagtgtattctatatgcattcactatcactatatatag

SEQ ID NO: 61559 - DNA, 193 bp, Glycine max
tacaatcattacctaaagagagtaagcaatatagggagacacccacactcttgcttactaagtttgctctttctctttagccaatgtgacagttgacataaatatgaattctaattgaatgggtaacacaaaattgtcaattgaatcctcaccctcaataatccctatgtattcaaaaatattccactatcaa

SEQ ID NO: 61560 - DNA, 450 bp, Glycine max
  unsure (1)..(450): unsure at all n locations
attacataactctcaactacattttcttcataatgtatactctgcnaagcttggtgttgtacttcttaacatntatcatatagataaaatatggcttcaagtagagagagatacacatgggtgtatacgtaaagcgacaaccacaaaggtaaataattaagagttagcatgagcatacaagacaagagacaaagctgtgaatgcacgtgtaaaaataattactaattaatattccctccacttgtatcactcaacatattgcacattgcgcacatgtctaataagactgcaaaacaagatagatacacaacgtcagaagattcatttaccagccttcttagctgcacggagcaggagttcttctattatatgttgggctggatcttcttccggaaaatttccatgaagctctcacatgagacaccacttctcattgttagatattgatat

SEQ ID NO: 61561 - DNA, 419 bp, Glycine max
  unsure (1)..(419): unsure at all n locations
tgntgagatttccacgtctcttcagatcaaatgaaaagctgttattcccaagatatagnaatttgatgtgggagttacttgtgctaatggtgttgttcacttgtatggtgaatcttgtgaaaaaataagcttaaatgttttatatacctataatatttttctttttcagtttattacttagaaaatatttttattttattttactatctgatattcttaaaaattctatttttatacttgtagttaatttaagtttcttaagtaatgatgtaacacttaattaacttcttatatcatcacttaattaatgatgtaatattctattagcttatcacattattatttaacggatgcaagactataagtattcnaaataaaaatttaaaatattcagacgtaaactaaaaaaaatatcttta

SEQ ID NO: 61562 - DNA, 171 bp, Glycine max
  unsure (1)..(171): unsure at all n locations
taataaaccctatttagaaaaaaaagtgtcagaaccctaatttttgtgggaataattgatcagttaatcctaaacccttaaacggaagatggtatgtgtaccgattgcccagtaggcggtgtangccgaagatgagatcttcctcgtcggggcgatgtggccgctcttgac

SEQ ID NO: 61563 - DNA, 255 bp, Glycine max
ctctccttgccaaaaatcgcaagacaacgctaatcttttgggccctctctctctttccaaaaacaaggacaaccgctgaatctttgctcctttccttgcaaaatcaaatgacacagcgggaatctttgatcttccttcctatcaaaattcaaagacaccgctaaaatcttgtttccatccaaattcaagttaccctgaaactgtctaaccatgaggacatctgggacataaggacttacggtgtgacaaacaaag

SEQ ID NO: 61564 - DNA, 374 bp, Glycine max
accatgacccatattgtaactgaggtcatgcgacatggaagattcaggtgggtcaccagctcttgttggatgaaattgagggtgcttccgctatccaccagcaccatgacctggtggccgaaaagcgagcccaacatacgtagtgtttttggtgcgagctgacccgccaaagaatgaaaacttatttgggtcgggcacaggtcaagggagtccacttggcctggcgggtcggggggcgggtcattcaacactatatgagggtcagggttctcgtcctcttctgcgatcagaagataaaccctagaggcacaatggtggcctctatgaaatttctcgtcgtagctgaagtagatgtcgccctcccgcgggatgcg

SEQ ID NO: 61565 - DNA, 391 bp, Glycine max
gtgtctactatcatcgtcatcgttatttcgtcattgaggtgccacttgagctgtcaagttcttcccctttgggcatattctttgaaagatctgtgccctctttttgcacatgttttgtagttgcatcctattcgaagccattatactgacactgcctaacgaaggcaaccattatgtccttccaagaatggactcgggaaggttccatgttagtgtaccaggtaacagctaccccagttagactttcttggaaggaatgtatcaacaattgctcatcttttgcgtatgcacgcatcctccgacaatacatctttagatggttcttgaggcgcgtaggtcactcgtactcgccaaagactgacaccttgaacttgggaggggtgatgatatt

SEQ ID NO: 61566 - DNA, 261 bp, Glycine max
tagcgagcgtgcgctgagcacaacacttatgggctaagtgcgaggaacactctggaagaagatgagctgtacaggtttgctaagcgtaccgcttcatctcactaagcgcactgcttcagttcatccactaagtgagaaaggcacgcgctaagccaaaattcactaatgtgcgctaagcggtccataattgcgctaagcgcacaagcacaaacaaggccacctatttaagcctagaatcagattttatatagggagtttgga

SEQ ID NO: 61567 - DNA, 285 bp, Glycine max
  unsure (1)..(285): unsure at all n locations
aactaagcttctaaagaagccacaggaagcttctgaagaagacctcttttttatcttctcaaggaagctacatgaagctacctcgataataatactgcccaaccttcggtaactgtcggatcttctcgaaatttggtctgcagcttcactagacacttttccacgatctaaccgttgggatctttgaaaagatgtttggagtgtgcgtgatgttatcgttgtccagagcattactcactngagtgtttcggcctttgctttcgtgtatcttatgaaaaatgccat

SEQ ID NO: 61568 - DNA, 237 bp, Glycine max
  unsure (1)..(237): unsure at all n locations
cagcatgcagcttaccaactatncaacttttgtttttataagaagtgcataaggatgaacatgagggactccttcattgatgagtaacaatgcattttgagaatccgactcatgatgatggaagtgtagccagtatcatacgcgatgcaaagcctatgataaatagcaaacacattttcattcaaaataatatttaatgtaaatccaccattatcattactagcgcactcctactgc

SEQ ID NO: 61569 - DNA, 420 bp, Glycine max
  unsure (1)..(420): unsure at all n locations
tcaaatgtggactcaacgggctggatactctgttggatgacgatctcatataggtggggtattcattaaatgtggaaattcaccaatttgcgattttcaccgggtaagttcacgatctttatcttgcattctttttcaattttgtatgtttatatgctcattttggttgatatatttcgtatcgagttacgatgaattggggttcatgtttacacatcatttgctatgtaactcacantttatttgtctacgttttgttattggtctcttttataatgtaatcataaactgtactctttggacatgccgaggatattaaacagatataatagttgatatctacaacaatggaaatctggattagactttaacttgagattgagatcatggcaagggttgtgttattggcttgggcatata

SEQ ID NO: 61570 - DNA, 470 bp, Glycine max
  unsure (1)..(470): unsure at all n locations
catcagaccacttncagggggctttatcttcttcacatggacttgatggggcctatgcaagttgaaagccttggaggatagaggtatgcctatgttgttgtggatgatttctccagatttacctgagtcaactttatcagagagaaatcagacacctttgaagtattcaaggagttgagtctaagacttcaaagagaaaaagactgtgtcatcaagagaatcaggagtgaccatggcagagagtttgaaaacagcaagtttactgaattctgcacatctgaaggcatcactcatgagttctctgcagccattacaccacaacaaaatggcatagttgaaaggaaaaacacgactntgctagaagctgctanggtcatgcttcatgccanagaacttccctataatctctgtgctgaagccatgaacacagcgtgctacatccacaacagagtcacacttagaagagggac

SEQ ID NO: 61571 - DNA, 127 bp, Glycine max
cttcatttttctccatgtatctcctcacatgtcttgtctaaatgttgtaacatgattctttagagttccaccgataaacttgctatagaagtagattgatttctatgttcaatttcttgtcttgtct

SEQ ID NO: 61572 - DNA, 123 bp, Glycine max
tgcgagattataccaacccaaatcccgtggttcctcggtgctacacagctgttatgccgcattgtcttgccaaaccattcgggctcgaaccggacccaacatcaccgggccaccatattgccg

SEQ ID NO: 61573 - DNA, 419 bp, Glycine max
  unsure (1)..(419): unsure at all n locations
tttagatgctaatgttcgaaactgatctagagaagctcagttatgcttgacgagatctgctcattaagttgaatttcaaaattgatttacagaagcacaagtgctctcaacaacctaagatatacttgacaagagatgctgtgaaatatcataatggtcgtataattaaaattgagaatcggtgattcaaagtatttatattatgcataatgaatacatataatcaagtcataattaattaattaattaagacctaacaatgagtaatcagaattatctatattagtaataatgaatatatataattagggataccttattgtgtggtgtgaacccaagntatgactgatggcaccattctgactcgtgctttaatggtctgcacagtaccctatgcgtgaagaagctacacatgtatc

SEQ ID NO: 61574 - DNA, 171 bp, Glycine max
gcttccattctcaactacgagcgtctcgatattctatgggacacaatcggacatccgattcaaaaggtattgtcgcttgaattcgctcagagcttcagttttcaattaccagcgccttgatatattacgggtttcaatcggacatccgagtcaaaagttattgtcgtttga

SEQ ID NO: 61575 - DNA, 200 bp, Glycine max
agcctgcaacacacataatgtctggtcttgtttctgacatatacaacaaactaccaattatacttctataaacaaaatcatctgctttatcaataccatcgttcattgataacttttcattcacaacaattggagtggcaacaggcttgcattgctccatgcaaaacttcaatatcaccaaagcatatttcttttgtgaa

SEQ ID NO: 61576 - DNA, 129 bp, Glycine max
gatggcaccacatgagagggtacttccacaccattgttccacagccgttccacttctactattgcctgcaaccataatcactctcattacactcatgcccatattcgagctctatctgcgttttcgtct

SEQ ID NO: 61577 - DNA, 140 bp, Glycine max
gagagtttgagagattctgttgtgcgaagacctgcacagaactgagcttgaagaggaagccgttctgagagcttgatatgagtatatgagtgattgtgatgttctagaggtggaggagccatcctcaccactcgtatttc

SEQ ID NO: 61578 - DNA, 272 bp, Glycine max
atcgtctttacaatctttagatatgggagccaatccaatccttgtgtccggactctcagccacttatgatagccgccgatgatcccattactgcttcccctaagctctctgtcctttcttcacaccgcatcacatgccttgcgaactccttggagtacctttgcattggggtcattgaaaccccgtggtgaggacaggattataatttatacaaccccttgttcccattaagggaatatttggaaatctttcgcatgaaaatagaatcctga

SEQ ID NO: 61579 - DNA, 246 bp, Glycine max
  unsure (1)..(246): unsure at all n locations
catgcaagcttatgcgcatacttcttcacgaacgttttctttgttctagacattcttataactaagaaaaatgcactcatatacaatcaaggcaccttcgttacctaatttatatacatgtacttccaaggtgtatttgttacctacatcacacacattttcttngctaaattcaacatacatgcatactctaagcactttggctatcaagatttgcatacgggcacatcttggtatttctaatac

SEQ ID NO: 61580 - DNA, 303 bp, Glycine max
ttcttatgtggtggcttattactcattggttaaatctttgtgttctgtttaccccctcatataattgtgtctttctatttaataatagttaataatgcattaacagtagttagttacatattttttttaattactttaaaataaaattaatcatatgttacgtagtaattaatcatcatatatctttcttagggaaaatcaccatatatctaagtaaacgatagaatgatatatccaactttaatcattatactcgattatatattcattgccatcatcaaacactgttgcctcgcgcgtaag

SEQ ID NO: 61581 - DNA, 339 bp, Glycine max
  unsure (1)..(339): unsure at all n locations
tataaaactcagctagactgatagaggttaagagtcaaatggagctacttattctttatcttgcacatggaaanttcagctttacatttttgggcctagttttgtgtttattgacccaatagtgtttntaattggggagctactattagaacaaacaccttttctattcacattaccaatatgtgctttatttttttttctttcttgaaaatacatttttcacgaaaacatgattacgctgacaaaatacataatagaattatgtttccattgtttaaaaaggggtgctaaaaaaatgcacaaaacaaacattgacaaaatacataatagaattatgtt

SEQ ID NO: 61582 - DNA, 129 bp, Glycine max
agaactcatctctagagtcatcaatagagggaaacttcaactgggatcttagtatacttcttgaagaaataatcccaaaatgcttccacctctagggctctctatcagcatgagcttgatcatgaagag

SEQ ID NO: 61583 - DNA, 266 bp, Glycine max
  unsure (1)..(266): unsure at all n locations
acgcatcaacaagaatcaagccaaggatattgtgcaagcaatcaatggggcaaaacacaccatatggttatgatgatggatggctcaaattctcacataggtaaactcatcactttcaaattgagctttcaaaactatcatgacatgtagagaagaatcattgatttcaagtcacaaaatgtcaagaacttttattttcaaaacaattacccatttcttgaacatatcctataatncaaagaaaaacatgcaaaatcgtacgtgca

SEQ ID NO: 61584 - DNA, 199 bp, Glycine max
  unsure (1)..(199): unsure at all n locations
tactcagcttatatcgctgctaaatcagncacaattttgtagtctctgtatagctaagctataaatannattaaatttcacaaatagttgttaatagaagcatagtaaaaagttggcagacaataaagatactgtgcagtgtanggctctgaggtatctattggtgtcttttgtcatgaccttgtagcaaggaaaaatg

SEQ ID NO: 61585 - DNA, 211 bp, Glycine max
aacaactctccctaatatccataatgctcaagaagttatgggattagtggaagagcgctctcaaacagttgataagactattgctgggacattaatcagtacattggccaccatgaagtttgatggttcacgtactatgtttgaacatgtcattgagatgacacacattgcaacaagattaaagaccttgtgaataactgtgaatgagaac

SEQ ID NO: 61586 - DNA, 194 bp, Glycine max
tgctagccgcggctatatgagacatcttgccaaacaaagtcaggttagccataactcgcctgtgctttatcttccatgccatatgtaacaaagccgttgatcctatcaagtttgatgagctggaaaataaggccgctattatactgcgccagttggagatgtatattccccctgctttctttgacatcatgatt

SEQ ID NO: 61587 - DNA, 346 bp, Glycine max
  unsure (1)..(346): unsure at all n locations
agcttctaataagatactaaactcgatttacctgccttctcgatggaagcttatcatttatgtcagacacttagcactgggccgggatngtatgcttgttgggtataccttctagaacaataatttttaaaaatataataaaatatgaatcattcgattatcttttgtattgttattcaattttgataaaacctagcataatgcacttttataatatctttatatagatttacgattgaattgataaagagtatattttatataaagatattgaatggctctataatgattgatgaagttatagtgatatcattcgatcaacttctatatgacttacgtgaaatac

SEQ ID NO: 61588 - DNA, 370 bp, Glycine max
tcatacaaggatttccttaatctaagtctttcttcttgaaccacaatctcaaaacctgtcggttggatgacatagacttccttgtgtagtggtccattcaacaaagcagacttcacatgtgattggtgcatatgaccacctcttattatagctatagctacaactaatcttattgtttgtatccttgccacaaatgcatcaacctcacctatcaaaccgagatctttgacaagatcttttgtcaccctctaatctttgtttgatcacctcaccatttggatcactctcactttattaacctacttgaatgctatgactttaccttcactttataacccactcttaatataccacttcatagtcggagctc

SEQ ID NO: 61589 - DNA, 182 bp, Glycine max
ctcatcttggtggtgttatcttttcttccatggcttattccctagtggatggcaccgcctcttacctcttctcctttgtcttccgctgcatctccatggtggaaaatcaccattaaaggacctcattgaagctcaaaagatccaacttccatataagccccacaagcaagctttcatcatgt

SEQ ID NO: 61590 - DNA, 333 bp, Glycine max
tatttggctagtggctaaaagaaaaaggtctaatatatcttattaaacgcatgcgcaacaaggaatgaccagagaagccaggaaaaacctagagtaatctagcacgagggtgaaatcacacatataagaacatgaatggaataatgcaatccatccacaaaatcccaaaatactcacaaggaagtatttcatcacacatgatccacctcataatgtcaagcctatttatcacttctacaattgcaacaattgtttcacatcaagcatgaaacctcttaactaagaatgatacatctgtcacaatttatacaagctagaaattctatgaaaaat

SEQ ID NO: 61591 - DNA, 203 bp, Glycine max
  unsure (1)..(203): unsure at all n locations
accctgaaggaatcntcttttcgtaatgatgttatgatataattatctaatcgaagaattgggtttggtcaacgcgtatatgaactgaccttaatgcagtatatacactgttacgctggttaattaaattttcaaaaagggatatgttacacttaatacatatctttatcaagttatattccttgcttcattacacctgctct

SEQ ID NO: 61592 - DNA, 239 bp, Glycine max
  unsure (1)..(239): unsure at all n locations
tgatctataaagtttttttggttacttcatgccctttatgttttttttttcaactttagtccctgtaagaattacaaatggatatagaattctttggcccaccatcgactctacaccacaggcgctgccatactcccaccataatggggatgttggcatgtccccttcgccgccgaatatcaatgnatgtggcataacccttatgcccccgtctctgattttttagagaaaaatgttgg

SEQ ID NO: 61593 - DNA, 197 bp, Glycine max
agcttaactacttatttttatgatgaagagatattatctagaattatttaaatccttctatggtattctcctaacaatcatcttatataacattactaaaaaaacatagttaaggaggggaaaaaagaatatgttttatttatctgctaaatgctctaattattaacgcattaaactatacagcacatcacgtgcta

SEQ ID NO: 61594 - DNA, 346 bp, Glycine max
  unsure (1)..(346): unsure at all n locations
ctaagcttggatggctctntgttatatntatctattattaaaattaatgtctatgtcttatataagaggttacaagtcgaacacaactgataaattggaaggttggatgatcatggtgttgcacactaagtaatttatttatttatatatttagaaacacatttatgtatatctctgtgcaattatctctctttatgatggaaaagaaagggaaaactagttagctgtaacagttgtcacttatatgtatattcaccatcatcataacaaatgattcttgagatattnttgtattgagacatccatgtgaatatntattcttagaatttggacttaggggctaata

SEQ ID NO: 61595 - DNA, 444 bp, Glycine max
  unsure (1)..(444): unsure at all n locations
tctatgaagaaattggtggacgcctaccactgagatgttctttttttcttcaatggntgggtctacattcgtctccgccctcatcaccagacttcagtcgtgcctacttatactaaactatccaagcgtttctatggatctctccaggtcaccaaacatattggcccagtggcctattggctcatgcttcttgaatcctccaagattcaccatgttttcaatggttccctgttgaaacgccatctcagcccagaaccctccctttcaagctctctacctctgacaagcttgggcaacaatcctgtcattgaaccactntccatcatcanttggaaatgagactcatctatgtccncttcacgcaagttgtttttggtccaatagttgggtatggctcccaaggataccacttgggagattgggatcaacttcttgctgcatatg

SEQ ID NO: 61596 - DNA, 157 bp, Glycine max
  unsure (1)..(157): unsure at all n locations
ttcttcacacatacttcttcattaatgaatccattcaaaaaagcactcttgacatccatctggtatatcttgatatctttgcgtgtagcataggccaaaagtttctaatggcccttactcttgctactgatgcanacggtttccattgccgatccct

SEQ ID NO: 61597 - DNA, 484 bp, Glycine max
  unsure (1)..(484): unsure at all n locations
tactcaagcttgggaaaatccttgcacaaagagtcatcagtagcacttaatattatattatccacatatagncggatgatcaggaattgactaccataatctttgcaaaatagaatagtatatacctttccttatataaagccattctcagttaaaaatgaatgtaacttttcataccaagctcgaggagcttgctttaaaccatacgaagctgtaattaagtttgaaaacatgatgatggtagatataactcttgaactcgaggggttgtatgacatagacatcttccttgattagtccattgagtaatgtgatttttatgtccatttgatacaacatcataccatggtgagcaacaaatgatagtaaaatgcatattggctttagacgagtaataggaccacaatttttagtatagactataccttcttgttgtgagaacctttgctacaagcctagcctgatcctcacaatttacatgttc

SEQ ID NO: 61598 - DNA, 272 bp, Glycine max
acagtccgcattcataggcggaagacacttgttgcacagtgtattgatagccatcgaaaccgtggaggaagcaaagaggcgtcataagccatgcttggtgttcaaagtagactatgaaagagcatacaactccgtctcgtggggtttcctatcatatatgctgaggagattaggcttctgcccccagtggatttgttggattgagggttgtcttagctcagcctcggtttctgtattggtaaatggcagccccacaaataaattcacttcac

SEQ ID NO: 61599 - DNA, 321 bp, Glycine max
  unsure (1)..(321): unsure at all n locations
tgtcagttataataataccgtgttgagacatcaagtcatactttataccataataacaagggttttnttccaaacatcagtcacttggaggatatttctagtgcaatcaaatagggtcaaaagtcacaacaacaataatctctcaaccaaaacatcaagataaaacaataggataatgcataataattttaagataaaagcttctcataaactagatacttaagtcaagagtggatcccgtcatgcagtatgtagtaaattccaattaacactaggtggatttattaaacatcatcatacattctgtttaaaagccaccta

SEQ ID NO: 61600 - DNA, 211 bp, Glycine max
ctgcaacttggattcaatccattcttttttttatcagcttctcggctaatcataggggcttctttggccacatctgggatgtccaccttgatgacactccagtctgttcaggattgagaagcacattctgcttcgatcatagtggtcatcaaatggggctgtcctggcctcttctctcatgtcacaaattctaccaatccccctcaattct

SEQ ID NO: 61601 - DNA, 176 bp, Glycine max
  unsure (1)..(176): unsure at all n locations
tttgaaatgcgatcaatccatgttgctatggctggacttagttcacgaaattttttctaaatttgataaaaaaaaatgtgcttgcaaggagtgtangctgcataaaattagttatccattaccaatttagtatatatggaagttaaataaacgtgaccattaaatatgaaatctta

SEQ ID NO: 61602 - DNA, 400 bp, Glycine max
actaaatatgtatggtgatgcagatctattcaagcagaaacattctaagacatgttaacaagcactgaaaactaatcatgtttgattaaactgtggaagaaaatcacaattttgtcattgcataatgcatatttattgaaaagagagagagagagagttaaacagacaaatcttagtggcaaatatgtaacaaactgacacagtaagcacagaacaaatccctgagtctgagagtggagctagaaaggcaaatctttatggaaaggaaggacttgtgggactgagccggtgagaataaagttctatgttcttattagaagggaacctagagaatgaacaactctttgatagaatgaggaccaagatgagagtgacttcttttgttacacgaatgtctgac

SEQ ID NO: 61603 - DNA, 162 bp, Glycine max
ttaagtgcatacaaattctctcagatcctcattcataaaaggcacaatggccaaatcttaaacccatccccaaacacactgatttgaccctaatgctgttgccaagaaatatgccctaaattacataaagttgtattagctcctaacggcaaaacgtattaa

SEQ ID NO: 61604 - DNA, 197 bp, Glycine max
  unsure (1)..(197): unsure at all n locations
acagaaagagtgatgattatcagaaagtgtttgtcagaggaaaatgtgttagattctcccctgctgtaatcaacaaatacctgngcagacccactgaaggagtggtggatattgcttgttctgagcatcagattgccaaggaaatcactgccaaacgagtccagcattggccaaagaaagggaagctttctgcatgg

SEQ ID NO: 61605 - DNA, 481 bp, Glycine max
  unsure (1)..(481): unsure at all n locations
cactattactaatgaagcaagtatacttttacatctttgacttgataagatncacaatgttcaccaggcctctgaagtataaaaatattaccattggaagcagtgaaatttaaagtttaataaatgataaagttactttgtgtacctgtggacagtatttttagcatgtcaattttccaagtcctgacaaaaatttgtgagtacctatggagccaccaacaactgataacaatagaaatagatactcacttatttcaatttccacaacaagattncaaacatggaaaaggaaatctatttatctgcattaattgcttagcattgtctttagatttggcatcatatgagaaaagagttacctctttcatagcacacatttcaacatgttgcctacacatgacaacatttgaaccaaacaatgtataacatgtatacactaatggatntagaacttganaaacatgactctatnggtttacat

SEQ ID NO: 61606 - DNA, 162 bp, Glycine max
actcgtacagggaaattgatagggtgaaagaaggtacactcaccaccactattagttttggaatgtagagaagatcttgtatcttatcttttgtataatatgaatattgcagatattcgagcacaagggaaaagaatggtgtatatatttctcatgaaagat

SEQ ID NO: 61607 - DNA, 82 bp, Glycine max
gaactagcttctgcaaattctggagctcttggaacttcttttgtgagctactcccccctctatactaactcactcttggagc

SEQ ID NO: 61608 - DNA, 174 bp, Glycine max
  unsure (1)..(174): unsure at all n locations
acactttgttgtgcgccctctctttagaataatatactaaggtccacanctacagaagtgctaaacaaaaatgggacaaattagctttgacatatgaaggatcaccacaagttaaatgcaacaagctcaacttgctgacatataagtatgaactcttcactatggaagatggcg

SEQ ID NO: 61609 - DNA, 216 bp, Glycine max
gcagcatgcagcttctaagaggtgacttaatatgatagcgtgtgtgtactaactctagcttctcaagaagttttctcacagaagcttctcaaggaagttttctcaagatagcttctcaaggaagctacctagtctataaatagaagcatgtgtaacacttcgtgtaactctgatgaatgacagtcttatgagacacacttctatgttgcccttttc

SEQ ID NO: 61610 - DNA, 223 bp, Glycine max
atgtatatttcacaggatgtgatattcatgagttggcttttccttttcctaagttgtgtggagaagcaaactcaatatcctccactactactgctattgtgtcatcctctcaacagctcttaattgctttttctacacattgtagaagcaaatgactttggtgttctgatgatgatcatgatgatttaattcaaatgatgaaaatgggctcttaaagtttaaa

SEQ ID NO: 61611 - DNA, 223 bp, Glycine max
  unsure (1)..(223): unsure at all n locations
acctgcggcatgcaagcttgcaagcaaataatgatgagatacacaattccatgatgagactcaaataattccaagaaaaggatcttgtgttgatggttcanagctatgcatggaagagatttcatgagggtaagcacatggaaaattgggaaaaacctttcaaaatcaagtataatataaagaatggagcattcaagttagagtaattatctagggaaaacat

SEQ ID NO: 61612 - DNA, 368 bp, Glycine max
  unsure (1)..(368): unsure at all n locations
tactaaatgccgattcaaaagctacagtggagatcagaatagctaacacattccttgcaattgcttgtagtgttggatactttaacttattcaatttccaccacattaagatatcaaaatctgaacttcttggtaaaacttcctcctctaagtaatgatctaactntgttttcatagatgaagttcttgcccttttctttctttcaatgtatctatcataatcacacaatttactctttccatcactaaccacatcttgtgattcaaaagaactagtagaatcttaatgctttttggcttgatattccgaaaccaaatcataacacaagtttcggatcctattaacttgtgaaaaaaaaaaatgggat

SEQ ID NO: 61613 - DNA, 365 bp, Glycine max
  unsure (1)..(365): unsure at all n locations
atgaacatcaccatagaacagggcaagacatttatatgttcatatagagaagcgccacatggctgaggatagcttcttttcctcatttaccgtgaaaagcacatgtgtctcgctaaaattctgtgtatctgctctcatagtcatttcaaaatgaaacagtgaatttgctatctcttctacacaagcggcggagcatgttcgcgggatggcaaacctgccaatgcgggaatatgtccccaatgcctacaatgggattgatacgtactgcattacagagcccctcggagattgagctggaatatgtgcctttaactntacagcaacgataccattgtgggtatgtcgttcatgctagaccttctgat

SEQ ID NO: 61614 - DNA, 186 bp, Glycine max
  unsure (1)..(186): unsure at all n locations
gggtgagtcccgtctatgtagtcccgaaaaaaccggccttaccgtgataaaaaatgagaaggaggagctggttcctactcgggtgcaaaacagttggagagtctgcattgactatangaaactggaccaggttacaaaaaaggaccatttgtctatgccattcattgacctaatgcttgactgctc

SEQ ID NO: 61615 - DNA, 295 bp, Glycine max
  unsure (1)..(295): unsure at all n locations
ctnccactatggagagctaaatcctctggtggntctttcctttatgtacatgatgtaaatacttgtatatctatttaatgatgttttatgtgttctctgtgctatcagtacttcatttcagcatgcttttgccttgatcacgtagatgcatgctttgttaggatcattcaatagtggaaactggtcaaattcttagaacttcataggacagggttagtttatcgtattatcaagaatcggggtacggtaacctagtttgttatatgttttttttaatgcggttctcgtcgagttt

SEQ ID NO: 61616 - DNA, 250 bp, Glycine max
tcttcctctccatcattgggggtgctacttgagctgccagatccctccacctttgggcgtattcttcgaaagattcatgctccttcatacacatgttccatagctgcattctatctggagccatattagaattgtactgatactgcctaatgaagacaaccatttcgtctttccaggaatggacccgggaaggttccagattagtatactaagtgacggctgcaccagtaagactctcttagaagaaatg

SEQ ID NO: 61617 - DNA, 209 bp, Glycine max
  unsure (1)..(209): unsure at all n locations
gcctctagggcttgtacctcatcactttcttcctaagctntaacctcatcatctctcatagtctttagatttgggagccaatccaatccttgtgtccggtctcttagccgcttatgatagccgccgatgatcccattactacttcccctaagctctctgtcctttcttcacgccgcatcccatgccttgcgaactccttggagtaccct

SEQ ID NO: 61618 - DNA, 284 bp, Glycine max
  unsure (1)..(284): unsure at all n locations
ctaggtgtctcattgactccagattgttgtaactattgacactcatctgtatggtgatctgcagaagaacatataccacagactcttgcgacaggtgcagatgcagatntctgattcatggcaagaagagttactatgttgaccaaggcatcaagatttcccttaagctttttattctcagtagatgaagatgaatccgcggccacctcatggactcctctaaagacaacagcatcacttttgcactgaattgttgggagttggaagccatcttctaattaaat

SEQ ID NO: 61619 - DNA, 134 bp, Glycine max
cactgagcagcagccggccaaaatctttgataaaagtcagaacagaatagggaacgacaagggaatcaaaaaccgcagagcacaccaaaacaaagaggaccgagcccaaatacaacacaacatggggacagaga

SEQ ID NO: 61620 - DNA, 437 bp, Glycine max
  unsure (1)..(437): unsure at all n locations
ccctatactgttcccgtatattggnacattgcaattacgcttgatacttccctccctcctgaggccccacccacacacaaaanaacctttttttgttgattgattntgttcacttttatcttctatttcactttgccttgtcgcaaaatcttttgttccccttcgtttctgtatctctgtggatataatcttgagctaattcataacaggagtagttactagaaaattaatgaaaaatgattgaagtatggaaggcactgtgtcgcaagagtattcgaaattcctgatttcttactttatctgtgttggaatattcctatggtcctaccttaccttccaacaccctgaacttaagtgaagaaataaaataaatacatgtagagattctgtcacgggtggttagtatattcttacgaattctttaaaataatataaaa

SEQ ID NO: 61621 - DNA, 214 bp, Glycine max
  unsure (1)..(214): unsure at all n locations
tacccatcacatgtggttctatgtggcggtcgggcgatggtgcacaacaagttttccacatccacaatgcacgcataaacccaccatcccctgtngcccacctccaactgaactcacgtactcccacgtagcccatatcctcgtgtctctcaacatcgggtccccatcaatcctcccaagcttncacaacatccaaagcaaacaacattcaaac

SEQ ID NO: 61622 - DNA, 316 bp, Glycine max
  unsure (1)..(316): unsure at all n locations
ctcanaatatgttctattaatggtgcctattttataccaatcctagttctgaaatttcaattgaaaattatggtgaaagcaagtgccaaaaatagaggtttcttgggtcttcttttttagtttttctactctactctagagccatctangtttctctttgaatcctagcttgcttttttgtgcttttcattgctttaattgttgaataatcctttaaaatttgtcttgttaaaactctattggtttagctctcatttcattttttttgtctctggttattgcttgtctctttgttccttgcttgtgagtgccatct

SEQ ID NO: 61623 - DNA, 500 bp, Glycine max
  unsure (1)..(500): unsure at all n locations
tcttagcttcggattatgcaactgagtttgtagctacctcatgttctcttctaatgactataacatcatttctggcgctaaactgctgggagttgtgaaaccatcttctcaattaaattctggcttcagcaggagtcatgtctccaagggctccaccactggaagcatctatcatacttctctccatattatngagtccttcataaaaatattggagaagctactccgaaatctaatggtgagggcaactggcacatagtttttttaaatctctcccagtattcatacacgctctctccactgagttgtctaatacctgagatatccttcctgatggctgtggtcctagaagcagggaaaatattttctaagaatagtctcttaaggtcatcccagctcgtgatggaccttggagcaaggtagtacaaccagtcctttgccactttcctctaagaatgangaaaagcctncagaaatatgtgatcctcttggatatctgg

SEQ ID NO: 61624 - DNA, 136 bp, Glycine max
gctcacacagaacaatccacaaagtgatataactcattttagaatctcactccaagttaccttaatagttttgagcaaagcagcatggtgcctgctaaggagagacaccgtctttctgtacatgttccgtatcaac

SEQ ID NO: 61625 - DNA, 302 bp, Glycine max
atgtgaaacacaagccagaaatatccctctcagtaagctaaaaggcacactccttcaaattgattttagttttgcacccgtgcttttcctaatggaagaatttgatataatgaccaactcacatatataattttttagcataagtatcaattaacaacttaatgtgattatttacgtgaactctacatgacttggctcttgtgaataagatgtcctgtgttgcatttatttcatggatgatcaagttgttctaatgaaagtaaactagaatatggcattctcttgagtagtacaagtttaaa

SEQ ID NO: 61626 - DNA, 197 bp, Glycine max
caccgcggctgcaactgacctaactccttttcttcgatctatgtataatgaaaagtcgataatgagtgtacggaaccacaaaaataaagactcactcaaagatggttctttgtaaaactgatgttgagtatctaatatcaagaatgattttgacaaatatcgtctctgataatatgttttaaagattgtcttgtaag

SEQ ID NO: 61627 - DNA, 351 bp, Glycine max
ctcagcttctgcggcctggcacggctggagcgggatggtttgtttgtttagacactgatggaagcatccattatcaatgtcgtggaacaatgcagagacatcatcaaagagcttggcacgaacttcacgccccaagagacatctactggctgtcaagatgatcagatgctcaagcccatacttctaatcaacctcaccacttggtccccactttgagaaatagtcctgcatattgagcttgtgtttgggaaagaacagacttcaatgacaattgtggttacaaccaacgataaattacaaggaagagttactattaacaactaaagaaacatgaacgccggtttgagcctt

SEQ ID NO: 61628 - DNA, 276 bp, Glycine max
ttgaccaatccctacccaccccggcatagtcggtcagtgagaacctgtgatgtacctaagcaggcgagctccctggcgtctacagataaaaaggaaacaagaccacacagcactgaggcttgtggtggctggccagctgtgaaatttgtgtgatatgtggagtatggcctctggtaatcgattaccaacggtgggtaatcgactacaatgcttataaatgaagacaggagactaggatggtctctggttatcgattaccaccgcgtgaattcatta

SEQ ID NO: 61629 - DNA, 226 bp, Glycine max
  unsure (1)..(226): unsure at all n locations
gatccttgagtcacctgaggcatgcaagctngccgcccagctcgcccaggcgagcattgttgcttctctccagaagcaacaaccttctggaggaatcttctggagggcccaagtgggcctggttgctattngcacccccctntttactaaatgcacccccttctatnttttggtaattctttttccgtaacgttacgaaacttcacgaatttcgtaatgatgctta

SEQ ID NO: 61630 - DNA, 295 bp, Glycine max
  unsure (1)..(295): unsure at all n locations
gtgcgtcacgtttaatacccagctcgatggtggttctagcctttgatggcactcngccggaagtgatgggggaaatcgacattcccatttagataggcccccacacttgccatgtggtgtttcaagtaatggatataaatcccgcctataattgcctcttgtgaagacccgtgattcatgccctgggagtggttccttcaacgcttcaacagaaataaagttcgcagtggtggacttttaatgatagtgtcgggtgaagaggactgttatgagctgccctcctcacaccatacta

SEQ ID NO: 61631 - DNA, 266 bp, Glycine max
  unsure (1)..(266): unsure at all n locations
gcttgagggtgcgtagcccaccatctnnnctttattttagtatcgataatgtgtctaccatcacgattatcgtctccctttccatcattgggggtaccacttgggccgccagatccctccaccttttaggcgtgttctttgaaagatccgtccccctttttgcaaatgttctatagttgcatcctatccggaaccatatcaaaattgtactgatactgcctaacaaaggcaaccattatgtcctttcaagaatggactctggaaga

SEQ ID NO: 61632 - DNA, 470 bp, Glycine max
  unsure (1)..(470): unsure at all n locations
ctcatttatttacaaaaagaagtcatatctagtcaaggtctgagagaccatacagtttctaacgatttctaattttgtgggccattaagtctatcatatgctgacaatagccgagaagcccatgaatctcttcgngggcggagtangtgtctgccatcgccttgggccttgctaacaatcggngaaagtcttgactcccgtccagggtaagagcaaaccgatccatccacatggttgcctcttggtgtaaagagtcgatcacccttcctctagcctctttttccgcgtatacttgggcatactcatccgcgattctatgctcgtgggccgtggctagacctaactcttcttggtacttggcgatgatagctaacatgttggtctctgtctcgcataaacgctgagacnaagcttcttttgaccttgaacangcaatcaactcctctttcagaaccatgctatgtgctcgc

SEQ ID NO: 61633 - DNA, 203 bp, Glycine max
  unsure (1)..(203): unsure at all n locations
agcttggaatcattacacacatattgaattgattttctatgagantttcagaanatattctcaattgtctcatcttttcanttggctcctgaatggctatcaaaggcctatatatatgtgactcgagacacgaatttgctaagagtttntcagaacaaaaaggtcttatcctcttaaaaagcaaaatcggtttatcctcttac

SEQ ID NO: 61634 - DNA, 355 bp, Glycine max
  unsure (1)..(355): unsure at all n locations
atgatgatctttntctatcttggaaggtaccatangatatggtacttccacaccttcatccataactttttcactcttactcttctttgcatagctttctatttttagtaaatgaagatgaatcttgggccacctcatggactcctctaaggatgatagcatcatttcttgcactatattattgggagttggaagccatcttctcaatcaaattcctagcctcaacaggggtcatacaaccaagagctccaccactggcaacatcaatcatactcttctccatgtggctaagtccctcatagaaatattgaagaaggagttgcttatatatctggtggtgagggcagcttgcaca

SEQ ID NO: 61635 - DNA, 259 bp, Glycine max
  unsure (1)..(259): unsure at all n locations
ataagaactagctcttttcttcctctattgcctttagttgaatacacctttgtttgattctctantttgggtcttaaaccctctcatgcatcttctntacaaattctgacctagattccccttctttatgtataaaagaagtgtccagtgggaggggaatgaggtctaacggtgttaggggattgaacccatagacaacctcaaaaggggactgcttggtggttctatgaacccccctgttgtaggcaaattctacatg

SEQ ID NO: 61636 - DNA, 210 bp, Glycine max
  unsure (1)..(210): unsure at all n locations
caagcttgaatctttcccatgtctcatagaaaggttcatttatatcctgggagaaagtcacgatggcggattctgcactgataaatcttgaaggaggaaagaacattgctatgaatttctcctccacctcttcccaagtgttgacgctcttatttggatgtgantggagccatgtctttaccttacctgctaatgaanatggaaacgctc

SEQ ID NO: 61637 - DNA, 220 bp, Glycine max
  unsure (1)..(220): unsure at all n locations
aaataagctgcccacttattatccaacccactcccaaaagtcttagctaatccaattcccaacntcatgctcaatatgatgctgcacctgacctcaactctcatgtgcaatgtggtatcattccaaggaaacagcctaagtgtgtccacaccacactctcacttatgaaaactaagtagtaaatgttcaggtcaccctggcgtgcacaggcaactccccc

SEQ ID NO: 61638 - DNA, 169 bp, Glycine max
  unsure (1)..(169): unsure at all n locations
agcangcctgcaagcttctactgctcacaccaattatcattggttacagttcttntactaaaactttaaacaaaaacccatgagaatcaagtgaagactttagcctagcatatacaaatgcttacatagttaagttatcaagagaatgacacttgtttctcaatgtgaa

SEQ ID NO: 61639 - DNA, 481 bp, Glycine max
acacttgatactcagcttgaaaagctctcattcaaataactcctaaaatattgttttcaagataactcctaaaatatatgcttttattgaaagttaaagatcaaaattatttatataggcgtaaattgtagtagttgaagtttcacgactcaattaataaaattgtaaaatatatttaattaatgtaatagcttgtatgctatatgcgtgttgagcttacaactcaaaatttcttttatattattttaatttttatgcatttaatttctcaattatttcaaaatattatatataagtttaaattcacatgtcctatatgattctaatttaaaaaatgtttgtttaaaaaatatcatctttataaatacattcgcatttgcatatatattaaatttaaacatacatattcttaaacaataatattaataattaaaatatcttatattatatcttggttctattattcttgtaaacatgcgtg

SEQ ID NO: 61640 - DNA, 170 bp, Glycine max
aaagctgaaatatataacataaactctaaattataaaatgtactaaagatgagataatattaaaattgttcaaaaagcacggaaataaaaatcccgatcctgttaatgatcttgtgcagagtccatggcataatcattcatgtccacacagtagtgcctgcaggtgaatc

SEQ ID NO: 61641 - DNA, 359 bp, Glycine max
  unsure (1)..(359): unsure at all n locations
tcatcaatggatttggactcacccatcttcttaagcatcnttttcaagatctcaggggttataaacccacagctttcagtgtcacacatgtcaaaagttaccttcaagtcattcaacttctgctcctctcccccaaattccatgttatagtgcaatgaacctcanatcaactagatgtccttaatacaagtgatttgacacttgagttcctaactaaaatctgagattcgattcttaagcttacgaacaaaattgcgattaaagatatcactntatctcaaaataggccgaccagaggagtaattgagtatcanatagaaggattagatatctcttgattatgatgataaacgtcacac

SEQ ID NO: 61642 - DNA, 174 bp, Glycine max
atgaatgaaggactatgagagagggggagaatacaacatcatatgaataacgatgcattttaagaaatattctttaatacaaacttctcttcttttttctcaattcaaaattataattctcttcatcctcgtctaatgtgcgttcagagaaagggagggtaacagttcaacatg

SEQ ID NO: 61643 - DNA, 262 bp, Glycine max
  unsure (1)..(262): unsure at all n locations
ctcactgnaatgcctctaatgatagtaattagtatcattcaaatacttcctagaggcatgtgatgtatttntctggtatggctctgcttttgtccttatatcatttatcatgatattgtgtttggaagtagctntaccgagtaaaaaagcatgtaatagcccccccatatgctaacatacagctgttactttnttaaacgagtataataacatgggtaatatatggcagttatttctgctagtactgtctctgggacctcag

SEQ ID NO: 61644 - DNA, 210 bp, Glycine max
  unsure (1)..(210): unsure at all n locations
agcttctacattcaatntcgagcttttcgattattacgggactcaatcggacatccgagtaaaaagttattgtagtttgaatttgctcaaggcttcagtattccatttcgagcgtctcgatatattacaggacttcaatcggacatcagagtaaaaagctattgttgtttgaatctgctcagagcttcagcattccatttccagcctctc

SEQ ID NO: 61645 - DNA, 279 bp, Glycine max
  unsure (1)..(279): unsure at all n locations
ctgagcatattcaaacgacaataactctntactcggatgtctgattgttcnctgcatatatcgagacgctcgaaatggaataccgaagctctgagcaaatttaaacgacaataacctttttactcggatgtctgattgagtcccgtaatatatcgagatgctagaaattgaatgttgaagctctgatcaaattcaaacgacaataaactttttactcggatgtccgattgagtctcgtaatatatcgagacgctcgaaatggaatatcgaagctctgag

SEQ ID NO: 61646 - DNA, 197 bp, Glycine max
acctgcggcatgcaagcttttctcttgaaacttattgtgctattattccctactactgcaatatgttcttcgaagagaatgatacctctacaaactatcaaaagagatatgactaccttgggggttatcactaaatgcctagttagttctctcccttataggtcccttaaataggggggcaccgagccgaatacgct

SEQ ID NO: 61647 - DNA, 430 bp, Glycine max
  unsure (1)..(430): unsure at all n locations
tcggaagaaagtgatgaggtacaagccctaatgcagagcttgaaagagcccgggtagtcgatgagaagttcaagtccatagccatcaaagtctgaaaagagtatgatgaactaagggacgtcaatatggccacagctgaagccttggaatgagaaaccaagaatgcccgaaaggaagaacacgaccaaagcaaagttttgaggggctttatagggcagcaatagtgagctcaagctccgaagaggtgaaaggaatcatcacgggtcanaggcatgatcttgaaggacgagctaaaggtttgccttatgtcgaaaagaaatttgtcccgacagttaagcgagactgaagggaatatgtgggccatcatcgattagtgcatagagaagctaaatctagcggcgaatcacgagcaaaggctagaggatgagta

SEQ ID NO: 61648 - DNA, 180 bp, Glycine max
cttattactttcccttcggcacttaactttttctttttattaaatggcagcacacacacacctttactttaataattactggtttttttaacacacatttaactgtgtgtgctggtttactcttaccattccattccttttaaccaagagcttcccaaattttggggctacttgctttga

SEQ ID NO: 61649 - DNA, 229 bp, Glycine max
  unsure (1)..(229): unsure at all n locations
agctngacacaccanatacaaatattacattctatatttctttcttcaaggagaaaatgtatgaccctaataatatgatcgatcttcgtacgtcacacgacaataagttgagtggtcattaatgactgaaactcacctctattgtcctaatcatatgaagatcccacacatgttcgctttccaaatcagaaatggtggagaatatgccccttangttatgcacgaatcc

SEQ ID NO: 61650 - DNA, 349 bp, Glycine max
atgttaccagatggaaccatagttgcagttaacaagtctaaagagattgaaaggaaccagataatgacttttgtcatgaagtagtcctcttatctcagatcaaccacaggaacattgtaaaactattaggttgttgtcttgagacagacactcccatactagtctatgaatgcattctaatgaaacactttctcatcacatacataggagagacatgaaccctccttaatgggttatcgcttaaatcgctgtgagttgcggagcatgactatatgcatttccgctctattcatttccatgagactcaaccatcactactttaacgcatacggccaaggttgattggaca

SEQ ID NO: 61651 - DNA, 236 bp, Glycine max
  unsure (1)..(236): unsure at all n locations
tatgccttggcttatgacattactttgcagatacagaagctgcaacaaaagtccaaatgcaaggtacaaaatccattagaaaacaagtgaaatgtgttggagactcagaagtcccaaaattaaaataaaataactataaaattatacatggnggtgcaaattcaagttgccagaattacaattttgttaagtgggggtgtattcaattctcgaatttaaaagctcnttattaaaaa

SEQ ID NO: 61652 - DNA, 435 bp, Glycine max
  unsure (1)..(435): unsure at all n locations
actcagctaatatctaagaagatagcggtgtgatgaatatttaatatattttaagagcctcatcctataagatggttttttggcggtaactacaagatctgaatgacctttctggagacttggtttaaaatccgtgtaattggtaccacctctgtccacctagcagaaaaanaaggtttntattattgttgtggtaactataagaatggaaaaattaatgcagctaggtgtttgtgtgccaattatcatgtgataatgtgatatattaaagatatgttttaggtaacctatctagtttggcactgctccgccagcatagatatctctatattaacatttctctcagtctcagatgtcacatgacacaaatatttctccatcaaataaaagggttatatttctatctacatcaaaatgtattaaatatcatgaata

SEQ ID NO: 61653 - DNA, 221 bp, Glycine max
  unsure (1)..(221): unsure at all n locations
gcttgtcggagtgatgacttccccttattgatgatattatcgggttgncaatccttcttctttatgtactgctatctctttgatgtcttgggtttgattctccccatgaaatcttttcaatgttctctgcttgagaacttaaatgtagtccccttttagcttcatcccaatagttggactatggtcaaggccttcgaggtcttgtgccttttcttcaacat

SEQ ID NO: 61654 - DNA, 213 bp, Glycine max
gggacctatgcaagtcgaaagccttggaggaaagaggtatgcctatgttgttgtggatgatatctccagattacctgggtcaactttatcagagagaaaacagacaccttcgaagtattccaagagttgagtctatgacttcaaagagaaacagactgtgtcatcaagagaattatgagtgaccctggccgatagtttgaaaacagcaagttt

SEQ ID NO: 61655 - DNA, 162 bp, Glycine max
  unsure (1)..(162): unsure at all n locations
gcttatgctgcanatatttacaatagacctttctaactttatctgcaaaagcaaccacagcagagcaattatgacctttccagcaacagatacaaccctggatggaggaatcaccctaacctcagatggtccagccctcaacaacaacaacagcagcctgct

SEQ ID NO: 61656 - DNA, 276 bp, Glycine max
  unsure (1)..(276): unsure at all n locations
ctatagaaagctctgaaagaagctcataaagcaatagctcatttttactactattgaattcacaaactaatgcaaatgaaacactaagtatntatcttcaaatataacatgcaacccatcatattgacgcaatcgtaacagtaaatggtctaagatgttcatgtgacattggacatagccactacataacaccgtatactcttgagagaagaaataataaagaaataaaagatatcaaccacagattaaaaaaagggtttcatttgaaaatatata

SEQ ID NO: 61657 - DNA, 307 bp, Glycine max
  unsure (1)..(307): unsure at all n locations
agcttgatagaaacaagaaaagaaaatagcgagttcttatattgtgtgtagtctcacaatgataaccgcatccccccatcccatttctctattctttcttcaacggtaatattctcaaatttttatccagaactttccttttctataacaggttcagactctacgttccaattctccacttcccaatacaccagatttccaatggtattttntttttcaacctcccgatcaccacttctctcaaattttagagcctccccatttcgtaattagaatccttttccacacagtctcactttcatcccct

SEQ ID NO: 61658 - DNA, 302 bp, Glycine max
  unsure (1)..(302): unsure at all n locations
tcttatgacacatggcacgagtacacatatcgaatcaagtttcatattctgcgcggagcattgagttatgagaagctcgaatttgagttctgtttgtctgaagattcaagtgcggacttattaactaagccattgaaagctatcaatgttaatgaattgagagacaatttaggagtgatatccttgacacatctgaattaaagacggattgtgatgcatgctgcaattcanttagtagtgaggagttagttattttgacagctatgaaggttattgtaggtacatgtgcagttcatataaat

SEQ ID NO: 61659 - DNA, 180 bp, Glycine max
  unsure (1)..(180): unsure at all n locations
agaacctgtgttaagaccactcttatagcttctgcacatatgcctgtgacctgntaaactgtaccaactatattaaaatgtaatttcccatatgaggaaatgacaaccccaacactgaccagcaacatgttctagaacacatcacactttgcttttgcaataccacacaaaacagccata

SEQ ID NO: 61660 - DNA, 423 bp, Glycine max
ctcagctttgaggaaggttctaaagaagcttctcaatgttgctatctagtctataaatagaagcatgtgtaacacttgttgtaactttgatgaatgagagtcttgtgagacacaactcaaagttcaacttctctccctgtttcttccttcaatttcgtgctcccccctctgtctatctctccctcgttcttttcctccattgaagcattctctccaagcttcttattccaaggctcatcttggtggtgaagcttcttcttgcatggcgccgcctcttacctcttctcctttgtcttccgctgcatctccatggtggaaaatcaccattaaaggacctcattgaagcttaaaggtccagcctccatagaagctcaacaagcaagcctccatcaagtggtaatcagagcacaagagcttcaagta

SEQ ID NO: 61661 - DNA, 148 bp, Glycine max
aactggataccgaatgtaaaaagacttcaggtgtgcattagacaaaaaataatgcatgggttatttctcgagtcacaagaaggaacgagctttacatggttctagagaaagctaatgaaacccttctatatgcttcagatgctgttga

SEQ ID NO: 61662 - DNA, 222 bp, Glycine max
aagaggctcctcagtcctcttaacaccactctgtcaaagtctcgtttgatgaaatgaagctttcaatcctcttagagagaatctgagttccgctttaagctccgacaacgaagcgggcaagagaactatgcgtgaaaaattacacacactcttttgtatgcatcttatctataaaacataattgtactctttctttaaggtttcagttcgagactttcaatt

SEQ ID NO: 61663 - DNA, 85 bp, Glycine max
  unsure (1)..(85): unsure at all n locations
gtgtgatggccaatacaagttntgtattttaccttgcctataattctgcccttgattgtaggtgttggtggagtattacttataa

SEQ ID NO: 61664 - DNA, 194 bp, Glycine max
  unsure (1)..(194): unsure at all n locations
aaattgccgtttcgtcactaataccggcttaacaaaaatatcagtgacaaagtttataatatatatgtaaattgtttagccattaaaggtaatattcttcttataactttaatgatccacaattggtngaaagagattgtaaatccagtgattttttcactttgtcttttttgggtacgaaaactataataatg

SEQ ID NO: 61665 - DNA, 276 bp, Glycine max
  unsure (1)..(276): unsure at all n locations
caaatacatgggagattctttctgagggccacattgcatataagacgatttctgaagccctgtcctgtctgaaagaagcatttatggttgctggtggttcaaagagttggagaccaaagccctcatactttgctgcaattcttgagctttgtccgagccaaatgacatggagagtgctgacgtnttaattggactgctgatgcagtcaaaatttagtaaaattatagtttatgcttctatcattggctcacctgattgtaccatcgacaatggtga

SEQ ID NO: 61666 - DNA, 230 bp, Glycine max
  unsure (1)..(230): unsure at all n locations
gctaattctttttgttggaactcaagtattananaaacataattaatcttgaaaggataaaanacaataaaatgaanttgatctcttttaataattttttatacacacaatcacaatcggagaatcgaaactctctcagtatgatattntacgagcataactaattattataatgatcaatagggcacaantttaacttggtgtagtagaattaaaatgcaaaattcgta

SEQ ID NO: 61667 - DNA, 330 bp, Glycine max
  unsure (1)..(330): unsure at all n locations
ttatatgggcttctttacacaagacttgtggatataactttccagtgcagatactgctagacaggttctcntttttgccctacttaccaccccttcttccttgtntattgtaggtttgctgatatcaacaatatgatactggggaattttaagtcaatctatttttattcatccatattctagtacttagtaaaattttctaatctctagtgaagctaaccctgatttttgcaaaatatgtggtcaagttgaaagcattttctaaatttgagaacacttcagaagctctagaggcagctactttacttattgatggaaaagctagcaagg

SEQ ID NO: 61668 - DNA, 115 bp, Glycine max
agaccactttattcatttggaacttaggatacactaggaataatttgtgctctttgactgtgacatattaacactggatccaattatgatcttttcatgctgacacaacaccttt

SEQ ID NO: 61669 - DNA, 180 bp, Glycine max
tggcgtccattatatacgcgtcaaattaaggttcgattttgaatatttcccgctatttattttgaacgcctctttcttgtgtttgggtggcgggtaattgatggtggacctggctgtgggatacacttctttgtaaattattatggttcggtctaaaacttaaataaagacaatgccttt

SEQ ID NO: 61670 - DNA, 190 bp, Glycine max
  unsure (1)..(190): unsure at all n locations
agaagctttaacataattatgcccattaccaatttatctttantattatagatgataataaggatagatctcttattaaaaagtgtagtataaattcttttgggtctatactatgattgaaatagggatatatagtatgaagtattaacccgaaaaagaataattccaaacttgctggaattttcctttc

SEQ ID NO: 61671 - DNA, 301 bp, Glycine max
  unsure (1)..(301): unsure at all n locations
aactttacttatgggatttatccctttggcttaatttgggagggctcaatatagggcaattcgatttgtaatctgcttgattangcagaattatgggcttgtatgagatggccctaggcctataatgcattttgaaataatggggcatgccacattgaccccgttcttttgctattgacacctaaacgcgcgcctcacaagtgttcggtgaaatgcctcatggcattagcgcctaatttttgtatggaaacaacacatggtgcaatatggtctgcacatattattgggacatgcattcttt

SEQ ID NO: 61672 - DNA, 204 bp, Glycine max
  unsure (1)..(204): unsure at all n locations
ctgcagcctaagaataagatcaagattcagatttatgttcagaactcaaagaagacttagtcaagatagtatgaaaaggatttttcaaaaactgagtagcacaaggatttttcacaaaacatgtttaccaaagagtttntactctcttgtnatcgattaccagattgctgtaatcgattaccagtagccaaatgtctctgaaaa

SEQ ID NO: 61673 - DNA, 146 bp, Glycine max
ataaacagcggatctggctattagcgtgtcctacaaaaaagcatgatgaccaagccaaaagctattttccattgatatggagactgtgacagccatatgccatactttccttgtggctcaaacacatgcaaataatttctcggacc

SEQ ID NO: 61674 - DNA, 91 bp, Glycine max
  unsure (1)..(91): unsure at all n locations
ataaaaccattccagtgctttcacctaacaacttaaacctcttgagtgagttggttcatgacaccatcatntatatttccttcagaattta

SEQ ID NO: 61675 - DNA, 264 bp, Glycine max
  unsure (1)..(264): unsure at all n locations
aactaagctttcaaagcgcactggtaatnttataactntgggactcggtactgtaatgtgtgtttcatcgaataccttatgggttttgaacaattcgacatcaacgatattacgtggcataacgcttctgatcctcgattatctgcaatattattctggagaccctatgcactcattgcatttaatagattattcaagctctttttccataattatttttattagattaaagcttattccgtgacatgattgtgcatcatatga

SEQ ID NO: 61676 - DNA, 155 bp, Glycine max
  unsure (1)..(155): unsure at all n locations
tgcaacttacgccgcaagttattttataattttctttaatacctcncggaagggtgggaatggatgcaactctancctggagagtgaagagagacagatgataagaaaagagtatcacttccacatggttggccctttccttctccaagtgtcat

SEQ ID NO: 61677 - DNA, 321 bp, Glycine max
tcaaattcacttaataatatcttctgaatagtgcatcttgtttacactccttcacacctattgtgaatggtgtgaacaaactatatctctttatatcctctacattctgccttgtcactgtcgccacgagtaaaagacaaaatcgaagtatgactaaccaaccaacatatcatgttttcaaatgggcccatggctcacttggcctcaaacattattaataatgacattattaagcatatgaagggttagaatttattttgatcgaaaatgacaccatagatggaccaattggagcacttggcacatggcttctctcgtgtg

SEQ ID NO: 61678 - DNA, 319 bp, Glycine max
  unsure (1)..(319): unsure at all n locations
ttgcagatttgggtcttcgccagtgaaaagatcgatgtgtgtcttgaaaaaaagcaaatttgatcatcctactangacgactgagaaaactggggcaaataaagagggtgaggataagggagaaacccatgctgtgactgccattcctgtacgaccaagttttccaccaacccaacaatatctttactcagccaataacaaaccttctccttacccaccacccaggtatccacaaaggccatccctaaatctaccacanagtctgtctaccgcacttccaatgacgaacaccacctttagcacanaccaaaaacaccaa

SEQ ID NO: 61679 - DNA, 208 bp, Glycine max
gcttctgaaccattaatgataattaaattattcatttataaatttgcataccagtctgaatattcgtcaagagatcgcgcaacaatcttaccatttatgatatcatatgcaccactccatcaggtatcatgactctattgtcgtcttgcaacctctgaaatttcagaaaatatactattaacgtagctcatgttgggaaggtggcact

SEQ ID NO: 61680 - DNA, 294 bp, Glycine max
tggttcagcatggggaaactatggatacaatggacatgactatgcctatagtctaactaatctttagggacaacatcaatgtggaatatggtagaatatacaatggcagtttcctgatacaaaaaaaaatggagtggagtctttatatgcagttaatgttcattcatacaccaataatttcataaggcatggtcccccatttgtgacagagtgagttcaatgacatgtatgcaagtcatacattatcagggattaatgttacttagaacaaaaaccgtgatgtttggacaatga

SEQ ID NO: 61681 - DNA, 220 bp, Glycine max
ctgcagctttcaggaagattcttaaatatgctctcaaggaagctacctagtctataaatagaagcatgtgtaacacttgttggaactttgatgaatgagaggctggtgagacacaacttaaagttcaacttctctccctttctctgccttcaatttcgggctccgccgctcctttttctctccctcttctttcctgcattgaagctcctctccagcttct

SEQ ID NO: 61682 - DNA, 295 bp, Glycine max
  unsure (1)..(295): unsure at all n locations
cttggtgaataccaatggttntgtagcatcatatcgcggttgtgctcatcttacgtgattctgcctcggctttatctacacagacttcactcaagtcagagaaacagaaaactgatgactttgaaagaagaaacaacgaagcccatgtttgtagcgataaaagaggtataaaactggaagacacggagaagaagacacgtcagcttcaagaatcactgtctaggtaatattaataatgataagtatgccctgatgtaattgtttccccgcgaaaatcaatgatgtccttgcaggg

SEQ ID NO: 61683 - DNA, 270 bp, Glycine max
ggacctcaagcacctgagctgcagcttgagccattcaaacgacattacgtttactatgatgtctgagtgagtcccgtcatatatcgagaccctcgaaattgaatgttgaagctccgagccaattcaaacgacaataacgttttactcagatgtctgattgagtcccataatataacgagacgctcgacattgaatgttgaagctctgagctaattcaaacgacaattacttttactccaatgcgtgattgactcccctacattgctgaat

SEQ ID NO: 61684 - DNA, 256 bp, Glycine max
  unsure (1)..(256): unsure at all n locations
agatactaagcttaacattactntcagcctctcgatatattaccggacacaatccatcatccgtagaaaaagttattgtcgtctgaatttgctcagaggctcaacattccaattctagcgtctcgatatattacgggactcaatcagatattcgagtaacaagttattggcgcttgaatatgctcagaggcatcacattcaatttcgagtgtctcgatatatgaccggaccaaattcaaaattccgagtaaaagtt

SEQ ID NO: 61685 - DNA, 306 bp, Glycine max
  unsure (1)..(306): unsure at all n locations
agcttcacaagcaagcttccatcacagcatgtatacagatcaacctccatttcctatgtctcacacagacctgngtatagggcctaatacctcaatgtttgtgcaaaggtgtaggtgtcctgcgtgcatagaacaaacaaatattcctaactacgaatgtaatagatagctagacacacaaaanaacacagtaacacatgcagggttatatacaaatatggacaaaataaaagaataaagggaaacgtaacttctatcatttgtaataccccttccgtcctctttctctcctcctcttcttctctt

SEQ ID NO: 61686 - DNA, 270 bp, Glycine max
tcaataaattccttgtgtaaagcatcatttacacaactcacaagtctggaaaacataaaatcattttggttttccactaaaattgtatttttgttgtttcttagtacgaataagttgtgaaactctttttgtggacctctacttagattaccttcaatggctgtaagtattactttacactttatcctctaaacatatcattaatcaatggctgctcatcaatcatgatttgattgaataaagatgcactcattgttagcttgccaacat

SEQ ID NO: 61687 - DNA, 162 bp, Glycine max
  unsure (1)..(162): unsure at all n locations
atgagcttcattcttcatcctggacttgattcctcttcattctcttgntctagcttctttaataactggaaattgtcattttgttttactgataagtgtcaaatttcagttgttttgggattaaattgttagctctaatcctttgattgaatagtcttttat

SEQ ID NO: 61688 - DNA, 307 bp, Glycine max
  unsure (1)..(307): unsure at all n locations
agtacgcctgagtcattcatccctatgagatgttgcttatatattggcgaacagaattgtcattccttggattataagtgtgaaccaagctcatgcttttataaaaaggcttatcaagtcaagttgaaatatggaaataaccgtcttgcanaattggggcaaaagatgaatcgagtcacatcactgctttgtctactgccaaacatatttaggattgttgatgtccttgttacttccagtttcaccttgacaaagatgtcatggaccatgttgaaaatctaaactgattcaaccccatatcctgcgt

SEQ ID NO: 61689 - DNA, 103 bp, Glycine max
atctcttattctatcgtatgagtacatggaaaattatagaaatttagtgattcagtccttttattaaaatttcttttgctactcttgaacaaaatatatgtca

SEQ ID NO: 61690 - DNA, 360 bp, Glycine max
gactttccaaagtgctcgtgtgattgagaatgactcttcttccctcatcctttgatctgttttgattttcttgtacgacttcctacttctagacacatgccccgtgtttcagtagtatcaaccttggcagctctactaatggttgcttgttggtgctcacgacaccccaaacctgatggaagcactgcttgtggagcttctattgagattggatctttgagcttcactgaggtccttcaatggtgattcttcaccatggagatgcagccgaagacaaacgagaataggtgagaggacgcgccatccactaaggaataacccatggaagaaggagcttcaccaccaagacgacccttggat

SEQ ID NO: 61691 - DNA, 173 bp, Glycine max
acaggtaaggggccgcctttaaaagggaggcccaaaacaaaggggagagcccaacagaatctagaagaaaacccgacacccccccttagaacagagagaaaccccctcaaaaagcaagttatcacaaacaaccaacgacaaaacacagctataaggcctaacacaggcgcaaa

SEQ ID NO: 61692 - DNA, 447 bp, Glycine max
  unsure (1)..(447): unsure at all n locations
actcagcttgacagtngagtctcgatcagcntaatcaattatagtagtcttttattcnattacactattgtgtgagacagtgactgatttattcacgagtctctgctttaatcgactaccaagtggattaatcgaatacttctctctcatatagttggtcagaggtgaacaagaacactttaatcaactactaagagaaattaactgattacatcggtcttgagtaattgttaaatgctgggaagaacactttaatcgattaccttagataatctaatcgattacttcattgaattaatagatcacctttgagatttaatcgattataagcggttataattggtttctctataaataaccagcttgtgttcactccgatacacacaatcaacacatccagagaatactcaatatcttagatatatcatcttagcctgtaaacgagca

SEQ ID NO: 61693 - DNA, 469 bp, Glycine max
  unsure (1)..(469): unsure at all n locations
agctntcttgagannacttccttgagaagcttctttgaganaacttccttgagaagcttctgtgagaaaacttccttgagaagcttctttgagaaaacttccttgagaagctagagcttagttacacatacccctctcataactaagctcacctccttgagaagcttccataagaagattcctagagaagctagagcttacttcacacacctctctaatagctaagttcacctccttgagatgagaagctagagcttagctacataccctctataatagctaaactcacccatatgccaaaaaacatgaaaatacaaaaaaagtccctactacaaagactactcaaaatgctctgaaatacgaggctaataccctatactactagaatggccaaaatacaatggccatacgaacgagaaaccctatctaatacttacaaagataagcggtctcatacatagcccatggg

SEQ ID NO: 61694 - DNA, 455 bp, Glycine max
  unsure (1)..(455): unsure at all n locations
ggacctatgaaactaagctggggtacaacttntaaaccaaaaaagaaaactaatcttgcatatatgtatcttgtttgtattagatccttctggctgtaactatgatgccatgatacttacatactagtggtactttatgattgatgcatgtggtaatactcgataattcacatatgcttatctttcctctctcaccaatctccgtaattccccctaacaagatccactaacaagtatatggaaatgctaagttgcttcttctaattttcaggcttggcgggtctagtagctacttatggtttgaacttgaatgtcctttaggtgtgcgatcaatctaactaaaatcctgtcatgcattctaggactaaacacatagaaataatgcatcattttcttagagatcatgttttgaaaggtgattactacattgagttcatagatagtgagcatcaact

SEQ ID NO: 61695 - DNA, 313 bp, Glycine max
  unsure (1)..(313): unsure at all n locations
ccccaccccaaccaccgaccaacgtaacctacaagagaggtgactctgcacccaaaaacngcgggaaaaagagagggagaatatttccccccgccaggcccaccaaaaaacccaagacaaaaaaagcccactgactcataacccaagcccacacaaggaatagaatcatcaagcaccgacgaaagaaggggaccaaagccaatagacaaaactagtagggcaccagttcaagcagccaaaccccaaatgccaggcatgagcggaagcagaaaaacaaagggccaagaaggcaggggacagcaagccaccccca

SEQ ID NO: 61696 - DNA, 329 bp, Glycine max
ttggtttctctccaccttgtgaagacctcagatggatgttgctggtttacaaccgtaaagttggacccttgacaagattgatctgtctatagcccgattggtgcataaggtacactccggagtttgacaggactactatgacacattcttactgtggccaagatggactcttgcagactgttattctccctcgcagtcatgtcattggcctctcttccaacactattaaaaatgttgttctgcatggagatcttgaggaggaagtacacatggaggaaccaccttggtttgtgctcacggggaggcctctaccatgatttgccgacttt

SEQ ID NO: 61697 - DNA, 446 bp, Glycine max
ctccacaacatccaagcaaaacaacattcacacagcacaagctattatatccaagcaaaacaaagcaaaggcagaaaactctgccaaaacaccaaccaaaaatcacagcttttcccactcaaagaccccagtaacaattccttcgatccaatttgttaaccgctggatcgactccaaagatcttctggaagtctatagtgcataagcctacattttgaccgctgggatctactagcaaacattcagaactcattttacattactctttccacaaccagcaaaaatacatggatgtttctgcactagtgcacaattctgctgcacaattttacagcaaaatctgcacaaagagtatatttcgaaaaccacacttcccctcatccaatcttgcccaaatcaattcctacaaatctcaattcatgtatcaatcatgtctaacccaaaat

SEQ ID NO: 61698 - DNA, 418 bp, Glycine max
aacgcacctaggtgaacacccgtgttactctttgcatccacccagagggaagcttgctagtttcagagtccgtacactgattcgacgcgcctggatattgcatcacgacaaagaacttctcatcatggccattgctcgagatctccccgctcccaatgacggacgaagatatattaccatcccctattgccaatcatttggccgagagaactcccggaagggacctctaaccccctttcccgaagtggtatgaccctgatgcaacttgcaagtaccatgggggtgacccggtgcattacgtctaaaaatgcttgaaccttaaatacatggtccaacatttaatggatgccggatggttgattttcccagaggatcggcccaatgtgaggaccaacccgctcgccaaaatggaggggga

SEQ ID NO: 61699 - DNA, 319 bp, Glycine max
cgatatgcatgcgcccggacggagaggaagcgtattgtttgaccatttgaatgtcagcagagcgtgcgttgctcaatagcggagcgcctcgatataccccgcccccagacctgacagtcgagagaaatgaccagacagaatgcatgtgaggagagctcgccgaggtacaatcgcagcgaaaaatatagccccggcccgaaaccgaccgccaagggaaagacatgaccatatgaactgcaccacagcgtgcacagctcaagggcaacgacatcatatgagacgcacccgaaccggcccttcaagagaaaagacctgacca

SEQ ID NO: 61700 - DNA, 446 bp, Glycine max
  unsure (1)..(446): unsure at all n locations
taatactcanaatcacatctataggactaaggtcctttatatcttaattactagataagaaagacttcacatcatttatgaaatgcataccactaccaaatatcaatatgtcatccacattcacacatttatcattattattgatttgaaaaccatacaaaagaacaacttgatcaaacttttcgtgtcattactttggagctttgtttcaaatcatattaagatttaccaagaatctataagtagtactatgctaagaatatccaacaaaaacataatcaacagtctttggtccaattttccttttcttattaatagggatgttaacctttgctagacacccacacactttaagatattttagatttgattatctttttctccatagctcaaaaggggttttttttataaaatacatataaggtaccatattaaaaatacaacat

SEQ ID NO: 61701 - DNA, 442 bp, Glycine max
  unsure (1)..(442): unsure at all n locations
agctcgcagtgctctaggatacatgtgtcgttatagtgcctatacttatagttcacttgtaagtattaaaaataatggtatttgccctcggagtactttataaacataacgaaaattaaaaaggaagaaacaatgatatttcgtttgatgaaagctacttcctgaacttttcatgatttatcctacctcagcttttttctcttcctgtttatatnttttagtttgctgttaagcaattattcctttttcaatccctagatatatacaactttgtaaactagatttatactgcggctgttatctgtaaggaaaaataagtcttcctttctggatgacagagtacatattatattaaaatttctgatactcagtaaaaatgtgaaaaaacaataagtgatactctgctctcttcttttctcctatattgaantctcttaattac

SEQ ID NO: 61702 - DNA, 437 bp, Glycine max
  unsure (1)..(437): unsure at all n locations
ntctccactaagttgcctgatgcctgaaatgtcttttctgatggcagtggtcctagatgaagggaagaatttctccaagaacaccctcttaaggtcatcccagctgaaaatagacctgcgagtaaggtagtatagctaatcttttgccactccctctagagaatgaggaaaagcctttagaaagatatgatcttcctggacatcagggggcttcatggtggaacaaacaatatggaactccttaagatgcttaagaggatcttcacctgcaagaccatgaaacttgggcagcaaatgtattagtccagtcttgagaacatatggaacaccctcatcgggatattgaatgcacaagttctcataagtgaaattaggtgcaatcatctccctatgagtcctctcacgaggtggaggttgagccatgttctcagtataaa

SEQ ID NO: 61703 - DNA, 309 bp, Glycine max
  unsure (1)..(309): unsure at all n locations
atgtgttgaccttgaattctattattcttctgttgcttttgttcaattgctctctaacattaatactagttgttggatatttctagtttggtatacaaatttctactcttactagatatggttactctggattgtgtcgtcgactatataatnttcgatcaaagtccttggttgttaaatatatgaaatagtcaggacaatggtcatggtgttgagaaatttgtctaactctagaataaatgctaaacttatactctctcacactatnttatcaacaaattctttactattagatggacctcacatact

SEQ ID NO: 61704 - DNA, 408 bp, Glycine max
  unsure (1)..(408): unsure at all n locations
tacttatgtggcagggcgggcttccttcaccttcttgtttcaaccgcgagctntgactaccgctcttccttcccgcgatgcttctctntacatctgccttagtgggcttatagcctaacccatacttcccacgatttcctttggcatttatcaggctagttatgccgcctttgtctttgcctaaacccattccgagttcgtaacccgtccccaacataactcaagccatcattactgctgcatcggacaagcaagcttgcccaaagaaggagtccacggaggaaatgcttaccacctcaaaagactggaaagcggtttctaatgacttctctgcggcctccacataatgcatagaggatgggcagctcaccaagatgtcttcctcgcctaatacgatgaccagatgcc

SEQ ID NO: 61705 - DNA, 264 bp, Glycine max
agctcgcagggctcttggaacatagtgcgtttagtgtctatctttatagttcacttgtaagtattaaaaataatggtatttgccctcggagtactttataaacataacgaatattaaaaaggaagaaacaatgatatttcgctcgatgaaagctacttcctgaactattcatgatgaatcctacctcaacttttcttctcttcctggttatatattatagatggctgtatagcaatatttctttttcaatcctcatatatatac

SEQ ID NO: 61706 - DNA, 448 bp, Glycine max
  unsure (1)..(448): unsure at all n locations
tcgattcattctatgtacncgtggtgatccacattgtgtttcgtgtatttttattctcgtttcatttactttttataccccctttttgacgtgcttaagccattttatttaagtcatttttcgcttaaactaaaaataaaataaatttccaccgatcgtttgaattgtattatccgttaacttcggttaaaatgaattccgaccgttcggtcgtgccgtaaccacgttggaaataaaaaaaaaggtaaaataataatataataatagaaaaacgtcttttagtaaaataaagcggaaaatcaatcggacgttntctctttgggatttctcattcttaatcgaattgactaataactaaagtgaaactaaggctaaaatcaactcgcctagtcaagctcgtccataaaaatagttttttgaagtttgtcatttcaatttcttactaagt

SEQ ID NO: 61707 - DNA, 423 bp, Glycine max
aaatatgacacgtagtcagtgttatttattgtctatatgacatgtaggtaattagtgtctatatgacttctagtaattctaaatcacacgatattttttcttcttcttgcttgaaattaagctttaaattttaagaataatttggattggtttattttggtgcgccaaacctgttagaagaaatgtagcagcatatccatatccaaatcccaataataaattggtttgggttaaagaaccattttaaatgtttttttttaatttggtttagattttttatttggttctaactacgtgtaccttctaattattttctcattaaatatgtatatgtatcaaatacatattaatgttcattgcatgcttttatgatttttgttgagtttaattatgaacctatctagtaattcctcacttattctc

SEQ ID NO: 61708 - DNA, 447 bp, Glycine max
  unsure (1)..(447): unsure at all n locations
cttaagcttcttttcgaccttgaacaagcaactaacttctctttcagaaccatgctatgtgctcgcgactggtccctctcttcccttcgcaacttgagttcactattgctaccccatagagctccgcgaaatttattccggccatactcttccttgcgagccctcttggtctcttgttcaaaggcccttgtggtagttgcattctcttcccgtaacccggcacactccttccgaatgtgtgttgcggccaatttgaactnttcctggcaagtttcgcctttcctaactcgcttttgagagcttggacttcttcgtcctcttccggtgcttcaaaactctcttcgctgacgacttttaacttggcgagccaatctaaacctcgtatatgaactctcagccattcgtggtacccaccaatgatgccattaccaatgccccttagctctt

SEQ ID NO: 61709 - DNA, 424 bp, Glycine max
agcttctctgagaaatcttccttgagaagctagagcggagctactttctttcttctaataactatagctcaccggcggtgagaagctttcttgaaaagattcctacagaagctagagcttagctacacatacctctctaatagctaagcttaccttcttgagatgagaagctagagcttagctacacacctgctatataggctaggctcaccccttgacaaaatacatgaaaatccaactaaaaagcccttactacaagactactccatagaatggccgaaatacaaggcctctacgacggagaaacctattctatattgacaaagatgatcggactcttacttagcccatgggctcgagatttaccctaaagctcaagagaaccctcgggcctttccgtggaacttagcccaatctgcttgcg

SEQ ID NO: 61710 - DNA, 443 bp, Glycine max
  unsure (1)..(443): unsure at all n locations
agcttaagactcgacaatctatgggttccgatgtgtttttttatggcaactatgacattggttacatcattgatgactaagatctactgatgattacaacctagtctaattagcccttgcacgagggctcggacatctgcggttgtctaagttgtgtactatagagatagagttgtctagttgggcatgctatgcatcgtcactgtttggagaagtatttggctgcgctgaacaatntagtagaggctcttaggtgacgagtcctattctccagaagcaaataatatgttggagaactacgttactgcatattgatctgaatctacctttgagtcatatgaattgttttagatgcttaacgaatgaattttttattgttttgcgaccatatgtgaaaatgtgtgactatggatcgacctataaaaagcttgtctgtgacacac

SEQ ID NO: 61711 - DNA, 436 bp, Glycine max
actgcagctgcagctagcttgcaatgctgaatcgacttattgtccattgggaacttccaattaaagaaataatacaaatgcaagggataatactgtgtggctatttctgagaaaaatagcggacagcagctagctatccatgatgtatggcttcttgaccaagatgacatcattttaacacggctaaacccgtattgactcacacacgagacacacttattaactaaacccgcgcactcctaaacattaatctaattaagcaagttagtgttacaaaaataaacgagaaaaaaaatcgccattgccaaaaggaagacatgtgtctttacaaagcacagactttcaagatgttgcgccgacaacgaatcctaaagactcagatattatataaactagaagctatcatgcgttgtaacaccctattgatattagtgac

SEQ ID NO: 61712 - DNA, 433 bp, Glycine max
  unsure (1)..(433): unsure at all n locations
taaaactcagctgctgaatgagtaggacttctccaattacttgttttgttacatgctcggccnagaaagattctggaagtctacaatcggcttgtgttaatgacctcattcaaattgtaagacacactgttgtctgatacaatttcatcgtgatgaatatggactctcgctatatcaagaactattgaggaaatctcactgtggtgactagagtatttctcccaaacaaaaatcctttacagtataaggatgagtgcttctttgaccaaattaacaattataagcccattgccctctctgagcatgacaatactaaatatcttgactgaacagagtgtcaagttgctgagttagaacctgatgttgaagcaaaaggttcttaagaaaattgtacattatagcctctctttgatacattaactctctctcttat

SEQ ID NO: 61713 - DNA, 427 bp, Glycine max
agtctcgcatcagcggaaccaatcatagtattctcataatcaatcacactattgtttgagacaatgactgatttattcaggattctccgctttaatcagattaccaagtggattaatcgattacttctctctcatttagtaggtcagaggtgaacaagaacactttaatccattacttatagaatataatagattacattgatcctgagttatatctagatgttgcgaataacactgtaatcgataacttatataatctaatcgcattactccattgaattaatagattactttgtaaatctaatcgatcatacgcggctataattgttttctctataaataaccaccttgtgttcactccaatacacacactcaacacattcagagaatactcaatatctcacaaatatcatcctagcctctaaat

SEQ ID NO: 61714 - DNA, 163 bp, Glycine max
ctcacggacaaacacgagcgcgccccccaaaaaaattgtaacgaagaaaggcacccgagactccttttcaatgtaaaaatgtccggaaaatcaccgagccttcgaccgtcgcaggattccaagttttacgtctcactcatatcttctagtcttgtctcacggt

SEQ ID NO: 61715 - DNA, 435 bp, Glycine max
tcttatccaaggttcatcttggtggtgaagctccttctttctggcttattccctaatggatggcgcctcctctcacctcttctcctttgtcttccgctgcatctccatggtggaaaatcaccattaaaggacctcatggaagctcaaagatccagcctccacagaagccccacaagcaagcttccatcaagtggtattatagcacaaagagccttaagtatgtgctccttaaacctccatatattttttgctttaccttctcttctattgatgtttcttcatttttctccatgtatctcctcacatgtcttgtgataaatgtttttaacatgaatatttacagtttccactgattaaatctgctatagaagctatatttgattttctatggttcaaatttcttgtccttgttcttgaaccatgaatattgttgag

SEQ ID NO: 61716 - DNA, 440 bp, Glycine max
  unsure (1)..(440): unsure at all n locations
agaggatgcttcaatggatgaanagagagagggtgagataatagaggagggatctcgaaaccggaggaagataaaaaggagagaagttgaactttgagttttgtcttacaagagtctcattcatcaaagttacaacaagtgttacacatgcttttatttatagactaggtagcttccttgagaagctttcttgagaaaagttccttgagaaaccttctttgagaaaacttccttgagaagctagagcttagctacacatacccctctcataactaagctcacctccttgagaaacttccttaagaagattcctaaagaagctagagcttatctacacacacctctctaatagctaagctcaccttcttgatatgaaaaactagagtttagctacacaccccctataatagttaagctcacccccatgactaaatacatgg

SEQ ID NO: 61717 - DNA, 278 bp, Glycine max
  unsure (1)..(278): unsure at all n locations
actgctttcctaaggcnacatcagtgtaattctgatatggctcccgatcgcactcagcaacaaaatttgttttaaaaggataggtagacctttaaagaatacgctcactggtagagagacctggcgacacaagttggtcctcccatggactataaggagattgctcaccatgatggtagacacattggctgcgctttactatgagaagtcagtaggctacatgccttccagcttctcggactttgtattcgtctgggaaagaatcgaagtatggttga

SEQ ID NO: 61718 - DNA, 445 bp, Glycine max
  unsure (1)..(445): unsure at all n locations
agctatgctgcnacatctcaatagacctcctcaactttatctttttaataaaccacaacaaaacaattatgacctctccagcaacagatacaatcccagatggaggaatcaccctaatctcagatggtctagccctcaacaacaacaacagcagcctgcttcttccttccaaaatgctgctggtccaagtagagcatatgttccttcttcagtgcaacaacaacaacaacaacatcaactgagacaacaatccactgttgaggccccttctcaaccttcattagaagaattagtgaggcaaatgacaatacagaacatgcagttttagtaggagactagagcctcaattcagagtttaacaaatcagatggggcagatggccacccagctgaaccaagctcaatcacaaaactctgacaagctgccttcttaatctgtccagaat

SEQ ID NO: 61719 - DNA, 391 bp, Glycine max
  unsure (1)..(391): unsure at all n locations
cttactctgtgacatacacaatgctctggatctccctgtagaacaccttacttcacctatacgcgtgtggatggtaaggggacacccactctgtgtcccgctacattatgatacaaaacttatgctagttgcgcattgcaaaagtgcgttcccttccttattgatcaacacttacgatatccaaacctggcgaagatgttctccatgaagaacttgattgttgccttcgaattattggagggagtggccactgctaacacccactttgagacatagtctactgctactangatgtattcatagccatacgataactggagggggccaacaaaatcaatgccccaatagtcaaagaactttacctccaacatagatagttatgacattgatg

SEQ ID NO: 61720 - DNA, 441 bp, Glycine max
  unsure (1)..(441): unsure at all n locations
tgcgggttcattaacataagttgtgttgtaactgtatctgttntctatttttctgttgtaaccattttcggttacatagttagttgttgtctccattataaggagctctatattatgggtttggagagtttgagagtgttttgaacactttcattgtaaattttttattcgcaataaacttaataatttggtgtgatatctctttcctccttctatcattcgaacttccctatctgaataaaattttttgaatcttgccaacaataacttagaaaggaagataagcttaaaaggtaaaaaaaaggctcaaagtgtcattagttgtgtactccaatgaagaagtcaacatgctcactggatgaaaagaaaagcattaagccattagaagtaattagtagttaaaggataataaaaatgcagcagacatgaagaacaacattg

SEQ ID NO: 61721 - DNA, 142 bp, Glycine max
ttctccactgtattccgtgtgacaacgtatgaccatttgaatctctcgatagcattcgttggtcaatctcgagcgtctcgatatattatgcgcctgaatcggacttccgtgcgacatgtattaccatctgatttgtgagagc

SEQ ID NO: 61722 - DNA, 427 bp, Glycine max
tctcgatatattatgcgcctgaatcggacttccgtgtgtattgttatgaccatttgaatttctcgacaccatacgttgttcaatttcgagcgtctcgatatattatgcgcctgaatcggatgtccgtgtgacaagttatgaccatttgagtttctcgagagctttcgttgttcaatttccagcttctcgatatattatgcgcctgaatcggacttccgtgtgacaagttatgaccattggaatttctcgagagctttcgatgttctatttcgagcgtctcgatatattatgcacctgaatcggactttcgtgtgacatgatatgaccattggagtttctcgagagctttctgtgttcaatttcaagcgtcttgatatattatgcggctgaatcggacttccgtgtgacaagttatgaccatttgaat

SEQ ID NO: 61723 - DNA, 299 bp, Glycine max
tgtaacactactttaatatcaaactacatatataccactataatgacaatgacactattgaaaagaaataccaatccccaattattaataatataatttattactaaataaaatgcacaagtacacatgtacagagacatgcacaagcaaaagacataatcgataatataacataataaaaataacaataataacaattaatacacaaataatataacaaggtcctattaaggattctccttaaggtatatgcctaatactcaaaactctgggtggacacattccatacctctctatgt

SEQ ID NO: 61724 - DNA, 446 bp, Glycine max
  unsure (1)..(446): unsure at all n locations
ngttgtgttccacgcangagaaagaagaaggattgcgaactgtttttttcattcgtaattctctcaacgaagcttgtttaattattcttttattttatttatattctgatgataatcacgaatatatgttattagttttttatcttaagctaattctagctagaaataatcaattaaatttattttgataattatagttttatagagtacatctatctttagatttagttttaaataatattaggtctagttttagtatgctattatttgcgttataagaaacattatatttagctgatttgctaatattattagtttcattcgttaatattattagtttgagttcttaattctatatagtagattagaattattntaaattttttatatggcagattaggaatagctctagttctacgaaatgtaagttattaattttatatgat

SEQ ID NO: 61725 - DNA, 456 bp, Glycine max
  unsure (1)..(456): unsure at all n locations
ccaaaaactcagctnanaaactntcattctaccctctgatcccttaacatactttatgtctttactaatttnttntacagcaggaccgactactttcaacccctcttgaacactaaggtttaaaatgtgagcacaacatcagatatgaaaaaattcaccaccacttactaaaccattagtatgcaaaagtctttccttcaaatagtcttgcattttaatcatggaagaagcatcatctagagttaatgaaaatattttctgctcaatcccccattcttccaaaaaaaccatatataactttagccatctcacgcccctagtgtggaggaggaaaataagaaaaattaaccattttactattcaacttccaatttgcatcaacataatgcgcagttaatgaaatataacctcagaagtacaagatgtccacacatcagatgtcaagcttattctact

SEQ ID NO: 61726 - DNA, 51 bp, Glycine max
  unsure (1)..(51): unsure at all n locations
cccccaagagtaatgtctctgcaccnaagaacgagtgggtcaagaagtggg

SEQ ID NO: 61727 - DNA, 196 bp, Glycine max
ccccggccaaccaggtggctcaaaagccaccttcgcatactgactcttaaccaaaaaccaaacacacaggtggacaaatctttcaaaagctcatgtctcttacacacaacaataagacaaagccacaggatcaaaaaagacataagccccatgctacataccttagaatggcctaacataagcagaatatagcaag

SEQ ID NO: 61728 - DNA, 448 bp, Glycine max
tcttatccaaagctcatctagatggtgaagctccttcttcctatgcttattccctagtggatggcgccgcctcttacctcttctcctttgtcttccactgcatctccatggtggaaaatcaccattaaaggacctcattgaagctcaaagatccagcctccatagaagctccacaagcaagcttccatcataatttacgttggtctctttctcattctcattttctcgcgggccttcttttgagctttcattgcttaccctagtgagagctttcccttattgtttctatgtttaaataatttattatgtcatcgtacaaggtagggttattgatactttaatatgtctattcccactctattcactatttgaaatagcctgtttaaataatttattatgtcattgtacaaggtagggttattgatactttaatatgtctattcccact

SEQ ID NO: 61729 - DNA, 461 bp, Glycine max
  unsure (1)..(461): unsure at all n locations
catagaaactcagccttacagcagatttagtaatgacctactaacctagatataatanttcttaatgccattaacctagggaattaaaaaaaacttaatggctgagtgtaactgaaattgtggcaaccaaaagtcacccccaacagccaacaagtcagccaccatttggtctcccaaaaggctgatgcctaggttgccaattgggcccttattacaacttgaactaaacctactaaagcccttttagttgattaacccaaaacatatttttggtccgccaactttacaaggattgggccattatttagtcaaactaaacactctaaaattgagacaaagtggtgccatttagtcctcctccatttgggccatgatacaactcacaaccttggacttttctccttgaaacttgggcttgtattcaaatagtatggacaacactcgttgaagagcttcttggg

SEQ ID NO: 61730 - DNA, 452 bp, Glycine max
  unsure (1)..(452): unsure at all n locations
ctcaagcttacggacgagattaatgacaagttgaatgaagaagtaagtaattgtgttantctgcnggcagagtctgtgacctatgcaatggtaaagagtaacatgttgtttatgggatagagagtgacctacatcatgcccaatgctaatgctgatgtatcgaaagaccatgtcgagctgtgcgtctggagttgggaggagattgcggcatctttgttatcttgaataatgatgatattcgggacataagatattaaattttataatgtgcgcattacgaattgttattctaatatagattaagagtttttgcttattatcgatggactaatgatttgagtattatattggtgatgcaaactaataatttgaaattgatgccaaaatttgttcaaggagaactcgatgttcgatgctctttgcacagaaggatccatgacaggattatggtt

SEQ ID NO: 61731 - DNA, 400 bp, Glycine max
aacagcaggaagaaacagaagggcggatataagcacgacatatggcccaccgaagaagcagattaagctttccctaatgcctgtgcctccatatgctaatcgtaataaaaacagagtaaagattacacagaaaagggcaaagaggggcaagggagctctgcacacttatcaaaaagataaaggcaatcctgaatgtcttcaaaatcaactgtagcccaatcaatcccatcttggatatatgcccgaaacaaaattgcaaacaagcaacaggcataagcaaaagggcagatttcggaggcaataatagcagattatggcattttagacatcaactctcatctttcatacgatggtcatcaacttaaatgagaactcgtgtaaacataagcttgccaaaaca

SEQ ID NO: 61732 - DNA, 391 bp, Glycine max
  unsure (1)..(391): unsure at all n locations
agctnaggaacccaatcttgtagcttctatgtaaggaaacatgctnaaactaggatttagagtcaaaaaaacatgacaatcacgattttctcgtgagagtatttgctcgaatttgggtagccccatgctagatactttacattaatgtacgcatgtaaaacacctcatcacttcgtgtagacaattgtgatatataaaactattgtaactcgttccgtagtgtgagtgattgtctatctagatgaatgtttgaacgtgtggaaagccttctctgaatgctaatatgtgcacgatgttattatatctccaatatgcatataaataactaggagtgaaacagctaaaactcgtatggcgtcttcaaaagatgtaagatgctcggatacagatg

SEQ ID NO: 61733 - DNA, 442 bp, Glycine max
tcaccttctggtcctcctcatagttgttgcatgagataacatgctctattttcatctcccactccaagtaggcctctggatcattctttcctttaaatggaggaatgttgagtttaataccatcaattcggttttgtctaggaacaccatcattccctcttctcctcctttcttcttcattatgatctctattctccatttgatccaacctttcatggagcgcatcatctcgttgattcattaacctctccaaatgttgcatcaaagcttgcatttggaattgcgaaagccccactccatcattaggattagtacctgacatctcaaacaaacaaatcaaacgtaacaagacaattatagttgctgtttgaatacctcacccactcaagtgtatcacacaattatggcttttctctaatgaaacactcttgccttttaccac

SEQ ID NO: 61734 - DNA, 448 bp, Glycine max
  unsure (1)..(448): unsure at all n locations
agcttgactntggtttagacatgattgatatttgatttangacttgtaggaattgatttgggcaagattggatgagaggaagtgtgattntcgaaatctgcacttatgtagaattttgctgtcaaataggtgtagcagaattttggctttgtgcagaaaaatgcttgtgtgtggtgggctgtggaaagagtagtacagaatgagttctgaacgtttgctagtagatcccaacggtcacaatgtatgcttaagtactagagacttccagtaaaattttcgagtcgatccaacggttaacgaattggaacgaaggaattgttactggggtctttaagtgagaaaangctgtgatttggttggtgttntgggcagagttttctgcctttgccctgttttattggctgtgatagtttgtgttggttgaatggttgattactttgatgttggg

SEQ ID NO: 61735 - DNA, 446 bp, Glycine max
  unsure (1)..(446): unsure at all n locations
ntactaagggacttagtgatggctgcttcaagagaaacttatttggaggcatatgaagggaaaatgagtcaaatcaaagagatcaacaacaaggcttatgactggttgacaaaagaatttcccaaaaaggcatggtgtaagcatgtatttactacttactccaagtgtgatgttgtaatgaataacttgtgtgggtcttttaatagtgtaattatgcctgctagagataaaccaataatagctatgctagactggattagaacttatttgatgactagatttaatgttatgagggaaaagttgaaaattttagggtaagataatgccaagacctatgaaaatgttagaatgcgagactgaaaaataaaaaaaaaaattgatttgctgaatgtgctggatccatgttgtatgaggttacacagactcattatcgaaaagttcattgt

SEQ ID NO: 61736 - DNA, 328 bp, Glycine max
agcttctctatatgttatgcacctaaatctgtcatccgagttaaaagttatgaccatttgattttctcaagcggtttcttttctcaatttcgagcgtctcgatatattatgcacctgaatctgacctccgagagaaaagttatgaccattcgaattgctcaagagctctcattgttcaatttcgagcgtgtcgatatattatgcgcctgaatcggacctccgagttacaagttatgaccttcgaatttctcgatagcttccgtttttaaaattctatcgtctcgacatattatgcgcccgaatcggacatccgtgtgaaaaggtatga

SEQ ID NO: 61737 - DNA, 442 bp, Glycine max
  unsure (1)..(442): unsure at all n locations
ntaactcggatgtccgattcaggcgcataatatatcgagtattttgatattgaataacagaagctctcgagaaattcgaatggtcataacttttcacacggatgtccgattcgggcgcataatatgtcgagacgctcgaaattgaacaacggaagctctcgagaaattctaatggtcataacttttcactcggaggaccgattcaggcgcataatatatcgagacgctcgaaattgaaaaacggaagctcccgagaaattcaaatggtcataacttttaactcagaggtccgattcaggcgcataatatatcgagacgctcgaaattgaacatcgaaagctctctagaaattcaaatggtcataacttttcactcggaggtccgattcaggcgcataatatatcgagacgctcgatattgaacaacagaagctctcgagaaa

SEQ ID NO: 61738 - DNA, 450 bp, Glycine max
  unsure (1)..(450): unsure at all n locations
agctagttntgccatgatgtaagggtcattgtggtaaccaagtttctttagatctaccagcgtaaatcctatatcatcggtgtgcacaccggtgttgctgtcaacccatttacatttgaaaacacatactgtaaatttcacataattaagctcccgaatntcatcaatgaacccaaagtaatggatggaagctacatatggattggcatcattgacacttgcaaagtgttgagattcagcccttaaggtgaccccgctgttctgcattgtacttttgtcatcttgtgcttttgtgtaaaatgaatacctgtttatgtcgtatccttgccagattataacatttcttttaggcccatctgctagctttcttaatctttttgaagcattctcatctgcagagattgtatctttaaaccaatcacagaaagtgttgttatgctttttcaacac

SEQ ID NO: 61739 - DNA, 449 bp, Glycine max
  unsure (1)..(449): unsure at all n locations
catcacggacctataacactcagctcgaagcgaactggatgcattcggatactnggtaacccatttggccttgaaccagaaatcagcacctgtcgcaagggtctgtggttagtgctcctctgctgaccaccatacagacctttgcccttccatgcagcaacctggagaaattgagcagcccgaagcttatgctgcaaacatttacaatagacctcctcaacctcagtagcaaaatcaaccacaacagaacaattatgacctttccagcaacagatacaaccctggatggaggaatcaccctaatctcagatggtctagccctcagcaacaacaacaacaacctgctccttccttccaaaatgctgctggcccaagcagaccatacattcctccaccaatccaacaacaagcataaccccagaaatagccaacagttgaggcttcttcac

SEQ ID NO: 61740 - DNA, 438 bp, Glycine max
  unsure (1)..(438): unsure at all n locations
gctttggaggaacttgacaangatgctttctactcataagattctagacttcctggacattggttggactgtgcatttccagtatggttgtgcatttgtcggagttgtcttcaattccccgatgtgtgatcatgaagcctaggatcttgcctctatcgacctcaaaagtgcactttttcgggttgaggcaccatgtcgtattacgggattctattaatacttctcctaggtctaccacatgtggggcttagctntgaggcctgacgactgttttgtcgatgtatcccttgacattttgttcgatctattgtttaaagttccaatccaccagtcattggtatgtagcactcgtgttttttaggccgaagagcatgaccctgtagcaaaagttggcatcttcagtaatgaatgtggttatctcttcatttgagacgtgca

SEQ ID NO: 61741 - DNA, 449 bp, Glycine max
  unsure (1)..(449): unsure at all n locations
ggaacaagttcagggaagtgaggagttgtctactnttcttatccagctatcacctagttagtatcaggtaggaaaccttagagtgaaatcgttagaatcccttgaacctaagtgagagttatgaatcaggtatatcggagtaagaaagatcgtgttgagggaagaaacctagatccgaagataggtaaatcatgtattctcgagagtcacgtgtggactangatttgtagagtgttgaagtctcaaaacttatacctcttttcttgaatcgtcccatgttaaaaaaaaagtcggccatgtggccaatcgtgttaccttgtgtttgtttgttcatttcagattctcatcagtgtctcttatgatattacccaacttcaaaatagtatgtcattcgcattctattatcattgagatgtcactcgtgtaagaaaacttgacttatgaaatac

SEQ ID NO: 61742 - DNA, 442 bp, Glycine max
  unsure (1)..(442): unsure at all n locations
tgcagcttaagaatatggcctcataaactacttgttcccgaggganattctataaatagacctcccatctttaatggagtgggttaccactactggaaaacccgcatgtgaatctttatagaggcaatagaattaaatatttgggaagcaatagaacaaggaccttatgttccctctatagtggccgaaagtgcaacaataganaaacctatagcagattggactgaggaagaaagaagattagtacaatataatttagaggccaaaaatattattacatctgccctatgaatagatgaatactttagggtttcaaattgtaaaagtgctaaggatatgtgggatacacttcaagtaacacatgaaggcacaacagatgttaaaagatctaggataaacacattaactcgtgaatatgaactgtttaggatgaatgtaaatg

SEQ ID NO: 61743 - DNA, 465 bp, Glycine max
  unsure (1)..(465): unsure at all n locations
aggacctataaaactcagcctgaggggttgatggngacccggtgctgagaggaacgaggataatgtctacgtangagtgcgtgagctcaatttaaaggtgggcaactggggatggtgtgtttatgtttgacttgtggaagtgggagagttgatttgcgccatcgcccgattgccacctagtaccacatatgacgggtaccccatgatccaatcaacttgatgtgagaaaacgtggaagagntagtcttcctacttttgtttgttgaccacagagtggtacctatagatatgtcgcgggggtcacgagaccttggggacgtcaggtggggtgctattgcccaaaaccaagcttggctaatcccgacccaacccgagcatagtcagtcagtgagaacctgtgacgtacctaagcaggtgaactcctggcagtcaaccaatagaagaacatagtccacgaagcaagga

SEQ ID NO: 61744 - DNA, 477 bp, Glycine max
  unsure (1)..(477): unsure at all n locations
ttaagcaccgcggctgcagcttctagcggttcaatatatgggctatttttctatcatatgctgacaatggccgagaagtccgtggatctcctcgggggcggagtatgtgtccgccattgctttggccttggctagcaattggggaagttcttgactcccgttcaaggtaagagcaaattggtccatccacatggttgcctcttggtgtaacgagtcgatcacccttcctctagcctccttttccgcgtacacttgggcatactcgtccgccaccctatgctcgtgggctgtggcaagacttagttcctcttggtacttgctgatgatggctaacatgttggtctctgtctcgcataaatgttgagacaaacttctcttggacctcgagcaagccttcaactcatccttcaagatcaaactgtctacccgcgataggtccctttcctctctttgaagtttaagctcgatgntactacc

SEQ ID NO: 61745 - DNA, 318 bp, Glycine max
tatacatgatggcatggctcagcattctcacagaagtaaaatcatcactttcaaattgagctttcaacactatcatgacatgtcgagaaaattcaagatttaagtcacaaaatgtcaagaacttttattttcaaaacaattacccatttcttgaacatatcctataattcaaagaaaaacatgcaaagtcgtacgtgcacacaaaattgacccaaaatattaaactgaatatccgacgaaactaacaacattaacaaattaacacaactaacaaattaacaaaaccaacaaaactagcaaaaccaaagaacactcccc

SEQ ID NO: 61746 - DNA, 422 bp, Glycine max
  unsure (1)..(422): unsure at all n locations
tcacaattcttaanacataaccaagaacaatttaacatattacaacacctcataatccattataacatgttatcaaatacaattttaagcataaaaaatcaactttgttcatacaactataagtacacaaagattacaaaaatattaatgctatgtcctattctattacttttattaataaaaattaattactttaaaatcatataaataataagatctaattaattgataatataattnttagtcactaataaatgcattggaaagtcactctttttcttcttctgaaaatcaccagccattatatatatttttttgggtttctattctacattaaaacatagtacccaatttatactaatcacttgctattatattgatatagtgaacccaatntatactaatcacttaaaatggccact

SEQ ID NO: 61747 - DNA, 435 bp, Glycine max
  unsure (1)..(435): unsure at all n locations
tcatgatgatgaatcaagtgtgagtcaagtagttctgatgatgacttttagcccaaaagaatgatgtcaagattgagtcagcaagttcaagatccagattaaagaaaagacatcttgaagaatcaagattcaagagaagatgaattccagattccagagaagaaaccaaaaagcaaccattcaagacttcgcaagggaagtattgaaaaagatttttcgaaaaccaaacatagcagaagtttgtgttacaagagaagtttttcaaatttttctaagttaccaaagtatttactctctggtaatcgattaccaattacccggaattgattaccagtgataagaattggattcaaaaagcttttaactgaattntgcaacgtccaaatattttttaaatggtgtaatcgattacaatatattggtaatcgattacca

SEQ ID NO: 61748 - DNA, 189 bp, Glycine max
tcttgaggaaggctcttattgaagctgcatggcgctgtctcatggcttacgatgcccagccttgtgtcaccattggatcgtattgaattgtggtccgctgcttctccagactggattactccacctgaccgatgtgatcttagctaagatgtccggagtgcgcgcgacctttctgatcccgagagcatt

SEQ ID NO: 61749 - DNA, 432 bp, Glycine max
  unsure (1)..(432): unsure at all n locations
gcacttgaagtagctaaacttttgttangtctgtacacactctcaaacagaatgaacctattgataaatgtgtaattcatcgagcccagcttgaacaatgcctactactcaacagccaacacaatatcaaacacacttcaataacaattagagaaaagtacaattcattttgatatactattctcaatcaagttccttccctaaacacaagaaaatcactgaaaaaaggacaataccaagtaaataagtaatcatatcatattatgtgatacggcacaaggaagagcacagtgtatagttcaatttacattagatctccaaaacatcagggatattgagtttgctgtcccctgtcaagaactcgtcaatatgcaacttgaatgtcattctactcattggatatctttcgctgatcagaccagaaacaaacaa

SEQ ID NO: 61750 - DNA, 443 bp, Glycine max
  unsure (1)..(443): unsure at all n locations
tctaagatgggaactaccaggcaagcaggtaagccttttattttcttcatgttatccttttcactttagtaatgtgttatttcaattctgtggccttccatcatgtgatatacaggacagagatatcatgcgggttcttgtggagtgttgcttgcaagagaaagtttttaacaagtattataccgtgttggcttccaaggtatgcgagcatgancaaaatcataagtttactctacaggtatagattttctctccctgttgtaggatttagatgagaactaaattgtggaattgtgtagtatttgcctcatgagtcaaaacagttacatnttttaactactcacagagagggaaaatatgactagaggaacacttattatgaaaaatatgagtgcatcataattgttgaattgtgaatcgatagatgcgccttatgcaggggc

SEQ ID NO: 61751 - DNA, 431 bp, Glycine max
agtcacctgcggcatgcaagcttgagatgaggaagtgttgaagggtgattcttcctgctcttattggcgaccacagagtggtacctggagatatgtcgcgggggtcaggagaccttgtggacgtcaggtggggtgctattgcccaaaaccaagcttgaccaatcccgacccaacccgggcatagtcggtcagtgagaacctgtgatgtacctaagcaggcgagctcctgtcagtcacagataaaaggaacaaagaccacaaagcaaggaggcttgtggtggctggccagctgagaactttgatagatatgtgggttatggcctctggtaatcaagtaccaagggtgggtaatctactacaaggcttacaaatgaagacaggaggctaagatggtctctggtaatcgattaccacggggcgttattcatacc

SEQ ID NO: 61752 - DNA, 435 bp, Glycine max
  unsure (1)..(435): unsure at all n locations
tgtcaaatagggaagcaagttaaaaactcttttcanagttattacgttgtttctacttcaaaaccctttgaactacttcacatagacttatttggtgcctctagaactatgagtttgggtggtaattactatggcttagttatagtagatgattactcaagattcacatggactttgtttttgaaaaccaaagatgaagcttttgatggtttttgcaaacttgccaaggtcattcataatgaanaaaggtcttaacattgtttcacttataagttatcatggaggtgaatttcaaaatgagtctcttgaaatgttttgtgaagaaaatggaattcaccacaacttttctaccctaagaacacctcaacagaatggtgtcatggagaggaaaaatagatcccttgaagaaggagctataactcttctaaatgaaac

SEQ ID NO: 61753 - DNA, 275 bp, Glycine max
aataaacatgaacactgaagcaaaatgattcaacgcacctccacactcacacgaaactgaataaatgaatccgagaacgtctggtgccccttctctatcatacatatttctcgtatagtagagttctatgtaacaaatcaaatgtgtgcggatgtgcaagactccagttctcttcaaattcccattctgaagagaaagagcactcactttcacaaaaaaaaaaaacaagtgcacaagcttgacctctccctaccctctcacaacctgtcaaatct

SEQ ID NO: 61754 - DNA, 437 bp, Glycine max
  unsure (1)..(437): unsure at all n locations
tatagtaaaactggagggtgtcttcctccaccctcaaattctcttaatagaggctgctctaagtattatcgttgtaggtctgactcttgattgcatcttcatgcaaacatctttaagggtgttcatgaatcatgccttttcacataatctttaagttgtccattaaatttgatggtaatttacttttgaatntgaagttgtatgaaaatttccaaaaggttctctaataactaatactgtgaatgaagaattcttattctgtggtcgtaggtaatcaattctgaataagtgaatattaagtgcaatagccaaagatcaactgctatgattgtatcaataattttttttctttttatctcccaactctttctttgttccattatgctagatggaatttgattnttttctactttgtggngggaatatttctgtaatgc

SEQ ID NO: 61755 - DNA, 373 bp, Glycine max
  unsure (1)..(373): unsure at all n locations
agctngagtgtgcattcccgaccactattattcttgaccatctggtggtctgtccacgatactgtgaacatatctatctcctcacaagtacgcgccacatgagcttccagaggtataacatcgttaggctgatgcgccgaatgagtcatgccactctcagcacatgcgctgtactcactgcccattttacaccatgtaaaacttggactccagctgcctcactgaagcagccaacacgaacctctatgaatggattcgagaaggttccaagtctatgtactcagatacaactaccccagtaagactttcttggaagaaatgtatcatcagtttctcatctcttgcgtatgcccccatcttccgacaatacatc

SEQ ID NO: 61756 - DNA, 169 bp, Glycine max
atgatgactatccggagacatcgtataatgtactagccggtgctcctgaacgtcgactctgagaaaaccgtgtggatgagcaccttaatcgtctcgcaacacatataacgtttcccttctgagctattaaactatacggccgggcctatgctctctagcatcatttggt

SEQ ID NO: 61757 - DNA, 330 bp, Glycine max
ctcgaccgaccttagcactgagctcactggctggctctcatcaatgccgatgagcgactcacgtcgttaaccaccttctacagggctagaccgttatatggttagtaggcgcggctactctgcacctgagggatagtgttgaaccggatcacaaagctggactccccttacttggaatgaaaggaagatactgccaaagcaggcaggttgtaccctatggagagaccctccgagccgctttagagataggcctttgcgaagccagtaatttcggccccaacctgcactgagagatgctatggagaaggaacgtgtcgtgtccactcctgc

SEQ ID NO: 61758 - DNA, 450 bp, Glycine max
  unsure (1)..(450): unsure at all n locations
cttgagccaaaatcctgactcaccataaaccttgacccagtgtgagaatgtcaatccttaccctcggaagcaaaaaagaatagaggggaaatttccaatcaaagaaaaagagaaggaaaatttccaatgaaagcaaaaaaagaaaagaaggaaaattccccaatcaaagagtgcgagaaagcaaaaaaagaaaagaaggaaaattccccaatcaaagagtgggagaaagcaaaaagaaaagaaaggaaaattcccaatcaaagaatgggagaaagtaaaaaaggaagaagaagaaggaaagaaagctcctgatcaaggatcgaaagaaaacagaagaaatgtgcagagaggtctttggaccggacaatatctgaacaatacagaattgccaccaaatgaacgaaaaaagaaggatagggaaccacgacctanaatagtcttctccctttt

SEQ ID NO: 61759 - DNA, 446 bp, Glycine max
  unsure (1)..(446): unsure at all n locations
agtcacctgcggcatgcaagcttgatacatgttgatgtttctccttatcttcaaatgcaaaatgactacttcatatggtattatttntatctctatctttccacttcattcccgtgcctcaaatttatgtaacccttgagttccaaactcctagctttattttactatttagtatagtaatagctaattaattgttagaaacatactttgtgttttttaattattctagatagtattcaattatctatgaaatcattgagcacgaattataaaaaaaatgagaattttttttttgtttaggacaaatatatattaagagttccgttcaaatggaaaagcacccttggtcctcttttggccactaattttgcttaattccaattaacatattaggggatattctgatcattaacaaaaatgatcttcagtgatgagatatctaacta

SEQ ID NO: 61760 - DNA, 437 bp, Glycine max
  unsure (1)..(437): unsure at all n locations
tccttgagaagctagagcttagctacacacacccatctaattactaagctcaccctccttgacaaaatacatgaaaatacaaaaaaaagtccctactacaaagactactcaaaatgccctgaattacaaggctaaaaaccctatactactagaatggtcaaaatacaaggctcaaaagaaggaaaaacatattctaatatttacaaagaaagagtggatccaaccttgacccatgggctcaaaaatctaccctaaggttcatgagaaccctagggcctcctttagtagctctagcccaagcctcttggagtcttctatccaatacccttggggggtaggattgcatcaccatgggctaaaaaatctaccatgagggtcatgagaaccctanggccttctttagtcgctctagcccaatcctcttggagtcttctatc

SEQ ID NO: 61761 - DNA, 374 bp, Glycine max
atgaataacgaatgaagaacgtcgaataacggttgaataccttgcgagattcctcacggagaaccgtacggaaacgtttcggaagcgcctcggcttataatttcttcacggaaacaatgttttcaagcaaattccaacgagagagaagtgcctaaaggtgctggccccttccttcttgctttcctcccctatatatagcaaaataggggaggtggttgccgcccagctcgcccaggcgagctcagctcgcccaggcgagcagggttgcttcctccagaagcaacctgcttctggaggaatcttctggagggcccaagtgggcctgggtgctatttgcacccccattgttacttaagacaccccgctctgctgtt

SEQ ID NO: 61762 - DNA, 309 bp, Glycine max
tttacgaaagtacggaagccttacggaagcatttcagacttgattttcctcttttttgttttccctctcaccaatattaaatgaaatatgttaaccccaggttttcggaaattttatggaagccctagatgccccggatgccatttttttaacaaaatggaggtggttgccgcctataggcttcttgaggaagattccggaatgcaccccgtaattgataagttcaccccccttctagatttttctggatgaagtttcctgagtgcacccctatgtttgataagttcaccccccgctatggtgttcttg

SEQ ID NO: 61763 - DNA, 422 bp, Glycine max
cgcccagcacgcacaggagagcagggatgctaccaccataattttcatcctactggaggaatctcctggagggcccaagtgggccatattgctatatgcacccccctatttactaaatgcaccccccctatatactaagtgcacccccccttctaattttttcgtaattctttcttctgtaacgatacgaaaccttacgaatttcatcaccaaaacttatattccttccgcaaggttaccaatccttacggattatgtaaccactctttttacacttccaaagaagtacggaaacttacggattatgcacaacacctcttttcacttccgccacgtactgaattcacggatcgccacgcctgctcctttaattctcgaaatctcggacttcattattggcaacacggaagccagtatctcaa

SEQ ID NO: 61764 - DNA, 362 bp, Glycine max
aagtgggcctaattgctatttgcacccccatttttactaaatacacccccttgctctttttggtgatatttttcggaacgtttccaaactttaccaattttctaacgatgccttgtttcttttcgtaatgttaccaaaccttacagattacgtaaatcttcccctttttgccttccggaatgttactaaactttacggatggcgcactaacactttcctttaaatttttggcatgtcacggaacattacggattgtgctacaatgctttcttttgactttcggcattgttcggaacttcacgaattgcctagcaatgggtgccaagtaccttgaagtggtcaaacgagggtcgcatcccaac

SEQ ID NO: 61765 - DNA, 404 bp, Glycine max
  unsure (1)..(404): unsure at all n locations
ctcaagccccaaccatcgctcggagcctgaaagagcaagtctaactgttttacatctgtacgactcttatggaaactcccgccaagttggaatgcttgaatcctgtccagctcatcactcataattggaatacccgcatttcgacntccgctaaactcccttgaaccccgtcgagaccatcactctcaaatggaatctccgtatcacggtcctcgtgaatcccccatcacggaactcgcatcacgaacgattctccctctctagcaccaatggtaatcacgacgaaggaacatcatacaacaaaatagcaccaatgtccatcaagcacggatgaaaaagatccacactctcttccatngatatccaaccaggaccacaaatagctcattgacggacaaaatgaa

SEQ ID NO: 61766 - DNA, 360 bp, Glycine max
  unsure (1)..(360): unsure at all n locations
gtggagatgcagcggaagacaaatgagaacaggtgagaggaggcgccatccactaaggaataagccatggaagaaagagctttaccacccagatgagccttggataagaagcttggagagaatgctctcttggaggaaaagaatgagggacaaaaaagagggggggagcacgaaattgaaggaatataagagggagagaagtggaactttgaagtatgtctcacaagactctcattcatcatagttacaacaagtgttacacatgtttctatttatagactangtagcttcctctcctgagaagctttcttggaaaaacttccttgagaagcctctctgtaaaaacttgcttgagaagct

SEQ ID NO: 61767 - DNA, 438 bp, Glycine max
  unsure (1)..(438): unsure at all n locations
tgtcaagctacagcttanatccaatcttgagcaatctatgttactcagtagggacctcaccaaccataagcacagacacatagttgatgtcctacacaggaacacggacctgtttgcttgatagccttctgacatgtagggaatccaccccaacattatctgccacaagctcatcatctgtccccaggccaaactggtatcacaatataagaagaagatgggagaagaatgatacaaatcggttagagaagaggtggacaagctcctcaatgccaacttcatcagagaagccagatattctacctagctcgccaatgtcgtcatggtcaaaaaggctaatgaaaaatggcaaatgtgaatcaattatactggtctgaatagggcgtgccccaaagatgcataccttctgcccaacatcgatagactagtcaatggagt

SEQ ID NO: 61768 - DNA, 130 bp, Glycine max
cgagcacagaggacaagagaaaactttttctaaattcaaccagaggcgaacagcggtagtctcaggacgagaacgaacgctgcgcaatgaaaacgcgagaaaggtaacccggctggaatcatgcattaaa

SEQ ID NO: 61769 - DNA, 395 bp, Glycine max
  unsure (1)..(395): unsure at all n locations
gactcgaccctgcatacgattattattttgncattattctggaccacaccagctataatgataggacaagaaatgaacggtctgcagaatcgtattgtaaagggatctctatggaggaacatacgttcgaaaccattggcaccatttctgctttgaaaatgttttgcaccaaaggcaacacctttgtgacgacctttcttgtcgaggccttgcgtaaacaccttgtcctgtgcaatatcttcggcaatctctgacggtgatatgtaaccatttggaacaaatgaacgcctccatttcaagtactttatgaacattgccgaagccttctccacatctaaactacgagcccgcaagaatcttctatcatcaatcatctactttctgctgacccacca

SEQ ID NO: 61770 - DNA, 430 bp, Glycine max
  unsure (1)..(430): unsure at all n locations
gganatgaggaagtgtagaagggtgagactttctgcttttattcgttgaccacagagtggtacctggagatatgtcgcgggggtcaagagaccttggggacgtcaggtggggtgctattgcccacaaccaagcttgaccaatcccgacccaacccgggcatagtcagtcagtgagaacctgtgatgtacctaaacaggcgagctcctggcagtcaacagattaaacaaacaaagaccacaaagcaaggaggcttgtgtggtggctggccagctgtgaactttgattgatatatgggatatggtgtgacatcctggaaatttctactcataatttttgaaaacgatgtattttgaatgattatatatataagtattattcagcgtatatgcatatatgttcttggtagaagtaggaataatgggggcaaga

SEQ ID NO: 61771 - DNA, 411 bp, Glycine max
  unsure (1)..(411): unsure at all n locations
agcttgacatcttttgatatatcatacaatctttttgagggtccacttccaaacattctagccctccaaaatacttcaattgaagcattgagaaataataaaggcttgtgtggcaatgtcactggcttggagccttgcacaacatcaactgcgaagaaatctcatagtcatatgacaaagaaagtcttaatatcangtttaccccttagtttggtcattctaatgcttgcattatctgttttcggagtctggtatcatttacgccaaaattcaaagaaaaaacaagaccaggctacagatttactatctccaaggagtccaaacttattattaccaacgtggagtttgggtggcaaaatgatgttcgagaatattattgaagccacagaatatttngacgaacaatatctt

SEQ ID NO: 61772 - DNA, 172 bp, Glycine max
  unsure (1)..(172): unsure at all n locations
tgtcaagctacagcttaaatncaatcttgagcaatccttgttatctagtanggtacctttcaaccacaagcacatacacatagttgatgtcctacacacgaacacggaccttgttgcttgatagccttctgacatgtaaggaatccacctcaacactatttgccacaagctc

SEQ ID NO: 61773 - DNA, 419 bp, Glycine max
  unsure (1)..(419): unsure at all n locations
atgttttacttggtgaattacattactaaaatggcgacaacaagatttgctatgatactctgttctgcttaaatatagttgcgagatagatatgaacacatcctgatctcttgaaagaagtttctcttacatatccctgcgtcatgctagtgacccaaggtgggtcttatgatgacaagagaaatgttaggaatgtactatnntttatcacattttttactattagttaaaatttattacaaatttcaattgtggtggtgttcctcgtaacaataaacacaaaagattaaggaaagaatcaagccaaagattttatgtcattaacaaacaagtagacaattgagattagcatgttttgattcacactatgaatgtgattcatgtaattggactcgtgtactagttgagacatttctaat

SEQ ID NO: 61774 - DNA, 446 bp, Glycine max
  unsure (1)..(446): unsure at all n locations
tgcattagttgtggtagttattattctcaacctcagttntgctttttcatctccttacttcttcaaaaacatgtaaaatgatactattgccctcccctgttttcctacggcccttccccttcctcgcacaccacttttccttctcttgatatatatatttttatttaatttaattatgatatagtttatcattttaactataacttgaataactatgacacaaattatcatatgatgacacaagctatcctttcttaataataatcaaattaattattatacaaattagcatcataataaagcanatttgcatagtaattaatttgattatttttataaatgataactcctatcataattaaatttaattggtattcattactattaaaaaaattgaattttaatttaaaaaagataatttgtatcaccatcaatttaattagctt

SEQ ID NO: 61775 - DNA, 444 bp, Glycine max
  unsure (1)..(444): unsure at all n locations
aagcaccgcggctgcagctnggatttctttagtagggaatctattcttttaagatggattccaacccagtcaccctcattaagaactagctctattcttcctctattgcctttagttgaatacacctttgtttggttctctatttggttcttaaccctctcatgcaacttctttacaaattctgacctagattccccttctttatgtataaaagaagtgcgcagtgggaggggaataaggtctaacggtgttaggggattaaacccatatacaacctcaaaaggggactgcttggtggttctatgaatccctgttgtangaaaattctacatgaggaagatactcatcccaagacttatggttgctctttagaagagaccttagaagggtggataagacctatcactacctctcgtttccatcagtttgtggatgtcaagtgga

SEQ ID NO: 61776 - DNA, 444 bp, Glycine max
  unsure (1)..(444): unsure at all n locations
tctcccncaattttctataaatagggggagaagtgaagtgataaatgtttatccccttatgcacttctctctctttcgaatttgcttggaaaaattgtttccgtgaagaaaattcaagccgaggcgcttccgaaacgatttcatgaggaatttcgcaaaggtttcgaccgttcttcgacgttcttcattcgttcttcatcggtcttcgatcttaaacgggtaaggacctcgaaccaagcttttcgatcattctatgtacccgtggtggtccacattgtgtttcgtgtatttttattctcgtttcatttactttttatacccctttttgacgtgcttaagccattttatttaagtcatttctcgcttaaactaaaaataaaataaatttccaccgatcgttagaattgtattatccgttaacttcggttaaaatgaattccgacc

SEQ ID NO: 61777 - DNA, 445 bp, Glycine max
  unsure (1)..(445): unsure at all n locations
ctaagctntaagctaaaaaaagtatacataacaaacaatgtctacttttattttaagcttcacagcatctagaaaaactgtactatagattaattaacttccaacggctacaacattatatttaaaagaagttaatgtatttttttgtaacattatatattttgtaatctttgattaagtggttctaactaatttgcgtccaatattgggtgtttagtgacttgcgccaacaagttatatccaatgactngcgtctagcgagttgcatcaagcacgttaaatctagtgacttgcaagcaaacttactgtagagggacacatttataaacaatttacggatcatggtcccttttgaaagaaattgtagggggggtctgtttttcatttgatgccgccagctgcatcagcgactccatggatgccgccactagctctggcgagacgt

SEQ ID NO: 61778 - DNA, 191 bp, Glycine max
acccacccaatcagtttatccataaagagccatgtcctaaatcaaccacaaagtctgtctaccgcacttccaatgacgaacaccacctttatcaaaaccagacaccccaccaaaatgaattttgcaggagaagcccgtaaattcaccccaattcagtgtccttgctgactgccccattctacttgatattc

SEQ ID NO: 61779 - DNA, 444 bp, Glycine max
  unsure (1)..(444): unsure at all n locations
tgtctcagtgttnatgcgagacagagaccaacatgtttgttctttgtttttagtaccaagaagaattaaatctagccacggtccacaagtacaaagaggtgaacgagtatgcccgagtgtatgcggaaaaggaggctagaggaagggtgatcgactcgttacatcaagaggaaacaatgtggatggaccgatttgctcttactttgaacgggagtaaagaacttccccaattgctagccacggctaaagcaatggcggacacctacttcgcccccaagcttctcagctcgtgctagggactcttccaattcagcacttgtacaacctagagcgcccgcgcccatccagagggaggccccctaagctccggctccaaccctgactcactcggccagcaacgcccactttatcgccggttccaacgcgataaggaacttttccccg

SEQ ID NO: 61780 - DNA, 441 bp, Glycine max
  unsure (1)..(441): unsure at all n locations
tcctcaatcacctcattaagaactagtacgccatgcatgatgttgtctgttnttatgaaagaagtctgcctctcatcaataagaccagatatcacttgtctcaatctatttgctaataacttagctatcaccttgtacatacatccaatcaaggagattggtctgtagtcatcaaatgactgggggtgtttggttttgggaattaaaactaatgaaagaagcattactgcctctagggaagctgccatgcacatggaattcatctacaaatcttctgatgtcagttttcatcatttcccaaaattctttaatgaatttgaagttgaagccatccggtccaggacatttgtccccatcacaactccacactgcttctttgatctccaaatccgaaaaaggaatagccaaaaactccctctgctcctggtttattcaaaaaaa

SEQ ID NO: 61781 - DNA, 431 bp, Glycine max
agcacctgcggcatgcaagcttatgcggtacaatcaaagagttgattttggtgcatagtgtaacataatgtcagccaccacctcataccacgatacatatgttatggtgactcatcaatacaaaacaaaccacaccaactaaactacataatcatataccattcagctcagaatattccgctggagaatagagattagcagacagcctcttaatcttattccataactagagaatcaaccataagtaaccaacaacaacaacaactacaactagaacaacaaaaacctaggtttcagcatcacttctaaattccaatcatgcaaagaagcaaacaaggactagcttagatctatatctactcaatgtctactaaagaacaatcacataaaccccaaatcctagtgaacccatgttcctaaatgattgacaa

SEQ ID NO: 61782 - DNA, 441 bp, Glycine max
cgtaagagaaacaaccaccagaattctgagaatcggatgaattctcaacattagtgtcaaaggacagattcaaactatcatcttcaggagaacgagaggaactcgcttgagtaaggttcacagtaggcgcaaaggtattactcaaagaatcaagtttattgtacttcctaagtggcagttcttgggaagaataagccttaacttcttcttcaccggtgatatatggaagtcgactttgaataagagcaataacagaatcgaaatccctaggaagacctttaagaatggaatccatgtgctcgcgataggtagcaacatctcttacagatccaagcgccttaatgcgaggaaggaacttcgaaacgagatgattatcaagagtagtagtatgacaaagttcccatcggagctaacacgccttcattctagtttgatgatgaa

SEQ ID NO: 61783 - DNA, 329 bp, Glycine max
  unsure (1)..(329): unsure at all n locations
agggttcagcctcttaggcacttctctctctctcgaaattgctgaggaaaattatttccgtgaagaaaatccaagccgaggcgcttccgtaacgttttcgtgagaaattacgcgaagattctcgaccgttcttcaagaattcatcgtcgttcttcgttttcttcaatcttcaacgggtaagtacctcaaaccgagcttttcaattcattctatgtacccgtggtggtccacattntgtttcatgtatttttattctcgttntcattntctttctatacccncttttgacgtgcttaagtcatttatttaagtcatttctcgcttaatct

SEQ ID NO: 61784 - DNA, 415 bp, Glycine max
  unsure (1)..(415): unsure at all n locations
ttatgcatgaattcatagatgagagctttcttgcgtccttccaaacagaatcaaagaagtatgacaacattaacatgagaagttctactgatacactattagaaaatatgttttctacatcggntatttatgactttcaacatcggtttttcaaccgatgttgaaagtaccgacgttgatagtattatcgttaacatcggtttttgaaaaaccgatgttaacgtaaaattaccaacatcggttatataaataaccgatgttgctaatatgaattacacccagaaaatgtatattaatgttgaaagttaacatcggtttttacaaaaaaccgatgttgtgttcaagaatttttttttatataatgtctctgtagaaaaccgatgttaacgaatgtgttactaatgatagttaacat

SEQ ID NO: 61785 - DNA, 340 bp, Glycine max
  unsure (1)..(340): unsure at all n locations
ctgcagcttaaaccaaatcttcactaatcgttcattcctaaccccaaaatgcgtgatcacaaccatganacgaagaccaacgttgccccacacatcgtttaacagaccctccacaatagcaggatgaagcaaatcggtaaccctaatcccatcttattgtgaacattgattaaagtgtgtgagaagaaagagacgaaattcgtgtttgtgtgtttgaagcaaaacacaatgctctttctatcttagtaaaatgacgtcataacattattctccctccctcttaatttaaaatttgaatctaaacaatatttgctgattatttttatanattaaaaataca

SEQ ID NO: 61786 - DNA, 442 bp, Glycine max
  unsure (1)..(442): unsure at all n locations
nnttattatctccatttctgcttcacaacaaattacaaagtgtattgacatcttttctgatcatctcttatgggtttgaatgatgcatgtaaaatgttgtaggaaagagagggacctgtgagtgtcacaaacatgggagaggagaatgttaaacaaccgttgttggagaggaagtactacaaggactgcccaggttgtaaagtggatcaagccaaaaagttgagtgagggaaagggtgtacctgttaaaaatctttttatcatgtggatggtggtgctgtgtgctggtaattaacatttcactcttttctgagtattttttcacttctggaaaaattggttgttccagctctcctttttttttttactctcgggacgtgttagaaagattcacattgtctgtatctattcttaaagtgtaacttatatatttattagacaat

SEQ ID NO: 61787 - DNA, 241 bp, Glycine max
ataccttctctcaacagatcggaaacctagtttggcctacaatataattataggtaacttgttatttcctaccataatatactgatggtaatacttctttattttttttatcattgtgaagaacacacataaatttaaaatatataatgattattatttaaatattattatttatttaatcttatcatttttttggacagctataaaattaaaaaataataccacagaatattttctaaat

SEQ ID NO: 61788 - DNA, 438 bp, Glycine max
tgtgactagctagtgagacgtgaaataatgagtttcccaactataataatgaagggatatgaattatgaagagtactagtgccacttattggtaggagggtagaatgggatctcaatttcctcataaccaaatacacaagaaaacatacaattttttatgttgatttccacctaaaattgcttataataatttctataataaaaaagagatatataacaaatagtgtgataagatagatgatataattaaaaaatatattatttttttaataaaaataacaatatcacaaactaccaaatatgtttcatatatatttattgggaatctgttgaaagaaatttaatctttaaatgaattttaatgtcttaaaagattaattttttactttccatttagatatacttaatatatatattgctagtggaagcacaagtgat

SEQ ID NO: 61789 - DNA, 369 bp, Glycine max
ctttattgttgaccacagagtggtacctggagatatgtcgcgggggtcaggagaccttgtggacgtcaggtggggtgctattgcccaaaaccaagcttgaccaatcccgacccaacccgggcatatgcgtgcaggagaacctgtgatgtacctaagcaggcgagctcctggcagtcaaccgataaaaggaatacaaagaccacaaagcaaggaggcttgtggtggctggccagctgtgaatctgtgtgatatgtggagtatggtctctggtaatcgactaccaacggtgggtaatcgattacaaggcttacaaatgaagacaggaggctaagatggtctcttgtaatcgattaccacgtggtgtaatcg

SEQ ID NO: 61790 - DNA, 354 bp, Glycine max
gcttctaaccttgtacaagaatgaagctctgataccacctgatatacaagttgtcttacatatcttaagaagggcgggttgaattaagatattccaaactgtctcccctaagtaaaaaactatgccacttttactcaagctatgaattcccttaatgacaatcttcttaaatattaatgcaaatgaagcaactctgatctgaatataaagcgattcatacataaaggatatttagggaatagagaatgcctgctcagttttatactggttcggcatggccgtgctccgccctggaatctaccatcacctctttgtgagtactctctacttctggaacattggaagtccaactcc

SEQ ID NO: 61791 - DNA, 444 bp, Glycine max
  unsure (1)..(444): unsure at all n locations
aaaaactaagcttgagaggatgcttcatggaggtaaanagaggggatatttattatgggggagcacgaaatngaaggaagaaaaagggagagaagttgaactttgagttgtgtctcacaagactctcattcatcaaagttacaaacaagtgttacacatgcttctatttatagactaagtagcttccttgagatgcttccttgagaaaacttccttgagaagcttctttgagaaaactccatgagaagctagagcttagctacacacacccatctaataactaagctcacctccttgagaagagaagctagagcttagctacacacccttataatagctaagctcacccccatgacaaaaatacatgaaaatactaaaaaaaagtccctactacaaagactactcaaaatgccctgaaatacaaggctaanaccctatactact

SEQ ID NO: 61792 - DNA, 419 bp, Glycine max
  unsure (1)..(419): unsure at all n locations
tgttgatacaaatggacaagaatgagaagacaacaaaataacaggaatgaaaatataatatatatgacaattggtatagcatcaacaccttccatgttcttcttctgttgtttcatatactcacatagttctaataagagagactgtctctggggctacctatgagtaaatttgtcgtcacaatggcatttacgaaatataaaatgagttaaagtataaggcatcttattctacatcatntgcaacaacaatgacttcttggatcaaccttactgccttttttggtacctatgcagaaatatatgaccaaatcaatactagtgatataaatgagacaaacaatggatgatgttgaagcctataatgacacacatacatcaaatattctttttacaacaactacaaagccttattccact

SEQ ID NO: 61793 - DNA, 282 bp, Glycine max
actcagctgtggaattaccccgatcccgatgccatatgctgacttgcttccttctttgatcaccaaccaattggtggtggtgaaccctgcgaagatccactaatctcccttccctcgatgggcaaccccttcacaacctatgcttatcatggagagcgctcggggcattcaatagaacactccgtggcttgtcaacacaaagttccatagtttgtttgacacggggtggctgacatttcaagagggcaacccaaatgttaagacaattcctcttgcctgtca

SEQ ID NO: 61794 - DNA, 468 bp, Glycine max
acctgcggcgtgaagcttaaccaagaagggatggtccatttcattgattttttttgtataatgacaaagcatacaagatcgaattgcccggtgagtataatgcgagtactacatttaatgtgtctgacttaactctttttgatgcatatgaagaagccaatttgaggacaaatcctttcgaagagggagagagtgatgatgacatggctaggaacctttagaaggacttggaggacctatgtctagggctataacaaagaacgccaaggaagctcttcaacaagtgtcaaccatgctatttgaatctacgcccaagttacaagtggagaagcttcggattttcaattgcactatgttccaagaagagtagagggtgccaccttcgttgagtggtttactacaatttgtagctgaaaaaaggccccacttgtataaagtggtgtcattcttcgggatctgccccctatg

SEQ ID NO: 61795 - DNA, 230 bp, Glycine max
tggatggatcttgactaggatccgtggtgggtagtcattaaactagcaattcaatactgatatgccgaacggaactgacacgcgatcgatgtagagtggaatctctacttgataccgattgaatcttatgatgaagtgaatatcatgaaaagaatcttcgttgctggaaaagacatcattcttgaaaatgtaaaaatggttcaactgagaggaactctattggatttttt

SEQ ID NO: 61796 - DNA, 426 bp, Glycine max
agctagaggatatggggacccacacatgtggtttatgtggcggacaggcgatggtgcacaacaagttttccacattcacaatgcgcgcataaacccaccatcccctgttgcccacctccatctgagctcacgtactcccacgtagcccatatcctcgtttctctcaacaccggggccccatcaaatctctcaagcttccacaacatccaagcacaacaacattcaaacagcacaagctatcacagccaaacaaaacagggcaaaggcagaaaactctgcctaaacaccaaccaaatcacagcttttctcacttaaagaccccagtaacaattctttcgatccaattcgttaaccggtggatcgactccaaaattctactggaggtctatagtacattatcctacattgtgaccgttgggatctact

SEQ ID NO: 61797 - DNA, 426 bp, Glycine max
tacaacctagcgctgatcactacgcgtggtccaactcttggtggactatcttgaacgactatcaatccatggggctccgaattaaagcgtgtaatggggaattgctctctgcaatcactacacagggctccaaactcattggtggaggttgcattaacaacatacacttctttgggctcctaattaaagccgagaatggagaattgactaagcaatcacttctcgtggctccagactcattgttggatgatgcacgagcgacaatcaattcatggtgcttcgaattaaagtggcgaacggagaattgcactatgcaatcactacgcgtggctccagactcattggtggaagatgcgtatccgacaatcaattcatggggctccgaatacaagaggagaatggagaattgcactatgcaatcactac

SEQ ID NO: 61798 - DNA, 439 bp, Glycine max
  unsure (1)..(439): unsure at all n locations
aagtcnagctgcaatagaacagcgaactgtgtcttttgtctatatcctaagaaggggtgaccctcataacagtgtatggaagatgcggtgagacttcgatgggacaaagagttcccgatatttatgctccacttatatcacggagaccacatattataaaacaagcctgctaattgcaaccatatgactataaattatggaacaatcgcatcctatcccccacatattgatcatgcagctaaacataatttgtggcggggaaaaaaatgaatagaaatataagcaaattctgcataagctctattttataggcaatcaaagcccctcttgggataccattaaagtatgacagaaccctcttcaacactgaatcaagacgcggacaggttaaaccaactgtgcacaccagatcagtatatatcacaccttgattagttat

SEQ ID NO: 61799 - DNA, 482 bp, Glycine max
  unsure (1)..(482): unsure at all n locations
acctctaagtcacctgcggcatgcaagcttctntcggacctcgaacaagctatctatttctctatcttaaccatgctatgtgctcgcgactggtccctttcttcccttcgcaacttgagttcactattgctaccccatagagctccgcgaaatttgttccggccatactcttccttgcgagccctcttggtctctcgttcaagggctcttgcggtaatagcattctcttcctgtaacccggctcactccttccgaacgtgtgtagcagccaacttgaacttctccttggcgagtattgcctttcctaactcgcttttgagagcttggacttcctcgtcctcttccggtgcttcaaaattctcttcgctgacgactcttaacttggcgagccaatctaaacctcgtatgctaactttcagccattcgtggtacccaccaatgatgccattacgaacgcgtctaagctctcgatcttatcttaa

SEQ ID NO: 61800 - DNA, 415 bp, Glycine max
  unsure (1)..(415): unsure at all n locations
agagaatggaggatttccttgaaggacctctcttatgcatttattaacacacctccaaactcaaaaatggaggacacatgaatgacaacgcaattcattcatggggctccgaaaaagggtaagaatggaggatttgcttgaaggtcttctcttatgcaatcatggaacacagctccaaactcaaaaatggaagacacatgaatgacaaccccattcattcatggtgctcctcaaaatggtgagaatggaagattgccttgagggtcctctcttangtaatcatggaacacagctccaaactcgaaagtggaggacatatgaacagccctaagcaataacattcatgtggccctggaaataatgagaatggaggattgcctttaaagtcctctcttatgcaatcatggaacacagc

SEQ ID NO: 61801 - DNA, 457 bp, Glycine max
  unsure (1)..(457): unsure at all n locations
agctgggttcgaggtacttacccgttgaatattaataactatgaagaacgaatgaagaacgtcgaagaacggtcgaaaaccttcgcgaaattcctcacggaaaacgttacggaaacgtttcggaagcgcctcggcttagattttcttcacggaaacaatttttccaagcaaattcgaaagagagagaagtgcctaaggggctcaacccttttctttctcacatcctcccctatttatagcaaaataggggagatgcttgccgcccagctcgcccaggcgagcaggattgcttcctccagaagcaacagccttctggaggaatattctggagggcccaagtgggcctgggtgctatttgcacccccatttntactaagtacacccncctctgttttttttgtgattctttttttcgtaagtacggaacttacgaattcgaacgatcttgtttccttcg

SEQ ID NO: 61802 - DNA, 325 bp, Glycine max
  unsure (1)..(325): unsure at all n locations
ataaaacncagctggcgaaacatggggccctggaaacaacacaacttttttatcagttccaccagagaactttgaaccgtttgatctggaagaataagaacctggccaaatattcgtgctttcagatctatcgtatggatctaacttaaaaatctatctagtcaatctaacttgaatatcttggattgcctgaagcttacttggattatccatgaagacaaattcttcttgaaagcacaatcttggagaggagtcttggatatgccttactattggcatcatcaaaaacatcttgaagacgtaaatatgctttactattgggatc

SEQ ID NO: 61803 - DNA, 419 bp, Glycine max
  unsure (1)..(419): unsure at all n locations
agctntatctatatataaattcagaaatntttagtacccactttcactnttcttcaatttaattaagcaacttacttccttcccaaacctccttgaactgatgagaaggctcattgctcagcttgtctttgtaagcctcgtatttcactatttcccttgtggtttctgaattcaaatttcacttagttaatggaattttgtgttacgcatacgttgtcattagtaataattttcttctgttgccgccacggattcatctttgtggtgaaggtgagctagagagagatattgttgtattcactcatgcgttgatggaagactantttttattttaacttgttagcaatatatggttccgttcagaagaaagccggagtagtattaattcatataattctgtttattaattctgataaaat

SEQ ID NO: 61804 - DNA, 435 bp, Glycine max
gtcctcgtacttccattggaagtgtttctagagcatcttttttatatggtataagaattacacatggttagaatacagtgagatcaaggatgcagcttattgtttttattgctttctctttaagcaacccgggagggccgaacactttggttttgaagtcttcactaaaagcggatatagagattggaagcatgcatctcaaagcttggaagatcatgttggtagtcataatagtttgcacaactcatgtgtcaagcactacgatgattataataatcaaagacaaagtgtgacaagtaagtttgctaaagcaaccaaggaatcagaagaattgtataagattcgtttgacttgttctttagattgttcaagatatctcatagcacaaggcatggctttccgtggccatgatgaatcctctacttcgctaaataa

SEQ ID NO: 61805 - DNA, 360 bp, Glycine max
aaaggtctgtatggtggtcagcagaggagcacaaaccacaaacctttgcaacaggtacagatttctgattcaaggccagctgggttaccaagttaaccaatgcatccagtatgccttcaagcttcttagtatcagatgatgcagatgggtttgagctacctcatgcactcctctaatgactatggcatcatttctggcgctaaactgctgcgagtaggaagccatcttctcaattaaattcctgtctccagtacgagtcatgtttccaacggctccaccactggcagcatctatcatacttctctccatattactgagtccttcataaaaagtattggagatgaagctgttctgaaatct

SEQ ID NO: 61806 - DNA, 440 bp, Glycine max
  unsure (1)..(440): unsure at all n locations
ggcacattgctgcttgatagaagaagagcaagacgtgtaattatggtactttgacatcaagcgggacgtagagtataaggagtatccacagggggcttctgacaatgacaagaggacattgtgaaggttggcaactagtttctttttaagcggaggtatcctatacaaatgaaatcatgatatggttttgctctgatgtgtagacactaaagaaaccgagcgaatgctcatggaggtacatgaagggtcctttgggatgcatgctaatgtgcatgtcatggctaggatgattctaagggcagactatcactggctcaccatggaaaatgactgttgcatccatgtgaggaaatgccacaagtgccaggcattcgcgaacaatgtgaatgctccgcctatgcctttngaacatttggcagtgcatggcccttctctatgtg

SEQ ID NO: 61807 - DNA, 382 bp, Glycine max
  unsure (1)..(382): unsure at all n locations
agctngagaagctctctatgtaatgagatattcgatttccatgatatgtactcgaataccatgtttctggaaaaacagagcaagagtgatttcaacaaattaatttattaccacatttgataatcgattagttttatctattaaaattataaatacccccatatgttatttattattagtgactcttgattcaatcttattttttgaaaacaatttctaagagtcatgtaagggaaccacattacatttcaacaagagattcatgttgatcaaaattcattcatttntgatcatggtttgataatcaaatgaagatcttanaaatgttgtgatctacacatcaaggtgtattcgatctaattttcaattctttctaaattct

SEQ ID NO: 61808 - DNA, 424 bp, Glycine max
  unsure (1)..(424): unsure at all n locations
tgtcacaaggganaacaagttaaaaaatccttttctaccgtataaattgtttccacctcaagaccattagaactgttacatcttgatctatttgatccttctagaatagcctcaataagtggcaaaaggtatggtctgatcatagtggacattactctaaatggacctaggttatgttcctatcccacaaggatgagtcttttagtgtctttctttaaatnttgtaaaagtgttcaaaatgggaaatgagtatgcattacttcaatcagaagtaaccatggaggagaatttgaaaatgagaattttcaattgttctaggagcaaaatggtatacttcacaacttttcaactctaagaacaccttaatagaatggtgtagttgagaggaacaacaattcattaagtaaaataacacatatcacac

SEQ ID NO: 61809 - DNA, 355 bp, Glycine max
  unsure (1)..(355): unsure at all n locations
aacccataccttgcacagacagattctgatactaggcagctgggttaccaagttaaccaatgcactcaggttgccttcaagcttcttaattcacatgacgcagatgggttagtagctacctcatgcactcctctaatgactatggcatcattactggcgctaaactgctgtgagttggaagccatcttctcaattaaattcctggcttcagtaggagtcatcgttccaagggctccaccacttgcagcatctatcatacttctttccatattactgagttcttcataanaatattggagaagaagctgttctgaaatctgatggtggaggcatctgcacatatattatatatctc

SEQ ID NO: 61810 - DNA, 418 bp, Glycine max
gctctacttgacaaatgtctctgatccaccgcttcttttgtcccattttagagggggggtgaattaaaattccacattggcccctaactagacaactagactactttatagttgggatatgaattccctttatgacgaggcttctctaaatcaaaagaacacatgaaacggcttggctctgatgtgtagacacttataaatcccggcgaatatcggatgaggaaccgcaaacgtacttttagactggttcggacacacccttgtggctacggacaattcccaaggcacacgattgagagttccactaacttagaaagtccttttaccagttgtaaacacaccacgacagcccttcctttgcgattaaagatgttttactacaagagactctcagtctcttaatcccttagagaacgac

SEQ ID NO: 61811 - DNA, 435 bp, Glycine max
  unsure (1)..(435): unsure at all n locations
cccggaccttaagcaccgcggctgcagctacnatctgtttaagtcatgccttttttatataaatctagataagataagataagatctagatgaaataatatctagatgagataaaatccagatatgataagataaaatctagatgaaataatatctagatgagataaaatccagatatgataagataaaatctagatgagatataatctagataagataagatttggtagaataaaatagtctgctctcttcaagtccaagcccaattgcttatcattcttctgaaattaaattagaaacacaaaattaatccaatatgcccaaatgataaaactgcataattaatttgacaattaaggctaatcagtaattaaaatggtgacaaaaagggttaagaattatgagaaaatgatgacacatcacatctcctcacac

SEQ ID NO: 61812 - DNA, 436 bp, Glycine max
  unsure (1)..(436): unsure at all n locations
gccttggatcttcttcataatggagtctttgcttcttgtatttaatggtagcggaatgaagaagaaagaaagattattggagacgccacttcaaggagaagatgagtcaagaagaagctcaccaccataggaagccatggataagagcttgaaggaggagaaaatgaggggagggagaatgagagaaggagcacgaaatttgtgcctcaaatgaagtctgaactttgaagtgtaattctcaaatgattaaagttgaaaaaatgcacacacatgacctctatttatagcctaagtgtcacacaaaattggagggaaatntgaatttctattcaaatttcactggaatttgaaattgaatttgtggagccaaaanttcactaattatgatttgtgaatttaagctatggttcagcccactaatccaagatcaagttca

SEQ ID NO: 61813 - DNA, 453 bp, Glycine max
  unsure (1)..(453): unsure at all n locations
tactcagctaatactgatgacaatntcattggaaaccctgggcattataggtttggtggtttgcttaagaataacctaagtggttactgggttctcgattacttaggttcgtgtgggtatactataaacatcattccacaataaagattaaaaattaattaatgattttaaagttagttttataaaattattatttttttgtgtaaaataacttacaacagtaattataatgaaacaaagagcgtaaaaaatatttaacggaagaattagttaaaaatattttaagaagatttagaattattcttttcatttataagaattatagtatttcccactaaaatattcaaatcattcatcatgggtttggttgcttagaagttgggaacagagactcggaatttagggtatgtgtccccttatcttgattggagtatgggcctaattaagtttaac

SEQ ID NO: 61814 - DNA, 418 bp, Glycine max
  unsure (1)..(418): unsure at all n locations
gggtgtttcgctctctcacgttgttcgaggacatggtcaagtgcatactcctctgtaattgctagtgactactatccactacgtgtttgtcataatgtcacattgtaggaaaaaaaaaacccctttttctcgacctttgtttgggggcgtgtnnttgntctttggtttcctnttttaagtgcaaaatgggctggcggacgttgagcatggctcaggcactntgttttccctttttctgttgctcacattgtggaaacaaaacttttccaggtggccgaggacgttgagcatggctcangctctntgtgagcttcagttggaattgcaaaatgggttgccttgtcccattgttgtgtcggngaattcanaaggtgagagtgagggattcatccccaaaacaccagcttctaaagagact

SEQ ID NO: 61815 - DNA, 446 bp, Glycine max
  unsure (1)..(446): unsure at all n locations
ttacatagagctacatcatgtggtatcagagcatcttcatctaggttatgctcttttgcttcctctatctttntgttcgatcaattcactttaatttcttgttcttcatcatcttctccatatatctcctccattgtcttgtggtttggtgctgtttaaaatagattaaaaaaaaaccgattaaatcttagatctacacttgttcttgcattttctatggntcaaattttatagatctactcttgaatcatgtttttgtgttgattttaggttctatcatttttcagtcataatcttctagtgctaaaactttagatttcaattttattacaaaatattgattagaaaagaaaacacaaaaatctaagtgtaaatcacttcattcatgttgtcttagagtcatgtttagtcataataattgtcacattatgttctaagtttatgtt

SEQ ID NO: 61816 - DNA, 404 bp, Glycine max
  unsure (1)..(404): unsure at all n locations
atagcccttttgagccttgtttccctttccttgttttgaagctcactacaagccttaagtgaaaaaccatgatatcaccatatccttaaggaattttggagctttggaattgttttgggaataagtgtggngggtttttggttcattggacaacttngtttgttggctatgcttcatgatgtatttngggccatacttgatgtacattgtatattggttaaatgttggacatgctgaatgaaatgttgtttctcaaaggctatagaataaaaaaaaaatatattcgaaaaaaaanaattcgaaaaagaaaaagaaaagcaataaagttgagtgaataagatcttgaatggcacaagaatgatganactctttggtctactcttcatgtgtaattttatcttact

SEQ ID NO: 61817 - DNA, 261 bp, Glycine max
atttctttggaccattttttaatcccaacaatcggatactctttaagaagaatattttttcaataataatacttcagactcactatattatatggcgaattcttatataatatttattgtaatacaactaagtatattttttgatataaatatttcacaacatatattattttattatttaataacccgaattggccatcacaatatcctgagtgttaccagcctgagatccatcccaggactccaaaacctattggaaga

SEQ ID NO: 61818 - DNA, 444 bp, Glycine max
gcttgaagggtcatcgacccaataacagatatctttcttgagtcatcaactcaggattgcccaaaaccaattacaacaaaacagaccgtggtagactatgcctggtcaatccaaactctccaggcccttgaagacatgggtcttaccaaactcccaagactagccaaaatgacctaggataaaatggcctcataatcagatgaagattctaaattagacactctaaaacgtattcaaattgccaaggaaaccaaaacgggtagcaatccaaaagacaaacaaatagtggtctaacaaaaccggaccccataatcaactaacagctatatttcaaaaaaataaattcttgactgtttggcagatggaaccagaatgttgggacacgaatcctttcaagtgacggcagagattctatttatgcctacgaccatcacaaacaagaaa

SEQ ID NO: 61819 - DNA, 436 bp, Glycine max
  unsure (1)..(436): unsure at all n locations
cattttttntgaaaatccaatacaactgcatgattattcgtgtataatatataatatataatatagaaacattatcccttgataaaccaaaaataaaattattctctttataaatgatttccagaattagattggcagttcctctctatgtgtaaataatagaaattaattaatgatgataatgatttataattttttattcagtgatgtttaagaagtatgttttaatttggatctagctgcagaattagaattatatatttattatatttatagattntaatttatatatttctaaacatgtatcttacacgtattgtatccaataaatttaacataatcgtatcacagtattggatatgtatcgtatctgtgcttcataagaggaaaaaaataacacatttacttgctggtggtaattatcatttgggcataa

SEQ ID NO: 61820 - DNA, 437 bp, Glycine max
  unsure (1)..(437): unsure at all n locations
gtcacctgcggctgcagcttgctacaccaacatggcaagtcaacatgttttcacaaatctcttcacacataactatcataaagcataaaccaagtaaaactacccatcatatctcccaaagctccatacccacgaaaatcaagtgagaaggaagtctacccaaacctgaaatttcgaggtcccacacgtagagatgcgcttcacgactccgaanatgccttcctttcgcgaattggagcaaaaatggctaccaaaggttggagctntgttggagcttcaatggaggatgagaganaggaagaaaaatgctgcgtgagagagagggagagagcttctgaaatttgtgctgagtgaggagagagagagagagattgcttttggttanaaaggcnttctctctctattatttattntaagttatccacatgtctcattaa

SEQ ID NO: 61821 - DNA, 440 bp, Glycine max
  unsure (1)..(440): unsure at all n locations
tgaatcggatatccgtgtgaaaagttatgaccatntgaatttatcaagagcttccgttgttcaatttcgagcttctcgacatattatgcgcccgaattggacatccgtgtgaaaagtaatgatcatttgaatttgcgagagtttccgatgtttaatttcgagcatatcgatatattataatcctgaatcggacatccgtgtgaaaagttatgaccatttgtatttctcaagagcttccgttgttcaatttctagcctctcgacatattatgcgcccgaatcggacattcgtgtcaaaagttatgacaatttgaatttctcaagagtttccgttgtttaatatcgggcgtatcgatatattataagcccggatcggaactcagtgtgaacagttatgaccatttgaatttcacgagagctttcgttgtctatatacgagcg

SEQ ID NO: 61822 - DNA, 411 bp, Glycine max
agctttgtcttctttggatgctgacttgtgttcttataccattaataatgagatggattctgtagaatctaacaagacctgacatttagtagacttgcctcctgactgcaaacctattagatgtgaaatcattgtcgtgtaacaactttgataagaaagaccacggagaaacaagtgtaatccttggattaagaatactaggtcaaaaagaaaattctctggataatctcactacattggaagacttaagaaaatgactcttgattgtaacctgctatacccatatgatcaagtgtaaactgtttaaacactggtaaggttacgacaattgagtaccaagtatcattgtagcctacgttgccctgattgactaacccgactagctatgtggggatatatgccgttaccata

SEQ ID NO: 61823 - DNA, 445 bp, Glycine max
  unsure (1)..(445): unsure at all n locations
tataaaggttgatggggattcactaaacaccttcctggagtctctgatggttctggagcccgaggagcgctacaccacatacaccaggttctgtagcactcatccagaccctcaagagcttgcctncaagctctgtattccagggcatcacttcgttttaaataatgaggaaggatcttactactctagcgcaaacctggagcgtcttgtcctattctaacctcgccctcacctcttatacgttcgatcttaacatggacagagcgaggttggtttctggacttgtgatgaaaatggacatgcatgtgggctctacttctctcagctaggatttcccgcacttattaaaactctatgcattgctagaggagtggtcccagattcgctcaccttcgagtccctaagccctgccattagattggcatacatcaggaagaactgctgg

SEQ ID NO: 61824 - DNA, 453 bp, Glycine max
  unsure (1)..(453): unsure at all n locations
agctngganagattaatagacttagcttattgttcatgagaatgttgttgtagacaacattaagacaactctcccttagactgaaagtgctaaagaatttatggggttagtgagaaagctctcttaaagaactaagtacgttgaccaccatgaagtttgatggttcacatattatgcatgagcacatcattgagatgacaaacattgcaacaaggcttaagactttgggaatgattgtggatgaaaactttcttgtatagtttattcttaactcattactgtttgagtatggcctgtttcgaataagctataataccatgaaagacaaatgggatgtgtatgaattgcatagtatgttggttcagaaggaaatgaaacttaagaatcaaggaggtcactcagtctattatgtaagccatgcagggaatcaaggtgggtgaaataaatttatga

SEQ ID NO: 61825 - DNA, 445 bp, Glycine max
gagaggctaactatcctaaactctaataggtcttagatggttattaagggtagaatcagatatcattcacacgaggtgccccatagcatccaacctccctgagatagcttcaaaacatgctttcagccccctatagtcttccttatgaatcctcatgagctcatccatcttaaccatcatcattattagctcaaagggaatgatagggctttcttctacttcttttattgttgttgctaccgagccttcttctttcttaggcttcttaatccaacctcttgctccttcttcaacttcaatgtagcccatctgcttaagagccttagccttcacttcaaactctagctctacaaagtgaaacacctcatcctggttatccacttggaagtgatcaagaatcctagagatcagcattggatatggaaacttgaaagaaccaatcctt

SEQ ID NO: 61826 - DNA, 418 bp, Glycine max
  unsure (1)..(418): unsure at all n locations
agcttgatgatatggtcttcgccggcaaatggatcgatgtgggtctgaaaaaaggcaaatttagtcgtcctgcttggacgaatgagaaaactggggcaaatgaagagggtgaggatgaaggagaagcccgtgctgtgactgccattcctatacagccaagtttcccaccaacccaacaatgttattactcagccaataacanaccttctccttacccaccgcccagttatccacaaaggccatccctaaaatcaaccacaaagactacctactgcacttccaatgacaaacaccacctttagcacaaaccaaaaacatcaaccaagatatgatatttgcagcgagaaagcctgtagaattcaccccaattccggtgtcctatgctgacttgctcccttatctacttgataattcaatg

SEQ ID NO: 61827 - DNA, 412 bp, Glycine max
  unsure (1)..(412): unsure at all n locations
acttgatttactctttataataaattagactggatgagggtatatttatttataatgagtcaaccaatgacagatgttacccaaaatgagccttgaagcatataacctctatgcccaaattctaaaccagtaaaatgtaagatgtgctactgagatgaaatgtgatgcagtgcttgttaatgaagggataaaaagaagctaataagctccaccatggcttgaaaaagaattgataagggtttcttattttcnnnaatctattatatggttggtgcacaatacattacaaggcaggatatgtataaaagtttgtatgaccaactaaagtgttcatatgctaagtactccacaaacttatgtacctgtggccatatattcaggagcaacatagccatatgtgcccattaccctt

SEQ ID NO: 61828 - DNA, 440 bp, Glycine max
gtgatcctcacagtcacctgaggcatgcaagctataatatatcgatacgctctaaattatacatcggatactctcgacaaaatcagatgatcattactcttcacacggatgatcgatatcggtgcatcatatgtttagaggctcggaattgactatccgcatctctatatatattcaaatggtcataacctctcacactaatgtcctattccatcccatacaatgcccacatgctcgaatcttagcaacgtagtctctcgagatataaccatggtcataacattttactctaactggcaatttatgcgcatcacatgtagtgatattccaaattgaacaacggaatctcttcgacaaattcaaatggtcataactttccacactgaggttcgatacacggtataaaatatggatacgctcgaaatttaacagtcgaaact

SEQ ID NO: 61829 - DNA, 344 bp, Glycine max
  unsure (1)..(344): unsure at all n locations
cggacctataaatactcagcttatgatngtgtttgttgggagtttttgctatacataactattatgataangcctactgaaaaatggacctcttggattaatgtatgcccggagtctacatctatattaatcttggacaatgagagtcattatgaagaattccatcctgtgagaggtcttatacaaggagattctaattgctcctttctccttcttattgtggataagggcttgactggtttcacttaagaagcttttaggatgacatgtattcaggctttaaagattgaagacagcacgtggatggctcattactaaaattatcaaactgaaatttcccattt

SEQ ID NO: 61830 - DNA, 416 bp, Glycine max
cgacccgcgatcctcagagtcacctgcggctgcagcttaaagatgtctttttttgttatacatacgcactcagacatgtgaaggaaagctggagttgctgcacatgatgtccaacgttatgtcatagaataagatcgggctgcacaatgcacaaggcatgataaagtgtcaaatgaagaattgaagctgcatgattcacaatggcggatttatgtccagacattctgcctgaaaatactggaattgctaaaagcatcgaagctgcaagatccacgatgtcggatactatgtacaggacatcctgcccgaaaatactggagttgctaaaagcattgaagttgcatgatccacgatgtctgatacgatgtcctagacattcttgtccgaacatactggacatattatatctggtatat

SEQ ID NO: 61831 - DNA, 399 bp, Glycine max
  unsure (1)..(399): unsure at all n locations
attaccggagcagattttcagaanatattctcaacaaccacatctttttatttggttcttgaatggctatcaaaggcctatatatatgtgacttgagacacgaatttgctaagagtttttcagaacaaaaaggtcttatcctcttaaaaagcaaaatcgttttatcctcttacaaattccttggccaaaacacttgtgattcaataaggaattatttgagtgctcaaattgttcaatctatctctttcaagaaagatttcttcttctcttcttctgtattctgaaaagggattaagatactgagggtctcttgttgtgaaagaattccaaacacaaaggaaggattgtccttgtgtgtttagaacttgtaaaaggaatttacaagatagtggaactctc

SEQ ID NO: 61832 - DNA, 311 bp, Glycine max
  unsure (1)..(311): unsure at all n locations
ctatataaagagtgtatagtaagctcaacgagcacaaacaatgcatatgcatgatcattagtaaggctatcatcaactttatagagtgacgaacctgctacaacgtataaaaggttaaaaatatgtttctcgtacctgtaatatatgccatctttattttactacctatatttcactttttctttatttactagatattttttggttgaatttagcattngtcatcagccaatgtctatgataattagacaagtttatacactacaaataccattntacatgagcatacatgagggcgtaaatggattaca

SEQ ID NO: 61833 - DNA, 297 bp, Glycine max
tattggaagggttgaattacttgcatttgcattgacccttgtatcatccacagagacctcaactgcagcaatgtgtttgtgaatgggaatactggccaggtaacattttcttttcccaaatgaaatgttttttctaatccatgttttcttgattgccaagatgaaaattaaccaaaagagaaaaaaaaaatcaatgggaattatcaaggttttaaaaaatgtctgtggccgtgttttttttgccgaatgtcaggttttgggagtgtctcgactacaacgaggttgcaattgtgatca

SEQ ID NO: 61834 - DNA, 454 bp, Glycine max
  unsure (1)..(454): unsure at all n locations
aatggaaaaggctcacattcacttcttctacattatatttcaactttgtccaaataanaaaaaagncatctcgactcaaagaaatcatataagtctcatacaattaatataaaacctatactctaatgtcacatcctatcaaagcgtggtgttccccgtgtcctctagcatgaggttcttcatagtcatccacctattcatcttgctccccgaacacaagttcaagatcatcacnaggatccaaacacaacaacacacagggagtgagttatcacattcctagctaatagagaaacaagacaattaaatatacatattatataaatgagataccacttacttaaacatagctcacgtaacttcaccacttcgtcattcanaattcacttttcaattatcaatcacattacacaagaatcttacacttcgatcaagatataataacacatcaatt

SEQ ID NO: 61835 - DNA, 377 bp, Glycine max
  unsure (1)..(377): unsure at all n locations
aacctcgacctttcatccccagtgtcgagacaacttaagaggaagatggcccacacaaagcgctttggccaaatgacctctgtatggcacaacaaatttgaaacacaattgtgagttcatgtgttgtgcacttacagtgatgggcaaataattgtgtcataagaataaacttaatttttttcaaattcaaaaaatatgtttgcatgccggattcattagaggaacaggcttcacaggggagttttgttccgcatggccatcaagacatactgaacatggctttaggtcgacatgagcatctatgccgtgttcgtgtcacagggacatgtgtcataatatgccaatactntggccaagcgtcacgtgcctctagcaca

SEQ ID NO: 61836 - DNA, 382 bp, Glycine max
  unsure (1)..(382): unsure at all n locations
tctctcatcaatccagtgagaccttcacccacaatattaaagagncaaggggctagagggtccccttgtctcacacctcgagtaggggcaaattcattagtanggctaccattcactaaaatggaaatagttgctgattgaaggcatgcagcaatccattgcctctatttagtgcagaagcctaatcttgacagcatatagtccaagaaagaccaagatacagaatcatagcagatttacctgtgttagtttactaaagggtaaatntcaagtgctatccttagtacagaatttcatagctnttgttgaaagacagtatagtgcagtggtaaaagttgtgagaacagataatgggccagaagttacactcaatgccttttac

SEQ ID NO: 61837 - DNA, 414 bp, Glycine max
  unsure (1)..(414): unsure at all n locations
gcacacaaagcaaaaaatgcaatgccgactgccaagnttgctatttcctacgcatttctgataaatgagtaagtgaatatttattgacacgcaatgcttgggaagcctaggggattgccaccgaaccaagtcattgcagtcttgcagaagaaatatgaatcttcacaagatttgtctcagagtagtatattactactataataaatactcaaagaaaattttccttgccagttactcaaagaagacacatataataaatgataatgaaaattttccttgccatttactcaaagaaagacagagaaagcggtaacgtggggacttggcacatatagagaaagaaaaagtaggtaggatgatgcgattttcggtttttttaggttgggataattaccgtgtggttggacttgtacc

SEQ ID NO: 61838 - DNA, 477 bp, Glycine max
  unsure (1)..(477): unsure at all n locations
nganatattngtaagaccccttatgaaccttctttatttattttataccacataaagaatcaataatggtaccccaagaaagaggtcgtgtaacttcaagttaaaaatctaattnttctttccctgccgagtcatttttctctatattcattatttcctttgaacgggaacacagtgaaccttgtcttattttcgaagttctagttcacgagatctacattgaactctcttacatgaagaaatatttatgaaaggcaattagatcctagcaaaatatattttccttttaaaaaaaatcttattttcctatggatcttccagttttatatcccttattattaggtggaagatttctaataggatttagacacattgaatacttgctattgagatccaattaaacgttgatgcatctggaaccatgcaataatatattaaaaaggaaaataataagtagaaaacatctatattcttata

SEQ ID NO: 61839 - DNA, 430 bp, Glycine max
accccggctgcagctgctctaacacaagattggttttattgagttgtgtagccacctagaccaaggcgagtattgtttgctaaaactaacttttcaaatgtttgccttcgcatgaaatggcctccaggaagcttggctcaaataggtccaggagagacaaagcggcccaatgaactaggcccgctcctgagtatgacactcaccgattcaggatcgctgtacaccaccagcccttctaggccatccacgagtggccgtttcttctggagcgacgcgtccatcttaaggacgacgagtatactgattacctggaagaaattgggcgccggcggaggacatttacatgtatcttccatggcccatgtcgatccagaaatagtccttgagatttatgccaatgcttggccaacaaaggagggcgtgcgtgaca

SEQ ID NO: 61840 - DNA, 360 bp, Glycine max
  unsure (1)..(360): unsure at all n locations
caaaaacnaactgccgctgagcacatagaggccgttttatgttttgtacaacccgagggttagcaagacacgcgctactacctataatgccaagaaacgggaacatggtatgcataaccactcagcgattaaaaaaagttctatgaagaaggcatattaaaactcctttgaacaaaaggtgaagaaccaactgcacattatagactttataacgcgtctggggacaaagtcaatggccgattacaaatgagttcgatacatgattggtcaccagcctctgattcactgaaatggggggaaaaccccgctttaccacacataagaacttacgttaaacctaattggcaacttaagtttttt

SEQ ID NO: 61841 - DNA, 453 bp, Glycine max
  unsure (1)..(453): unsure at all n locations
agcttaagctccttcaactgcactatgctcttattattngaagagtatccttgtggaaccttcacccgacgaagacactgacaaaaacttatcttctccttcttggacaaagtatggcaggttgggggcaagtaaatattcttcccatcagaccttggatgcaactgtgatcgtatacccatatcagntaaatcttgacgggtattcaagccatcccttgtctagccttaaatgttaaggagcatcccaaccacactgtcacaaacatttttctccacatgcataacatcaatacaatgtctaatgtcaagatcacaccagtacggaagatcaaagaaaatggatctcttcttccatatgcaactctgacttttatccttcttttgggtcttcccaaatacagtattcaggtgtngaacccgctgatatacctgctcactaatcaacggtatc

SEQ ID NO: 61842 - DNA, 240 bp, Glycine max
  unsure (1)..(240): unsure at all n locations
acaactnactaactgctaatttcactaatctatagagtgactattcataatgaagggatgggccttgattangcccatctaatctatctaattaaactaattacacaaaacaaagcctaaactcatagcccaattaattaagtgcagaggttctgacttcaagcctaatttgaccctcaaaatggtagaattgaccaaattgaatatctttttcttatctttccaatgactactcacaca

SEQ ID NO: 61843 - DNA, 464 bp, Glycine max
  unsure (1)..(464): unsure at all n locations
cggaactagagcaccgcagctgcagctgatgttccgttattaatgacgttatttaatcttctactatttgacatcgacatccacaatctctctagtttctattattttctattccactatgctaagtgcaagataattacgctagggtcttgaataggagagcaattgcttgttcttttcatggctatatacgacccatgcaattattcatcccacccttctaaaaatataaaagaaaggaatcgtggagaagggacacgtagaataatactatcttactaaagctgttgcttggctgttgggtgtacttatttacaccttgtctaagtngcatttgcattacatatttgaaccatacatggctcttaaatacagattaattagtgcatgttagtgtgtaactgaattggtggacatatgacacctttgttttattgttgatattaggtccatatgtcgctact

SEQ ID NO: 61844 - DNA, 414 bp, Glycine max
  unsure (1)..(414): unsure at all n locations
tataccacatcggatcaactagttntggttcatttcttgttcatcattagaaaaatgttaaattgttggggtcggcgaaaaatctgggtgctaataatctctttagtcatatgagaaatgtacggacataaaaatgtcacataccccattctttactaagtaattaactcttcctgatcaaactgaaatatcaaactgaaatattcttatagcatgattaaatttgaccacaaaaattatttaaccaaagctttaattcagctatttatccacgcattctaaaaggatcgttatttattaaactgaaatattcttatagcagttaattggcatagtggagaaaaaaaaagagggaagagactcataaaaataaaaaagttgacagggatcactattatgcgggaacgttgttgg

SEQ ID NO: 61845 - DNA, 427 bp, Glycine max
  unsure (1)..(427): unsure at all n locations
agctgaatgataaacaatatcgctntatttatattaaaaacacgtataacccaagcctgtggttgttaacaacatcgcgttagttaacaatcattcataacgattaaaaaatatacaataatataaggttttagtttgtgttgaggaattagatagacacatacgtttgtgctgctttcttcaaattttccgcatcaaagtacagctacgtttgtgttccggccattatcacgttagcactatcaatgtttcactaatcaatatcaaagtgtttataacataaggtgtgatatttataattgagtaatctatatctttctacaaattntttaaaatataatcaggntggattattatgtcttatttaatttattaataaaagttgtgcctactctggaggcaaagcatcacacactttgatgctttg

SEQ ID NO: 61846 - DNA, 458 bp, Glycine max
  unsure (1)..(458): unsure at all n locations
tcgttgcaagccaatgttggaggagaatgctgtatggttattttgattngnggagtgcgtaatcatgaattggccaagtcattagttggacatccatatgcggggcgattgactaaagctgaaaaaacacttattgctgatatgacgaagtccagggtatagccaagaaacattctgctaattctgaaagaacacaatgccaatagctgtatgaccattaaacaaatatacaatgcaagaagtgcattccgttcttccataagaggaagcgatcttgaaatgcaacatctgatgaagtttcttgaacgtgatcagtatattcattggcacaaaataaaggacgaaaacatggttcgtgatatcttttggtgtcaccctgatgcagtgaagttagtcaacgcatgtaatttggtattttgatagatacactcacaaacanaccggacaaactcctatac

SEQ ID NO: 61847 - DNA, 364 bp, Glycine max
  unsure (1)..(364): unsure at all n locations
ctatttgaaattatcacttatacatgttctctcaacaatgcttcaattctgacttaattcaggctaacattangttcctgtgtttgatacttggattcattcgttntaattttaaatacatgacgactccgtgcactttccagtgaaaactccccattgaaatttcctggagagataaatgcacaaaaagtaactgcaatggggagtcatcaaccgactaacaccatccttgacgaaattgtgggaactacccccatcgatgaggaccacaacgtcgtgcccattaacaaaaccatcaacacgcaaggtggcagaagtaggtgtcccgataatcgtgaaacttatcgggcggggatgaactatt

SEQ ID NO: 61848 - DNA, 321 bp, Glycine max
atgtgagctatgaacttgtcaatcacacaattggtagaccatttaagggcaacgagtattatgatgggatccactatgggaacccgacagttaatatgattttgaaaacaattgagtagttgtgtgtattgcatgggttatacgtaaagtgtatgtgatttatgaagtgtgtttagcacttgatatgacaataattgtattgtgagttgtgaattatacaataacccgaccaatgttgatgcacaatgttgaagaaaaagtgttatgttcttatttacgaaccagctgttaattgtagagcactgtgttaaacgtgtttga

SEQ ID NO: 61849 - DNA, 465 bp, Glycine max
  unsure (1)..(465): unsure at all n locations
cgtattagacacttagtgaataattatattatatctcacattacaaaattacaaaaccacanaatataacatanatattggccactacattaaattaatattacaatccacaaatgttttgtccatgttttacacattttaccataatacgtgtgataatgtgctcanataaccatatattgatacattaattcaaatcaacaaaaaaataaggaaggtctgcaatttcaatagtgattcatggtgatcattcaatcttgatatgctctttgtctagcctagttgaggatagttgtatggacgataaatcttcgaatggtattccatgcagttgactatgagactgtggcaaaatgcgcttagccgatgatggatcccagtagcgttggacagactcagcactggcttataaacattgctacaacatatgatatatatattcacatagtcattgaccatttcata

SEQ ID NO: 61850 - DNA, 349 bp, Glycine max
cccgggggggggaggtcaaaggcataaaaaaatcccttgggtgaaatgggaaataatttgtctctctaaggaagaagggggtctaggagtcaaagatatcttttaattcaatacagctctgatgggtacatggataatgggctttatcctctaatcataatcagttgcgggttaaaatcttaatgtctaaatatggtggatggtcagatcttatcagtgggacgcgacactctaagtgtcatgtaattatgtgtaattcatcactactcctggtactgaattgatattattaataatatatatatctatggtcgccttccacaaaaaaataaaaaaaagacacaatagt

SEQ ID NO: 61851 - DNA, 408 bp, Glycine max
  unsure (1)..(408): unsure at all n locations
atactaagcttctccggaagctacatgagctgccttggaaaacgctgttcacttcttcttaactatnggatcttcacngaaattggtctgcagcttcacaagacactcgtccacgatctgaccaatgggatctttgagagatgttggagtggcgcggcgtttcgtgtccgagccatttcttacttgagcgtttcagcctttgctttcgtgtagcttaggaaaaacaccatttcttcttctttctttcttccaaatccttttctaacgtcccaagcactttctccatcacccacatccaccattagccaccacanaaccgccgtgttctcccgtgcaaccctacactgagaggaacccttcgaccgtagaggaatcttccaacttggctcgccggttcggtagagaacg

SEQ ID NO: 61852 - DNA, 416 bp, Glycine max
ttctatcaatagaccttcaatctttaatggagagggttaccactactggaaaacccgaatgccaatttttatcgaggcaataaaactaaatatctgggaagccatagaaatagggccttatatacccaccacagtagaaagagtttcaatagatggtagttcatcaagtgaaagcataaccatagaaaaacctatagatagatggtctgaagaggatagaaaacgagtacaatacaacctaaaagccaaaaacataataacatctgccctaggaatggatgaatatttcagagtttcaaattgtaagagtgctaaggaaatgtgggacactcttcgattaacacatgaaggaactacagatgttaaaagatctaggataaatgcactaactcatgagtattgaattattagaatga

SEQ ID NO: 61853 - DNA, 464 bp, Glycine max
  unsure (1)..(464): unsure at all n locations
cgagaagaaaatacatggttgcatcatcataagggggagaatgtgaatgtatgtatacatgattttgatgatgtcaaagaagaatctaacaaggatgcttcaaatgataagcatttgcttcaagaataattcaagattgcttcaacaaacaaagcctttgttcaagaatcactaaagaccaagccttgccttaaaacaaagtgctttcaagacatgcaaggctctggtaatcaattaccaggaagtgtaatcgattaccacaagacagggttgagaaatagctggtgaaaaatgttttgaatttgaattttcaacatgtaatcgattaccatatgtctgtaatcgattaccacccacgaaactttggaaattcaaattcaaaagtcataacccttcanatataactgtgtaatcgattacacaaacattgtaatcgattaccagtggagaagtttagaaaatct

SEQ ID NO: 61854 - DNA, 366 bp, Glycine max
  unsure (1)..(366): unsure at all n locations
ctcttggatnntcggttaatctttcattctgcaagaatttcagtgaatttgtttgcacgtgttgcacgagaagaggcgagagcacttcacggcatggccgaactactttntcttgagttactttttcaggtgcgctatccatctatttagatgctgaaagaaatttcttggtcaatgttgtgctcgattgtagagagaatgtggttcttgtgacacatagatgactgaactttgtcatatgtgtgctatatgtatcttgcttcagtatcccatactggtgttgcaccttctggataaactaatcactatttcccgtagctgcatggtattggatgggcatattatctttgcagttcgctcgatcta

SEQ ID NO: 61855 - DNA, 430 bp, Glycine max
  unsure (1)..(430): unsure at all n locations
tctggctngntngctacagaaanaatttatgatttacaagttcaccatgaaccaagatactctgcctggctgggtaatggctcttgcatggcttgtctatctactgtggttgtggatttgtttcaaggaaccagcacatgagaatcaaggaaatcttgtgctatatgaagcagacacaggtacgtcagcaagaccgcatgtttctattacatatatgaaactcacttttatttatgggtcttttctcttctatatgtatcagacatgaagtacgcctatgcaccaacgataatgatggttcttgttttttccatcaacatgagaaaattcattgtggtcttggtttgtctataagagttccataaatgattctataagatcaactcttcttatcatgaatgtatctactatttcttgacaacaccttcat

SEQ ID NO: 61856 - DNA, 432 bp, Glycine max
  unsure (1)..(432): unsure at all n locations
agctngcattaggaatagcgaaatccccactctatcattaggattaggacctgacatctcaaacaaacaaatcaaacgcaacaagacaattatagttgttgtttgaatacctcacccactcaagtgtatcacacaattatggcttttctctaatgaaacactcttaccttttaccactctaattccccttgagttcttaagcaattcaagagattatggccacaacaaagaacaattcaccaatatgtgtaaggtaaggctagagagacaaagaaaaggttaaccaagaaaaaggctaacaatgtttctatgcacaaatgaaggaaataaaattcagaatttatgaattcaagtaacaatccttcatgcaaccaatatattaccttatagagatttttttaaagttcttcagcatgaaccatcaacccgatt

SEQ ID NO: 61857 - DNA, 459 bp, Glycine max
ttcagatctaaagctgtggttctgtttatatctgtagaagttaattgctccccttttggccgttcagtgtgaaaaatgcctctactttcatcttctgaaaaattgaacatgacatgattaatttataaaaaattggcctccgaaagctaattggatccacagaataatcttatcatgacatatacataccatctaattcatgcttgacaaattttgccttttgagatttaatgcttctaatttggacatgccgatgcaagttcaccacattgtgcctttttttaacatttgtagatagtccagccttcattatcttggtaggttgaggagaagacactgtggatttctctctagtcttttggcatgagaatttctcatccaaaatttcaacaggatcgtcgctaatctcgacatggctgctgtcctttccatgatgagtaccattggaaggatagtcta

SEQ ID NO: 61858 - DNA, 446 bp, Glycine max
  unsure (1)..(446): unsure at all n locations
agcttgatgcgttaccagagaaacccattctttagtatatgttgatgccgaagtgattcagtgtgttggactgcatgcaattngaaacttggcaaactgacaatcacactttccaatgtgagaccataagtgattcggtgtgtttgactgcatgcaatttatattaatactctgcagcaatgcatccncggatttgttttatattttttacatgaagagaatcatacaatttttttattattaaatagatncaattttttacacatgaattcaacatgaccttatttcattggttcattgtatcaaccttttaggttaactatgttatcatttaaaaataaatgttatgagaaattaaataaataatttgataagatttacatatatttaaggttctaatttgaaacatgcgaggagtaaaatgatttacgtctaactaattttgt

SEQ ID NO: 61859 - DNA, 463 bp, Glycine max
  unsure (1)..(463): unsure at all n locations
cattatcctcagaattgagtcgtgctgtttttgtttcttcttgngccttattgaggtctggacttcttctanggcaatgtcttgatctttgccataaagaattgcatccttgaaatgttcaaaggattttggtaaggaattcanaagcaagagagctntatcctcctcttcaagctttacttcaatattttccaaatcatcaagaatcttgtngaaatcagccaattgttcggtgctgttcttgactctgtcatcttgaaggtgtatagttgttgcttcaagcatagccgatttgcaagggactttgtcatatataatgactccagtttcagccacattgaggttgctgtcttttctcttgcaacttctcttanagctntatctccaaggcataaaatgattgcacttctggattagcaatcatcactgatttctcttcgagcttaaagattanacatctttt

SEQ ID NO: 61860 - DNA, 414 bp, Glycine max
  unsure (1)..(414): unsure at all n locations
gacggaccttaagcgaccgggcatgcaagcttcttataagctgaaccatttatctattacacaagtngagntttattcagaaaattagagtttatctcttttatcttagtgagagtgattctcctaaattcttgagtgattcaagaacaccttggctgtatcaaaggactttcacaacctttgtgtgttgccctcgctggaaagagtgattctttccttcctatcatcatcacccttgttctttcaaaccacaattccagaaaatccacctctgcccagaattatctcgtggccataactcccattttacgcactcaaattaagtgattcttgagcctaaattgaatttcaaaacgagacctttcacctctgtcataccctaatttcgtccggggaccttttgttgatgacatg

SEQ ID NO: 61861 - DNA, 491 bp, Glycine max
gagccaaaatcccaactcacctagaccttgtttctatatgagaatttctatcgtcacccttgggagaaaacataataagataaattaagttcccaatcaaagatcggaagaaaacaaaaaagaaaaaagatctcgatcaaagatcggaaggaaacataagaaaaaaaaagttcccagtcaaagatcggaagaaaacaaaggaaataagaaaatccccgatcaaagatcggaagaaaatgaaagaattatacagaagggtctttggaccagacaaatatccaaacaatacagaatagtcacaacccaataaggaaagaaaggaaaccatgacttgaagtggtcctctccctttgattgccaaccaaaatcttgtgcgctgatgactttctcgccccgcactaaacaaaaacagaaaagggaaagggtcaaacactcagagccaaatatcttcaccaaacaccattccccgaaaagtcctattgatccatgat

SEQ ID NO: 61862 - DNA, 256 bp, Glycine max
catttgggtgagcatccatacatggccttatctccacaccactttatcaccatgatcaatagcttgcagtctcataaagcatagactaacgcgtatacaccccatctatttttggtgggactatatacaatactttgcgaaccacccaactgccgcttacatactaacgtgtgacttgaacggtcttattcccatgaacaaacgaacaatgaacagatttagcaccctcttggttacgcttaatgacacacattta

SEQ ID NO: 61863 - DNA, 457 bp, Glycine max
  unsure (1)..(457): unsure at all n locations
ttctccgaactcagaactacagaactattgttngtcctttccttcaangaccncgagggagaaattcccgaggaaatttggtgcatggagaagttggatgttcttgatcttgaaggaaacttgataagtggggttctccctcttacgtttaatggcttgaaaaacttgaaggttcttaatctacggtttaatacgaattgtggggagaatccgagttcgctgtctagttttaagagtttggaggttttgaacttggctgggaatgggattaacggttctgttcctagctttgttgggaggttgagaggggtgtatctgtcttataacttgcttggtggggcaattccgcacgagattggggaacattgtgggcaactggatcatcttgatttgtctggtaatcttttgatgcaggcaatttcggagagtgtgngcaattgtagtgagttgaggatga

SEQ ID NO: 61864 - DNA, 382 bp, Glycine max
agtcacctgcagcatgcaagcttagcctgacactaatcgacaacttttttggctaagcgagacttattgtcgctaagcgcaattccttacggccataactgaggtcgataagctaagtgccagtcatggtagctaagcgagattcattgcggcaatatgagcgctaagcgagaacctctcaactaagcgcatgctcctctgtactttagatgcatcattttagctaagctggccagagccaggcttagcgagagttgcaacttttctaatctgcagacctcgctaagtggacttactctcacgctaagccgagtttctgtcaaaaaaaaattgattttgatttgaacgtcagctaacgcatgttcgctagcgagcctattga

SEQ ID NO: 61865 - DNA, 461 bp, Glycine max
  unsure (1)..(461): unsure at all n locations
ccttcttggattcaanggacatcttctagtttatttaccttatgaggcaagaactcggtggccagttcaatatcgctggatgtatcctttcgtgaggcataaaatgagtaatcatttatacaccattgtattatatacaatagtcatttttaaaaaatacttattcatattcaatttaggtgtttacactccctcagaaataaagtcaagaataaagcttaagttgagggatcaatttgtgaagcgtactttgtggaggagacatctacctttgcctcgttttactatcctgatcaaattgcaacaagaaggactaagacgcctcgaaatgttgatgcggatgaaggttcttcatcttctcctcctatatcagttgtcaattacccaagaagagcgagtggtaaatccaaaacatatnttttggaccaagttgatcttcatgtngctcacttgtacgttct

SEQ ID NO: 61866 - DNA, 365 bp, Glycine max
tactggaaaacccgaatgctaatttttatcgaggcaataaatctaaatatctgggaagccataaaaatagggccttatatacccaccacagtagaaagaagttcaatagatggttgttcatcaagtgaaagcctaaccatataaaaacctataaatatatggtctgaagaggataaaaaactagtaccatacaacctaaaagccaaaaacattataacatctgccctaggaatggatgaatatttcagagtttcaaattgttaagagtgctaaagaaatgtgggacactctttcattaacacatgaaggaactacagatgttaaaagatctaggattaatgcactaactcatgagtatgaattat

SEQ ID NO: 61867 - DNA, 418 bp, Glycine max
  unsure (1)..(418): unsure at all n locations
cacattcacaaagcgcgcataaacccaccatcccctggtggccaccttcaactgagctcacgtactcccacgtagcccatatcctcgtttctctcaacaccgggtccccatcaatctctcccagcttncacaacatccaagcaaaacaacattcaaacagcacaagctatcacagccaagcaaaacagagcaaaggcagaaaactctgctcaacacatcaaccaaaatcacagcttttctcacttaaagaccacagtaacaattccttcgttccaattcgttaaccggtggatcgactccaaatatttactggaagtctctagtacataagcctacattnttgaccgtgggatctactagcaaacatccagaactcattctgcactgctctnttcacagccaaccacacacaagcatt

SEQ ID NO: 61868 - DNA, 402 bp, Glycine max
  unsure (1)..(402): unsure at all n locations
gatgccttttttttttaccatattaccaaccatccctcatctctttttctgccattccagttctaacctttaaattggtgcatataatctattatgtaggcaaacattagtggttaaaacgttattttttttgttaattcaacatgtgaatttttattttctttatttctttcttaaacatcatatccatcttatatctattggatatgatngatcggattaatttgcatcatattatacaccctccactacctatagaacaactgtcacacctttgaataaccaaataaacattattttacagacaaagatttgtttacaccaacctcgtacaaaaantnaagcctttcttttcttttctttggtttcccttttggttacaccaacctaaataattaattt

SEQ ID NO: 61869 - DNA, 492 bp, Glycine max
  unsure (1)..(492): unsure at all n locations
tactcaagctgtaattngtatagatgctagatagaatgagagactatatttcttgcgtggaaaccctctgtgaggtgaaaatctatgtccgtgcactttaaaacacaaaaaccccttntgtgttgtaagtcaaacaatggttgtcaaggttaaaatccagtagtgttggtggtctaattgaggctaggttgaaagtctaatagaagtattatcangttgttgaaattcagtggttggttgtgtttgtgaaatctcatcttanagggcgaggactaggcgtagctcaagcttgggctgaaccaatataaaaatcaatgtgcactcttttttctttctcctatttgcactatttttgaacaaatntgtttactagttntgttaatctttaaaacagaaaaaactttcacaatacacaaaanactgaactaagtttatcaaaatcttttcaaataaacaacctttttgaaacaagagctctgagtagagaatttt

SEQ ID NO: 61870 - DNA, 447 bp, Glycine max
  unsure (1)..(447): unsure at all n locations
acataaacttcctctaacgnatccatttatgaaagaatctntgacatccatttgggataacttgaaacccataacacaagcataagcaagtagtaatcttacggcctctaaccttgctattggtgcataggtttcaccaaaagtctataccctatcattggntatagcccttggctactagccttgcctcattcctagttatcaaaacatgttcatccaatttattcttgaacacccatttagtgccaatgatgttcatgactntagaataaggtaccaattcccatacgtcatttcttttaaattgttcaactcctcatgcatggacattattcaaaactcatctntgattgccacttatatagataagggttcttcttgtaacgccttgaaattttgttaactataaaatcgaagattaattgtatttatcgtatttgattatat

SEQ ID NO: 61871 - DNA, 432 bp, Glycine max
  unsure (1)..(432): unsure at all n locations
actaagcttaaaagtattcaccagcaccttanggttgcttccaggtcaagctgtttgatctgctcttcaaacaagggaaagacgaacgacaataaactcggtttcgacgtcagtaaaaacgatggtatgtcacggggtgaaagcgaaaacgacaatcccggaagcactatgttctctttggtttcgtccgtgatgtaatcagcgtatccgtgaaagtagtggtagaggatatccagcaccgtggcgggttggatccgagcatagctgttgggaggttgagtccacgcgccacctgtggggcccacggaacgagcaaggtgtagagtaagcaagtgaaagggtggccctcgttggcgctggagagtatgaggttggacacgaacaccgaggcacggcgcttgagttccgaggcgtagaggttgtaatcggagt

SEQ ID NO: 61872 - DNA, 446 bp, Glycine max
catgcaagctaggagctggtctagaattgttggagtttaaccaaactttacattgggagagaattcctatgggtctaagggtaggaagaatcacgagcgcgaagatatagactccagagaagaagaagaaaggagaagtaacaagcaatcagcacttatccttgttgatgagagtgactcgtcagatgcttttgatcgagttgggctgcttaatgtggaaaatggttgtaatgaacactgtagtttgcaaagggatacagtgaatgctgtatagccaggtggagtgaagggtcgtcctacgaatcaagcgacacactaggaaacagtgaaattgaggaatcttctgatgatgtgatcacaatgtgtgtgtgcccacgacacaagagctgccaatgaatcgctagagcagattaggcagcactcttctccctctggggatgcattac

SEQ ID NO: 61873 - DNA, 385 bp, Glycine max
taactatgggagagcagtacttatctctgacgctcattgtatgataatgattagccagtgccatattcggatataaagtggtcagtttcttagttattccgtgctatcgtattctagccagatccattataactagaaactacagggactgccaagtgcgagtcttttaataatattgggggaagacggcgtcatatctcttgaataacgcgggtaataccatttatagtagtatttctgtcctggtcacgcttcggctagttcataatttatgtgcatatatagtatcattatctaaatagttgatgttactatcaacaattgacagtctgcacattacctctatattgcataccccacgtatgagttaagccctgaattatgc

SEQ ID NO: 61874 - DNA, 481 bp, Glycine max
  unsure (1)..(481): unsure at all n locations
atcctcagagtcacctgngcatgcaagctntctttctttcctgtgagtcttactattattaaccacttgatttagngtatacatatgtttcgggaccaactccaacaaaatccttagatcaattcttttactatcttgtctttgttgatcatttcaccaagtgcatttggttgtatcccatgaaatataatgcaaatgtctcaataataccaaaattaaatgtcttgttgaaatttttttaatttaccattattacattttactctgacaacagggtaagtttatcaaactcaaacagtttttaagtagtcaaggtatatctcattataccacccccaccacacaccaaagtgaaatgccaccgctaaaaggtgccaccgacacatagttgaaatcaggaaagccttactccacataaccaacctacccctcttaatttggacatatgcctttcgcactgccacttacctcataaatagac

SEQ ID NO: 61875 - DNA, 464 bp, Glycine max
  unsure (1)..(464): unsure at all n locations
gtctcacgatgtcacgtgctttgcatcttttgttggtcgtggctatacgagacatcttgccaaacaaagtcaggttagcgataactcgcctgtgctttttcttccatgctatatgtagcaaagtcattgatccagtcaagtttgatgagttggaaaatgaggccgtaattatactgtgccagttggagatgtattttccccctgctttctttgacatcatgattcacttgattgtgcatctggtaagagaaatcaaatgttgtggtcctgtttatctacggtggatgtacnccggtgagcgatacatgaagatcttaaaagggtatacaaagaatctatattgtccagaagcatctattgttgagaggtacattgcagaagaagccacttgaatttgttcagaatacttagagaaggctaaacctgttgngcttnctgagtctcgacatgatgacagagtgggt

SEQ ID NO: 61876 - DNA, 326 bp, Glycine max
aacacacaccaaatctatcttgtattccagcactcacttaattctccccctttggttttgagattaagctatcacttgaaggtaaggtatctaattatatgaactcttgatttaatcccaactttatcttaaagttgagctctttaattatatgagagattgatttaatgccaactttctgtccccctttggcatcaacaaaaagataaagtgcgtatagatacataaaatcatacattcactcataatcatccaagtgttctaatccatacgacaagcaaggaggacaatgtttcatacataaacccagcaatgaagataataat

SEQ ID NO: 61877 - DNA, 472 bp, Glycine max
tgcccagtgagcaagttgaatacataatacagacctaatatgctcaactcctcatatgcagcccacattagaggatccattgagagtgcctgcttaaaattatgtatggcacttttccttctgtcagtgtatctgaaaaagagaataacagccaaagaaatttagaaaggtggatttatcaaatgtggcaagctagcatgacatacacacatacatacatacatatgtgtacacacacacatacacaaatatatggaattgactccagttacagcatccaatgtctttctatgaaatgtatttttcattgattcaattgttgaattacaactatctatcattttttttcatgtcaaactttgaaaaacttgaacatcaataaaaaggtaattgaatagatcatattttcataccatttgaatgtacaaaactacaaatcatatattaatatagtgattattaaaaggagtat

SEQ ID NO: 61878 - DNA, 459 bp, Glycine max
  unsure (1)..(459): unsure at all n locations
catgcaagcttatgcgcatatttccttactaacgttctcttgcacaagacatcctatcaactaagaaaaatgcacccatatacaatcaaggtagcttcattacctagattatttacatgtacttccaaagggtatttgttatttacatcacacacgcctccttggctgaatttacatacatacatactcaaagcattttggggtaccaaaaactgcacatgcgctcatcttggtatttctaatacccatacatatacaaacttcacgatgaatcttgactacctacacaataaggtgctacatttcatgctttcttttttttttttttttttcaagtttttgctacctaaagccacatgcaaattcaagcatattttcctttgctgactaaaatngtattcaaattagaaggtatatatttnttttggaatatgttntcttcacataacatgcaacata

SEQ ID NO: 61879 - DNA, 450 bp, Glycine max
  unsure (1)..(450): unsure at all n locations
tctccttccttttcctatanatagggaaggagggaagaacataaatgttcaaccctcctggtatatgagattcacttaaaagtagtgagaaaaattgtttccgtgaaggaaatccaagccaaggcgcttccgtgacatttccgtgggtgatttcgcgaagaatttcaaccggtcttcgtcggtcctcgttcgttctttcgcattcttgggtcttcaactggtaagtttccgaaatcgaacttttcaattcattctgtacccatagtggtcctcatttgtttcacatgcttttattttcatttcatttactttctgtaccccctcttaacgtgctttagtcatttatttaagtcattttctcgcctaaccaaaaataaaatacatttccaccaatcattcgtattggaacatcctttaatttctgctaaaatgaattccgaccattatgcc

SEQ ID NO: 61880 - DNA, 423 bp, Glycine max
  unsure (1)..(423): unsure at all n locations
agctngaagtgtaaataatgttgttaaagattattacganattaggtaattggtttgaatgaatggtgtcgacgtaatgtgcaaaattaataatgtctctaggataattcggggtggttaatgataaatcgaaaataaaaacctaagtttcacgtgaaaagataatactaagataaattgagtacatcccttatttacaagttggccaaatcttgtaattaaaataaacacattttctatattataaaatgatatcaaaatatgttctatatctattaatgaatcacttatcgtattactattcatgcattgatcgagctcaaaagtgctaagcgtgtgagaaagtgtacttataaaagcttaagtttcacgtcgacatacagttccataatcacattttaagactaggtgaaataatatata

SEQ ID NO: 61881 - DNA, 444 bp, Glycine max
  unsure (1)..(444): unsure at all n locations
agctgcctatgtttgtcaagcttatggagctgcgtcgaggcttaccgaggatgagccttggattttgtgaacctttgaggatcaccaagcgtagatcttgggtttgatgagtcttatttgcaatgcatgtgttgtgctcttgcacacatggcacttgccgtgggtggcatgtattggagacgtagtggcatgctcttgcatacgtgtcacttacaaagtggcacatagtggagatatggtggtgtgctccttcatatatgtcactcgccgtgggtggcatatactggagacgtagtgtcgtgaattagaaggactcagcaagggaggaccttgggtttttcgttccgtttgtaggatcaactanggaatngacggacctangttttgggtgtcgtgctcttgcatacatgccactntgtgtgggtggcacacactgaagtcatg

SEQ ID NO: 61882 - DNA, 443 bp, Glycine max
cttgtcctcagaatcccttatgggactatacttataccatacagcattattggaacaacatacttaaaaccaaaacttaatctgcagatccctcttgtaaagctaagttttaattctgcttcattcaagttctaaggcaacaatacatttcccaatgttaaaatcacctaactaggcacacaaatggttgattagaccaagagaaatacaaaattaagcactgaaagaagcattgaacacaagaaacaaaatcaattagatatgaaataattgcatcagctgttcattagaaatccccaacaagggtgtttagccagccattacagacgaaaccctaacaataataagcttacaaaacctaagcatctcttgcaaaagtgttcctcttgctgcctctagagctcttttcccgaaataagcattgtggcgtgatgtggaaattt

SEQ ID NO: 61883 - DNA, 457 bp, Glycine max
  unsure (1)..(457): unsure at all n locations
tactaagctagcattgcaatgcatgtgaattcctctgctgttctattagtggagggatcagagaatgactaagtgatcgttcaatgggatgatggtttgaattgctgagataaagtgtcaatgtgaagttctggtcccatgagtaaactacacgactaaaaaaatattgtcgtaactttaatgggtcaaaagcattaataaaccttttatttttttattactttntttaacaacgggttatatatatgtagcagnttattctaaacaatggactacgtgtgaaatctttgaattctatgtaagaaatgttatttcaaacttctcatcagtcttcatgtcaatgatggcatgctccatttgaattctatgtctaaataagctctcggtcttccggttctgaaactttatttcgtagaaagaagccaaattngaagatacaacatttgatactataacc

SEQ ID NO: 61884 - DNA, 437 bp, Glycine max
  unsure (1)..(437): unsure at all n locations
ccgcaagacttacggaaagatctagattgaccttagtttangtatctatataagccaatggatcactcacccaatactaacgaccagcctttgagatgcctcacattccgagacttccaatagtccaccattgagaattgagaatttagatgtctttcagggaagaaaccatatctttatcgggtgtctcccttttgacagattgcactgtgtcaggattcacaagaagttggaccgcaaaaacagactcggaancggcatagcgggcctaccatgggggtacctagaagacaaggcgaggggtatggcccatcaaggagattgggtccccgttatggatgtgttaactcntgctaattttgggatcgtcctctctccaaacgtggatggtttgggggacctagcagcaatcgacgctttccttgcataccaccata

SEQ ID NO: 61885 - DNA, 52 bp, Glycine max
  unsure (1)..(52): unsure at all n locations
aactaagcgatgctgaggcactctaaggatccgggaccgtgctttatnttct

SEQ ID NO: 61886 - DNA, 308 bp, Glycine max
tgggcccttactttttggtactgttccccacacaatttttctttggaaataccaaggtgcaatattccaaaaatagggtggtatatgtaataggaatttaccttgggggatgtcaatacccctatttttcaaacaaaataatgaattatgtgctccaccccagacatggtatctggttgcggctcttgcaagtaaataaatggtgcaatggttttctatggaaagttacacaattaagaatgcacaatgttctttcagtagtgttggtgtgcatggaccatacgttaatagtataaattgtcatgcct

SEQ ID NO: 61887 - DNA, 334 bp, Glycine max
gaggatcaaagagagaagtctattttataaaccaaacccaaccccttaggacatatggaagatcagatcacatacatgggaactccacttgatgaaattgaggcgcacctcataatccaagtgttgaatgtaaatgtagacttcgtcatgtagttcgtagcgaacatatttgaggtacatcctaactatcactgccattagctttcgatatgccaagaggctaagccaatcactcacaataaagaaaggttgttgatgaaagacacataacaattcacgacatggttggtaaactatcgtcaccttagctcattcgagaggtccatataccact

SEQ ID NO: 61888 - DNA, 419 bp, Glycine max
  unsure (1)..(419): unsure at all n locations
agcttggtagggaaaacgancgttatcatttgctggccngttgttcgcngcacncacaganaattgcgggcactacatacacattaaattattctctttttatttaccaagaagatatagaaggttcattattaggttgaatttgcttaataatactatagcagagaagatatagaagggtcaacgcattccgccttcgaaatttgatcgtaacttgcttctttgtagctccccccacatgcataaccatatataacggatggattagcacttaattagcagtaaaatatataacttacactggattttgtttaggaagcatggaaaattgtggttccatctaggcatgacaagatgcattacaggatcattgactatataaaggcaactacaccatccgcacgcttcaagtttttaat

SEQ ID NO: 61889 - DNA, 464 bp, Glycine max
  unsure (1)..(464): unsure at all n locations
gagcgaccaggcatgcaagcttgaggatatggcgactttatacattgttactatgnnggcggcgggcganggggcacaacangttttccacatccacaaagcgcgcataaacccaccatcccctgttgcccacctccaactgagctcacgtactcccacgtagcccatattctcttttctctcaacaccgggtccccatcaatccttccaagctntcccaacatcaaagtaaaacgacattcaaacagcacaagctatcacagtcaagcaaaacagagcaaaggcagaaaactctgccaaaacaccaaccaaatcacagcttttctcacttaaagactccaataacaattccttcgttccggttcattaaccgttggatcgactccgaaaatttactggaagtctttatgacataagcctacattttgaccgttgngatctactattacacattcagaacttat

SEQ ID NO: 61890 - DNA, 466 bp, Glycine max
  unsure (1)..(466): unsure at all n locations
tctatataagctgaaccacttttcaataaacactatttgtgnnttattcagaacattagaggttatctctcttatcttggtgagagagattctcctaaattcttgagtgattcaagaacaccctggctgtatcaaaggactttcacaacctttgtgtgttgccctcgctggaaagagtgattctttccttcctatcatcttcacccttggtctttcaaaccacaattccagaaaatccacctctgcccaaaattatctcgtgaccatacactccattctacacactcaaattaagtgattcttgagcctaatttgaatttcaaaacgagacctttcacctcgttttggaatcacctcatctggagccctgtagcttccgctattgccatttctatatttctgtccacgcaccacttaacctaccgtntaccatcccattcatccattatatgccagaaaccacctt

SEQ ID NO: 61891 - DNA, 451 bp, Glycine max
  unsure (1)..(451): unsure at all n locations
agctntgngngtgcanannggattctttgatattngagaatttatacttcaaagnncagacctcattctccctcttctttctctcaaaatttcattcctctctctccctctccctccactcatcttctcctaccttcaagctcttatccatggtttcctatggcggtgagctttttcttgactcatcttctcattgaaggagtgtctccaatcacctttcatccttctccattntgctgccattcatcttcaagaagcaaaggactccattgatgaagaagatccaaggcctacaagctctacatggagccacattaattctctcaggagatagaatttcacccacttggaacacattcaacttgtgcagatgcacatactatatctaaataaagagaataacacgggtacaaaactacaaaatatattcaaagatatattgtaatttttt

SEQ ID NO: 61892 - DNA, 479 bp, Glycine max
  unsure (1)..(479): unsure at all n locations
ggatactcttagctgctgtaggcggacgacaagtttcaatgcagtattcactntgngagaaangaacatgtggctcgcaccactatcaatcaacaccaatanatccacattctgtatcttcccttcaaccttcatggngtgagactcgcccatgcttgccaatacccccatcagtttacattccacctccacttttttctttacttttcaccggcacatactccatacttacaatttccccttcctttgttatggtttcaccttctcctaggattagaaccctaagagctcattctggacatttatgcaacgtagggcggtattttcccccacatttgaaacaaagacccttcgctctcctctcttcgaattcatcattgtggatacttcgtattccctttcacctctncatcgtgccagaacgcggacctccatctgttttgcgagctgaggaaaccaaagacgaagctgaatttgtg

SEQ ID NO: 61893 - DNA, 405 bp, Glycine max
  unsure (1)..(405): unsure at all n locations
tcagagacgaccacaggcatgcaagcttattaacaactgacacatatgaagatatgatttcattataagcaaaccaaacaatgtcaaaactaccggcatcacctagcggctngccataatgccctaatcgcacttcacaaattatagagatggtcggtcttataactcgcgactcaacaatggaattatggtatagaaacattaaagatgcaaggacatttcaagcatcattcagccatgcagaataaaatacaaataattattcaaccatgctcaatagaagtactcataagtaatcacaaagagcgcacactataatatggtcagcatataacacactgtgtgaaaggttcaacctgctctaataccactaaatgtaaccctctaccccgatttccatattat

SEQ ID NO: 61894 - DNA, 491 bp, Glycine max
gcctatgatactaagcttgtggcaataagatgattaagaagttgtgttgttttttatggacgacacaacgctcaaaagtcaagaacacttcatgataacacagatgatgatctcatgaatcaaagaatgagttcaagattgaaacacttcaaggttcaagacgaaattcgatttcaaagaatcaaggttccagaatcaagatcatgattcaagacttcaagatcaagaatcaagagaagactcaatcaagaaaagtattaaaaagctttttcaaaaactgagtagcacatgaatttctctcaaaaccttttaccaaagagattctactctctggtaatcgattaccagattgttgtaatcgattaccagcagcaaaatgtgtcttaaagagctctcaactgaattacaatgctccaattgatttcacaatgttgtaatcgattacaatgttttcggtaatcgactaccagcgtgtttgaacgtctgaattc

SEQ ID NO: 61895 - DNA, 398 bp, Glycine max
  unsure (1)..(398): unsure at all n locations
agctnggcacatgtagaatatactgancgaattgttactagaaagcagcaagaacaaaccatggtgcttgaacgaatgtaacatctgtgctggatggagagagagcgatagagaggaaaacccatgcagtgactgacatatctatgcgaacaagattaccaccaaccctcaatgtgcaaacttaccatataacaacctttatccttacctaccacccagttattcataaggggtatccctaagtcgaccacaaagtgtgtatagcacacttgcagtcacgaagaccatcttctggacatgccacatcaccagccaagatatgaatcttgcagcgaaacagcctgcagaattcaccccaagcccgggcgctatgctgtcttgctcccatatctacttga

SEQ ID NO: 61896 - DNA, 336 bp, Glycine max
  unsure (1)..(336): unsure at all n locations
agcttctagatatattatgtgtccttaacgatcatccgagngaaaagntatgaccatttgaatttctggagagctttcgttgtacaatcttgagggtctcgatatattatgcgccagaatcggactttcagctgaaatgatatgaccatttgaatttgcgatagatttttgttctcaaattcaactgtctcgataattatacgccctaataggacatncgagcgaaaagctatgaccatttgagtttaatgagagctctcgtttttaaattcaagcgtcttgtctatcatggccccgtttcgtacatcgttgaaacgttatgatatcccacttctc

SEQ ID NO: 61897 - DNA, 439 bp, Glycine max
  unsure (1)..(439): unsure at all n locations
ntggagaaccaagccatcagaatgctagacgaaatatagatggtaatagaggtaacaatggtggtaatgacggaccgaggcagaaccgggttgagggagtaaagctcaatgttcctcccttcaaaggtagaagtgatccagatgcctacctggactgggaaatgaagactggagcacgtattgcctgcaatgactacactgatgcgcagaaagtcaagctagcaacagctgaattctccgactatgccctttgttggtggcataaataccaaagagaaatgttgagagaggaaaggcgagaggtagatacatggactgagatgaaaagggtgatgagaaaaaggtatgtgcccactagctataacagaaccatgcgacagaaactncaagggctgtcccaagggaattaaccgtggaagaatatataaagagatggaat

SEQ ID NO: 61898 - DNA, 180 bp, Glycine max
aacaatttttatagaatattgagtgtcaacgctttgtaaataaatgattcacttattgtgaaatagtgtttcacacgaactgttttagtatatcaatgaaccttaatatatgacacttatttatatcctcacaatgacgtccaacaggtactaaggattatagggagtgtacgatctcct

SEQ ID NO: 61899 - DNA, 373 bp, Glycine max
  unsure (1)..(373): unsure at all n locations
atatgaacattctagaacatcatggataactataagcttgagagcacttgtttgcatgcccaagattgtgcattctttttgtctgtggactggcaggataaagcaaagatccgaaaaaagaaaaagaataaacaaaagaagctttctttatagcaatcttagctgaatgaaatatttttacctaaagctcactttccaaatcaggccacggttntactctcatgcattaccatgtcgttttcctagctcccctaggtgtgtaatttgtatcatctgcaatgaatcataataaaatcatgaagagtaaagaataatatttgtgaaattctctgatagaagaaacaatcgtgttgtctacacggtagccaaaatg

SEQ ID NO: 61900 - DNA, 364 bp, Glycine max
  unsure (1)..(364): unsure at all n locations
aaacatcttttaaaaaagggtttgaatttgaattttgaacctgtaatcgattaccagatgtttataatcgattatcagcaacagaactcttgaaatcaaattgaaaattcatgacccttcaaaatataatcgtgtaatcgattaccagagacctataatcgattactagtgtagaatttcagaaaaaactttttgaaaagacacatctcttcaagccattttgaaaaggcacgaagggaaatttgaaaaggcacgaagggcctatatatatgtgtgtctaacttcgaanagtaagagagagatattctaagagaacttcattgccaaatgctctctcatcaactcttgggcaaacacttacaaa

SEQ ID NO: 61901 - DNA, 493 bp, Glycine max
  unsure (1)..(493): unsure at all n locations
ccttgatactaagctttgaatcaaacttccactggtaatattacagctatctattactatagagtaaaaactctggtaacttagaaaattttgagaanaactctcttgaaaaacaaaattgtgctatgtctgtttttttgaaaaaacttttcaatacttctcttgtgaagtcttcttgatttcttctcttgaatcttgaattcatcatttcttgaatcttgaaatcaaacttcacttgattcttgaatcttcttgatttcttctcgttgacttaatcttgaaatcattctttaggatttttgtcatcatctttgtcattatcaaaactacttgattcatcttgattcatcatcatgaagcttgcttctacacagaatagaagagaatagaaggtttatgcagaatattcctcaaggatcactctctttaaggacaacgagcacatgctactatctatnttgttcctctcttctaacatagagaatgccatgtc

SEQ ID NO: 61902 - DNA, 349 bp, Glycine max
atttgtcgttttcatgcggaatcccaccttcactcggatgtaaaatatgtctctatagtcactcttttgacttgcgaggcagaattcatagcatctccttcttgcgatcgcccgtatgccggctgaagaataagtaaaagagttggacatgttacaagacgagcagaccaacacctttgcggtaataagtctaccatatgtctagtaaagaacaccagtgtttcatgatcgaagcaaacatattgacacctcggtcccctacataaaatagtgcatagacagaaatgatgtacatccagaagttgataagtctcagacccacttcttatatcttctctccgccgctcat

SEQ ID NO: 61903 - DNA, 396 bp, Glycine max
atggcagcagaagggagaatgtacaaagatgattggagatgctcacctcacgcataagatgatgctagaagtagcttcccaccatacgaagccatggataatagctctgacgtaggacaataaaatggcgggagtggagagaagggcccacatttatgcctcaatgggcctcacttgaagtctattctcaaattgaccaaagttgaaagaatactcacacaaggccgttatatatcacctatgtgtcacataaaaattggagggaaatctgacattctattctaaattcacctgaatttgaatttgaattggggagccaaattaggagccaacatttcactaataatgagcagcggaggttagatatggcctagcccactcatccaagatcaattc

SEQ ID NO: 61904 - DNA, 256 bp, Glycine max
  unsure (1)..(256): unsure at all n locations
tctctcttctatatatatntcaaacattgcaagaagctatgagaatatgcccaaactccctctccatttctgatattaggcttaaatatgtggccttgttggagcttgtgcgcctaacgcaactttgggtcgcttagcgagcattatggaatttcagcttaccgcgctcgtttttactcaggggataggctcaagtggcgtgcctacgggattagccttcctcggaaacgttacagatatcctctttcaaatcttc

SEQ ID NO: 61905 - DNA, 403 bp, Glycine max
aggggcacaacaagcctggataacttgacatacacactacacgaactgtatggtaaagccatatcaataacatggaacggcacccacctgatagttctgtatcaggagacactaaatgcgaactcaaacatggaactcttttactacttaggtcattttgtttcaaaaataaaaaaaatacgtgtttgacacaggtttcaacgaggcacatattgaatcacaaacggaatctgtactcaatcaaatacattgaataaaaatgctacaccccttccttttacatctcttttatcagacaagaacatacatagtcgttacttcaaggctttaaaacccatggaccaccatagtaagcctcctgcaacataaaggtaatgacacccaccacaacgagcacatgtcg

SEQ ID NO: 61906 - DNA, 449 bp, Glycine max
  unsure (1)..(449): unsure at all n locations
agcttcatgaatcaagtntcatagaatcaagtttcatgaataatcaaatttcaagattcaatcaagtttcaagaatcaagatcaagattcaagactcatgattcaagaatcaagacaagactctatcaagataagtactaaaattttttttcaaaacattgagtagcacaagaatttttcaccaaaatatttaccgaagagttttactctctgggaatcgattaccataaggtagtaatcgattaccagtagccatcattgttttcaaaactggattacaaagctataatcgattaccataatcgtgtaatcgattaccaatgttttaaaatgttagatttcaaatttcaagagtcacaactagtgataaaacattttcaaatcatnttaaacttgtgtaatcgattacacaatactagtaattgattaccagagtttctaaacgtttt

SEQ ID NO: 61907 - DNA, 447 bp, Glycine max
  unsure (1)..(447): unsure at all n locations
gtgtagccaccatctcacatggtatatcactgtgtatgnngcnactatcacgggtatcatctctctttccattattgggggtgccacttgggctgacaggtctctctacctttgggcgtattctttgaaagatatgtgccctttttgcacacgctttgtatgtgtatcctatccggagccatattcaaaatgtacttgttactgcctaacgaaggcaaccattaagtcctttcaagaatggactcatgaaggttccaagttagtgtaccaagtaacagctaccccagtaagactttgttggaagaaatgtatcagcagttcctcatcttttgcgtatgcccccatcttctgacaataatttttagatggttcttggtgcaagtaggctccttgtacttgtgaaaggttggcaccttgtacttgggaggggtgatgatattgcgtact

SEQ ID NO: 61908 - DNA, 445 bp, Glycine max
  unsure (1)..(445): unsure at all n locations
ncaagctggacgatctaaatataccttnngatttaatatttttcttctctaagatggagctctgatggctttgtttaaagtgcttttaattgccaatgataagtgttagttcttattattgttagtaatgcatggcttgtattgtacaattctcctataattaaataataatgtcgaaatatcttgtacaagaagcttctaagaaaatttaaaatttgtttcaaagaatagactagattgttatcctaaaccagaatagagtttttttaataagccaataaatattataaaacaaagtgaaagcaatgttgcaggtgaatgcagaccttgacatggaactaaatccccaagcacaaccatggccatatcaaccgaagagccttaatagaatgtttagagatggtaatcctcacaacattngcaaattgcaaggacacatatcact

SEQ ID NO: 61909 - DNA, 476 bp, Glycine max
  unsure (1)..(476): unsure at all n locations
tggagaatgtgnggtgatatatcaagaggaaatntcattatctcctataccacttgnntgaaaatttgccatggtattaggaagaaagtcaaatcattctttatgtgttggtactgcaccactaacaaagaagttttcacacaaataaattattcaaaatcaacttaaaaatgcataaaattgagcaaataatttggagttgaaagtgcaaaagttgacaaatattaccaatgcacgtttaactctatgcagttatttcagttacttcatttccctcactctatctattataactgttttccttctctgtgtagtgttgcagctgtcaagtcaaactaactgccatgccatgcacataaaccactgcactatatgtatatgggtatgcatctcgatntctccatttcctacttctattanatataactcctctttaaacactacctaaattctgtacaaaaaaaatacctaaatta

SEQ ID NO: 61910 - DNA, 256 bp, Glycine max
  unsure (1)..(256): unsure at all n locations
catataccattaagtggtacttattttcttgggaatgggtctaataccttctcgtgtcaaagtgatgcaactacaactgtgtacattgttactctgagacaagctcctgcttctcactatcatcaacatgagttgatcacagcgggcaacaactctagacatggttcatctgggagaagaagaactagatgtcacaaaccaaggtacccctcatatgttgttagaatgttaacaaactgtgtgcanagtgtattaa

SEQ ID NO: 61911 - DNA, 465 bp, Glycine max
  unsure (1)..(465): unsure at all n locations
gctagattatgtaatttagatatgcgggcttaatcattcttaatagtgcactgggttatcttttgtaatgtatatgcattattaattcaaagtgtttgtgtgtgtgcacacatatcaaatctgctagtgctaatcactccagtatgtcacaagtttcttaaattcaaatctttcaattgacttcagaaataaaaaaacagaaattgcaagtaaaagaaacttacatgaagaggattgttaggatccaattgccccataccttgcaattgggtcctaacaaggattaacaaaatcatcaaattctaggaatagcaatgcaagcatggaggtcatgaagtcaaataaaaataaagaaataacactcttataatttctctaattttgtttctataatttctctaagaatatgacatcttaaaaattacaaagagtaaaanattgaaaggatgatcaggccatcacaat

SEQ ID NO: 61912 - DNA, 311 bp, Glycine max
tatgagggatccacaatcgttcacaacatccctttttgtgcatgatcaagtgaaggtcggtgtgaggaggttagagatgcagatgctcccattcctgtacccactgaagagggttaagtagtgggccaggcacttaacaccattcttgcttggccgacacatctcgtcaagcgtttatcagaacaggtatttcgatgtcattaaatgctctcttttttcaatttaaatttgttaattaactatgttggataaacagggaggtgtgggaccagcataaccttcagataggccggatcatgaggtcgatgatc

SEQ ID NO: 61913 - DNA, 407 bp, Glycine max
gtgatagtattggtggcctttcttttccatcctttgacttttgaacaattcatttgaatggttaaagaatatttctgaatgaatgtcattggattcaataattcaacacctattttgtctgtttattgtacggataggttactcaatgtgactttttcattttcaataataattgcagtgaacaaaaaaactaatatgaaattgatttaaattaaattcgcattctattactatagaaatcaaattatgaatgggagatattattcattaagtaatggtctcgtttaatttcttttgaagcacaatatataaaataagatatttctaaaattgtaattctccaagtaataacgcatgagataaaatataaatcattacgaagtcatgataatatatttgtgtataaa

SEQ ID NO: 61914 - DNA, 439 bp, Glycine max
  unsure (1)..(439): unsure at all n locations
attcttggtttgggtagaaaaattgtattgaagacgtaatatgggttatatatntattcttgtgcttcagtcttatgtgagtggatagatagctctgtaggcctttaaagtttcagaatattcaaacaatatttcattatcacattctgagtcaaaatttattagattgtctttagtggtgagaatgaaacattgacatccaaaataatgaaagtatgatattgtagagattttgtcctttccacaatttaggagtttttttagaattgggtctaatataaattgtgtgtttgaaataacaaacaatatttactactttagtccaaaagtattttagagttgagttatcattcaacatgggtctagctatttcttgtatgacctattttttctctcaacaatataatattgtgtggtgttcttggtattgaaaagttgt

SEQ ID NO: 61915 - DNA, 399 bp, Glycine max
  unsure (1)..(399): unsure at all n locations
gcttatacaattaatacaaaacctatatcttaatgtcttatcctatcaaagcgtngnggtcccgtgtcctctagcatgaagttcttcatagtcatccacctattcatctgctcccccgaacacaagttcaagatcattacaggatccaaacacaacacacaaggagtgagttatcacattcctagctaatagagaaacaagacaattaaatatgcatattatataaatgagataccgcttgcttaaacatagctcacgtaacttcaccacttcgtcattcaaaattcactgttcaatcatcaatcagaatacacaagaaatccacacttcgatcaagatataataacacatcaattagcaagcatatgcaacagttatgcctagactcaatcttatatg

SEQ ID NO: 61916 - DNA, 451 bp, Glycine max
  unsure (1)..(451): unsure at all n locations
tacttacttgttggtgatgataaaagcgtctaactttatctaagaatgcgaaaagtagagatcctatggctgcaaactcgtaaattccgcgggtatggcttttgaaaggggggaaaagaagtttttgaatgcaaaaacgtcccccctttcgtcacttttatatttggtgcangggttgcttcgccaggcgagctaacctgcactttttttttttttttgagaggaacattaaccatgtcccctccttccttatgggtcagtgttttgcctatttgagcctactcaagttagaattacgcattaattactaaaaacaaacaatggtagtaaaatactgngaatccaaaggatactgggctgccttgcgcggcgttctctgcttgttagcacagagaaagggaaacgatcggtcggttgtgaccccattcccacttgcatccagttctaagta

SEQ ID NO: 61917 - DNA, 353 bp, Glycine max
  unsure (1)..(353): unsure at all n locations
tacttttatcagaacatcctcaattaccccgtaaggtcttgtgatggatcggtcaacaagttgtaaagtcattctcgtgggcatgatttccaactctcacaaccttctacacatggagagcggcattaggttgctactggttcccaaatcaatgagagtctttctgatgtgccatcattttcttctatttcttanaccctttttgcaccattttaattactgattagtcttaattgtcaaattaattaggcagttttattatttgggcacattgagctaatttgatgtttntaatctaatttcatgaattaatgaaacattgggcttaatctggatnntggttgtggacttga

SEQ ID NO: 61918 - DNA, 441 bp, Glycine max
aacaaaaactaagcttaaattgatatacgaaactctttttttttcacaggcaatttgaatcaaatttaatagctgttgtaaatcagttttggccactggtaattgattacatcctctggtaatcgattaccagagagtaaatttgttgaaaaagacttcttaacttaatattcttggccaaaccttttgctaccttcaattgaattcccttcctatttaatataccctctctaagactctagagactgtcttgatcatccatcttgaatatctttaatttctttgtcttgaataaagctttgagacacatgtgaaactttggcatcatcaaaacattcagcttgatcctttgtctactatctacccctttttgatgatgacaatgcctgaaatcaagacaagttatatacaagatgatagcacattcacacaacccttact

SEQ ID NO: 61919 - DNA, 416 bp, Glycine max
agcttattccttcatagctaagcttattctttcttgggcgattcttaacagccccaaaatggctttttccctataaatagccatgttgggggggggggtcaagtagttacaactgttacgtcactcaaacatttaacagaatatactctatatgcatcactaatatctatatataaaatgttttctccttctttttcttatcttcaatctgacattttcataccttttttttttctttctttttcttcattactaattcctttatttttccttccagtattctattgaatttttttactccttaagcttccaattacttctctgaacatactcatttctcatatcactcttcttaattataattatattattcatttttctttttctattattccattcttatctttactttctat

SEQ ID NO: 61920 - DNA, 433 bp, Glycine max
  unsure (1)..(433): unsure at all n locations
cgcctcanagaggtccaggaagacaaggcagccgaaggttctagttccgctccggagtatgacagtcaccgctttatgagcgctgtacaccancagcgcttcgaggccatcaagggatggtcgtttctccgggagcgacgcgtccagctcatggacgacgagtatgctgatttccaagaggaaataaggcgccggcggtgggcatcactggttactcccatggccaagtttgacccagaaatagtccttgagntttatgccaatgcttggccaacagaggagggcgtgcgtgacatgagatcctgngtaaggggtcagtgaatcctgtttgatgccgacgctatcggccaactcctantgatatccgtggtgttggaagagggccaggaatgtgagtatggccagaggaggaacccgtctgatgggttcgatg

SEQ ID NO: 61921 - DNA, 474 bp, Glycine max
ctcgacggatcttaagcaccagctgcagcttccgctgactacggattgtattttgagttgaccttagcagaggtatccatagaagcctttgcatcactcacccaatactacgaccagcctttgagatgcttcacattcggagacttccaattagtaccaaccattgaagaatttgaggaagttctatgatgtcctctcgggggaagaaaaccatatctttcatccgggtgtctcccctctttgagcagaattgcaatagtggtcaaggattcagcaagaggtttggaccgcataaaacagactcggaatggcatagcgggcctaccacggaagtacctataagacaaggcaaggggtatggccaatcaaggagactgggtcccgcttatggatggtgtagctttgctaattatcgcggttgtctctttccaatgtggatgggttgtagacctaacagcaatcgacgctttcttg

SEQ ID NO: 61922 - DNA, 437 bp, Glycine max
  unsure (1)..(437): unsure at all n locations
gtcatacctcacanatatatatatgtatgtttatgtagaaagataccttagatatgcatgtatgtaaacaaaaagatacctcacaaaatatgtatatatgtatgtctaggtagcaagataccttagatatgcatgtatgtagcaaaaagatacctcacanaatatatatatgtatgtttacgtagcaagataccttggatatgcatgtatacaacaaaaataccttacaaaacatatatatgtatgtttaggtagcaagataccttggatatgcatgtatatagcaaaaatacctcataaaaaaaagaagaaggagaaaaaagaaaataagttgtctagctaanaaccgacatgcttttgaaaagagacgatttccaacttttctttgaaaaaattcattgatcataaccaatttttggaaaatgtgtatacacctg

SEQ ID NO: 61923 - DNA, 432 bp, Glycine max
agcttgcacttaaggagggtaggatattagcttctaatgaactttctttttaactatttggcctttaaattctactggttctttttgctaatatgtaaatataaatagtataaggctatggcttatggacatggtcttttttacccatattctatcacattattgaacaaaatacttgcaaaatagctttgcaacaagaaatgtgggatatatcaaatgcttatgaatccttgttgaagcaatcagcaaaaactgctttcaaagctttctggtggggaagaataaagtgcctgctaacattctccaatatacaaacgatactatattttttttggagaagcttctatggaaaatgtcaaatctgtgaaggcaatgcttatatgttttgagatgatgtttggcctaccaatcaactttgcttaaaggcaatgc

SEQ ID NO: 61924 - DNA, 431 bp, Glycine max
  unsure (1)..(431): unsure at all n locations
ctcgccaggcacaggggtgcttcctctttatactacagccttctggaggaatcttctggagggcccaagtgggcctgtgtgctatatgcacccccatttttactaagtacacccnctgccttttttttggtgattcttttttcgtaaagttacggaaacttactaatttcgtaacaatattttgttttctttccgtaatggtacggaaccttgcggaatacataatcatccctttttttgacttacggaatgttacggaacctcactaattgtgcaacgatgcttccatttgatttctggtgtgtcacggaaccttacggattgtgcatcaatattttcttttgttttctggcatgtcccggaatttcacaaatatgctaatgatgggtgccaagcacctcacaatgaccaaacaaaagttgcatgtcatc

SEQ ID NO: 61925 - DNA, 319 bp, Glycine max
gaaacccgcagagttctttgtttctccgaatctctatgaggaggccaagaaactactgggtaagattttctttttttccttggtagtggtcttgatttgcgaatctcacttaaaatttgagcttaatatgtggcatgcattgtgaatcacatttttaatctttatcagcctaagtgagttggttatttatgttgtatggcctttcaaggagaaacgaagcaatgagcttaaattctaatagctcacaatcacatataattttcacatttgtcattgagtctttgtgtaagggactggtcaattttgtaattctacctaa

SEQ ID NO: 61926 - DNA, 367 bp, Glycine max
gcagagcaattctcaggaactcaagctcctttcggataggttcatcagtggaatggaaatctttaacaccctcatcttgttcttggacttaaacctcatgcacagggatgagggctttccattattatgatagcataattggtcatatgagggtaatcgaaagaatataatttctctatctgtttcaagacagatctgtttaataattataaatggattcatagttccttcttgactttcagcttctacagtgcattcatatcaagtgataacattctctcttatgattaataacatgactcctacttggtaatatttgtagaatctgttttgagtgaagctttatcagtacttgcaggtaaaaata

SEQ ID NO: 61927 - DNA, 441 bp, Glycine max
  unsure (1)..(441): unsure at all n locations
agcttatccttatggcttgcctnctgactttacctcccgtgccaccccgaaagatataagccaagctcctactttcgaggggcaactcccaccttatgatgactatcccgggcaagacgatgaggaaggagatacccatcttggccccctactccacctcaaagatccgtcgccccatgaactaccccaaccgaacatagtccgccatatcccggcttcccccacacccgtaaaagaatttgntcccttcacgaaagataaggggaagatggaggcgcttgaagagaggttaagagtagtcgagggccttggcaattacccattctcggatttggcggatttatgtctcgtgcccaacatcgtcttccctcccaagttcaaagtaccagactttgataagtacaaagggacgacatgttcaaaagggcatctccggatgta

SEQ ID NO: 61928 - DNA, 378 bp, Glycine max
gtacccaagcctcaacatcacacgggctaccataaatgcagcactggatgaacggtgttacactgtgggagactcgatgtcgcaacctacccttcaacgggagggcgacgcgagactcacgggtgcatcttccaaggaaggaaaacacgccgagttgccaccaaccgttattctacgaaaacgcctgaaaaaaccagataaggcgtggtctacaaactttaagtgtgaaaagttcgtgagatgcatttatgcacggcgaatgtactagcaccccacgcgttcgtcacaaggtacgacagcctttaatcaagtgtgcaaatatgactgcaactgtgtttatcacctctttaaaggtttaatgtcatgctacgcttcttg

SEQ ID NO: 61929 - DNA, 258 bp, Glycine max
tacaccatttccctgccagcacataaccaccttaaaacgaacgtgtaaatgacaacaggattttcgagtaaagcgattctttcggtccacaatatttaagaacaagatttcaattcgacggccaagaacaaactacttgtcataggaggacagcatcgcttacccgtttataacttgcagtatacaagcattggctattctacaatgtgaacgtcagatctgacttcaggaaggggctcccggacaaaacttcaggat

SEQ ID NO: 61930 - DNA, 463 bp, Glycine max
gctggttatctccttcttcactacatcaagaatcacctggttgagtcttctttgtggctgtcttactggtttaactccatcctcctaaattattcgatgcatacatgtggatgggctaataccaggaatgtccgccagggtccagcctatagccttcttatgcttcttgagaactgataacaacttctcctcttgctcatcagcaagggaggcagatataatcactggaaaactcttgctatcatccaagtaagcgtattttaaatttgatggcagaggcttcaattctggtgtggtcgactggacagtggtagaaggagatggtttctcagcctttacctcataaagaaagtcagaggtatgtgtacttcctgaaacatggttagtcctatctgactctataaaatcaatctcgagaggtaaaacaccaccaccagacatgcaatcaatatcactctcagat

SEQ ID NO: 61931 - DNA, 445 bp, Glycine max
  unsure (1)..(445): unsure at all n locations
tagattatgcgtgaacttatattgatatcatatattagatcanacactactcattactagactaaaagatgtagctgatggtaaaaataaaattctgttaatttcctcaaagaattttagagttacaactaacttaagagtatggaaattaaattcatcatggagtactgtgagatgtaaattcatcacattcttgttggaatcgcgttaaccaaattaaataaaatcaacacatcttataaagttntaaagtcaatatatagttgaaagtaaaaattaactgttgatcatattaagaattgcaaagggagaaagcatagcccttacaagtctttttttttacataaaataaatagtaagtttagcattactactttttatacgtacattttacggataatttcatttgaaaaataatgcttactcaaatanatgcatatatatt

SEQ ID NO: 61932 - DNA, 404 bp, Glycine max
  unsure (1)..(404): unsure at all n locations
ctacagacactatatttctccatgataaaagaagtatgtcacttgtattttcctcacagatagggcatgcatgatgacccttaacactgtaaccgctgaggattccatatgctggaaaagcaataattgggacaggaaagcattgcacgcattttataggtctcttgccaaacgcattaaacactacaaccccctcgttccacaacttttttagatcttcaaccaatggacttagataaacatcaatgtcattttctggctttcttgggcccgatatcatcatagacaacatcatgtattntcgcttcatgcacaaccaacgagacaaattgttaattactatcagaactggccatgaactgttgtgagtgcttaaggtgacatatggattcatcccatcaccg

SEQ ID NO: 61933 - DNA, 360 bp, Glycine max
caacaaaactcacgccttttggtgttatcaattctcggatcaccccctcttgattttgaagcggagtattggagtgatgtcacattactactgttactttgtcagtcttttacaactttacctaaggtgttagtgtgacctcctattatttgtactggaaggtgcaattactttagaatttgtctaaactaatttgctgaggttgtaacatgagcttaactatgtaactgagcttaactattgcgcaaagtgactaactcctatttactcacatatgttgtttgaaatactcatagtgcctgccatcttaccagcctatgagtacatgctgctaataaattttggtctcaacactgcatt

SEQ ID NO: 61934 - DNA, 394 bp, Glycine max
  unsure (1)..(394): unsure at all n locations
cccaacaaattcaattcaacatcctttgaatctcatcctttagagttggtggaagcaaatagatactcatgttgtatgaagggattgcttgagcacaaaaattaattaaaacttccttaccagctttggaaagataccttcccaattagtgattgatgcatttcccaattcgatcatctacantaattggaaatgctttctttgttcttgcaatgatagatgagaggcccaagtcttttccataccctatgattgtagagacacccaaaccaaacatgattgnttgcctcacagattgttgagtattggtgctaanaaaatatatgacttgtctaaagtgatcatttggccataagccctttcatatgtatcaaggatttgagtgggtctagtt

SEQ ID NO: 61935 - DNA, 395 bp, Glycine max
  unsure (1)..(395): unsure at all n locations
tctctgctcatcaccaactntctggtctatgcttccaactgagcaatatagctgatggttaacataggaattntggcacttccaacctgtatacataactagtctatagacattgatattatctacctcaatcngcgtattttgcctcttttaaatggctcaaagacttcatcatcgatgtaaagttaggaaacaatgtctgcccatttttgttataataattgctgcagctgcatttatgtccacatcttcaagtgtggaaattcttggtcattaaccttgtagtacaaaagtgtttgtgtacgtttggagtcccgagagaatatacaagtacaaatgaacaaatatattatgtatgaatgcacgtatacaatttctcggcatttggctcgagt

SEQ ID NO: 61936 - DNA, 441 bp, Glycine max
  unsure (1)..(441): unsure at all n locations
atgctgtaatggacgaaaaaaaagagtttatgtggagcaccaaattgaacgaatgaaagatggaaagaaatggaactttgaagtgtatctcataagactttcattcatcaaagatataacaagtggtacacatgcttctatatatagactaaggagcttccttgagaagcttttcttgaaaaaaacttccttgagaaagcttctttgagaaaacttccttgagaagctagagcttagctacacacacccctctcataactaagctcacctncttgagaagctttcttaagaagattcctaaagaagctagagcttaactacacatacctctctaatagctaagctcacctccttgagatgagaagctttaacttagctacacacccctctatatagctaagctcacccccctgacagaaaacatgaaaataccaaaaaaaa

SEQ ID NO: 61937 - DNA, 382 bp, Glycine max
cactcaagcttgacacggttaagtgcaggtgctgctactgagaatgcacttgaattttgttgttagacctcaaggggatggcactcatattttttggattctgcacaatttacgaaggcaatttgccagaattttgggattgagcttggttcaactgagtaaccatctgccccatctgatttgtcagactcttgatgaaggctcttgtctcttgctgaaattgcatattctggatgggcatttgcctcactaactcttctaacgaaggttgaggagggggctcagctgcttgttgtctttggtgtgactgctactactgatattgcattggaggaggaacatatggcttgcttggaccagcatcattctggaaaggagggac

SEQ ID NO: 61938 - DNA, 417 bp, Glycine max
  unsure (1)..(417): unsure at all n locations
cattntctgggaaagggttcaattaaatgggcaatgagtgtcccattacccacagttggcaatatgggtgaatagtctcgcatcacccaatagcccagccctcacggcttaactagttcacttcagaatgctatgcacgttatattcgtttaaaaaattcagcccaaacttgcaaataatcattataatttatataatcgcttacctaattactgtaactgaaatcattatttaaattggcaattataaatgatttatttttttgttgatggataaaaagtcaatatttatgtataagcgatcctagtgctgttcggtatgtgcataagaaagagattaatagagtagaaggaaatgtgattagaggatggacttntgtgtgagtaaatgggatccacacactctatcccgtatttt

SEQ ID NO: 61939 - DNA, 422 bp, Glycine max
ctaacccttgcaggactaatgatggagacaagttagctcaaggtgtattggaggctacaccaaaatgggtcacttttggaatggcgtggtggatctctatcaacttaacaatttgcgtatttatacctcccttcggaaattaaggtaaaatgcagattttaactaccttggtcactcaagattcatatacctagcaaataaatacgtggtaaaatttatatctttttttattatattcagtatttaagacacaagaagaaaccaactacaccaagtgggatcatgaagcataagcctgagatttgataataataataacaatccaagctattgaaaaaaaggaatagatccacatgttttcacagaacctcgaagtgatgcctcagtgattgccacaacttcctctgcatttgggtaattac

SEQ ID NO: 61940 - DNA, 396 bp, Glycine max
  unsure (1)..(396): unsure at all n locations
ttacagtcgacccttgcatgcaagctngagggctttgcgagccgggctaagattgttcacattgttattgattcagctgagattgggaagaacaagcagccgcatgtgtcggtttgtgcggatttgaagttggcattgaaggggattaatcgcgtgttaaagagcagaggggttgcagggaagcttgattttagaggttggagggaagaactgaatgagcagaagcgaaggtttcctttgagtataagacttttgaaaagagattctcctcatatgctatcaggtcttgacagttaccaatggggagctattgtgagtaccggagttggacagcccagatgggctgctcattttacagtacagagcctagcagggtaacatcgtggcttgtgctat

SEQ ID NO: 61941 - DNA, 468 bp, Glycine max
  unsure (1)..(468): unsure at all n locations
tcgctctctatctngtttntattcgccacataaaaataatgtctgcaccgcataaatactattntttgtttaaccaaaattacatttttggtcccctagtttattttcagtttcgaaattggttcttcagtaatttaattcacgaatttggtccttctattttctaaaaccgtgcaatgttagtcccccaaatcacaattggatgttgactaagtgatattgactgccacatgtcatgttctgattggtcaatgagtatttcatctttcatggagttgacatttaatcagaacatgacacgtgacagttatcatctaataagaacgtgacatgtgacagtcaacatcacttgttaatggtcaatgtccaattatagcttgcgggaccaacattgtacgattnttacaaaatatgaggaccaaatcaaattcataacaggggatcaaatccacaactgaagataatctg

SEQ ID NO: 61942 - DNA, 456 bp, Glycine max
  unsure (1)..(456): unsure at all n locations
agcttgcatgatntacatctccctctttctatagcaattcttcttgatatcatcaaaatcttcatgatttacattctccccctttttgatgatgacaaccacctgtaggttaggagcaacaacaaagaaaatatctatttgcatatagtttactcccccttggttttacaatgattgcttatatgagacaattgaagatttcatatttttcatatataaaaagttgtctcataaaacaatagataatttttcttactattttatcttttatctttctctccccctttgtcaacatcaaaaacaaatcatgaatagagaggagaaagatgttaccacttgttgcaatgtatgagaatcaagtgatatcaaaaggcattaaaacaatcattcaatattaatcaagcaaaaacaagtacaataacacatcaatcaaacacaatcaaacacaatcaatca

SEQ ID NO: 61943 - DNA, 471 bp, Glycine max
  unsure (1)..(471): unsure at all n locations
tctcaagggaagtttcttaagaagcttctcagtgaagctacctattctataaatagaagcatgtgtaacactcgttgtaactttgatgaatgagagtcttgtgagacacaactcanagatcaacttctctccctttatcttccttcgatttcgtgctcccncctctctctttctctccctctttcttttcctccattgaagcatcctctcgatgcttcttatccaaggctcatcttggtggtgaagctccttcttccatagcttattccttaatggatggcgcctcctctcacctcttttcctttgtcttccgctgcatctccatggtggaaaatcaccattacaggaccccattgaagctcatagatccagcctccatagaagccccacangcaagcttccatcactattgtaatttgcccattacgtgtcattttatctatgctctgtaaacanatacacttacatgcg

SEQ ID NO: 61944 - DNA, 454 bp, Glycine max
  unsure (1)..(454): unsure at all n locations
catgcaagcttatgcacggaaaatgtaattatgaaatttatatgcccgtataaacaccatttcctagttaaccatgcattaggtaccatgttcaattattttgtttttaagtgaaacgggtttatgatcccaacatggttggctcctaacacatgaaactaagaatgtagtgtgaagtttcacgcttcccccttcctttgtttttgttttgtagaggaaaacgcaaggatgagcaaacatgaaaacaaatggtatgcaattttgcagatcaaaaagtttgttgaacgcatatgcatgatgatgccatgactcatgcaaaatgtgaggctggaatatgataacggacaaatgcangatatgtctattatgatgttatgaagagatgcttatgcgatgcatgatatgaatgcattntacggacacgagagcccggaaaattatctcttcttactcg

SEQ ID NO: 61945 - DNA, 473 bp, Glycine max
  unsure (1)..(473): unsure at all n locations
ntcttgagaagctagagctcacntctagagatgagaatctagagcttanctacacatacccctctaatatctaagctcacccccatgccaaaatacatgaaattacaaaataaagtctctactacagagactactcaaaatgccctgaaatactaggctaaaaccctatactactagaatagccaaaatacaaggccccaaagaaggaaaacatattctagtatttacaaagacaagtggacccaaccttggcccatgggctcagaaatctaccctgaggttcgtgagaaccctagggccttctttagtagctttggcccaatcttcttggaatcttttatccaatgcccttgggggataggattgcatcatttgtcgcctggttatgttccttgcacaataagactgactactacttgaaaggaatggttaacaggtcagttctaattggtacacacttactttattggtta

SEQ ID NO: 61946 - DNA, 364 bp, Glycine max
agctttgaaacttttatatttttatttaacgtgagttctttatttcttctcttctctattgaaactcaaataaataaagggtgttcttcatattttagagggtgttagggagagaagaacaaatttgtcccttaactagcttattttccatcaatgcctcttcattccaactctatctaaccataaacttgaggagagtcatagaactcacatctatttatatgtgatgttctcaagagtcctttacatatgtcttcttagcattttttttttgtagattatgtgtttgtttacacatgattttgttagctttgaactacgacgaatgatttgtttaagagacgtggtgtgttgctcgacgttg

SEQ ID NO: 61947 - DNA, 424 bp, Glycine max
  unsure (1)..(424): unsure at all n locations
tctaacaacanaatcatgcaggtactactacttatattttcataaagacatgataaataaacctcagttgaaaaacacataagttattttgaataatatattttaacaatggtgattntacttaaaattacctatatanttttcaacggcttatatagccatataattcagatgttggtataggtcaaattttcacatattttaatttgatgttgaggaactnaatatgatttcataattaattttgagttaaaaaatttttagataactttttaattagttagatcaaaaaatttatttaagttttactactgatttgcttttatgataaaaatgtntaaatataaattatatcatttcaaaattaatataaaattcatttcatttaaaatcatctnttatgcttgtaaaattaatttatcta

SEQ ID NO: 61948 - DNA, 375 bp, Glycine max
accccagggccctattggacctctctggatccactgggtgtctcggaggcataatccctacaaactgatagatagcatctgaaatcagctgggcgacatggacactcacctaagtcatgatggcatagactagatgacacttcgacagggggaggtctgaattatggttattggggagaatgttgctaagaagcaacgtcatccagatttgcataagggtggtcatgctagtgcgcatgatccgcacccgtctccccactacgctctaggcaaagtcttgccccggaatgcacagcaactggctgatagcctcctcgtgaagccagaggcgttgactccgcctttggctgaacttgcagcattggccctcctcta

SEQ ID NO: 61949 - DNA, 313 bp, Glycine max
aactactcaaattgtgcatcaacgtctagtctaagcgtcacaatctgggacactttgccacgtatgatcttctatgtggcacatacaatgccaacaatacacctcactgacgacgttcctatttaatttaacggcaatgactattctgcataacttatgcgaagataggaactatttcttacatttcacaaacacagagactacattgcgaaacgggtcaaaagtcaacgaccacaatgtctatttactcttttagattctctagactcagagatcaacatttatatgatacagagcgtctcacaatagaaga

SEQ ID NO: 61950 - DNA, 394 bp, Glycine max
  unsure (1)..(394): unsure at all n locations
ctatgtggtggttggtagaggagcataaaccacagagtctggcgacaggtgtagatttttgattcatggccagttgggttaccaagttaaccaaagcatctagtttaccttcaagcttcttaatctcagctgatgaagatngaattgtggctacttcatgcactcctctaatgacaatagcatcacttctggcactaaattgctgggagtttgaagccatcttctcaattaaatttttggcttcagcaggggtcatgtctccaagggctccaccactggcaacatctatcatacttctctctatgttgttgagtccttcataaaaaatatacaggagaagctgcttataaatctggtggtgagggaaactggcacataantttttatatctctc

SEQ ID NO: 61951 - DNA, 346 bp, Glycine max
agacaagttgaactttgagttgtgtctcgcaagacttcttattcatcaaaattacaaaagggttacacatgctcctatatatatactaagaaagttccatgagaagcttttttaagaaaaatttctttaaaaactatatcttaactacacacacctcctctcataactaagctcacccttcttgagaaacttccttaagaagatcctaaagaagctagagcttaactacacatacctctctaatagctaagctcacctccctgacatgagaagctagaacttagctttacaccccctattattagctaactcacccccatgactaaatacatgagaatatataaaa

SEQ ID NO: 61952 - DNA, 74 bp, Glycine max
aaaagaccttatggtgatattaatttggacaccagcaaaaagaggctggcagggtttttttttttttttttttt

SEQ ID NO: 61953 - DNA, 413 bp, Glycine max
atggactgtggattggtttgtgtgttaatctaagagatgctagcatagaagtagctatggtaactgctgatggaaatccattgttaaaggctcctcctccagggggtattgcgagggttggtattgcttgtgaacagtatctatccaacacttcagttgaacagttattatttggcctggatctctatgcttattttgggagagttagtgagataatagcaatagctggaaaaaagaaacaattgaaggatgtcaggaacaaatcttttagtggaaagctgatggacaagataccaagcgacacatctgtaactttgacattaaataatctccaacttcaatttcttgagccatcttctgtgaatgctgagggaatgcctctagcacagcttgtcggagatgatctgtctttt

SEQ ID NO: 61954 - DNA, 166 bp, Glycine max
aaaccttagatttaaaaccatgatgatagaacaacttcaggatcagcgcaagcttatgaagagaagcataagaagaagcaacagatcactaagcaactcttcaagatgcaactgatggagaatgaagaaagtcaaggaaatgagagaagtcaacgagactgacgtg

SEQ ID NO: 61955 - DNA, 379 bp, Glycine max
gaaaattagtagttgaatgctctacatcagaatattcatattcatcatcaaccgaatactcagcttgctcaatattcttacaatgcttgaaatgcatagaatgaccacgatgcacactatgcctaagtaatctatgaaaggctctatctattttaggatcaaagcggtgtaaatcacctgcattgcccctagtcatgcactatatacaacaaataatgtgttctcaaacaagcaccaggggacggttaaaactacaactatagtgaaacgatatccaaatgagctgaaattgtgtgagcaacacactcaaatcatgaaaagatagcacaaaaattttcagaccaaaaataaaagtctaactatgaaaactgcttaatga

SEQ ID NO: 61956 - DNA, 414 bp, Glycine max
  unsure (1)..(414): unsure at all n locations
caatcataatatgcatatctaatgagaaatgtacttattcatatttgagggagggaaaggtcatcaaaataattatcatcaatactacaaatagaaataatctatttgacaacttaattttaatgatatacaaatttcattgatctaaagccaataaaagtcaaaaaaatttaaattgcttgcactaattaaaatgtacaatcaaatagagntctcaatatttcataattatatccatttacaattttacattaatggaaaggtaaatgtatcctataataaagaactatgagaagaatcatagtgataatatctctatctttttataacacatgatatatactctttgtaactgagtggctaactagatcaacatattctaatacacctctttagtcaatcaaagtcgggtac

SEQ ID NO: 61957 - DNA, 155 bp, Glycine max
  unsure (1)..(155): unsure at all n locations
ctaagctatctggctgggtcaggtgctatcataggcggntgttcatgtggtctatatagggtccgtggtaagggcaccctcatcatcatctacaatcaacaaaaatactttagaagcgcatttgtggccacgatgatatttttcatcacaattaa

SEQ ID NO: 61958 - DNA, 282 bp, Glycine max
atgaactagctaaacagtcggggtaatttatctcatttttaagaagaagaagacgtcgtgttatggcattgaaagcttaagggtagacttgtgcttcttgcagcaggcctaaccatccattggtatatataaactggctgggtatcattactaattagctatattgtgtaaaaacggattctgatttacggaacatataatacacatgtcaattagtataagaggtatactgtattatagataccagtacaagtactgaagatctaaggtgggattgaatat

SEQ ID NO: 61959 - DNA, 379 bp, Glycine max
  unsure (1)..(379): unsure at all n locations
ctaggagagcaatcacctatttcctatttacctaacaaacactttttcacaaccaccaaccttattgaattgctacacagttgctttcaactcttaatttctcaattttttattttaacaaaactttgaacataataccaaaaaatgtagttctggttttctgtgtgttgttatttatatccctgcaacaaaattacccaatacactccccgaaattggggacaaatttgtcttgatccataataatgctctcttataacctaagacagggtgcacaacaacaacatttgcattcagctaactttcaatgacaaattcattcacatttangcttanaagggtataagggattcattcattcactagcaacatggtagct

SEQ ID NO: 61960 - DNA, 492 bp, Glycine max
  unsure (1)..(492): unsure at all n locations
cactataaaactaagcttaggcctttttttataattatcacggatgttaaacttggtcatattaagntatatatatatatataagcagcacatcttcttcctgctacagtatattattttaatatantaaaaattaagcttcaggctttccttttaattacgcttttgataccgtatacctctttaaaaaaaatataaaaaaaatactattcatcttntcttctctattgaacanaacacaatagaagtaaggcaaaagcactggaatggctctcatactaaatgtaaattgaacgggtactcatctaaacatgcaaattaatttaaatgacatattcagattaaacaacggaaactaaatattatgaccatatctccaatcattgtagatggaatgcgaagcaacgcatgcaccanactgaagacaantttgctctttcagaaccgtgctcactctgaatagatggtgtattttctgtatagaaaagtgag

SEQ ID NO: 61961 - DNA, 340 bp, Glycine max
  unsure (1)..(340): unsure at all n locations
agcttaacaccaagaattacttgattcaactttattaagcatctaannattaactntcaaagattaaactattaaaggcttaaaaaagagaaaagaaaagaataccttcataatatgttaaacgcatatatacatgcatggaaataaaactaaaaataatcaacctatcaatttaaaaaatattaatcaaatttttttatatactttgactttttaacatttgtagggtctagccctgacaaatctatgtcatgttttggattatatttttacaagttgcattaagttttgtcctcatttatataagaattttgccttaaatattgttatttttttatca

SEQ ID NO: 61962 - DNA, 323 bp, Glycine max
  unsure (1)..(323): unsure at all n locations
tcaagaagaggtaccttcccactcacacacgntttacacacttattcttgtatctctccatgtaactcaaactctatgctcgatcttgaactatttattatatgggntntgcctttcagaattgaaagatctcttcatttcaagtttgaatatgtagtggcccctatctcatgtcttggtgatcattccccaaaaaatgaattatgcgactctccatctttatcattagggtttaactcttgatcctgtcacatatgtgatgtgaaagataatacagtaaaagaaatgtgaaattaacattttaatttataccacactattgc

SEQ ID NO: 61963 - DNA, 233 bp, Glycine max
  unsure (1)..(233): unsure at all n locations
ttttaattgctttaacccttttaaagttgtngagtaaccgatcaagttagaaaataatgcatcaataacttgaagtggtaggagagctataccttcccaagtaaattgcggtgccaaggaatatttgggacaggaaggcagaaaatgcaggttgaagtggattgtatagggcaacccaagcttgccccaagatcttattgctccatgtaacgactccatagttaagggcagat

SEQ ID NO: 61964 - DNA, 303 bp, Glycine max
gaaactaagctgcagagaggagtgatggatttcatgtgggttcgttagggaaggcctggtggaagcttgtcttgtgtttgatgctagcttcttgatgatagcatgaactgtgatgcatgtcatcataattaagccatcattatttgtggtggagagtggtgtacgtggtacaatattgatgtaaaaatagtatatttatattgctttctcacagttttttttaagtaacaaataatttcaaagtgataattattttgaaatcttgagaattatgattttatatatcttggtcattgctaaatg

SEQ ID NO: 61965 - DNA, 457 bp, Glycine max
  unsure (1)..(457): unsure at all n locations
agctttcataacagaagaaaggaaacactcatgatgatcagcatctattatcataagggtcgcagctgtgcttcaataaagaattcttgccaacggggaggtactggtgatcaagatcaatttaacagcaaaattttaattggttggttcagaactcccaccccaactgaaaattttaaaatataaattgtggcgacttattttatccaagatgaacagatacattcatcaagttataacttccactgattctttttgtcattatctttctcaaaacctaagatcaagtaaaactaagagactaaagagccaaacctggaatgtgttcttctgttgctcatccactacattaagagaaaagcgtattaaaaaaaacatggaaagaatagaagatatttgtcactaacaaaacactattagcagaanagtgtatgctaaatgcttacaagtttccata

SEQ ID NO: 61966 - DNA, 489 bp, Glycine max
  unsure (1)..(489): unsure at all n locations
ggtacttatncaatgaagaaatgtcttggttatgtgtgtgtgttagatgtaagagngagtaatattaagagaagaggaggagatatgagatactacctgcgtactttccaacaaaggcagacatggntaaagcttattggatatatggcgggaaacagataacagacaacagcacgaaaaaggagttcagccagaccaaagctatatagantaaanatctcataggaatataccaagtggtatctacccaacccatgcaaaggaaccacgtgtccagtgattagcctaacgaaggttatcactcttggataaagcaacgagtgatccttcccttgcccaagtggcacctcatccttcgtttcaataatatatattccactcacctcatgatatataacaaggaaattntgtggaaagctctcacccgtcaccctcttggactnggctntacatantaagatatcaacctaaaggctattatgaaaattg

SEQ ID NO: 61967 - DNA, 353 bp, Glycine max
  unsure (1)..(353): unsure at all n locations
agctntacaaatccacaattccttaaaagtatgtctaactcacanaaagtccccagtagagtcgccaactgtcgcaacgtgcccttcgcgggcgagcgagggcgaggcttacggatgcgcttttcaaaagaagaaaggtgccgcgagtcgccaccaacgcttatttgtggaataacgtcggaaaaccgaaggataccggcaaaaagagaattctaagttcgggaggtagaactacccatcgaagatgggtggagaactaattcgcaatcttgatcacaacagggattttcttctcactccaatactctctactaattcggagaccatccctcttgacaagaccacaccccctc

SEQ ID NO: 61968 - DNA, 259 bp, Glycine max
  unsure (1)..(259): unsure at all n locations
actatgaaactaagctgccttcgatgatgaattttattatttatgaatatctngtgtgtttacctttgtctatgcaagggtctgtacttatggtagtatgaataggccatcatgatgataagtgtggaatctttgacagcgcaggaagcaagacctctttgatgtagaggtagaatcctggtggtcttggtaaaagtagatgacatgaaatcatctcaggtttgatttcaacctggttaaaggtcttgacacccatgtg

SEQ ID NO: 61969 - DNA, 450 bp, Glycine max
  unsure (1)..(450): unsure at all n locations
agcttataagaacaaaattgtcttaatcattttcaaatatgcatgggaattaggacgcatcaacaagaatcaagccaaggctattgtgcaagcaatcaatggggcaaaacacaccaaatgattataatgatggatggctcaaattctcacaaaggtaaaatcatcactttcaaattgagctttcaaaactatcatgacatgtagagaagaatcaaggatttcaagtcacaaaatgtcaagaacttttatttttaaaacaattacccatttcttgaacatatcctataattcaaagaaaaacatgcaaagtcgtacgtgcacacgaaattgacccaaaatattaaactgaaaatccgacgaaactaacaacattaacaaattaacacaactatacaaataacaaaaccaacanaactagcataaccaaagaacactcccccccatacttaa

SEQ ID NO: 61970 - DNA, 265 bp, Glycine max
  unsure (1)..(265): unsure at all n locations
ctacattncatctctatcatgctttttctntcttaccccactctcacgntngggtttntagggaaaaacaccataaactaaaccgcgccgcaggggaatccctatcgcacccataatccaaatctagaaacgatggggtgatcaacgatggagaccgcaggaacaagatgaatagccgacnnatgtcggcttctgaaaagaaacanatggccctccatgatgggaggccatggtaggtatgaagcagctcatggagaagaacgcg

SEQ ID NO: 61971 - DNA, 266 bp, Glycine max
  unsure (1)..(266): unsure at all n locations
agctntcttcgcttcctctctcatcttggtttcttcgtaggnttcccccaacatgcaccacgccttcgcgtttcgcggactcagcttcaccgactcggtcaaatcagccagcaccgagtcaacgccgcgccgctcgctcatcgngatcttcagntccgccctcttcagaagcgcggtaactctctcgtccttcgggagcgaacccgctgcgagtggaaacaacgcggcgtctagcgcatcgagcgcggtggtgcggaatccctgga

SEQ ID NO: 61972 - DNA, 245 bp, Glycine max
  unsure (1)..(245): unsure at all n locations
ctaagctatcctagatccataacgaaccacccatcatgttatcctcacaccaagcccaaaagtggtgggcgtgaaaggtgtgtattggaaaaaactcaagtctcacattgtctagaaataaggccaagatacagtatataagtgagggacaaccctcatcccatgagttagcttttgaggttgagntagacctaaattcacattctaataggctggtctgttctaacaggcatttgtggaggggg

SEQ ID NO: 61973 - DNA, 161 bp, Glycine max
ctggcgacagcttctcgtacatatatgataacgccatcattaagcctgcagaaatcttctcgttcaccatgttaaacgtgacattcttcgctaatgacaattagataacgccaagaactcgtcgaactaacaatgaccatactctctgcttcatatcatat

SEQ ID NO: 61974 - DNA, 455 bp, Glycine max
  unsure (1)..(455): unsure at all n locations
gaacttctgctttttgtgaccatagtgtacctgagagagncnctgtggtcaggagaccttggcgacgtcacgtgaggtgctattgcccaaaaccaatctcgaccaatcccgacccaacccgggcatagtcggtcattgagaacctgtgatgtacctaatcaggcgagctcctggcattctacagataaaaggaaaacaataccactcagcaaggaggcttgtggtggctggccacctgcgaatattgtgtaatatgtggatggcggcctcctggtatccattactaaaggtgggtaatcgattacacagcgcaaaaatgaagacaagaggctaagatggtctctggtcatcgactaccaccgggggtatacgataccacgcttgaaactacgcaggaagctctggaattattcccatgggtgtatcttaccagctctaaaaggactgggagtgat

SEQ ID NO: 61975 - DNA, 366 bp, Glycine max
  unsure (1)..(366): unsure at all n locations
tgtgagtgaaacaacatgaggggacttttaaacaagtttttgatgaggtgaaatggactctatttggatacagatgttgatgagtatgactaacacattaatttggatcttgaagaattcatggtacccaacttcaattcatttgttatgaatgaatgtatcgatggtaacctgaaaaatgcattggtttggttgaagaaatgctttgttgtggacaagaactgctatttcctgaattttcagatctagtgagacaactatgntcatctctgtcacaaatcaagtcaatgaccaagcttttggagcacatgccacagtcttgccatatactacacccagatactcttaatttggttgtacaggcat

SEQ ID NO: 61976 - DNA, 404 bp, Glycine max
  unsure (1)..(404): unsure at all n locations
gactccaagatcaagcatcaagaatccaatccaggattttagagaagaaatcatgaagctacaagttcagacttcatatacgacaagtattaaaagatttattcatattccatacagcacatgtgtattgtacatatagattttctcaaatgttctaaagtaccagagcgattactttctggtaatcgattactagttggccataatcgattaccagtgaccagatttgttctcaaatttgttcnatcgattgtacgctccaaaatgattttccaatagtggatcgattcactatattagtatctattaaagtgaatctgactgcggaatcacatccattgggagagcacacttgtctatatcattggaaccataccccatggggactataaatgtttctcaag

SEQ ID NO: 61977 - DNA, 362 bp, Glycine max
  unsure (1)..(362): unsure at all n locations
acatgcacatatactcatatggaagagttgatctctgttacgtcatgtgacgctggtgttggaggtatgatctgcagtacttactacttatgaaggtcaatgaatccctcttaatgaattttatatttccttataatattggtgttctgattccattacaattctgacacttgtactttataaattaaacgtacactgcctaatcagcaacttctgtgcaatggttatagcattatgaagcttattatagcatattcactatgtacatatgcaatgtcactaatgaagctagtttgagacccttaactattaggatccatgatctcacgcgtcaagntactaattgttctataatttgacat

SEQ ID NO: 61978 - DNA, 341 bp, Glycine max
cttaaactacctgtgagagactctctgttatattacgtttttgatcatacctctcagggaacatgtctattacatgatcttacttaacaattccagggagggagtcgatactccccttgaaatgtcccgtatgatcagaaactttgttcgataacaaatctaacgatacttgttttgaagcttctaggtgggagaacctttatcattaaaatgtatctattgtactttgtaaaaatcgatatgggcaattttcgatactgcattataggttcgtataataccactgtgtccacttacactccatttaacttactgatcttcggtaagggtattacattgga

SEQ ID NO: 61979 - DNA, 390 bp, Glycine max
  unsure (1)..(390): unsure at all n locations
tctctgaaccacaccgacaatgtgatcctataatgatatggtcgccattaaacagaagaaacaataatgagagggttagtcaagttggtcatccttcgacacgtcctacaaaaacattcgtcaatagtntctctacggngaaaagttcataattaatatctaggatgcagacagaacttggacaaatatattttaattatgaggataaatatatgcatngcttatattatttggcatataagtgtttccaaacttactcagcggcttcatggtcctctagattgtactncatacgaactatatatatatatatatatattagaaatcataatcaatattctgactctattaaaattataaattataggaatattatctttggaccaatga

SEQ ID NO: 61980 - DNA, 422 bp, Glycine max
  unsure (1)..(422): unsure at all n locations
ctcttggagtagaaacatgggaccaactctatttatttcataaagaaagtcgatctagtcatagtctgagagaccatacaagnttcctagcgatttctaattatgtgggccattaagtctatcatatgctgacaataggctagaagcccatgaatctcttctggggcggagtangtgtccgccattgccttggcgttcgctaacaagcggggaagttcttgactcccgttcaaggtaagagcaaaccgatccatccacatggttgcctctcggtgtaaagagatgatcacccttcctctagcctcttnttccgcgtatacttgagcatactcgtccgcgaccctacgctcgtgggccgtggctagacctaactcttttaggacttggcgatgatagctatcatgttggtctccgtctcgcat

SEQ ID NO: 61981 - DNA, 322 bp, Glycine max
actaccagcagctactgcagctacaagtgcttctcaaacacacctttggagaattttggaggcccaggggccggtgtattgccccctgtactaaatgcccccccttttatttttgtattcttttccgaacttcgaacattacaattctaacatacttttttcttcgcaggttacaatctacggatatgattactcctttttacttgaaaagtcggacctccaatgccaaaacacttttcacttccccattatgaattacggacgccacctgttctttgatatgaacgctcgacttattgtgctgtatagaatatcccgacaa

SEQ ID NO: 61982 - DNA, 265 bp, Glycine max
atgacaggcagatttctcatatggaacagtcgatctctggtatgtcatgtgcacgctggtgttggtcggtatgatcatggagtactcactactatgaaggtcaatgattctcttatgagttaaataccttttattacgctgctatgatgtcattaccactcatgacactgtagctttatatataacatacacatccttgtcacaacttctggcatatggttttagcattaatcaagcttattatatgctcattcacatatatcat

SEQ ID NO: 61983 - DNA, 452 bp, Glycine max
  unsure (1)..(452): unsure at all n locations
gtttgacatcacgttattactggcatcgcatttctgttgtatccgacaaactntattctggcagcactgatgggacagttaggatatgggactgtcatactggtcaatgtgctaaagtcatcaaccttggtgctgaggttacctctttgatcagtgaggggttatggatttttgttggtctgcacaatgctgtcaaggttagctcttatctgtcattgctttgttttgatgtatgataatgtctaatcataggagtagtacatgcaaactgattatgtggctgtggctgttgtgaaggcttggaatatccagaccatgtcagagtttactcttgatggacccaaaggccgagtccgtgccatgaactgtggcaacaatacacttcttgctggtgcagatgtaactaaccatgttattaatatngtccaatgatatttccctaacccaattct

SEQ ID NO: 61984 - DNA, 440 bp, Glycine max
  unsure (1)..(440): unsure at all n locations
aatgctaccacctcttatactggaagcttgttctatgactcctctacngcttccacatatagcatagaggatgggcagctcaccaagatgtcttcctcgcctgatacgatgaccagatgcccttccactacgaatttcacttttggtggagtgtagagggaacaactcccactgagtggatccacgggcgccccaacagataactgtaaggggggttaatatccattatttggaaagtaacttgacaggtgtgagggcctatctgtactgagagatctatctcttccctaacctctcggcgggtgccgtcgaaggcacgaaccaccatagaactctgctttaagtgggaggcattgaatggaatttctccaaagtgctctaggcatcacgttaaactgaaccatatcgtgacactttgctactaatgggcatacacttac

SEQ ID NO: 61985 - DNA, 276 bp, Glycine max
gcaaccacatatgatatatgtggatgctcaatactcacaaggtgaaatatgctttaaattgagcttgcaaactattatgacatgtagagaagaatcaaggagttcagtcacatatagtaagaactattatttcaaacagtacccatgtctgaacatatcctataattcaaatataaacatgcttagttgtacgtgcacacgaaattgatccataatattaaacttgaaaatgtgatgaatctaacaacactaacaaagtatcacaactaacatgtt

SEQ ID NO: 61986 - DNA, 477 bp, Glycine max
  unsure (1)..(477): unsure at all n locations
agaattctagagtattttatatatctaagcttgtgacattctaaggtgagtattgattaacactatgatttatcggattgattataaaactacatttnnttctatatctcacgattcaagtcattaaagtgcagcaacgtcttataagatacttaaatggatcttacatatctgcataactgagttttacttttgttcttctttacagattaagcacctcataagcacttaatttttctaactaacacctctccttggacaaaaactcagatccttatattttattaataaattatttaaaaaatgaacatccaatcactaaaacatatattgtatttaaaaatgatctattgttttaatctttaaaagcataagcacatatacttaaatgagcgatcaatgttgttattaatagagtgccccaatactcatcccggcttccanactagtgataagtataaacgaatacatgagttc

SEQ ID NO: 61987 - DNA, 376 bp, Glycine max
catttacctgcggtgataaacaatagcaagcctttgctctgctcaaagaaaagcttactaaggcacctgctctagctcttcctgactattctataacttttgagctaaaatgtgatgcctttggagtgggagttggagctatattgctacaaggtgggcaccctattgcttattttagtgaaaaaattcatagtgccaccctcaactaccccacctatgataaagagctatatgccttaataatggccctccaaactttggaacgttaccttgtttccaaggaatttgtcattcatggtgacgatcaaccacttatgtacattagagggcaaagcaagttaaacaagacgcatgcacaatgggtagagtacctaca

SEQ ID NO: 61988 - DNA, 292 bp, Glycine max
  unsure (1)..(292): unsure at all n locations
gagtgttgtatgctatatctctgtcaattacatgtctttattgagtatcttctgacacatacttnagagaatgtaagatacatactcaacgtgttcgtcgagtctgagatcgtggtgtcaatgaagcacatcataagaggggcaataaaacattaaaacatattagctcattgtgaatcatgaatgcttctcctagttgagatctccaaacattagaaaggcttgttctataatctgcatcagcaataaccatggactgatctagaattgtagtcccgaatacttatttgct

SEQ ID NO: 61989 - DNA, 476 bp, Glycine max
  unsure (1)..(476): unsure at all n locations
ggtgcanatcanatcactcctacantttactctagcatgtatngtatgttagnnctcgcctttgtcacgggaagccggaaggtccatatcaccttcttaattgtacacatggngcactgcgcccncaaatgcgcgagtaagaagagataattntccgggctctcgtgtccgtaaaatgcattcatatcatgcatcgcataagcatctcttcataacatcataatggacatatcctgcatttgtccgttatcatattccagcctcaccttttgcatgagtcatggcatcatcatgcatatgcgtccaacaaactttttgatctgcaaaattgcataccatttgttttcatggttgctcatccttgcgttttcctctacaaaacaaaaacaaagaagggggaagcgtgagacttcacactacattcttatgttcatgtgttaggagccaaccatgttgggatcataaacccgtttcac

SEQ ID NO: 61990 - DNA, 466 bp, Glycine max
  unsure (1)..(466): unsure at all n locations
cactcaagcttgaagaggaactcgagaaaactcaacgcacttggggagcatggagtagagaaatgtatttgaagtggtaaatttgaatcanatattagaataggttattatgtgtaattttgtatttggacctttgtaaaccttattacttgttcggcctcttttggtgtgtttgagtctttcatgagaggattagtataaataagtctatctttgactctgagaggagtaagactcattctattgaaagaattatgaactctgtgtgtgagaacctctcttggttcttgtgagcacttctttgattcttatcttgagatgctaattcaagtgactaatcctcctttaaacgcatcaattcatcatgaactgtggtgttgttcttcatccctaatggttccgtcctttngaatattatcttcacctttgattcatttctttgagtgttgatgcagaaatttgagat

SEQ ID NO: 61991 - DNA, 410 bp, Glycine max
  unsure (1)..(410): unsure at all n locations
aagtccatctagacaatctactaaaccatttagaagaacatttttaagataggttttacataatcatcatcattagtcaacacttttaacgtcattggcttcaaagaaagttccataagcgtctttgatgtaccttagaaaccgtcttgaatatcagctttgtagtagtgctcactatntaatcctaatagctcgaccattgctcagtagtttgactccctaaggggctatacaactctgaattgggtgaaaccaacgacatatgttagctaacatccaaggctacatctttcatgaataccacanaacctaattcaattattttattagtcattttaaggcttcaagttaactcatggttgtagggaaaaatagcacgggcttaaaacaacagatnttcactaagcaca

SEQ ID NO: 61992 - DNA, 335 bp, Glycine max
aatgggacatataatcgtcaagggcttcttcattctttgtcgcggttaagcgcccttcacctatcattaaatttttggaatattaagtgctaacaatctaaggtgtataatcatccagtaaagacactctttatattatcacttaactataattaatcgcaatatagattttacaatagttatatcaaaattattaatcttatcatacatgactaatatgattaatccgccataaaactttaatactatatgcatatgataattcttttctaaaattcttcgcaataatcttccatttatttgaaaataaattcaaatgattttaagatcattta

SEQ ID NO: 61993 - DNA, 350 bp, Glycine max
  unsure (1)..(350): unsure at all n locations
ctcaaatgatctatatatgtatggattggctcaaaattctcacaaacgtaaaatcatcactcttaaatttgagcttccaaactatcatgacatgtagagaagaatcaacgacttcagtcacaaaatgtcaagaacttttattttcaaaacaattacccctttcttgaacatatcctataattcaaagaagaacatgcaaagtcgttcctgcacacgaaattgacccataatnataaactgaaaattcgatgatactaacaacattaacaaattatcacaactaacaaattaactaaaccaacaaaactttcttaacctaagaacacttctccccatacttaaacaacaca

SEQ ID NO: 61994 - DNA, 317 bp, Glycine max
aacatatctagaacatgtttgtcttttttgttgaccattttaccttcaagcattatcctgtttggtctctttaaatgagagcctctgccttgctgaaagatggcttgtcatactttgcttgaggctccaacatttgtgtggtccgaggtcattgacaaagcgtcaattggtctcttgtctttactgtacgccaggggagtatactctcactattgtcattttggactgtcctggtgtgagttacaccactttcaaccgagaaaatggtcatctactgtgatactccttatcatatctatgtatccgctgacatgatt

SEQ ID NO: 61995 - DNA, 467 bp, Glycine max
  unsure (1)..(467): unsure at all n locations
ntganatctataactaactagttgtagatcgacgacaattaagtatgttgaagaacgtncacggaattgatcatggaaacatcacataagcgttacagaagcgtcttggtttggattttcttcttctatctccttctgttcactaattttaagtaaaatatgcttgcctatggtgctgaacccttcccttcagcctcccacgccccttttatagccaaaataggggaggaggttgccgcccagctcgcctagacgagctgatgcttcctacagaaggttcttgatgggcccatggctgaatgacaccctctatattgatcactccacccctcatttttagtttttttggtatttctttctgaaacgtcggaaacttttggatatgcgggatgagtgtaagcatctaatttggcagcaaagttccatgttgacaacattgtcccgacaaactagggatgacaacacaa

SEQ ID NO: 61996 - DNA, 351 bp, Glycine max
ggaccataacagctgcatctgtcctataattttgctaaatttggttatcataatgatattgtcaacaatggagagccttaggtgggggtccagtgatatagacgtcgatgaacactattctggacgttcaatatcatatgaatctgaattactgtaagtgataatggagatgcaaactcataattcctacatcagatacagattaaccacattgttaggaaatctttggtcacgatcttctgtagccggtaatcttttaaaactattttatttctttctctggatgcttgatttactcacaacagtacttgagcaggttataattaatgatatttgtcatcgaacttccct

SEQ ID NO: 61997 - DNA, 482 bp, Glycine max
  unsure (1)..(482): unsure at all n locations
gaaactaagctataaatatggtacgctcgtattaacatcgaactctgattanattgaaggncttaactttcacacggatgtgcaattccggcgtcaaatatgtctatatgtgcaaattgaacaacggaagctcttgagagaatcaaatggtcttagcttataccacagatctccgattcacgcttataatatattgatacgctcgatattgaacatttggacactcttgacaaatacagatggtcataacttttcacacggatgtccgatccaagcgcataatatgttgagaggcttgaaaatgaacaacggatgctcttgagagattcatatggtcatatctttccacacggatgtgtgatttatacgcatcacatatatatacactccgacatgaacaacggaagctctaggaaatatatatggtatacttttacactgagggtcgatcacgctaatatatattgaaccctcaaactaaa

SEQ ID NO: 61998 - DNA, 436 bp, Glycine max
  unsure (1)..(436): unsure at all n locations
tccaagagttaaagaggcggttgacaacagctccatgtttatttttnctgaccctaagagaccatttgaagtgtattgccatgcgagcgggcaaggcttatggtgtgtattgatgcaggagggaagagtagtggcttatgcttcacgtcaattgtgccctcatgaagttaactatccgacccatgacttggaactagcagctgtggtctttgccttaaagatttggaggcactatttatatggtactcgttttgaagttttcagcgatcacaagagcctcaaatacttgttcgatcagaaggaacttaatatgatgcaatgaagatggatggagttcctcaaggattatgattttggtcttcctaccatccaagaaggctaatgtatagctgactgctgagccgaagtcttaatgttgcaccatgatattctggac

SEQ ID NO: 61999 - DNA, 475 bp, Glycine max
  unsure (1)..(475): unsure at all n locations
actcagctgcttctcaatctcctcttttttgatgtgacaaccctgttttcaaganacacatacacacantttttcctagtcgatctctcacttaattctccatattctccccctttgtgtttgagtttaagcttcacttgaaattaagttgatttcttatgtgagttcttgatttaatccatatttctctccccctctggcatcaacaaaaatccaaagtgcgtaacaagtaaaaaacatacatacactactaatcataaacaagacattcattaaagagtataaaccaatcatgaagcaagaaacatgaatagatcaaatatataaaaaccacgtagtcatataacataattcataattgttcaatcataccatgcanataaaagaaatactaaagtagtcaaatgtcataataatatagccaaatacacggctagaaatcatagtacttataataatagaaaactaagatgat

SEQ ID NO: 62000 - DNA, 419 bp, Glycine max
  unsure (1)..(419): unsure at all n locations
caattgggccaaaatggacgagggcaagtgtgatttcgaanatcttcactattatgcagaattttgctggtgaaatgtgcagcaaaattttggctttgtgcagaaaatgatgtgtatttgctggttgtggaaagagtagtacagattgtgttctggacgttttctagcagatcccaacggtcacaatgtagatttatgtactagggacctccagtaaaattttcgagtcgatccaacagttaacgaattggaacgaagagaatgtntactgggtatttgagtaaagaaagctgcggtattggtttgtggttttgggcagagttttctgcctctgccctgttttcttggttntgatagttcatgatgtttggatgctgtattgcttgggtgttgtggaagcttggagagattgatgggga

SEQ ID NO: 62001 - DNA, 408 bp, Glycine max
  unsure (1)..(408): unsure at all n locations
atataaactctaataattaatcaaattagccgttgaaagatgttgttatgatacatttgtttaaattagcctncttgttactaatctttactcgagttaattaaaagagatgcatgccaagtgcatgttagcgtacgtcagatgcataagtgacaaacagatgttagttagtcctgcacttcttattctccttgaccagccctccctcttttcatctatttcccctaaaaagtgaatacaagaacaaaaacacaacttccttcaccctgcacttctttctcaacccatttgcttgctctaaccncacctctatttctgcaaagaatgctagttcatggtgctagatgatntntctctcacacctgatgagatctcaagactcaccactcctcacacccttctcctaat

SEQ ID NO: 62002 - DNA, 417 bp, Glycine max
  unsure (1)..(417): unsure at all n locations
cacaatctctgtttcaagatgataggacagtggtatgagaaatccctttggatgacatgctganaactggcaggccaatgagctatccactgctctgaaaccagacacctgtcaagtctactcttcacactaccattgggcctagaccaagtatacctgctaccaaagcattttatttcttgaagctctatgtcagatatccagtcattgaaagcagagatgtcataggtgtcagcattcctttgcgatgaaccaattgcttcttcctgacatctgatgctgttgaaatcttcaaggaagcaccataggccatcagggntagaaacctttaactggcgtcattctttccacataactctcttcccgccaggacacaaagggcgtatacattaacaatgtacaccctcttgatattct

SEQ ID NO: 62003 - DNA, 262 bp, Glycine max
  unsure (1)..(262): unsure at all n locations
agatgncaagcaaagcatagatctcatgataataattaagatatgctcttagaataattgttgaaaagcacaaatgagcgcgcaagagagtttctatcttaccaataacttttccaagcattttactctcttggaatcgatcaccagaagccgtagcccattaccaacgcttgaaaaaggctaataatgactttgtagctgtgttaccgattacacatcatatgtaatcgattactatagcttttgaacgtcggacatttga

SEQ ID NO: 62004 - DNA, 53 bp, Glycine max
tttgaagtattattctcttatgtactcgatgatcaccatgattttgtccttgt

SEQ ID NO: 62005 - DNA, 425 bp, Glycine max
  unsure (1)..(425): unsure at all n locations
ttctctctttctctcaattgttcttcanttctcttccctttttcacatttgttcttcctttttcttgcacaaatattgtggcttttccactggtgatgatcatggaaggctaaatactcaatcaatccaagtaaggctaaattggagttatggtttagtatttataatatgtgtgaatattcatcttttcttcaatcctattttcggttttcatgattatgaatatgcttgggattgaaacaaaattatgttagggattcctttcctaatttcaaacttaataacagattgtttggatgatattccaacctaacttgtgatctcaatgaatttagggattaatttgattgaactaactcaaatgacatngattgaaccttcacaacttgatcattctctacagaactgtgataaatcaatttgca

SEQ ID NO: 62006 - DNA, 171 bp, Glycine max
  unsure (1)..(171): unsure at all n locations
ggggggagctcgcgtattgatagatgaataaaggagagaagttgaactttgagttgtgtctcacaagactctcttatatcaaagttacaacaagtgtctcacatgctnctatttatagactaagtagctttcttgagaagctttcttgagaaaacttgcttgagaagcttc

SEQ ID NO: 62007 - DNA, 482 bp, Glycine max
  unsure (1)..(482): unsure at all n locations
tattgattctcaccatgctgtcgtttccttgtttctttgttcacactctttgtttttgtacatgttctttttttcttcaattctcgatgtcatatttataggtagagagaagctcgtaattgtggagagtatcttcaacattgaataatatgaccgttttgcagattgatcttggttcttggaataaattgatcctgtgtgtttctgtctaatatgatcaaaactcttcatatctgtcattcataacttaatatggttgttagactcataaaaggaaatataagattgattcacanatatattccttttaaacaaaatcatataaactagtataaatgaataattcacataaaattctctattcaatcggcgtttggatggactagaatagtacttcctgcttctaatagaacaagtatccactaatggagtaagttcaacttggtgttgcttccagtcttcaaacctggttaactacatgc

SEQ ID NO: 62008 - DNA, 426 bp, Glycine max
  unsure (1)..(426): unsure at all n locations
ttcttcacgttttnccagggtaataatgtanatccctatttctcatattccaggttaacacagaagatcaaaaatcatatccctctattacaactattgcacgttcaatacaaacacccattggaatttaaatttttaacatgcgattgtaggagattgatgaaaagaaaggatgagctagggatttatttaccgtctgtgtggcgcttgaagatgtaatgttccatttggaagatgcagttcttggtgtcgaggtggacgtcaacggccaacatcatctggatgtcgacttccttctgggagagctggcgtggtggggcgacagtggcattcttaacagtggtcacgggtgcgtaatgtccctaactctgaaacaacgatagcttccatagcccactcccaaatattattttattaaataaaata

SEQ ID NO: 62009 - DNA, 377 bp, Glycine max
  unsure (1)..(377): unsure at all n locations
cccataatctntagcaattcttgctctcttacctcttcgaggctctatatctagttctggttgtgcaagattttcactactaatagcaggaagataactggatgaagtacccccattatcccttaatttaaaaggaaatttattntcataaaaatcagcatcatttgactctatgatcacttctgcgtttaggtcataaaacctatacgcttttctattaatagcttaaccaatgaacacacattcataggctctacttgcaagtttaaccctcttagggtctgggatccttacataggccagacatcctcaagttctcatataagacaaatatgggttggttttctttaatatctcatagggagatgtcttgcttt

SEQ ID NO: 62010 - DNA, 357 bp, Glycine max
  unsure (1)..(357): unsure at all n locations
cccttattaagaactagctctcttcttactctatngcccttagatgaatacacctttgtttggttctctatttgggtcttaaccctctcatgcaacttctttacaaactctgacctagattccccttctttatgtataaaagaagtgccaattgggaggggaatgaggtctaagggtgtttagggattgaacccatacacaacctcaaaaggggatcgcttggtggttctatgaacccccctattgtaggcaaattctacatgaggaagatactcatcccaagacgtatggatgccttttagaagagcccttaatagagtggataaagacctatccactacctctgtgtgcccatca

SEQ ID NO: 62011 - DNA, 452 bp, Glycine max
  unsure (1)..(452): unsure at all n locations
taagctgttgngctgaggcttatgaataatcttattctttctttaacannatnngaaatggatgggggattgtacactgtacttaatgtctgcttccactataccatnttttctgactaactcgggagaagaatggttaagattctaatcagatgtgtctttccatttctattgctctttgttgttggtaagaattgccacctcatttattggggctgcattcatgtatctacaaattattgactttcccaaatatatggatgattgtttacttttgttgggagagaattattagaagttagtatgtaatgctaaacacatgttctgttctttattgattgaattactattaattcaagcatactaaggtggcaaaataactaatatctagtctaacngtaagcatatgaccattctaatgtgatcaacatatatacacgtcactgtatatt

SEQ ID NO: 62012 - DNA, 410 bp, Glycine max
  unsure (1)..(410): unsure at all n locations
tgaagtgaganagtgtggaagagtcagtcttcctattttattttgtgaccacagagtggtacctggagatatgtcgcggnggtcaggagaccttgttgacgttaggtggtgtgctattgcctaanaccaagcttgaccaatcccgacccaacccgggcatagtcagtcagtgagaacctgtgatgtacctaaacaggcgagctcctggcagtcaaccaataaaagaacaaagaccacaaagtaaggaggcttgtgtggtggctggccagctatggatcttgagtgatatctggaatatggcttctggtaattgattaccaagggtgtgtaatcgattacaaggcttaaaaatgaagacaataagttgagatggcctctggtaatcgattaccaaggagtgtaaccgatta

SEQ ID NO: 62013 - DNA, 304 bp, Glycine max
  unsure (1)..(304): unsure at all n locations
actcgcgatgatcagatgctgacgagctcaacgcgtgatcacaccgtcatacccattataccaagaaaggcacgcttagcgtgaggtcgtgtgaattttaagctatcttacgcctataaaatgagtaggaagcatagagacataccgaagctcagaactctctggtgaataatccacagcctgagcatctctaatatggacaagtccttcttctttagtcattntcccttctatatcgttattcatccatcttattcttctatccacatcaacccgtaaggggaaaacctctcatggcaatgag

SEQ ID NO: 62014 - DNA, 473 bp, Glycine max
  unsure (1)..(473): unsure at all n locations
gtgaactataacactcagcttattacaatgtctttatttttctactctattttttaccatataaaagctctataacctaatatacaactaaagttccttacaattattaaaagttattacttcagttttacagacaacgtgaaaagaccatcccacaatcctatatacatgcatgtgaaccaaaatccgaatgactgccataacaattntcccacaaatctcaattaaaatcacattccacaaaattgatcattctaagcctattatcaatgaagaaaatattaagaatgctttcatatccaatccacttatatggtatcatgtggtgattttagaagttgaatcttacatgttactagtgtgttcaaattcctctctaatggtgttaaaatatgaagctctaaaaaggaaggatgtatacacattttagaagcgcaatccataataccacatattatatagacctacatcat

SEQ ID NO: 62015 - DNA, 483 bp, Glycine max
  unsure (1)..(483): unsure at all n locations
ntggctgcgcacgagctcatatntcgtgntatttatagtatatgacgcattgtaatcgattacaggtattggtaatcgattacaggcccaataagccttctggtaatcgnatacaggatgttgtaatcgattacaggctgcctgttcatgtgtaatcgattacactggatggtaatcgattaccagagcctatcctaggctagtttctaagagaatatctatatttatgctcaaatacatcctatatgtctaattttcactactaatacactaaattcaatcattcaattactatatacacaagagatcataaattctatcataaaaacaagaattcaaacaagatcaaccaaaataatctacaatcaaaaggtaaaaagtaaatcaaccaatcaatcaaccaatcaatcaaccaatcgatcaaccaatcaattcctatgtgtctaaatctcttacatctaagagacctaattctcttctaat

SEQ ID NO: 62016 - DNA, 356 bp, Glycine max
  unsure (1)..(356): unsure at all n locations
tcgatgaaattagatacaaagttcatgataagctcttctaagagactcaacgtcatcaaaatttacctaatcgtcttggtattgatatgggatccttcaaaagttgtgtctgccatcaagcatatgtntgcttcttcatcgtcttcatcatacgaggtgtcttccaagtcttcctatgtgctcgtaagccccttcttttctttagtcttaaagaaattcttcttatcttgacttttctctagatttggacattctgacttgaagtgtccaggaatttacactcatagtagactatggaaatttgtctttgccttttgtctcgggaattcttttgaagggttctctactagacttac

SEQ ID NO: 62017 - DNA, 318 bp, Glycine max
  unsure (1)..(318): unsure at all n locations
tttatatacatacacgcattggtcattattgagcctaagcccatcttttgtgaaatctaaatgagatgaatactgctagctatgccccctttctccatgtacggacccctgccacctatgctgatgataagacctgtcacgtcatcattccgacaatgtagaataaggctaaatctaccctttgacttttaaaataaaaattagaatcaaaaaaggatgaacttaaattaagtaataattataaataagtaggttattggacagcgtntatcttatgtctcttttgtcttaagtatatatattattcttcaattacat

SEQ ID NO: 62018 - DNA, 142 bp, Glycine max
tctggtatgctcaatgatcctattggctatagtcttggtgctagaatgtcaatttggagtccacaataagaagatctccatatggcgctagagcttttgctggagatggtacaacacaaccaagtgtaatggagatcgtgct

SEQ ID NO: 62019 - DNA, 430 bp, Glycine max
  unsure (1)..(430): unsure at all n locations
acccactaacctacaattataataacttaagccttatctctanggaattaanacaaacttaatggctgagtgtaactgaaatcgtggcaaccaaaagtcaccctcaacagccaacaagtcagccaccatttggtctctcaaaaggctgatgcctaagttgccaattgtgcccttatacaacttgaactaaagcccttttagttgattaacccaaaacatatttttggccagccaactttacaaggattgggccattatttagacaaactaaacactctaaaattgaaataaagtggtgtcatttagtcctcctccatttgggccatgatacaactcacaaccttggactcttctccttgaaacttgngctcgtattcaaatagtatggacaacactttgtgagaagctccttggcttcctgctctaccct

SEQ ID NO: 62020 - DNA, 461 bp, Glycine max
  unsure (1)..(461): unsure at all n locations
gctcgatgtcctgataatgaaataatctgatgcagncacattatcttactgaataaaganaattcagaaacacacatagttataaacaataattaaattaggaataatgtattcttaagtaatcatgtaagtgttagtaaaatagttgtcgcatcctcccctctcgtagctttaaagactatattttagtaattgtgaaagtaatagaaaagtattaaaaatgctaagataattagaaacgtattttctaactgtagcagagtaacaggtaagttagaaaatttactaagcatgatctgaagtatcccatattatagttggaatttggtttacccttggtctaacttctcattttgctcttaagaaaaagtggtaagttttactaagaattgttattgatgcactcccaccatgacttcaatgcatccncaacatgaattttgataaaaactctctattat

SEQ ID NO: 62021 - DNA, 471 bp, Glycine max
  unsure (1)..(471): unsure at all n locations
ctaagctttgatggattattaaatcttatcatggtatcatttactatatgaccaagcaattaggaatntaatcccagacacctctgttcataaaagttccattaaatttcagcacaagtacaatgggcttatgcattatccatgcttcanacccaaatgacaactgaattaagggatgaataagaaattaaaattattcataaaccagcacttggcagcttaaaaatttggattgatttggtagctaatcttcaaaatcattaaatcgagtcaagatataatctcaagatatcaaatacatcattgagttagcattgaatggtctcataacaacacctcagatgcaagttatactataaaaaggtagcttgaactttgtatagtttaaaaactccatctgaaatcgcatgacaacaaagaaaaaagggtccagagagatttcatttcataaaagagaatatcaaccttggc

SEQ ID NO: 62022 - DNA, 490 bp, Glycine max
  unsure (1)..(490): unsure at all n locations
ntgattactcattcagtcatatatgtgtatgtgcaatattttttcttggacgatattcaacgatntatgctgaaaggttctcgctggtatatgattcacacgngcctgattttacagatactcatgcccaataatgtagtatatcagaacggtttggtcacagaggcagcggaaataggatcaagcttatacctcanagatcgggttggccaatgaataatctataagtacttttatgagtattatttgaatcttcaaacttatcttgacattggtaagcatatccaacttatctaaattgtatggaaagaaaaaatgccataaatttatgccatttaactattatgccgtttatagtaaataatagcagtcctgagacagacaagatatggggcaaaagagcatgtgttccaggtataaaatatttgttgctcgaccttgtcgtgaatcaactccacacggtgcatggattgcattctttccacctaac

SEQ ID NO: 62023 - DNA, 438 bp, Glycine max
  unsure (1)..(438): unsure at all n locations
agttagcggtttttttatttcttgtaagtncatttttctaattttagcccatgtaagttggcacttttcctattttgattcctgtcagntttttatttattattagtccttgtaagtgtttgttttttcaatttatagtccctttaagattccaattttttcatttatagtccccataagtttgtacttacaaggatcaaaaatgaaaaaacgcaaacttacggtgactaaaaatgagtaaaatatcttacaagaaccaatactgaataaacataaacttacaaaaactaaaaatgaacaaaaaattttacaggaaccaaaattgaaaaattacaaacttatagggaccactaacatatttaagtctattttagcatgaccaaggtccctcctcacattacagcaccttaaggcaagtactgaccttaatatattatc

SEQ ID NO: 62024 - DNA, 470 bp, Glycine max
  unsure (1)..(470): unsure at all n locations
tagtactccggncatacagatatgagcttggaatggngttttatcttatgcangactggnatntgtattctagtggtaatttccattaaaattttggaagttcctctactggtaattggtgttgtatggctgccttaactgattccccatgtagtgaactccttcttactgcccacaactagttntgcaatgggaagactgatgttctcccccacattgttcacaattgaaattntgatgcgaggtgttatgcatggacggaagttgcctaagcagctattgcattngctttgtgatggtgtccagggatgaatgtcaaatttaccatcttttcatatgcaatttgagacatttatttgattctttagtatactatacgccttgttgtgaataaactcattatgttttcaattttaatatatttataggaagtaccattctataacgttttaatgtgatttagtgagtct

SEQ ID NO: 62025 - DNA, 458 bp, Glycine max
ggacacttgaactacgcttaaccaatgcttacatatcaccattttcctgtttacttcagaaatgaattagagcattatcttgtgttctattatcttatctgataatattggtactgcatcattccgactccagctacatcttcatccaactaatccaaagaaaaattatatatttagttgtagaagacaatgagtgaatgaggactcctttggaggaaaattcccttggaattctactgtattttaatctttcttaccgtctggtgcacgagtagtctccactgataatgctgcccgttagagggtggtatgcactgtgtacttgagattttgtggccatctgttctaacaattcccaagatctccctatgagaatgtttcacactccagatattttgagaggtttggaccactcctcacatctttctcacatgtccctagtcaacatccaaaatctt

SEQ ID NO: 62026 - DNA, 403 bp, Glycine max
  unsure (1)..(403): unsure at all n locations
acatatttccatgacacanatgcaaagatgatgaatttggaaatttatgccaaactggtcatgcatgcacctatgtggacgctcaagtgtcaaatatttatggtcatgtgaagctagggctcaggattcatttcctctattttaaatcaacccaatgtttccaaaatatgctcttttatcaatttatgcatttatcctagtccatttcgtgcgtccggngaaattttcacagcattcacccttcaggtgtagacacgttttttcttcaaaaatcggttatgatacaatgaatttttttttcaaagaaaagttggaaatcatctcttttcaaaagcatgtgcggttttagctagacaacttattntntcttttttctccttctctcttttgtgtatcattatca

SEQ ID NO: 62027 - DNA, 380 bp, Glycine max
  unsure (1)..(380): unsure at all n locations
agctcttgacaaagcaaaggaaaggaaattcttgaaatgatggaagaggaatntgtgtgaacaagcctcccatgttcaagggagtcatatatgactactagaaggaaatgatgattgtcttattcaaatccactcacattgatatgtggaatgttgtaaaataggacaatcacattcctctagacgctgtgaagaaggcgatcccaatggacaaatggatggatgatcagaaatccaaattntgtctcaactcatgcactaganatgccttactatgcgctctatcagaagaagaatattccaacgttcacaactttataagtgccaagtagatgtgggacttcttggctattacctatgaagggtcctctaaggtaaaa

SEQ ID NO: 62028 - DNA, 376 bp, Glycine max
  unsure (1)..(376): unsure at all n locations
cctcagctcacctgattggtcctttatcctcatttttgcacctctttctggttttctggccttttatcggaggttgctaacgtcagctgctatcctgttctcctatctaggcttctattnttgagcatctctcttgtctggtgactctttacctcttttcttgggttttgctcacgtctcgtgctatttagtctcctatccacgatgggaactacgacttcgctcttctttttcgatcgctttcattgaccacagaatgaattcggttcctttcgattctctgcccatgcgttggtttgcaaaacgcctctaatcaccaaatgctgcacatacactatttctggggttgcctatgtctatgtctcccattgacagt

SEQ ID NO: 62029 - DNA, 403 bp, Glycine max
gacacttatacactaagctaagatgttccatttctatcatcagtgttctattagttgtcgcttatcaagtccatgcagaaatattcgagtttatttgtgtttcaagaagagttttctttattttcatcctcaatatttttttcaaaaaacttttgcatgtgacccaaaagagttcaaaagtactggtgttgatcttcaaagcatgtatgtctagaaactttgtttaagcctagaagagtatatctatactcactatcagatataaagcacgctaaataataaataactcgcgtagtttttttcaagagccaaaaataataggaataagactgaattactcaaatgataataactaagacagtctaaatttaagacatggtgtgagctctctcctcagaaataa

SEQ ID NO: 62030 - DNA, 475 bp, Glycine max
  unsure (1)..(475): unsure at all n locations
tcattctacacctganaaagatgatgatatagttgacaatatataaagcttcctgatcatgagggagctaacaaaaattntcatgcaggtggaccttcttctaatagttctgacttgcagcagcctcctatccctcttccattttcacctagagcaatttcaaacaaaaatatggaagaagtggataatgagatcttggagacctttatgaaagtagaggtgaacatacctctactagatgccatcaagcaaattccaagatatgccaagtttctaaaggagctatgcacccaccaaaggaagctcacaggcaatgaaaggattagcatgggcaaaaatgtgtcagtattaataggtaaatctgttcctcacattcttgaaaaatgtaaggaacccaggactctatgtataccttgcattattgggaacgacaattttgagaatgccatactagatcaaggagcattcagtagtg

SEQ ID NO: 62031 - DNA, 487 bp, Glycine max
  unsure (1)..(487): unsure at all n locations
gtgagcagattcgacgacaattatcttttttgtcgatgtctgatngagtcccgtaaatatatcgagacgctcgaaatggaataccgaagctctgagcaaattcaaacaacaataactttttactcggatgtccgattgagtcccggaatatatcggaacgcttgaaattgaatgttgaagctctgagaaaattcagacgacaataactttctactcggaagtccgattgagtcccgtaatatatcggaacgcttgaaattgaatgttgaagctctgagcaaattcaaacgacaataacattttactctgatgtctgattgagtcccgtaatatatcgagacgctcgacatggaataccgaagctctgagaaaattcacacaacaataactttctactcggatgttagattgagtcccgtaatatatcgagatgctccgaattgaataccgaagctctgagcactatcaaacgacattatacttttat

SEQ ID NO: 62032 - DNA, 460 bp, Glycine max
  unsure (1)..(460): unsure at all n locations
gccttaatgtatgttgtttcacctnttgtgacaanttntaccctagtcctttcccaaattaggggcatatcatgactaanacccttgtgctctcttaaaaccctacaacaaggtaagagatatctgagaaaatacgcttaggggtttttagacacaacacacattatcatcttttggctcacataacgtacaagggataaattattatcaaaggttggctttttggctaagtgactgaaaataaaaagaaacagggccttgatcatttccacctcatttaattaatctaacaaactaataatgatgcaaaattaggaaactgagaacagacgttctttcacaagtttcacacaactcaccgggacaagacaaaagttgtttgaaaagggtttcaaattgattaccagtagcaaaattgtttcgaaagggtttcaaattgaatttacaaatgtncaattat

SEQ ID NO: 62033 - DNA, 487 bp, Glycine max
  unsure (1)..(487): unsure at all n locations
ngcatattctntattggttctccacctttaccaatacattatcattctgcagaaaataacggtaaaccatcccagccaaaacaaacccaaacagaattaaaacactaaatacatcacataagtcatatgtttatacacaaccccttagcacaccttgttatttgggatcttcgacacatactcatcatacccagcttgcccagccactcgtcgagcaacaatgccagaacctccagtttcagcctattaaaaacaccatgttaaagcaaattatatttttaaaatccacttgatatcgtaatggcttttctaatgagcaggtaataagaagtcaacaacaaaaaaatcttttcaaaagccattcgaagcttactttttgagtaatttaaagcatgcaataagctgtattaacacttccacacacaatactacccctatactatgacttccaattgttcataaacaagccgaaacataaacacaccac

SEQ ID NO: 62034 - DNA, 481 bp, Glycine max
tcaatatgtagttaatactgctgacaactctgttcatgtttgaagcttgatagaaacacagatgttagctatagtaatatgaggaaggctgcttcttgggaagatctgactgacaactatttattctgttctaaagctgtagatcctcagtacaaggatctaaggcattttcagtggcattgggaaaagggggagcctgtcattgtcagcaatgtgcttgaatgtacatctggtttaagctgggaaccgcttgtcatgtggcgtgcattacgtcatgtaactaataccaagcatggccaacattctgcggagaacacaattgattgcttagatcggactgagggttgcttaatatcccaatctttaactctattgaccatggagagctgtttacacacaattcattcttcaccttcattctcatgaagaatatagttaaatagttgatgttggtacttatctaactgaaccactgcagtta

SEQ ID NO: 62035 - DNA, 461 bp, Glycine max
  unsure (1)..(461): unsure at all n locations
aatggacttaccttgatttatcctttgatatctcttntgagccctgntatcctttcctgtgtttgaagctcactacaagccttaaatgagaaaccatgatatcaccatatccttaagggaatttggagctctggaatggttttggaataatgtggggggtttgttcattggaaacttgttttgtggctatgcttcatgatgtattctgggccatacttgatgtacattgtatattcggtaaatgttggacatgctgaatgaaatgctgtttctcanaggctatagagtaaaacaaaatcgataaaagaataagataagcaataaagttgaataagatcttatatggcacaagaatgatgaaactcttggttctactctttatgattaagatttatctctatcntcttttattctcttattgtttcttaatatgcacttattccgcattgctcctctatttc

SEQ ID NO: 62036 - DNA, 429 bp, Glycine max
  unsure (1)..(429): unsure at all n locations
catatcaatcttttttttcttcttgatataaagtatntatcatcaaaaatacttctatgttaaattcataactcaatccgcttacttattaacaaacataaaatattatcatttatgttaactaatgttgatttattatcatatataattaaaaaaatataataacagaaatatataattaaaactaaattatgtttntataatttatctataattattaataaagataattatcttntttatgtagatatttcttattcttaaattaatatttaatatttataactggttttattttattcataaacctttaaaatctaactgttgtcgcttctcttataaaaacttatatcactacttcttnntaatgtgtttctttntctttataaaaaaagagaggggtgtgctttttcaacaaaatatataaaa

SEQ ID NO: 62037 - DNA, 238 bp, Glycine max
  unsure (1)..(238): unsure at all n locations
aaacataataagtaaccggataaaataatcactcttttctcaggggaaacctcctctttcatatccttggggggcctcacatttcttctcttgtctctctntctctcatccgatttgtcatcacacacttctctatgggatagaggttaagagtaaacgaggaagaattggctattcatctgtagggctcttctttgtacgggtcaacaaacgctgcatatgtgtagtgcacgcaact

SEQ ID NO: 62038 - DNA, 190 bp, Glycine max
acccaccactcatgtattcacaaaggctatccctaatcaaccacaaagtctgtctaccgcactttcaatgacgaagacccactttagcacacgccaataaaacaccaactaaaaggaattttgcagcaacaaacctgtagggttcaccacaaattccgtggcattagctaaacttgacccatattcactc

SEQ ID NO: 62039 - DNA, 305 bp, Glycine max
acctgacaaaacttatcttctcctttttggacaaagtatggcaagctaggggcaaagaaaatttgttgccatcagaccttggatgcaactgtgatcgtatccccatatcagctagatcttgatgggtattcaagccatccttcgtcttgccttgaatgttaagaagcgtcccaatcacactgtcacatacatttttctccacatgcataacatcaatacaatgtctaacgtctagatcagaccagtacggaagatcaaagaaaatggacctcttcttccatatgcaactcttacttttatccttc

SEQ ID NO: 62040 - DNA, 389 bp, Glycine max
ttctagttaaaatatattacggaatttgaatttgtatttgcgaaggacatttgggactacctcaaatcagagtattagggtagtgagcgaaccaaaggtatgaaagcacttaacttggctcaagaatttaagatgcagagcatgaaggagacagcaactatcaaaagttatgttgacaaaccattgagcatttgcaacaaggtacgtcttctcggtaagaatatttctgacaaaaggatagtgcaaaaaaatattgttactagactccgagagagatgcacttcttattgcagtgaaaaacatcgacaccaaacagctcttctagtcctatactcgagagaaatgctcaaaaaggtgcccagcaattaataagaacaatattgactgga

SEQ ID NO: 62041 - DNA, 127 bp, Glycine max
tttgcctggatcttacccagtccttagaaaataacctcctacttatatggaaaaagccttattaaaaacccccacccaactttcatggaatctttaataattccaaggtttaaaatggaccactcct

SEQ ID NO: 62042 - DNA, 400 bp, Glycine max
  unsure (1)..(400): unsure at all n locations
acccggtgtatagagaaacgaggatatgggctacttgggagtacgtgagctctgttggaggtgggcaacaagggatggtgggtttatgcgcgaattgtggatgtggaaaacttgttgtgcaccatcgcccgaccgccacctagtaccacatgtgatgggtaccccataattctacaagcttgagatgaggaagtgtagaagggtgaaacttcttgcttttattcgttcaccacagaatggtacctggagatatgtcgcgggggtcatgaaaccttggggacgtcangtggggtgctattgcccaaaaccaagcttgaccaatcccgacccaacccgcgcatagtcagtcagtgagaacctgtgatgtacctaagcaggcgagctcctggcagtcaacaga

SEQ ID NO: 62043 - DNA, 284 bp, Glycine max
atgagctgattcctacttgagtgcagaacagttggagagtatgcattgactataggaggccgaaccaggttaccaaaaacgaccatttttcactatcattcattgaccagatgcttgaacacctgtcaagtaaatctcactactcgttccttgatggtctctctcggtatatggaaatcactattgctcctaaggatcaggaaaagaccacattcacctgcccctttggcacttttgcctataggaggatgccctttaacttgtgcaatgctccccgtaccctc

SEQ ID NO: 62044 - DNA, 420 bp, Glycine max
  unsure (1)..(420): unsure at all n locations
gatgatatggtgtcccatcacatgtgactaggtgtttgttggctatggtgcacaacaagcttttcacattcacaatgcgcgcataaacccaccatcctctgttgtccacctacaactgagctcacgtactcccacgtagcccatattcttgtttctctcacaccgggttcccatcaatccttccaagcttccacaacattcaagcgaaacaacattcatacagcacaaactaccacagccaataagacatggcaaaggcagaatactctgctcaaacaccaaccaaaaatcacagctnttcttacttaaagaccccagtaacaattccttctatccaattcggtaaccgttggatcgactccaaaattatactggaagtctctagtacataagcctacattctgaccggtgggatctact

SEQ ID NO: 62045 - DNA, 318 bp, Glycine max
  unsure (1)..(318): unsure at all n locations
tggctttttttttttgtgaacttttttttataaggtgtcattgtttttttaccttgttatatgtagagtggtgtgtgttagttgagtgttaggtggtgattgtagggttgggctggcgtataaggaggagggggtttagaagggggtgtaagggtgttgatttagtatggtcggggaagagaggggcagcttatagtttggggttttttgggaaagaattaggagtggtgtggggatgtgttgtgtttttgctttggggaagtatgagggggtcgnggatattggtgtggtagggaggagggggttggggtgggtttt

SEQ ID NO: 62046 - DNA, 369 bp, Glycine max
  unsure (1)..(369): unsure at all n locations
ttgttcagccataggttccataactcgtgagccctctatattgttagcctttttaaaagccatcatcctatttaaaatcttatatgaaatagagatttaaatttaacctatttccaaccctgaagaacatgtaaaaaatattggatataacaatttaagtaaaaaatttcaattaatgtaggataatatatcattcagaaaacataaatactctacactaattaggatttgcaagtgtcgattaaattttactaattaatgagtacttttttattcgttaggtaagagtacaattaataaattatactttaactcatacaaaaggtattatgtgcactntataatgcactatcatccttacacagttac

SEQ ID NO: 62047 - DNA, 436 bp, Glycine max
  unsure (1)..(436): unsure at all n locations
agctttctccactaagttgcctgatgtcttattgtctttttgatgacaatggtcctagatgcagggaaaaatttctccaagaacaccttcttaaggtcatcccaactgaaaatggacctgggagcaaggtagtatgaccaatcttttgccactccctctagagaatgaggaaaagcctttataaagatatgatcttcttggacatcaaggggcttcatggtggaacaaacaatatgaaactccttaagatgcttataaggatcttcacttggaacaccctcatcaggatattgaatgcacaagctntcataagtgaaatcaggtgcagccatctccctaagagtcctctcacaaggtggaggctgagccatgttctcagtatgaaaattagtagtggaatgctcaaaatcaaaatattcagaatcacccttcacag

SEQ ID NO: 62048 - DNA, 343 bp, Glycine max
  unsure (1)..(343): unsure at all n locations
tctaatactntgtgctgcaagtgcaacactgccacaattgtttctcttctgcatatagagaataagtgagaggaggtgctttgatgtcattaaaggaaggccatcctgaaactgttgaagagacgcccgctttgggaaaatctttatcattattcattacaccctatagtcctataccacgactgactacttttagttactctgccttcaacttcagttaatttgtgcagtcaactggacaatgaaattccaagtctgataaaagaacaagacccgatatctcacactctataactcttgttttaacccatctgcacagaatgccaatcattattattaaaaa

SEQ ID NO: 62049 - DNA, 391 bp, Glycine max
  unsure (1)..(391): unsure at all n locations
catgcaagctngcaatttcgctgagagagcnctttgtcaattattctggnctctgggncncgaaaagagggagagcatccttctatttgttgactacactccccagatggagccttacgtaacttctggtgggaagctatccagcgactacagtaaacaaaaaacttatcttcataatcccgaagacaattaataaagtgcggtcaaatgaacatgcaatttattatagatgaattatactacaacggggcaactatggtcattggggcacaacctttcattagccaatgctctatgggtgcctttataaaagaatcttaagatctttcaacctttaacccctctggagaacacacgggattaaaatatctcaaaaattttccccctgaaa

SEQ ID NO: 62050 - DNA, 388 bp, Glycine max
tactaagctgtgccatcccatggtggaaaatctcttcaaaaatttaccctgactggactcctatgatttacctagtgagagagacccgaccttctcacgtatggtttgttctggcaagtactcctaggcgcctgaccaggtttttcactgacatggtaccacattgcatataagaatgagtcctattgtatactgtgcataatgcaagtggttagatccatattgattgacttagtgatattgtattttgatcctcaagtacgtgaatgaggtgacaaataatgacacttgttgtattgcgatgtgatgctacacccgaaagtggattatcaccccaactatgtcaaataagctgaattcaacttatggtaattttactccgagcttc

SEQ ID NO: 62051 - DNA, 370 bp, Glycine max
  unsure (1)..(370): unsure at all n locations
agcttgngagttgtgagtgagaagactgaatatatctctaccataccctctttccccttatcacaaactttgtggaatactattgctactccagaacaatgatctttagttaatctacactctaaggtaattccatcatctaattacctcgccgaccctaaaatcaaagaagattgagcttggtggaccttcatatgaagcagatgctcagatagcgtacatgtctcagcttggagtaaaaaatggtggaattgcaacggtgatcacagaagatagtgatctaatatcatatggctgtccagctgtaagaactcctccaatactgtgatattgcgcatggaggtttactgctggtttgatatcttgattt

SEQ ID NO: 62052 - DNA, 211 bp, Glycine max
atccccttactactagttctataggagttcatgtttaaacgtcttcgtgtatgcgatataattcttaatttaaattaaggactggttaatacagattggacgcccatttgcattgtatttgcatgcgagtatccgcatgaagtctaaaaacgacctactttacatcaaactggatacattaacaaaataactttaataggagattggtttt

SEQ ID NO: 62053 - DNA, 446 bp, Glycine max
  unsure (1)..(446): unsure at all n locations
ctataagccaccgcagctgcagcttatgaagtttctggtttcaatccttgtaaacttgngctattcatcttttcattctcttctccctttgccaaaaagaattcgccaaggactaaccgcctgaattattttttgtagatgcaaatgcctttggtgttttgatgatgatcatgatgatatgatgcaattgatgcaaatgggtttttcaagtttaaattcaagacaacacttcaagaatacaagtcacaacatcaagatgatcactagtatattaggaagggaattcctaattgaattagcaaaaggtttggccaagtaatttaaattaaaaagtggttttcaagggattactctctggtaatcgattaccagaggatgtaatcgattaccatgggcaaatatgctttacacaactactaaaatttgaatcaaaatttagactgtgt

SEQ ID NO: 62054 - DNA, 449 bp, Glycine max
  unsure (1)..(449): unsure at all n locations
nggttcgaggtacttacccgttgaagatcttataacgatgtttaacgaatgaagaacgtcgaagaacggttgaaacctctgcgaaattcctcacggaaaacgttacggaaacgtttcagaagcgcgcttgcttatattttcttcacggaaacaattttttcaagctaattctaaagagagagaagtgcctaatgggctgaacccttttcttcttcacttcctccccgtattatagcaaaataggggaggtggttgccgcctagctcgcctaggcgagccaggttgctttcctcagaagcaacaaacttcttgaggaatattctggagggcccaatgggcgctggggctatttgcaccccatttttactaagtacacccctctgctttcattgtggatcttattgaaagataccgaacttacaaattcgtacgatactggtttttttccg

SEQ ID NO: 62055 - DNA, 408 bp, Glycine max
  unsure (1)..(408): unsure at all n locations
agcttctgctaaattccatcaatttttatattgangttnattattnncgggtgggatcatgaaaattatggtatttggcgaatgatgggggtgtaattagttgggagatgttatttaattgcagattcctttaaagatacaaggaagcgagggtcaactttggatggacattattcaattgctgcgtgatgggattgattgagtgtgacattagtgtttgcaaaaccataatatatttggatgtttttcgctctctatcgctctgtcttaccttagaattgttgtttttgacttttctccgcgtagtggaattcaatgatcaaaatcaaacatcgtgaggctgagtcagccaaagcaaaagcaagtccaaggagattgagaatgaatcattgggctggatcatagaga

SEQ ID NO: 62056 - DNA, 239 bp, Glycine max
agctttacaaaggaacaaaacctaatatttcttatttaaaattttttggatgtaaatgctgtgtgttaaacaatgaaaaagaatctcttggcaaatttgatggaaaagccgatgagacaatttatcttggttattcattgcaaagcaagacatatagagggtttaataagagagctttgtgtatggaaaaatttgtacatgtgggtgatgaaaataactcttttgctcatgaaaatgct

SEQ ID NO: 62057 - DNA, 443 bp, Glycine max
  unsure (1)..(443): unsure at all n locations
ttaatgganatatttctaaattattatgtgttnaatgaggctgttcataacatacaaattcaaacatattttatcaataagcataccttctataaccaagccatagtacatcatgaacaaaaagttgtttcatggggaactggttatctgttcaaagattacctaataacagtatatttcattcatgagagcgttagtagaaacttgtacccgagccaaggaaattacagaacataacacaatacaaaatattgttcctataagtgaaagagccagaggccaaaccaatagacaaccacatttaatcaaaaggacacttttgttttgtgagggaagacctgcacctgttaccaagaacaacatgcaacttgacaatgatctttcttcttaacgagtaatattacctctcttcacattgatcttagtagttgatcacctcgtct

SEQ ID NO: 62058 - DNA, 76 bp, Glycine max
gacgcgatccttaagtcacctgcggctgcgctgagatttatagggacctaatattttgtgtataatggcataccgg

SEQ ID NO: 62059 - DNA, 407 bp, Glycine max
  unsure (1)..(407): unsure at all n locations
aagattttttattttttttggcaatggccaatccgctaaccgtaaacctggccctaatgctcaatccttatgccctaaggccaacctttctcccccctaaccccaaaaaccccggatgggtggcttgaatagttcagctaagcgaacatcactgcgctaagccaacatcttcacggtaattgaactctaccagtgggcttagcatggatgatgcgctaagtgccacttcttctctggaaaacttttattgtagcaacgctaagcgtgctatcctgcgctaagccccagatccattctgtaacttgagtttttaagctgggcttagcggngtaggaagcgctaatcgccaatctcttatgggttttgaattcttggaacgtgcgctattgaagctngatgtaacgctg

SEQ ID NO: 62060 - DNA, 417 bp, Glycine max
taaatcaatctcagttttgatattaatcgtatattgctctgtagttatgattttgaccactaaatcgattatatttgtatttattcctttagtattttcggcaattaaacaaacccatgatatttcgattaaacttgtacttaactaggggttggaataagccaggccaggccagactttgaaaggcctgagcctatcctatgatgaatctttgaggcctgagcctggcctatagcctataaaggatttatttggctggttgacttattaaagcctggcctaacctgatggcctttttaaaagccttcttcacaataaatatttaatatttcatggagtacgaacgtaatatgacagttaaagacataggaaagttaacaacataatgatgaatataaaaggacacatgactcacaa

SEQ ID NO: 62061 - DNA, 435 bp, Glycine max
  unsure (1)..(435): unsure at all n locations
gcatgcaagcttctcccncaattttctataaatagggttgattattgtgtagaanagggttcagccccttaggcacttctctctctttcgaatctgctgaggaaaattatttccgtgaagaaaatccaagctgaggcgcttctgtaacgtttccgtgagtaattacgcgaagattctcgaccgttcttcaagattcaccgttcgttcttcgtttttctttagtcttcaatgggtaagtacctcaaaccaagcttttcaattcattctatgtacccgtggtggtccacattttgtttcgtgtatttttattctcattntcatttactttttatacccccttttgacgtgcttaagccattttattaagtcatttctcgcttaatctaaaaataaaataaatctccaccgatcgtttgaatggatcatccgtaattt

SEQ ID NO: 62062 - DNA, 221 bp, Glycine max
tcttaatatttctgctttcgctgagtgaggagagagaaaagcttttttgttttaaataaagggctttctccttttctattattttattataaactatgccacatgtctcatttgagtggagcaagaagggcccactttctctttctgttgtgacccatactcagccacataagtgaggaaaatatgacctttgaaacgcctaaatcctgcctcagtttgcg

SEQ ID NO: 62063 - DNA, 442 bp, Glycine max
agcttgaaatagagctcgaaagacaagttgttttttataagctgaagacgacagtcactagggtcgggaaagagtgtgatgagctgaaagatatcaacatgaccacggttgaagtgttagagcgggaaacaaaaagggcccgaaaggaagaatggagtatgaacaagttccaaggggttctgtggagcagcagtaacgagctcaagcttagaaaggccgagagggatgaatcaatgatggaaaacatggtgttaaaggataagttaaaggcttgatggaggtcgaagagaagtttgacggaacagttgagcaaaatagaagagaatatgataataatcattgatcaatataaggagaaggtgaacctggctgctagtcatgggtagatgctagaaaatgaacatgcaaaggtaacggcttttgagatttgatgggaagcgag

SEQ ID NO: 62064 - DNA, 418 bp, Glycine max
  unsure (1)..(418): unsure at all n locations
gagaagagaaaaatgagggattgaagatatacaagtagtggggatgtctcctccacctctaggacctcacaatcactcacaaactcatctcaagctctcaggacgacttcctcttcaagctccggtctttgcaggtcttcgcacaacaaaatctctggaacttggacctttctctctctgaatcgcttagcgcgcattagtgaattatggcttagcgcgtgcttttctcgttctgcggatggactaaagtggtgcgcttagcaggatgacccttcgcttagcgaacatgcacaactcatncttcttccaaattctttcttgcgctcagccaaggagtgttgcgctcagcggatggctccctaagccagaatattggcttagcgagggagtgaaaatagcacttcacaaacttgctaat

SEQ ID NO: 62065 - DNA, 459 bp, Glycine max
tgtagaatggctagacatgatacatgtcatggtttggtttgtgttaaggataataaggatgccccacattatttccatggcacaaatgcaaaaatgatgatttggaaactctatgcaaaactggtcatgcatgcacctatgcggacactcaagtgtcaaatatttatggtcatgtgatgctagggctcacgattcattttctctattttaatcaacccaatgtgtccaaaaaatgttctcttatcatattgggcattcatccgagtccatttcgggcgttcggcgaaatatcacagcattcacccttcaggtgtagacacattttccaaaaattagttatgatcagtgaaatttcttaaaaaaaagtggaaatcgtttcttccaaagcatgtcagtttaacctgacacctacgcttcctcttcttctttatcatacaattgctattcttttctggtggt

SEQ ID NO: 62066 - DNA, 411 bp, Glycine max
ggaccttaaatctaagctgaatctaagagtgctcacaatcttatgcacattgtttctcgttgccagtgcaccaatttgcacaggtagtaaagactcgaaagtccgagtgttgattgatgcaatcctaccccgtaagggcattggatagaagactccaagaggattgggcatgagatgcaagagaaggccctatggtcctcatgagccttagggtagatttcgggccatggtctaagtatgagcccgcttatctttgtacatattagattaaggtttcattatttctttggccttttatttatggctccataatataggtaaggtaccctagaaatgtacgatatttcagcccttgtatttagggcacttagactagttattgtattagcggtagtcttgtatttcacatgc

SEQ ID NO: 62067 - DNA, 435 bp, Glycine max
  unsure (1)..(435): unsure at all n locations
agcttgaactntgaggttgnatttgcattcttttgtgttatgaaataataaaaaagttcacaagcaagacttatgagttcaaccatactgtaccataagtattaagtagacttctgactaaaaacaaaagaagtactggagtaaggagacaagtttaaaataataaatgtgaaatttaaaatggagtgtatgagatgggaagaagaaaaaaaataaagaaagaagaagtaagaatatggtaagtgtgataaatgatgagatggaaaaagaagatagatataaagaaaatggtaggaagttcatgggttggattcaaataggtttaggataaaaatcaaatttgaatacataatatttaattggatcagattgatttcaagtttaaaaaaaaaatcagctaaagtctaaaatgtgttgttcaaattgaaaataaat

SEQ ID NO: 62068 - DNA, 440 bp, Glycine max
  unsure (1)..(440): unsure at all n locations
tganatgattacaaagaatncttntatcatatatcatcaaatctttcaatatatattaatcattgatgatatcagaaaatattttgcacgaatatgatagaagaaaaacgataatctccatattaatctcatgcaagttattgttggtttttttaagaaagataattataccattttatttattacattagaaacaatataagatgatatataattaaattcatgagagctagcataaaatcttgtaagtcctaattacattatgagctactccatccattttgaaactatggatgttttggcattttaatcttgtttcaaaactatagatgttttacaaatctaagactaaattgtcaattgtttgttttcattatacacttgtttacaattattagtttattggaatttttttgttattcaagacatatatcaattac

SEQ ID NO: 62069 - DNA, 434 bp, Glycine max
  unsure (1)..(434): unsure at all n locations
agcttttgtgcataacttaaactttcttgtgttgaaaatataatttgaagtattttctggaccttcattattatatctcatatttttaagcatgaaagtggatgatcataagaagttaaagtattaaattcctgcttctggatataaacagcaataaaattagcactatcaagatggcataactntggcattattataattattggcacttaaacatctgtgttctatttgtaccttgataccagcctcaaatatttcaaaagatgcgagctgatcttgcttccatgtggagtcctactagcagaacaggaaacccgagaagattatcaataaaaggcaacttgatacatttggacgagaacagttcaactgctttctgcaatggatccttgacattcaatgaggatgtaaataggaaggtaagaatttttaag

SEQ ID NO: 62070 - DNA, 289 bp, Glycine max
  unsure (1)..(289): unsure at all n locations
cctgtacaatttgataccggctagtnggttctctagtntattatacattctcttcctaagaatgaataaaatgtttctcgaccaaagagagagactggatgaatagaaaaggagcaattgtgctaattcacgttcaacgaatatcactttattcacaccacaaacccggagttagacaattcttttggtttatgaactgtatacacgaccatactaattcaatgcaatgaacatttcggtgatggattagaaatgacagtcacaaacattttatttttgtttacagatc

SEQ ID NO: 62071 - DNA, 361 bp, Glycine max
  unsure (1)..(361): unsure at all n locations
ctgattttccttattttgtttctttcttanaacaataaacttggccttctcttaattgtctttgggcttggcgaccacgaacaacaaagtactttcggcacctactatatggtgacttgaccaacgctggtattggaatgctgcgacaatctttcaacaccttattcacacattctgataagttggttgtcatgtgaccatatcgtccgccagatgtatccgaagccatgctccatttttcctttgagattcgatcaatccatcttgctatggctggactcaattgacaaattttttttaagttttgatcaaacacatgcttgcaaggagtgtacgctgcatcaaaattgttatcatcaaa

SEQ ID NO: 62072 - DNA, 448 bp, Glycine max
  unsure (1)..(448): unsure at all n locations
tacttaagcttttctgaaggactctatcacttgaattgttgcataccattatttgggaaatgctagtttcatgaatgcgagcgtctgttcacgtagtggtagttgaatcacaaccaaagagagaaaagggtagcttcgctaataagaaatcatgggtccgttaagcccacacactctgttctgtctcggtgagttgggtgaaacttacttgtgaaaaacatctgttttaatttcatgatntgcctcattcttagactatagaataaatacatgattttaaatgaacaatgccctgtttttcttattttcgccacctagccaaaaagccaaccttgatgataattaattccttgcccctacttgagcacaaaggaaaatatgctttttgtaaaccctagcctactttatttctctacctttttagggttagaagctaggatttctcctg

SEQ ID NO: 62073 - DNA, 405 bp, Glycine max
  unsure (1)..(405): unsure at all n locations
agcttaagcaacttacagntcttactctgttgatacatataaggtattgcttattgatgtagagttattgcatatcattttttggtatttttgcttgatttgatggttgtgggttatttctgatccattttaatttttaatctgagagctgccagaaactggcctaccccagtccagataacttgcttattttttattgttaccagttttgttataagtggaagttgatttctatatcttaggtgtctcaaatcacttgttttagtttgggtctttgggtgaaaaatgaattctctcagctaaagggtggtgcaaagaccttaattgagatacctataacctgctgctagttataatgatagaactggaccagaaacagaagaaaagattgtgaacgttcgtagt

SEQ ID NO: 62074 - DNA, 435 bp, Glycine max
  unsure (1)..(435): unsure at all n locations
ntgccactcatcttcattctatntggtttctanttttcttttaccacacacgccctttagaatctattgcgaactatttatacactttgttataattctaacaaccaccttgatccaacccgacatgcctatctcttattggatagctacggtatatgggtcgagcctacccctagctaccacccaacaaatgatcaaaaagaaataaatattactcttattgtctctttntatgagactcaattaactaagtcatcaagattaagacaattacttaatctagttactagcattaaacatgacctaaactaacattgtttttaaaatctaacacaacatttataagacatacttttagtcctttaaaaaaacataaagaacaaaatgaatggcctatgtgtagataataatataactaaagtaaaagcttatgaa

SEQ ID NO: 62075 - DNA, 251 bp, Glycine max
tgagaacctgtgatgtacctaaacaggcgagctcctggcagtcaacagataaaaggaaaacaagaccacaaagcaaggaggcttgtggtggctggccagctgtgaattttgtgtaatatgtggatggtggcctctggtaatcgattaccaagggtgggtaatcgattacaaggcttaaaattgacgacaggaggctaagatggtctcttgtaatcgattaccaagggtgtaatcgattccaggcttgaaaa

SEQ ID NO: 62076 - DNA, 385 bp, Glycine max
  unsure (1)..(385): unsure at all n locations
aaggtaacccctcaaggaccaaaaacctcaagtggaagcggtttcctgcaaataagaaggggaaaggtattaaatagggaaaagtacttaaagaatttaaaccccgccggctttgacactaaacggggaagaaatatatgcatactttgagaggacttttgtaagaagattcaacnntctgaagttaataacggcaggcttcccctgtctattaagttcagcatcctcctcagctgtaacctcaagctcagccatgacagtctcaactaaataagctatttctgcaggacttctctcattcttcttctttntcttacctatcttgaaaagatccttaatttcttcgtcctcttcacccttctctgcctaagaattccatgtaaca

SEQ ID NO: 62077 - DNA, 351 bp, Glycine max
  unsure (1)..(351): unsure at all n locations
atctactgtttgagcaaagtttgtattcagaaactagcttgacaaaacacgtaaagttgttaagaacaacgctacgcttgtagccaatggttactcacaacaataaggtataaatcatactaaaacttttgctcttgttgctcgactaaaggcaaatcacatagtactatcctttgttgctcatcatggcatgatgttgtatcaaatggacataaaaagcatattccttaatggacttatcaaggaagaagtcaatgtggaaaaccctcctaggttcgagagatctatctaccttcatcatgttttcaaacttaacaaggctntgtctggcttaaaaccagctcctcgagc

SEQ ID NO: 62078 - DNA, 437 bp, Glycine max
  unsure (1)..(437): unsure at all n locations
gcttggccaatcttgacccaacttgggccttattatgcttttaaaacccgggaacgaccctaaccggccaacctcctgccagccacccattaaaggaccaaagttccacaaaccagggagcttggggggcaacttgcccacttttcaatctggggtttaatcggaaaaattccttctggtaatcaatacccattgtgtgtaatcaaatacagggnttaaaaattgaaacagaacgttcagtagctactggtaatcgattaccatctgtgtgtaatcgattacacaatgttatatgctactggtaatcgattaccaattatgtgtaatcgattacacagtgttatatgctactggtaatcgattaccatttaggtgtaatcgattacacagtgtaacttttaangtccaatgtgcaaatggctgtgtaaattcgtttt

SEQ ID NO: 62079 - DNA, 441 bp, Glycine max
  unsure (1)..(441): unsure at all n locations
gactgngaagcacgttattctgttgtttccagattggttcttctctcagnatgtgtatatgtgtatatctggattatattcgctggtctggctgctgattggattttgntttgcgccgaagaaaaaagaagaagttgagatgaaagtcgtcatcgccaaaagggcaggacggacgaaatcagggtcctatctttgctttcctcttatctcccatgagaggtaagtaaagaggggcaactgtcataccctaattttgtccggggattattacttgataacatgcaacctttggttagccgctttgagatacttggcgtactttgttgcacaataaatgaagtcccgagacgtcttagaaatcaaaaggaagcatgcttgcgcgatccgtgaaattccgtaatgtggcggaagtcgaaaagaggtgtttttgcacaatccgtg

SEQ ID NO: 62080 - DNA, 249 bp, Glycine max
gcactgtccacgaagaataaaattccgcttctgtaatttcgattctgctaccatctactatttcgctttatacctgagaatggaacgctaagtctccagcgttgttttctcttgaggatcaagcacaaatctctttgacgtatcgttattgctattgaactctaacacagttttcctcctcaccacttactctgtctatgttgctatacactcatgcatgcttaaggcttgactaattgtctctgcact

SEQ ID NO: 62081 - DNA, 225 bp, Glycine max
gtctttatgccattaagagctaataaccccgtggaacaaaacatggcactgaatgactactatatatctatcagttcattgatggggagctataacggctgcgacaaatttcaagacccctatacaaaggttgcgaatgcgagagaattaagacgcatcttggtggtctttaggggggggccgcagacttgaaactggctttttccttcaacgtcttacactgaa

SEQ ID NO: 62082 - DNA, 158 bp, Glycine max
  unsure (1)..(158): unsure at all n locations
taaatattttaattacttacaatatactaagtattatatacaatgtttgctagtcatatatcttttgtttgttttcgtaaaatacaatgtgacatnattttcatcgtggagaagtgcatggttttaaagtttggcagcttttgtgacgcggaaaaata

SEQ ID NO: 62083 - DNA, 321 bp, Glycine max
agaatgccaatccttaccttcaaagcaaaaaggaaatgaaggaaaattccccaatcaaagaatgggagaaagcaaaaaaaaggaaaagaaggaaaattccccaatcaaagagtgggagaaagcaaaagaaaagaaaggaaaattcccaatcaaagaatgggagaaagtaaaaaaggaagaagaagaaggaaagaaagctcctgatcaaggatcgaaagaaaccagaagaaatgtgcacagaggtctttggaccagacaatatctgaacagtacagaattgtcaccaaatgaacaaaaaggaaggaaaggaaaccacgacct

SEQ ID NO: 62084 - DNA, 226 bp, Glycine max
tactacggggttccggtatggtttcatcataaaatccaaacgcgagtttttttatcaaaatggtttataattgctttggtacggtcactgaaacgggtttttcaatacgttcaccagaaggaatattttgtggcaaagcaaaggtagcaaaagggtgacaaaagaaaacccaaagggactggtctaaaagagtattgatcgtgaaccaaacaactaacgaaattca

SEQ ID NO: 62085 - DNA, 392 bp, Glycine max
agcttcccaacatccaagaaaaacattattcttcttcacaagctatcacagccaagcaaaacagagcaaaggcagaaaactctgccaaaacaccaaccaaatcacagcttttctcacttaaagacctcagtaacaattccttcaatccaattcgttaaccgttggatcgactccaaaattttactggaagtctatagtacataagcctacattttgaccgttgggatctactagcaaacatccagaactcattctacattactctttccacaaccagcaaatacatggatttttctgcacttgtgcaaaattctgctgccaattttacagcaaaatctgcacaaagagcatatttcgaaaaccacaccttccctcatccgatcttgccaaaa

SEQ ID NO: 62086 - DNA, 316 bp, Glycine max
  unsure (1)..(316): unsure at all n locations
ctaagcttcatatgccccctcatcggacatatattatagtttaaatanagnancaaacctgttgtcacaaattgtgatgtgcacagaaaatgacaatttttcacaatgatccccttgaaacttaagttttaactagaactacttggattgcaaacatgatatagatcaaggataagaaccattctaacatgattagcaattgattgacttacagaagtgaatattggaagagtttctaatatgtctatgtcaatcaaaaaatataaaatgaaattcttctaaaattctagaatgaatacagactgaggcaaaacag

SEQ ID NO: 62087 - DNA, 430 bp, Glycine max
  unsure (1)..(430): unsure at all n locations
gcttcaatcttgaaactaaagaaggtcctttcatcaatgtttgnnaagagcggccgggagtttgttgacgtattggccatattgagagtgtttgttataaaaagcacggggtgcctccaaatatgatggaaagcccagggaaccatacaaggaagtgggaagacattgtcctattgcgggaaacttgccacaccatagatgtttgctacaagaaacacgagtatcccccaggaatcaagttcaacaatggcaaagtaatagctaacaacgtagtggcagtagaaggaaaggccacagatgaccaaatacagcgccaagaatctcaagaatnggttcgtttttcacctgagcaagacaaggcattgctggctttaatacaacagccatatgcaggaaactcagcatccaccaagcctcaggtcgtttcatt

SEQ ID NO: 62088 - DNA, 270 bp, Glycine max
atctagaacagtttcaaagattctcatccttaactaagtaccactaatgatcaatggtgggaatcccttgcagtaacattttggtccaatatttttttatgcaaatatgtgtagggaaatttattatgttggaaagcgtaacggatcggtcagtatttacaaattaaaatagatgagatccgtgtattgaactcaaggaactacacttcctgtatatgaagctcctctacaacctaagtcatagtagcaagagataacactgtatatgct

SEQ ID NO: 62089 - DNA, 413 bp, Glycine max
  unsure (1)..(413): unsure at all n locations
agcttgtccctccacttagatttgctattttattttgccatcctaattatttattgtgtacatgtaaataatagatactgaaattcgaatcaaactaaaataaaacaacttaattcgattntaaacacctgccatctaaacgtggaataatgggttgtcaagtccatcagtaacacctgccatcctaattacgttttatttggtgaataattccttcctataaccatgctctattattttccacgagtgtacagtgtcccaacttcagcttgttaggaatctgagatctaccacaaaggagcatcaattatacaaaataaattattcgtttttctacaattcaaccctccttatgctagtttaatttcaaaagcttcttggtgatgccttaagaagtttattcctgtagcagt

SEQ ID NO: 62090 - DNA, 420 bp, Glycine max
  unsure (1)..(420): unsure at all n locations
tattgtccaccctaacatcaaccttgttttgttcacaaccttcttcaacaagagcaatccccagaatgctcttctgagttntggaatcacaatggtcaatataaggaccaaactctttaacatctcttangataatttgttcaatgtggatccgcttataaaggtgtttataaacgctctatagtgtgtgaagaattgcctctaatcctatattaatttggctaacaaagacttgtatcaaaacttagatgttttctctattcaattcaagctcttttcatcataccctgtatattatatctcccttccttataatgaagtttaacaagtcgaggcccatttaaatccttgaggtatccgttcgtagtatatggaaaagaataaaagtgaagtcgttgaaagtgtgagtggtccctttca

SEQ ID NO: 62091 - DNA, 435 bp, Glycine max
  unsure (1)..(435): unsure at all n locations
gagcttgcttagcgagaactggagaatattatttctttctttaaccaggaaaaccccaattttaaggttttttcctctaaaacctccgcttaaaaacctaaaaaggttttcttcaacaacccaggaccaccgggggccacaagaagaagcattggctggccgcggaaccacctatagagaggaacaatttaatcagagcggaatgtcagaatccacctcanagattcagtggagaaacagctctcaattggttctttcgtagcttctctgaggtgatcttgaattctatgcctttttccttggtagnttgagcttcccttagtgtctcttgtgtttttggtatcgtattaagatattnttacacttcctttgaaaaacccttgaaaataaggcgttgaaaaagtatctttttaataaaatgatggtgttttcatg

SEQ ID NO: 62092 - DNA, 256 bp, Glycine max
ctaaatgtactggaggcgggtgttgcggcgttatcctctatagttttctggaggattaacatgacctctgagatggaagccatatgatcttttagcggcgatagatcgggcttcatatgttcctgcacgcccctcttattattcatatttctggatcgactgttatatgggtgcctatgtgctttcttagatatgatgaaatttccaaagaaataaaccacggtgagtatgccaccaaacatgaatatgctaatga

SEQ ID NO: 62093 - DNA, 363 bp, Glycine max
  unsure (1)..(363): unsure at all n locations
taatttcttggaggatttttcctggtccggcctaagtcactgatatatatacctgcttttcgttcttgaaacatatgatatgggctagcttgcataatttaattattaatttggaaacaaatatatttttgcttgaggtctgttattacgatgaagcaggaaatgttgtccaatcttcacatcaatttgctcctttggtacatactggggtcactacttatttactaatttatgatttnaatctttttaataatttacttatttctgacagttggcagagaggattaataaaggagggatggtaccaaaagagattgcagctaccgcaacagaggaatatgaaagaatgttgattgtcattac

SEQ ID NO: 62094 - DNA, 436 bp, Glycine max
  unsure (1)..(436): unsure at all n locations
tctagccaaatggacttacctngaattaattcctttgattttctctttgagcctcgtttccctttccttggtttgaagctcactacaagccttaagtgaaaaaccatgatatntccatatccttaaggaatnttggagctttggaattgttttgggaataagtgtggggggtttttgtttcattggacaacttgttctgttggctatgcttcatgatgtattttgggccatactcgatgtacattgtatattggttaaatgttggacatgctgaatgaaatgttgtttctcaaaggctaaagagttaaataaataaaaataacaaaatcgaaaaataaaattcgataaaagaataagaaaagcatataaagtgagtgaataagatcttatatggcacaagactgatgaaacccttggttctactcttcatgttaaa

SEQ ID NO: 62095 - DNA, 409 bp, Glycine max
  unsure (1)..(409): unsure at all n locations
atcttaagtcgaccgcaggctgcagctattgtgttgaattgctagggtcttttattttattttcgagcgtcttaatatattacgtgatgcaatcctaccgcgcaagggctntggatagaagactccaagtagattgggccaaagatccaacggaaggcccttaggttctcatgaaccttacggtagatttcgagcccatgggctaagtatgagcccgcttatctttgtaaatattagaatagtgttttactttgtttgggccttgtattttggccattgtagtagtatagggttttagctttgcattttgagtattctttgtagtaaggactctcttgtatttcctgtattttggcatgggggtgatcttacctattagaagaggctggtatatcttacatctacttca

SEQ ID NO: 62096 - DNA, 321 bp, Glycine max
  unsure (1)..(321): unsure at all n locations
tctgagcctaatctctacaggaattttgctgagttcctcattcccaaagtcaaagaaagcgcgcataactttcaccagagagggctttggaaaatgaaataaggaccctttgataggacctgattcaaatcctcttctgtcttaaacttaaacaccacgcatccctttttatgagttgaatatgaaactttacaccccatatttgacagcattccattaatgtgttctattcttganaccgcgccaccacataacctattaagctgtgacccccatgcctcttctaggattgcaaatcattatctttcagcagcacgtcac

SEQ ID NO: 62097 - DNA, 420 bp, Glycine max
  unsure (1)..(420): unsure at all n locations
agcttctttttagacctcgatcggtcgttctttctggtcgacgccgactgtcattnttttcgatcaatatcggtgaataatattttttttgccgaggtgggctaatgttttcctggccgaataaatcggaacatgccagtttcgggcaaaacgaaacatcggttgagctcacacgaaaaaacctagccgacctacattgtaagttttttatgcaacaccgaaacaagaaaacttcccctgccgtaagaaaaaacattatcggccagcgagcgttntttttttaaaaaaaaattgcgcaatgtcggctgaaaaatatcagtcggggccatttcacgaccgatgtcggctattgagntttctattcaatccctgaatggaaattgaatgatgtcgattaggaaatgtttgatcggcgtgatc

SEQ ID NO: 62098 - DNA, 427 bp, Glycine max
  unsure (1)..(427): unsure at all n locations
ctcagcttcactcgatgccgattaggcgcatatatatcgagattgcttgtaatgaacaacggaagctctcgagaaatngaaatgatcataacttttcactcagatgtccgattcagacgcataatatatcgagacgctcgaaattgaactacggaagctctcgagaaatttaaatgattataaattctcactccgatgtgcaatgaggaacatcagatatcgagacgctcgaaattaaacaacggaaccttctaggaaattcaaatggtcataaactttcanacggaaatccgattcaagcacatcacatatggagacgttcgatattgaaccacggaagatctcgagaaattcaaatggtcataacttttcactcggatgttcgatttacgcgcatgatatattgagacgctcaaattgaacaacg

SEQ ID NO: 62099 - DNA, 440 bp, Glycine max
  unsure (1)..(440): unsure at all n locations
cttaagtcacctgagcatgcagcttctacttttattggtgatatttttcttctttggngctctaaaatgtgggaatatgctcaaatatgtggggcaattctggtttgttttcttgcttgattgggttgaattgggggtttgtatgggatggccctacgcctataatgcattttgaagcaataggacatgccacattgtcctcgttctcttgctattgatgcctaaacgcgcgcccaccaagtgttcggtgaaatgcctcaatggcattagcgcgtgatttttgtaaggaaacaacccatggggcattttggtttgcacatattttccattttttttgggacatgcattcatttccgaaagggctagagtaattggcccacatatatcctatgcctaagaaccaaagtttatgcaaaagaacacaagaggaggtgcatatt

SEQ ID NO: 62100 - DNA, 274 bp, Glycine max
agataatacctttcagctgaacttctaaaaataccctttgttatgagatattcttcagccgcagataataaatttaagatccccaaagagaaaacctgaaaattcgtctatactaattgtaaaattgtctgtgatctccatacaattttctgaaagcttatgttacctctattcaaaaataagtaactttaggcatataggtatgtttcaagaaatttcctctcaaagagagtcttatagaacttctatgcctcaagcatttagttgtagtgaa

SEQ ID NO: 62101 - DNA, 410 bp, Glycine max
agctttctagattccagaaggctaatatttctcttcttggaacttcctccgctatacagaacagaatagtagtgagtggctttccttgccggaaccttcttttacaagagaaataacacactattttcccattcatagagactgacagcttggctgacaagagaatcgactgaatctaggagatgaagatcttagagaagccaaaacccaagagcactcttgaaagaaaattccaatccatagtgtcaaaagctttcttgatgtcaatcttgagggcagcattgcctctgaagcatttgttgtctaacatgttcaccgcttcagacgttactgcagtgcaatctgagaattgttttccctggatgaaacctctttgctgcggggaaatgatctttgaggcaacgaaagaa

SEQ ID NO: 62102 - DNA, 341 bp, Glycine max
  unsure (1)..(341): unsure at all n locations
gcggcggccgggcaacggagcacaacaagattgtcacaaccacaaagcgcgcataaacccaccatgcccggtggcccaccgccaactgagcacacggacacctacgtagcccagagccaacgattaaaaaacacacgggaccgcctcaacacccccaagccaccacaacagccaagcaaaacaacaaccaaacagcacaagctatcacagccaaacaaacagagccaagggagaaaactctgtccaacacagcaaccaagancacaggtatcctcacagaaagacgacagaaaacacgtcgctccgtccaatcacgtaaccggaggaacgactccaacagc

SEQ ID NO: 62103 - DNA, 439 bp, Glycine max
  unsure (1)..(439): unsure at all n locations
tcagcttacnacttagaatcagtgatcatgatttccaaatattgttggagtaacaatgcccatctatctattacaattgttgntgcttgcttgaatcttgatttcacgtattgtattgtcatcatcaaaaagggggagattgtagatgcaattggctttgatgttttgatgatgatcatgatgatgtgttgcaattgatgcaaatgggctttttaagattaaaattcaagacaatactttaagattacaagtcacaacatctagatgatcactataatattaggaagggaattcctaattgaatagcaaaggtttggcccagtgatttaaaatataaagtgtttctcacaggttttactctctgtgattgattccccacgatgtaatccatccagtgcccaatacgtttatacagctataaaattgatccaaatttaaa

SEQ ID NO: 62104 - DNA, 393 bp, Glycine max
agcttgagagtgaacacccgaagcactcaattttcttttattggtcatcgatagtaccatatgagaccgatgaaagggcgtaattccctgagacgcgccagagtgggcttctgcaccatggcctgaatttgtgagggcatgacactgctctcgtatggtgaattcatagacattaaatatccagacgctggcttatgaacaaccattgatcatttcattttaattaggacgtgactatacacactaatgtgaatttctggacgcagactcaaataaacgcggtacattgagcaaaggatggctacagagatgaagagaaggaatgaattctgacgcaggccgtacccaacagtggcgcttatcgcgcatcaagcgctaagcgagcaaccaact

SEQ ID NO: 62105 - DNA, 424 bp, Glycine max
agcttatgctgcaaacatctacaatattattttctttatctcaacaacaaaatcaaccacaacagaacaattatgacctctccaccaacagatacaatcccgaatggaggaatcaccctaatctcagatggtctagccctcagccacaacaacagcagcctgctccttccttccaaaatgctgcccggccaagtagaccatacgttcctcctccagtgcaacaacaacaacagcaacaacaacatcaacagagacaacaatccactactgaggcccctcctcaaccttcattggaagaattagtgaggcaaatgacaatacagaacatgcagtttcaacaggagactagagcctcaattcagagtttaacaaattagatggggcagatggccacccagctgaaccaagctcaatcacaaaactc

SEQ ID NO: 62106 - DNA, 379 bp, Glycine max
aggggtagagggtgtcacacctctgctgatgcccacaaataataagatgctcacactgcgtgcacaagacccgcacgtgctgtaaccaatcctagatacttacaggagtacgttagttagatactcgttcattcattcactagttacacatgtaatgcatgcatgcgtcttgccactcaataaacacgtgctgattagccgctaaaagtttgttagaaccccgattattttacgactgttacacgcttgcatctcaacaatatttaagtaggctggtatctcttatggaaaagaacacgctttcaaaaataatttctgatgacctacctctattagggacgcttcacttttcaaatttttttttcctcccttacttgcg

SEQ ID NO: 62107 - DNA, 121 bp, Glycine max
tcgtctcatcatttgatcgattcttcaatacttctcagatttccgttattctctcgcttctaagaattgtctgccttctttccagaaagacttgagagaactagctatcattttcatctct

SEQ ID NO: 62108 - DNA, 394 bp, Glycine max
  unsure (1)..(394): unsure at all n locations
agcttctatagaaggcgcgctcctttttttttttcancgcatcacctctcaacgagctggtgaagaagaatgtgacatttacctgcggtaaaaaaatagagcaagcctttgctttgctcaaagaaaagcctactaaggcacctgttctagctcttcctgacttttctaaaaattctgagctagaagaatgtgatggctctggagttggagtcggagctgtattgttacaaggtgggcaccttattgcttattttagtgaaaagcttcatagtgccaccctcaactaacccacctatgataaagagncttatgccttaataagagccctccanacttgggaacattaccttgtttccaaggaattttttattcatagtgatcatgaatcacttaa

SEQ ID NO: 62109 - DNA, 443 bp, Glycine max
  unsure (1)..(443): unsure at all n locations
tcttatccaaggctcatcttggtggtgaagctccttctttatggcttattccctagnggatggcgcctcctctcacctcttctcctttgtcttacgctgcatctacatggtggaaaaccaccattaaaggacctcattgaagctcaaagatccaacctcaatagaagctccacaagcaagctttcatcaaaggacaatgtagaggctaacttagtttgggaataagggtagagcaacaacttaaaaagaagtctacattaaaaatttatggctctcactcttatccaaagaaaggccaaggtcaaggcatcttangggtgacaccttctaagcccaaagatgattaggagaagacaatagaatagcaagctcctaatgctagtatgcacgagacaactagctctataaagtgcttttaatgtcttgaaagaggacacattaca

SEQ ID NO: 62110 - DNA, 227 bp, Glycine max
  unsure (1)..(227): unsure at all n locations
gagcttaactccccccccttataatagccatgctcaccccctgacanaaacatgaaatacaaaaaaaaagtcttactacaaagactactcaaaatgccccgaaatacaaggctaanaccctatactactagaatgtcaaaatacancgcccaaacaaaggaaaaacctattctaatattacaaagantagcgggctcatacttagcccatgggctcgaaatctaccc

SEQ ID NO: 62111 - DNA, 425 bp, Glycine max
  unsure (1)..(425): unsure at all n locations
catgacgctttatttgtcacagaataaagntcgctctctaaagaaaacctgagaatttaaaaataaggcacttgtgaagttggccaactaaacctgtctatttggtcaacatacacattctttctgtttgcaggttacaggttgtaccatctgtggtgaggctcatgaaacaggccaatgtattcccattgaagaacacactcaagaagtttactatatgggaaatcaatagagacaaggatatactcaaggaggattttcaggtttccagtaaggtccttataaccaacaaagatagtggagatcacaccctgacaatcaattcaacaaagaccagggtggaccttctaacaggccaatccaagaagggcctaacatcttttagaggactactnaacttgaggagaacttgactcagtttatgc

SEQ ID NO: 62112 - DNA, 439 bp, Glycine max
  unsure (1)..(439): unsure at all n locations
agctggcangattatggcgtacctatcacatgtgtttctaggtggcggtcgggcgatggtgcaaaataactcttcacatccacaaatcacgcataaacccagcatccccagttgcccaccttcactgagctcacgtactcccacgtaacccttatcctcgttcctctcaacactgagtccccatcaatctctccaagcttccacaacatccaagaaatacaacatccaatcatcatgaactatcaaagtcaagaaaatagggcaaaggcagaaaactctgcccaaaaacaccaaccaatatcacagctnttcacactcaaataccccaggaacattctcttcgctccaattcgttaaccaggggatcgactcgaaaattttactggaagtctctagtacataagtctacattgtgaccagtgggatctgctagaaaacg

SEQ ID NO: 62113 - DNA, 300 bp, Glycine max
agcttatacgtcacaccggagccagggtgtttattatctgagaccgtcactagagggggcctggcttatgtatatattcagactagacaaatgcccacctctttcagcttgttcaataggtggagactacacagttgactactctagttatcatggggactgaacaagtctcgtgtgtgagaaacccgggatagaccataaaatatagcaaaccggaacatgcacgtactttttgcaaacagaagcaacaggaccgactgacacgacaaaactaccatgccaccagcaggccctggcact

SEQ ID NO: 62114 - DNA, 445 bp, Glycine max
  unsure (1)..(445): unsure at all n locations
gcattgcaagcttaggctgttcaattacttgagattgttgcncttaanggcaaaggtctatgtggtggtcggcagaggagcagaaaccacagagtctggtgacaggtgcatattttttattcatgatcagttgggttaccaggttaaccaaggcatctagtttaccttcaagcttcttagtctcagttgatgaagatgaattcgtggatacttcatgcactcctctaatgacaatagcatcatttctggcactaaattgctaggagttggaagccatcgtctcaattaaatttctggcttcaggaggggtcatgtctccaagggctccaccactggcagcatctatcatacttctctccatgttactgagtccttcataaaaatattggagaagaagctgctcagaaatctggtggtgagggcaactggcacatagtttttaaat

SEQ ID NO: 62115 - DNA, 379 bp, Glycine max
  unsure (1)..(379): unsure at all n locations
ctgctgagtcttgatgtanatantatttactatctatttaatggggnnttgatgggtacactgcttctatctgcacttaattcttgcatgcttttgatccgatcattcatttgtgtgtaaagctaggatttttagcattgggaaatgttttgaatccttaaaactagatagagcaaggctagataactgtattgtttggacacggagtgtanggactcctagttttaatatgttgtgatattaatgttgttcggttaggctaagttcgacaagggaatcgagaacaaagttaattagaattagcccattcacgcaagacattatgtatttggataattgtcctcagcctagaacacagaaacaacatttgatagagaaa

SEQ ID NO: 62116 - DNA, 383 bp, Glycine max
catagctgaatgctaacataataacgaataaatgtgtgaattaacctcttttcttgtaatgaagcaataagtaaaactgatcttcatctgagggtgtgttgcacatagtaactttcttcgttccataaatttccacatttccaaaatctttttggaggatggtgtattcaatgaagagaattctatgcttgttgcattttctgctaactaggtatctgtcaatctctgcttgtgggttctgagtcccaggaacaaactatactacttgctatcatacaagaactcataatttctgcatggaatgccaacaaattagatcgctcgtcctgggaaggattcactcacttgcggacaaactcattctcatcagactcaaagctttg

SEQ ID NO: 62117 - DNA, 372 bp, Glycine max
agcttatgatagccgccatgcacgctttttattagtggaactgcaaagcgggataaatatacaatatgatgcactgacccctcgcacattgactggccatgtgagtgcggcatatgacgatctacaacctttgatcgcgggatcataatgacaacaacagaggaggagtactgagataatctagtggagccaccgagccgacgtgaccacaacggaaacattgcgagagagagtagagaactgacaatgaatatctccatagctagtctagctatactatttgacgattagcacaagtcattccctctatcaggctctgtctgacctattttattacgcacactgtgaatgctatgcacgtcattactaaac

SEQ ID NO: 62118 - DNA, 303 bp, Glycine max
aaggggggggtgaatgattaactcaagcacctcccaatcaaatatattcgttcttctcacttaatagtccatgctcgaactctttaaattatacaggacacaaatgtcttgagacaatctttatcgctccgaagtttgtaacaggaggcgcctctatttgtatgttagacaccccaggccactgcatacccaacaacggtgaagttttggacagaattctgtcaacataaacgcatgcgtctactggtttgatacaccacaagacccgtttttcccttctagaggaaagataggatttttatc

SEQ ID NO: 62119 - DNA, 430 bp, Glycine max
  unsure (1)..(430): unsure at all n locations
agctttggagaaggattttaatttactttttatccaatggtcttctggcctgagggatgctntctgtaattaggtgggatagatggtggtagatctatgtatctatgtttttattagggtgtgccagctcgttccatttctggatacgctggttccttcctatcccttgtaatcttagtaccactggtactatttttatataaatctcctaattttgctgagcaaaaaaaaaaatgaattccattctcacttctactcctctctctggaactcccactattactactcagaaactcaactggaaaaattatctatcttggtctgcctcggttgagttatggtttcttgttcaagaggcacttgatcatcctggttggtgacaagccaggattgttgaaatgcaggctcttgagaatagtgacacatggga

SEQ ID NO: 62120 - DNA, 448 bp, Glycine max
  unsure (1)..(448): unsure at all n locations
agaatgttganaatacgaantaatatattattatataaattgatatgttacgatctaatttacgggaagattaatctcctctaattatgtgtaattattatcgcacatctatttaaacaagcaactcattgtgtactttgacaagttttcactcaacttccttttgtttctattgttttacatggtattagagcatattattcttgatagaggaataacaaaagtcattctccattgnggacctattgtctctggtgtacctatgcgctcgccacccttcttttgataatcctttctcctttcttatgtgcgccaaccagttttgngttctttatcagtgtagtgtcccttcgttcttgcatgaacaataccacaagctaccagaagcctccattagcagtcgtcgcgcctttctatcttcagcgtgaccaaacactcagagtctcct

SEQ ID NO: 62121 - DNA, 221 bp, Glycine max
attcaacatgacaaacctgtgcctgtgccttattctgaattcattcactggatgtttatttacattattagaggccgtctcttcaattagtgttcatacataaaatgttcttatagaacgaacatgttcctgcatttgttccccatgttttggctattaattacacaacaatgttgatggtgggggtacatcaaaacacatatcacgtgcgtacacattca

SEQ ID NO: 62122 - DNA, 441 bp, Glycine max
  unsure (1)..(441): unsure at all n locations
agcttcagaccaacgcaattcanaatctagtttatatttaaccccttaatttagaggattttcaaggtttgagaagtgaaaatgagaatgggataattttggagcaaactctcatctcaatcaagtctataacattaatctaaacttgctcaaactggttttacgatgaaaactccaccgaatcaaaatttgacccctcaacacccaatttaccctagaaatggctcttgctttcactttggtcactcattttcctcatttgctcagtccaagctttcccacaagacctaaatgacattttaaactaggattaactcactttagactccaatttacactaacctcaaatttagcttctctaaccctcaaaatctcacatcaaacatgacaatgttaacatgctttcaacaaattccttcacaaataactaccataaggcat

SEQ ID NO: 62123 - DNA, 372 bp, Glycine max
ctcagctttctttgtgggggacgaatctaacctctatatggcattattgctaactatcatattctcaattagctcagttgccacttcaggggttttcagctttatttatccccctactgaagcatctatcagttgcttggtttgtggtcttaacccatctgtaaacatattcaattgaattggctcaaaaaacccacgggtgggagtctttctcaataaacctataaacctctgcaacgcttctcttaaggactcgtcatggaactgatgaaatgaagagattgcagctttccctttcgtagtctttgactcttggaaatatttcttcagaaacatttcaacaacttctttccatgttttcagactattacc

SEQ ID NO: 62124 - DNA, 391 bp, Glycine max
  unsure (1)..(391): unsure at all n locations
agcttgtagacaacactgcggtttgttcattttatgctgacctttnccaacctccgtcacccttattgcccaaatacctttgatctctaagtacatcagtcaatacacattccatttccaaattccatgtaaaataacttcttgtttcctcattattttttcctaaaacttttcttttggccgtcattttttcattacatgactccattgaagttaatgtcacttattcaacctgcacataacaaatattagatataacctactttattcattngactagtccactgcacaatcatagaaaatttttcaagcaaagtttttatgccacaacctagtacatcaaagtccactgcacaatcatagaaaatatttcagcatagtttttatgcat

SEQ ID NO: 62125 - DNA, 430 bp, Glycine max
agcttaaggctagtgccttctttatgttcttgtgggatcttggcttaagagaagtatctaaggctttttctacctaaggaattaggattaacaaaactcttattgacttattttagcataagatcatgaatgaagtatgtatgacacattaatgcatgaagagagtgaagatttgttgaaataaagccttgcaacagcttctaccatctttgtaacatcattattatcctgttttcttggtttaaaaccacataaaagcatctactttcctattttctcactcgatctatttgttacttcataaatccaccttgtagttcatgctttgagtgttctctttcattgtttttaggcctaagataacaattcactacattgcttatattgcatgagtctttcaggaaatgataaaaggaaacataacgtttat

SEQ ID NO: 62126 - DNA, 443 bp, Glycine max
  unsure (1)..(443): unsure at all n locations
ttaagtcacctgagctgcagctgtgattcaaacactgtgtggttattgtttattggaatcattcggccaaaacttaaaattttaaaataccacaccaaccttatcaatggtttaatggaattggcatttaactggccaaccaatggttctgttgaatgcttcaaccaatttaaacagccctgtactatagatcgagatggttaaattattatcaatcattatatgcctaanttgctgctgttagattagaaaccaccaatatatatacagctggtatcaagagcaaaagagaagtgcaggtgtgtacaactctgtgttgtgcccctaactaataaaattccacaaaattgtagcctgtaggttcaattttcagcataaagttgtttgtcatgtaattggctactcctctgnttggaatttatattaaactangtactgttcat

SEQ ID NO: 62127 - DNA, 272 bp, Glycine max
agctattaaatagattagaccattgctccacattagtatcaccgattcaccgtatcaagaaaaatacaaccttccaattgcaagatattattaacaagtttttttcttaaaaaaacaaataaactcatctaatattctgatacaatggtccaaacattgccacaaagaatcaaaatataaatctgcacagttgcagcacacgcggagagaaaaataaaaaacagattagcacccacttattgcaaaccacacaacgagggcggagtgatcac

SEQ ID NO: 62128 - DNA, 373 bp, Glycine max
  unsure (1)..(373): unsure at all n locations
agcttaattngaaagtgatgagtttacctttgtgatatatttgagccatccatcatcataatcatttggtgtgttttgccccattgattgcttgcacaatagccttggcttgattcttgttgatgcgtcctaattcacatgcatatttggaaatgattgaggcaattttgttcttataagcttctagccaaatggacttaccttgaattaattcctttgatagcccttttgagccttgtttccctctccttgttttgaagctcactacaagccttaagtgaaaaaccatgatatcaccatatccttaaggaattttggagctttggaattgttttgggaataagtgtggcgggggtttttnnttctcttctct

SEQ ID NO: 62129 - DNA, 121 bp, Glycine max
tttcattcattctatgtacccgggggggtacaccttttgttcatggattttatgctcattttcaatactttttatacccgcttttgacgtgcttaagccatctaattaagtcatttttcgc

SEQ ID NO: 62130 - DNA, 408 bp, Glycine max
agcttgagccaattctaacgacaataactttttatctcgtatgtccgattgagtctagtaatatatcgacacgctcgaaattgaatgttgaagctctaagcctattcaaacaacaataacgttttactcggatgtccgattgagtgacgtaatatatcgggacgctcgaaattgaatgttgaacctctgagccaactcaaacgacaataacgttttactcggatgtctgattgagtcccgaaatatatcgagacgctcgaaatggaatgttgaagctctgagccaattcaaacgacaataactttttactcggaggtctgattgagtcccggaaatatcgagacgctcgaaattgaatgttgaacctatgagcctgttagacgaccataacttttactcggatgtctg

SEQ ID NO: 62131 - DNA, 377 bp, Glycine max
cgagcgtctcgacatattacgggactatatcaacttctataagaagtattgtcgttcgaatatggtctgagcttcaacattcaatttctagcgtcttcatatatacaagactcaatcagacattcgagtaaaaagttattgcgcgttgaattggctctgatgttcaaaactccatttcgagcgtctcgatatatgacgggacttaatcagacatccgagtaaaaagttattgtcgtttgaattggctcagaggttcaacattcaatttcgagcgtcccgattattacggacttagtttaaatccgagtaaaagttattgcgttgaatggctctaagttaaaaataatttcagcgcttgtattcttggacttaatcga

SEQ ID NO: 62132 - DNA, 436 bp, Glycine max
  unsure (1)..(436): unsure at all n locations
agcttgaagtgagatagtgtggaagagtctttctttctacttttattcgttgaccacagagtggtacttggagatatgtcgcgggggtcaggagaccttggggacgtcaggtggggtgctattgcccaaaaccaagcttgaccaatcccgacccaacccgggcatagtcagtcagtgagaacctgtgacgtacctaaacaggcgagctcctagcagtcaaccgataaaagaacaaagaccacaaagcaaggaggcttgtgtggtggctggccaactatggattttgagtgatatctggaatatggcctctgataatcgattaccaagggtgtgtaatcgattacaaggcataaaaatgaagacaggaagntaagatggtctctagtaatcgattaccaanggtgggtaatcgactaccaggcctaaaaatgggatc

SEQ ID NO: 62133 - DNA, 275 bp, Glycine max
atgaacatatgactctcataatggaattgaatttcacgtcatatcactgtaatcgaaacccatatcttgtattgattacgccattttgaaatcacatggaacggtgcaaatttagttgaaaacttttgaaatcaaactttggcactggtaatcgattataagaaactggtaatcgataccagagagtaaaactctgtaacttagaaattttgagaaaactcttttgaaaaacaaaatgtgctatgtttggtttttgaaaaatctcttcaatactt

SEQ ID NO: 62134 - DNA, 446 bp, Glycine max
ctttcttgagaaaacttccttgagaagcttcgttgttaaaacttccttgagaagctagagcttagctacacatacccctctcataactaagctcacctccttgagaagcttccttaagaagattcctaaagaagctgatgcttagctacacacacctctctaatagctaagttcacctccttgagatgagaagctagagattagctacacaccccctataatagctaagctcacccccatgacaaaaaaacatgaaaataaaaaaaaaaagtccttactaaaaagactacttaaaatgccccgaaatacaaggctaacaccctatactaccagaatggccaaaatacaaggcccaaacgaaggaaaaacctattctaatatttacaaagaatccaaccttgacccatggactcaaatatctcccgtaaggttcatgagaaccctag

SEQ ID NO: 62135 - DNA, 471 bp, Glycine max
  unsure (1)..(471): unsure at all n locations
atgtagaatagcagaggacaaaaaaaaaccttgcttgtagcctatgatgaatgtgaagtcatgcttgtcttggttgagttgaaatgtgagttggaccgggggttagtgctataagttgtttaaaatattaacctacttgattaaagttcttctggatggcaaatataactgagtaaaaatgattggatgtggatgtgtggaagcggaattgtttttggagaagaagtgcgggagtcacagactaattgtcgagaagacgtaactggcggaatggtttttgtgggaattttgtagcattattcatggctggctttgaggattgtatgtgaagagtcatatattataatgataatgataaatatatgagatgatattntntgtagatttaatgtgtatgaaaatatattaaagaaatgaatattattggataatagtttggttttggttgtagaatcaagtacgactattttt

SEQ ID NO: 62136 - DNA, 328 bp, Glycine max
agcacggatcttaagcaccgccgctgcaagctgaatcgacctgagggaatgtttgatctttgattctcgaagctttcgttgttaatgtcgagcatctcgacatattatgcgctcgaatcgaacatccgagtgaaaagatatgaccatttgagtttctcgagagcttccgtgggtcaattccgagcatctcgacatattatgtgcccgaatctgaccttcgtgtgaaaagttatgaccatttgaatttctcgagagcttccgatgtttaatttcgagcgtctcaatatattgtaagcctgaatcggagctcagtgtgaaaagttatgac

SEQ ID NO: 62137 - DNA, 383 bp, Glycine max
  unsure (1)..(383): unsure at all n locations
tgagctagtgaagaagaatgtggcatttaactggggtgaaaaacaaggcaaacccttgctttgcttaaagaaaagcttactaaggcacctgttctagctcttcctaacttttctaaaacttttgagctagaatgtgatgcctctggagtgggacgtggagctgtnttgttgcaaagtgggcaccctattgcttattttagtgaaaaacttcatggtgcgacccttaactaccccacctatgataaagagctttatgccttaataagagcactccgaacttgggaacattatccttgttccaaggaatttgtcattcatagtgatcaacaatcacttaaagttcattgatggcacagcaagttaaacaaaaggcatgcaaatgg

SEQ ID NO: 62138 - DNA, 435 bp, Glycine max
  unsure (1)..(435): unsure at all n locations
agctntaaacaatatcaccattaaatatatgtatctgtcataccctaatttcgttcgggaactattgcttggtggcatgtaacctttgattgaccgcttcaaagtacttggcaccctttgttgcacaatatgtgaagtcccgagacgcgccaaaaatcaaaaggaagcgtggttacgcaatccatgaaattccgtaatgtgatggaaaccaaaaggaagtattgttacgcaatccgtgagtttccgtaacttcttcgaaagctaaaaaagagtaaatacatgatccgtaaggttccgtaaccttaagaaaagaaaataagtatcattacaaaattcgtaaagtttcgtaacattacagaaaaagaatncaccaaaaaagtaaaggtggggtgtatttagtaaaaaaagggtgcaaatagcaaccaggcccacttg

SEQ ID NO: 62139 - DNA, 345 bp, Glycine max
tccttcttctatggcttattccctagtggatggcgcctgctctcacctcttctcctttgtcttctgctgcatcttcatggtggaaaatcaccattaaaggacctcattgaagcttaaagatccagcctccatagaagccccacaagcaagcttccatcaatagcttccaaaaattcttgaaggtaatataataggttggtagaatgtttgaattaccaaattatgaagtttaattctttcaaaaaaatcccattgtgtagttgttggaatttttcgtccttgttctaagcatttgttagcctaaccctaagctctttccttgtcacaaattggtggttgaaattt

SEQ ID NO: 62140 - DNA, 383 bp, Glycine max
ttagattttcgctgagtgcatatgacacatagtacccatgattaattggaaaatttaaatagaaaaaaggtgattaaaattatttgggcatagaattgaattaagcattgaatgtgagaggcacgtggccagttgtgaatgtatgaatacatgattttgatgatgccaaagaataatcaaacaaagttgcgttcaagattacttcaataaagattcaaaggttaagcattgcttcaatattaatacaaggttgcttcaacaaacaagcattgcttaagattaatccaagatcaagcattttcctcaaaaacaagtggttccaaaacatccaaggctctggtaatcgattaccaagtagtgttattgattacccaaagacaatt

SEQ ID NO: 62141 - DNA, 379 bp, Glycine max
cgaagagagttcttccacgccagcacgcacttagcgcgtatgcagcttgctaagcgaggcgattgtctcttctgcgctaagcacaagattgacgctaagccaaatattacttacctgtgctaagcacgagaatggtgctaagcgcgccttcaaggtcagaaagccctttttaagcctgatttgcacagaaaaaaagaaagagggtgacaacgtgaaaaaggtcaaaattgactacgaattatgtgcagagaacagaggataagttgagcaaggaagcaaaggccttaacttttaggtagattctaggttctaaagttatattctacgttcttagagggggaggagacaatcccactgctttgtaacctgatattttctc

SEQ ID NO: 62142 - DNA, 340 bp, Glycine max
  unsure (1)..(340): unsure at all n locations
tcttaagcacctgcngcatgcaagctgacaggcgagtgaagtagtcttattttttctttaggtattacacaatccgattaagagtgagaaatcccggggagaacacgtacgattgattctgttttttcgcttcattttactaaaagatattttgtattattatattattatcttacctctttcttgatttgcgacgcggttacggcactaccgaacggtcataattcattttaaccgaaatttacagatgatacacatcaaatgatcggtggaaatttattttatttttagattatgcgagagatgacttaaataaatgactggagcacgtcttacgggg

SEQ ID NO: 62143 - DNA, 410 bp, Glycine max
gctggagggcctggatcttcttcattaagggtgtacttcgcttcttgaagctcaatggaagtagaatggagaacgaataaagatgactggatacaccacttcaaggagaatatgagtcaagaagaagctctcctccatacgaagccatggataagagctcataggaaggagaagatgagtggatggagatggagagaaagagcacgaaattttgtgcctctaatgaggtctgaactttgaaatgtaattctcaaatgatcaaagtggaaaaaaatgcacacacatgatctctatttatagcctaagtgtcacacaaaattggagagagagttgaatttctattcaaatattcactagaatcttgatattgaatgtgtgaagccacaatttcactaatgcatgtgaaatta

SEQ ID NO: 62144 - DNA, 355 bp, Glycine max
  unsure (1)..(355): unsure at all n locations
gccgctgcagctttacttatgggagggcgggcttcttttatcttcttggctcccacgccaactttgaccattggtctttctttccgcaatgcttcttttcatggctggctgaacgggcttataacctaaaacatactttccacgaattccttgaatatttaatcaggctagtatgccacccgtggttttttctaaaccccatccgggttcanaaccgntccccaacataactcgggccatcattaccgctgcatcggacagacaaagttgcccaaagagggagtccacggaggaaatgctgaccacctcaaaagactggaaaagcagttctaacgattcttctgcggcttcacat

SEQ ID NO: 62145 - DNA, 154 bp, Glycine max
atcattttacatcaaaatatcttgcttaaatccatcagctgaataatactgtaactatttctcgtcctgggaaaatactttttgcgagaatcaactgcttctttcattcttcctcactacgaggtcgtgaacacaagacaacacttggtacctc

SEQ ID NO: 62146 - DNA, 428 bp, Glycine max
agcttcacaatataattttctcattcttgatttttggaagaccaattactaagtctttcctaactagatgattgagatggtgcatgtttatgtgtgcagtcctacgatgccacaaccatgtatcatctatcttacttaccaaacaactcagctcatgaaatgatgcatgttcaatgtttaacatatagatattacctatccttttgccaatatggacaatatcgccgggcatatgcttcactaataagacaacaattcttgttgaattcaattttgaagcctttgtcacatagttgactaatgctcagaaggttatgctttagtccatcaacatatagaacattctttatctgtgttttatactgatttccaatattttcttctcccattatttttcctttattgttgcttcaaaagtacatattctc

SEQ ID NO: 62147 - DNA, 413 bp, Glycine max
  unsure (1)..(413): unsure at all n locations
ngagacacaaaattgagatgaaagatctatggtcagctagtaggatactcgggattgatattcatagggataaagcaaagggtgaactattcttgtcccatagcaattacctcaagaaagtggtggagaggtttatgatgcatcatagcaaacctattatcacaccacttggtcatcatacaaagctatctgttattcaagcactagaaatagctgaagaaaggtctaaaatgaatcaaacaccctatgccagtggtgttggaagcataatgtatggaatggtttgcagcagacctgacttagctcatgctgtaagtattataagtagaatcatgggagatcctgtcagcgcacactatgaagctgtgaagtggacactaaggtatctaaatggatccttgaaagctggttaa

SEQ ID NO: 62148 - DNA, 393 bp, Glycine max
  unsure (1)..(393): unsure at all n locations
agcttgcttgtggagcttctatggatgctgtatctttgagcttcaatggggtcctttaatggtgattttccaccatgagagatgcangcggaagacaaaagaaaggaggtgagaggaggcgccattcattaaagaataagccatggaagaaggagcttcaccaccaagatgagccttggataagaagcttggagaggatgcttcaatggaggaaaagaaagagggagagaaagagagaggggcgagcatgaaattgaaggaataaaagagggagagaagtggaactntgaagtatgtctcataagactctcattcatcaaagntacaacaagtgttacacatgcttctatttatagactaggtagctttctttgaaagctttcttgagaaaac

SEQ ID NO: 62149 - DNA, 349 bp, Glycine max
gctagctctcaatgtcaaactttatattgaaagttcttgtgaccttacccacaaacactgcaaaactatttttcttttggacaatatggacgtggggcaagagatttctccaataaccttggagcactgtgacgataccatacactagacttgacggtattaagccttctcgtctgcttgatgtaaagacatccaatacatgcacaaacattttcacatgcatacataatacaagctaacgcagacacaccgtcggagatcaagaaatgacctctcttcattcactctgacttatctttttggtctcctaacagattagggttgacccgtgtatactgtacagcaacgt

SEQ ID NO: 62150 - DNA, 377 bp, Glycine max
ggatccttaagcactgagctgcagcttgagtggaacacttatgtattatgaatgtatcaactatctggctagtttaggttcctttggctggtttgcttcaatattaatcgctttgtcattgtctgcactcaccatctatcgatgcatgttattttgtgcgataaatgtacagatccaacgatgagtcctatgaaggtactaatatcgacaacccagacgtcaattttgagcagctaataaaccaaactggggatgtagaagatgaagattgggagcttccccactagagctagaaagaatggtcgaacaagaagactcagaaatgaagccacacaaagaagagatgaaaatcgtaaacttgggcattcgtgaggaaa

SEQ ID NO: 62151 - DNA, 279 bp, Glycine max
taccttattcacttctcttatgactatggcattatttctggcactaaaacgctgggagtcggacgccatcttctcaattaaatttctggcttcagcacgagtcatgtctccaaaggctccaacactggcagcatctatcatacctctctccatgttactggagacctcataaaaatatttgacaagaagctgttcttaaatctgatggggggggcaactggcacatagtttcttaaatatctctccatactcatacaggctctcttcactgagttgtct

SEQ ID NO: 62152 - DNA, 428 bp, Glycine max
  unsure (1)..(428): unsure at all n locations
aattaaaaaaatattatttcttttatttttggaaatccaaaaccaaaccttatggtctaatttggccattatttggtaataacccaaaaattcctctaccaaaaaatcatgggtaaccactttacataaataaataacccatttattatatgaccaccattataaaaataaaggatttcttcgagaatggttgtataagaaaaattcaatataaatgcaaatcaagatgttctaaataaagaagaaattgagataaaatatatccaaatcaattctaattaataaagaggttgtaataattttttttcatcatgtgatattaatttaccatttgcattacctatcttatatcataaattgagaatataaaagtgaaattataggagtattntttatnattaaatgtatttgagtataatttttataaa

SEQ ID NO: 62153 - DNA, 250 bp, Glycine max
ataccagctggcagtgggcgaaggacaaaattatcctaattttataatgtttgtaaagaatggcttataagtcaatcttaacaagtagacaatgtattttgagaagagaagaaccaaaaagtaggcctaggtgagcttaagtagacaaacaaacctgaattaaggtggtggagaatgaccgaagaattgtgcctatgagaacaatcaagtgaaatgctagaaaggtcttttttttactaaaaatatatac

SEQ ID NO: 62154 - DNA, 419 bp, Glycine max
  unsure (1)..(419): unsure at all n locations
gctntgctgatntagttntcgcctgcgatatgatggaattgggtctgagaagataaaaaattgattatcctactttgatgaatgaggagcctgaggaaaatggagagaataagaaggagggaggaacctatgttgtgactgtcgttcctacatggccaaattntccaccagctcaacaatatcaatactcagtcaatatcatcccttctcattacccatcaccctatcagtcgagaacactcaatcatccgcaaaggtcacccctaaatcagccacaaagcctgcctgccgcacatccgataccaaacactacccttaacacaaatcaaaacaccaaccaaggaatgaattttcatataataagccggcagaattcaccccaattctaatgccatatgcgaacttactcccctatttgc

SEQ ID NO: 62155 - DNA, 447 bp, Glycine max
aaaaatggcactattgaagtatagcaactaatcactcttattataactcaaatctctctttatattcatttagctgttttcatataaaaaccaaaaacacaaaaatatttaaatcatctttttaatcatttttaccggtagtttaataaatttaactaattgaaaatacaactaattttttatattaagagtttcaagtccattgttactattgcgtaagacacacttacctttatgtgagcctaatatattttacccatcaaacttctaaattctatgactaaaaatttggaaactatataaataaagtgattctaataaagttgcaattgtttaaagtgaaatttgaaatttagttgcaaatggttttgcctcttctttctgccttatctggtttgagttattcttaagaaaaatgacaccagtacgaatattaaataataatga

SEQ ID NO: 62156 - DNA, 448 bp, Glycine max
  unsure (1)..(448): unsure at all n locations
agctntgagccaaaatcctgactcaccatattctttgacccanggtgagaatgtcaatccttaccctcggaagcaaaaaagaagagaagggaaatttccaatcaaagaaaaagagaaggaaagtttccaaatcaaaggaaaaaaggaagcaaggaaattcccaatcaaagagagggagaaagataaaaagaaaagatagatagttcccaaccaaagaatgggagaaagtagagaaagaaaagaagaaagctcctggtcaaagaaaccagaagaaatgtgcagagaggtctttagaccggacaatatctgaacaatacagaattgtcactaaataaacaaaaacagaaaaggaaaaagccaaccaaaaatcaaaagccaaaaacacacataagccaaaaaccccatcaaaagaacccattcccaagggaagtcctatttgatcatgatc

SEQ ID NO: 62157 - DNA, 293 bp, Glycine max
acatgcttctatttatagactaagtagctttctcgagaagctttcttaagaaaactttcttgagaagcttctttgagaaaaattccttgagaagctagagcttagctacacacacccatctaaaaactaagctcacctccttgagaagcttccttgagaagtagctacacacacccatctaaaagctaagctcacctcattgataaaatacatgagaatacacaaaaaagtccctactacaaagactactcaaaatgccctggaatacaatgctaaaaccctatactacgaga

SEQ ID NO: 62158 - DNA, 411 bp, Glycine max
  unsure (1)..(411): unsure at all n locations
acagaataatccatttatttctttgaattgggtgttgaaaaagcataacaagactttctgtgattggtttaaagatacaatctttgcaaatgacaatgcttcaaaaacattaagaaagctagcagatgggcctaaaagaaatgttataacttggcaaggatacgacataaacaagtattcattttacacaaaagcacaagatgacaaaagtacaatgcagaacaacgggatcaccctaagggctgaatctcaacacttcgcaagtgtgaatgacgccaatccttgtgtagcttccatcccttactttgggttcattgatgaaatttgggaacttaactatgtgaaatttactgtatgtgttttcaaatgtaaatggngttgacagcacaccggtgtgcgcaccgatgatat

SEQ ID NO: 62159 - DNA, 324 bp, Glycine max
tttaatctcagctgagaccaagcgcacaaatctagttttccaaccccttttttaatgggatttcacggtctgagaagcgaaattgaaaatgaggtgaatttggagcaaactacttacctgacacaaggctgtaacatctatttaaacttctcaaactggatttacacctaaaattccaccgaatcaaaatttgactcctcaacacgcaattttaccctataaatggctctttgttcactttggtaatttgtttttctctctagcacaacccaaactttcttataagtcctaaatgacatttcaagctaggagtaactcacttta

SEQ ID NO: 62160 - DNA, 419 bp, Glycine max
  unsure (1)..(419): unsure at all n locations
ggctgcagcttgctatcggaagggaggatttttnatggntnnntttccatgatatcttttactctaagaaagaaaagaaaaataataggagtatatgcttttcattntggtgatgagaattttatagatgtcacatcattatacgcatatggttgcgcttatctgttgttatttttgctgcctccaatctgggttgatttttatgggtacatgtacaatgtttactatagttctatgtataattaaccatgacatagatgggaagggcaggaaattattntgagcttgctaaattattgggtgagctataaagccaaatcaatgttttgtcttttggtaggtgcaaaattaatttaataaacatgtgatcacattgagaactaaatatttttgctcgttnttttaataagccgggtctt

SEQ ID NO: 62161 - DNA, 371 bp, Glycine max
  unsure (1)..(371): unsure at all n locations
gctgtaggatatgggatacccatcacatgttgtactangtgtgtgtcgggcgattgtgcacaacaagntttccacattcaccaattacgcattaacccaccatcccctgttggccaccttcaactgagctcacgtactcccacgtagcccatattctcgtttctctaaccccgagtcccataatctctccaagctttccccaaatacaagtatacaacattcaaacagccaaactatacagccaagcaaacagggcaatgcagaaaatctgccanaacaccaaccaaatcacagctttttcattaaagaccccataacattccttcgttcaattcgttaccgtggatcgaccgaaaatatactggagtctt

SEQ ID NO: 62162 - DNA, 447 bp, Glycine max
acctgctgcatgcaagcttggagaggatgtttcaatggatgtttttattgagggagagaaagagggagggggagcactaaattgaatgaagaacaagggagagaagttgaactttgagttgtgtctcacaagactctcattcatcaaagttacaacaagtgttacacatgctactatttatagactaggtagcttccttgagaagctttcttgagaaaacttccttgagaagcttctttgagaaaacttccttgagaagctagagcttaactacacacacccctctcataactaagctcacctccttgagaaggctgcttaagaagattccttaagaagctagagcttagctacacatacctctctaatagctaagctcacctccttgagatgagaagctagagcttagctacacaccaccctataataactggactcacccccatg

SEQ ID NO: 62163 - DNA, 424 bp, Glycine max
  unsure (1)..(424): unsure at all n locations
attcggacctccgaaactaagcttatanagtcatttcaaacanaacacagtatatgcaacctagtcaagccttataccanaggaggaacaatatacaaaatctgaaactaatataataaaccaaaaaagaccttgagtctattagaaatttaacatttcgtcaacacctcataagcaaaacaaatttcaacaatttatataagcaaaatcaagactaactttatggtaaaataaatttaatgtttgaaacaaaccgatgtgtctgaaagaaactattgtgaagaagcttctcgggtccttcaagctcaataacgtcatgttcaaatgaaacacagatattcaaccttattcagccttataccgaaaaaggaaccgntttctaaaacttatactaaaaattataccgaaaagacctgatttttta

SEQ ID NO: 62164 - DNA, 381 bp, Glycine max
agcttggaatatccagtggattgactctatttgattgtctgtcggagaggatggactttgactataaccaagtctccaatcacaaactgtacatctctatgtttggtgtctgcagagtgcttcatacttgtttgagaattttccagtttcttcttgatttcagcgaaaactgttgctatatcaatgagcatttcatcaacaactttgatgttagaggcgctagccaaatattgcgaaaaattgaaaggctttttgccaaaagtgatttcgtaaggggaaactcccgaacccgagtgccaagacgtgttatatgaccactctacccaatgtaatgattttccccaagacgaatgcttcttatgaacaacagtgccatgatac

SEQ ID NO: 62165 - DNA, 446 bp, Glycine max
tgcttgtcatgctgatatttatcatgcagacttttctgattatgacggaggaacaattagggattaacttgaaacttatgtgcttcaagtgagaagaaatgcttacttttccacttgtgaagatgttcaaaggttggctatgaagatggttcaaactgagaaacatttgtgatttccattggtttataaacttattgagctagctttgatattgccggtgtcgacagcatccgttgaaagagctttttcagcaatgaagattatcaagtctaaattgcgcaataagttcaatgacttgatggtatgttacaccgagcgggagatattcaagtcgcttgatgatattgatattattcgaacatttaccgcaaagaatctcgaaaaggacacttgccacgtaattttattaaacccgctatgtaagaatatgttatctctttatttta

SEQ ID NO: 62166 - DNA, 405 bp, Glycine max
  unsure (1)..(405): unsure at all n locations
agcttagaactttaatgttatgtgttatctctttcacaantcttataaatattgaaaaattacagagtggccgcaattgtagtcacaaaaggattcctaataaaaccctatggtatcaccaccacaaactttattcttttaagccgattaagagactaattattactcttgaatctaggtacacttaaaagtctatgttcctctctaataattatacactgcaaaaatgaaactcaaatcctctccacaaacattttatatatttagaaacattgtgaggttgtaatgtatgttctagtcctttgtagttacattatagtctagttntattgtaaaatctaatcacaaatattttttataaatagcttccaattgaaagttaggatatattattagaagctagct

SEQ ID NO: 62167 - DNA, 315 bp, Glycine max
aattgctgcatgtacaacacagatgtgaatacaatccgagccgatgcgcttccatgacgaacccgctggtatatatgcgaaaatccgacaccggactccacgattcctcatcacgtacaccattatttcataaaacaacggttaccatgcgcctaacagacctagtgagtgactctatgtacccatggtgatccactacaggatgactgtaatataagatctttgtggtttcatggctaaactacaatacttaccttcttagtaattaaggagtcgcatttttttcccgaaattacaaggccctttattaaacaa

SEQ ID NO: 62168 - DNA, 449 bp, Glycine max
  unsure (1)..(449): unsure at all n locations
ntngatgctccgccagcaactccgtatggtactgatcgatatctctcangacagattangcatctttaatttattttaaacgaacaatagtaataattactgtgaatntaatggatattggaatgctttatggcagcgccttccgcttgtcccgggctaggcaaaggacaacgacctattggtcgtgaccctagcctctctttgcatccgtctataagtacctgaaagtaggaaacaacgaggtgtggcanatcgcgaccgcgtcgtcgtcttaccttaatcggtttctgcttttaactntgtctcgacctttgatgattcccgcccctgtttatcacgaaatatgcatgtgtatgcgtatgcatgaaatgtttcaaacgcaacannnattttagcgaaagttgggttacgtttgattttaattaagcgcttgggacatcccatgaact

SEQ ID NO: 62169 - DNA, 352 bp, Glycine max
  unsure (1)..(352): unsure at all n locations
agctntacagcagattntagtaatgacccactattctataattaaaataacttaatgccattaacctagggaattaaaacaaactatatggctgagtgtaactgaaattgttggcaaccaaaagtcacccncaacagccaacaagtcagccaccatttggtctcccaaaaggctgatgcctangttgccaattgggcccttattacaacttgaactaaagcccttttagttgattaacccaaaacatatttttggtcagccaactttacaaggattgggccattatttagacaaactaaacactctaaaattgaaataaagtggtgtcatttagtcctccaattgggccatg

SEQ ID NO: 62170 - DNA, 214 bp, Glycine max
  unsure (1)..(214): unsure at all n locations
caaatggtcataacttgtcacacggaggtctgattccggcggatagtatatcgagaaggtcggaattgaacaacggaagctctcgagaaattcaaatggtcataacttttgaaacggtagtccgattaaggtgcattatatatcgagaagatngaaattgaacaacggaagcctgtgagaaattcanatggtcataacatataacacggaagtc

SEQ ID NO: 62171 - DNA, 400 bp, Glycine max
  unsure (1)..(400): unsure at all n locations
agcttctcccctattttgctataaataggttgtataagtgaagaagaaaagggtttagccccttaggcacttctctccctcttgaaattgctgaggaaaattagttccgtgaagaanatccaagccgaggcgcttccataacgtttccgtgagtaattatgcgaagattctcgaccgttcttcaagattcatcgttcgttcttcattttcttcagtcttcaacgggtaagtacctcaaaccgagcttttcaattcattctatgtacccgtggtggtccacattttgtttcatgtatttttattctcgttttcatntactttttatacccccttttgacgtgcttaagccatttatttagagtgtctcccgcttaatctaaaaataaaataaattttcacc

SEQ ID NO: 62172 - DNA, 262 bp, Glycine max
cgcttctttaacgtcttgagcttgacgcatgatgacttgtcggccacggacctaataccttgcttaccttttgctttggacttggtcgcctattggttcgccatgtgtcgtaggcaacgctctaaccttttcgtggatgagttgaggtgaactctataggtggtggcggtgggtctgcttgccgctgacggccgtacccaagctgctggggtgtttcgccctatgcctgcctgggggcgcagtacttcttgatgaaaactct

SEQ ID NO: 62173 - DNA, 404 bp, Glycine max
  unsure (1)..(404): unsure at all n locations
agcttttgcatgtntangaagttctagagttatataggtccaagttccaaagagttctgagagattntgttgtgtgaagatctgcagagatgcgagttcgaagcggaaaccgttctcagaacttgagatgagtttatgaatgattgtgagatcctagaggtgaaggagacatccttaccacttttgtttttgcagtcttttatcttgttcttctctttgttggaaaggaggtttccggactatgggaagctaaatcctctgttggatcttccctgtaggtacctgatgtaaatatattctatttatgtaatgatgttttgtgtgttctctgtgttatctgctattcattccagcgtgcttttaccttgatcatgtcnatgcatcctttgttagggcatttatct

SEQ ID NO: 62174 - DNA, 89 bp, Glycine max
tctttgtggttgtttttagttgtttgctgggggagcagctggtattggagcttggaatgggaggcgtttctatatctttgcatggaatg

SEQ ID NO: 62175 - DNA, 431 bp, Glycine max
  unsure (1)..(431): unsure at all n locations
agcttgttagttgagacatgtaatgttatattcattagctaacaatntattatgtcacaataactttgaatcanacctaacctaaaattaatttcctttgtaacaatttaaattaatacaaattaacaatttcttttatatataaatctaatcaatgacaaacaaaaattgtgaatttttaaaataattttataataatctaatcaatgacaaacaataattntatataaatctaatcaatgactgaatgtatttaatgttgggaaacaccaacactatttttctctctataaactcaaaatagacacttaacgggaacgaaaaaacaagaatagagagtagaaaaataataccaagaatttttaaggtaaaaaactctttcaatgtgaaaagtaaaaatcacgggaccaagccattanatatctccacta

SEQ ID NO: 62176 - DNA, 452 bp, Glycine max
  unsure (1)..(452): unsure at all n locations
ccttgaaactagctatttatgatatggtaacaaagtgtttcagttttcttctngcttcattnntcttgctccaaaattgtatggttaaaatccaataatcatcatgatcttctttgtagctggtagaaccattgcctatattaccatccttgccgtgtattttactaaaatagaaattcntttggtttctgaattctgaagtaaaagtacattattntttttagcaatgggaagccctcctacttgtgatctgtgaaatctcaaataattctttttctgaattcttctgattgattcattcttagtgttgcttgtgcntttaccagtttagtttaactagcaaggatatcatggccctatatttgttntaaccttaatanactcatccagagagaataaaagcttaacaggaactgcacgttatgcaagttgccacactcacatgggaaatg

SEQ ID NO: 62177 - DNA, 458 bp, Glycine max
  unsure (1)..(458): unsure at all n locations
gatccttaagtcacctgccgcatgcaagcttgtctcagcgtctatgcgagacagaatatctacatgttagctatcatcgccaagtaccaagaagattgggtctagccacggcccacgagcatagaatcgcggatgagtatgcccaagtatatgcggaaaaagaggctagaggaagggtgatcgactctttacaccaagaggcaaccatgtggatggatcggtttgcccttaccttgaacgggagtcaagaacttccccgattgttagccaaggccaaggcgatggcagacacctactccgcccccgaagagattcatgggcttctcggctattgtcagcatatgatagacttaatggcccacataattagaaatcgttaggaaacttgtatggtctctcagaccttgactagatatgacttcctttntgaaataaatgagttggtcccatgtttctac

SEQ ID NO: 62178 - DNA, 412 bp, Glycine max
  unsure (1)..(412): unsure at all n locations
atcaaaaagccaaagacctcggaaatcaacacagatatgacaaaggagtagaaaatatataaatatcagagtataaaacacaagaagccaaactcacaaagaagaaataatcagaccagaatccaaataactgaaaatgtcaacaatcacaaaacatccaagactgaaatttaaaaaccacacgaaaaataagaaaagtacttagcataataatgtaaattctaagaaactaaaagccaaaatacacggcttataaaagataaataatcagaaactaaaatctaagaagacggaggtggtggtggaagatcgaaactctgacgaatgtatccgacatcctcttcaagctgtgtaagacgaatgtncataccggcaaagcgtgaatctaacgagtcgaagcggtcacaacata

SEQ ID NO: 62179 - DNA, 455 bp, Glycine max
  unsure (1)..(455): unsure at all n locations
gtcacctgctgcatgcaagctcgtgcatatcaaatcactcctattttttatctctagcatgcattgtatgttggtctcgtcctttgtcacgggaagccggagagtccatatcaccttcttaattgtacacatggngcactaccccctcaaatgcgcaagtaagaagagataattgtccgggctctcgtgtccgtaaaaagcattcatatcatgcatcgcataagcatctcttcataacatcataatggacatatcctgcatttgtccgttatcatattccagcctcacattttgcatgagtcatggcatcatcatgcatatgcgttcaacaaactttttgatctgcaaaatgcataccatttgttttcatgtttgctcatcctttgcgtttcctctacaaaacaaaaacaaaaaagggggaagcggtgaacttcacactacattcttaatttcat

SEQ ID NO: 62180 - DNA, 436 bp, Glycine max
actaagcttcttggaaattccaagaagcagagcttactacatctacctctcaatagcaagctcacctccttgagatgagaagcagagcttactacacaccccctatatagctaagctcaccgcatgacaaatacatgaaaatacaaaaagtccctactacaaagactactaaaatgcctcgaaatcaagggctaaaccctatactactagaatggccgaaatacaaggcctaaacaaaggtaaaatctattctaatatttacaaagataagcaggctcatacttagcccatgggctcgaaatctaccttaaggctcatgagaacactagggccttcccttggatctctggcccaatctacttggagtcttctatccaatgcccttgcggggaatgattgtatcattcctccctcttctcattctctctattgggtc

SEQ ID NO: 62181 - DNA, 392 bp, Glycine max
taagcacctgcggctgcagctaacaactagaaatcagtgtttttgtttccgaaatatagggggagaaaacggatgcacattttatctatatacaattgtttgttgcttgcttgaatcttgatttcaggtattgtattgtcatcatcaaagagggggagattgtagatgcaattggctttgatgtttcgatgatgatcatgatgatgtgttgcaattgatgcatatgggcttttcaagattaaaattcaagacaatacttcaagattacaagtcacaacatcaagatgatcactataatattaggaaggggattcctaattgaattagcaaaggtttggccaagtgatttaaaataaaaagtgtttttcaagggtttactctctgtaatcgat

SEQ ID NO: 62182 - DNA, 355 bp, Glycine max
gctgcttatacagccagatgcgctaagaactaatctcttactatttttaattcttggaagtgcgcttagcgcacctattgcactaagcctgaactactctctgttagttgaagcttgattgcacgctaagactcacgtctcatgctaaacgcatattgtagaaaattttgtgttgtagaaagcactaagcacaacctattgcgctaagccccagatgctcactggaatttgaaacttcaagttgggcttagtgcgaggtttggccaagcactcgggattttaaacgcaaacatcacgtgacacgctaagtgcagctgtgcgctaagcgcgccatacaatattcagtttttaaaaa

SEQ ID NO: 62183 - DNA, 413 bp, Glycine max
  unsure (1)..(413): unsure at all n locations
naagcttggtttgggcaatagcaccccaccttacgtccccaaggtctcctgacccccacgacatatctccaggtgccactctgtggtcaacgaataaaagcaggaagtttcacccttctacacttcctcatctcaagcttgtaagattatggggtacccatcacatgtggtactaggtggcggtcgggcgatggtgcacaacaagttttccatgtggcgtccctaaattaatgactggtttaatagtaataatttaaataacaaaaaccatggtaatttttttttctcttcgttttctttttcatttctttctcttttcaccataactaggtttagaagggaaatcctcactataaagtcctgaatggccagttcacaactttactcggagtcatttctttcttaccgctcat

SEQ ID NO: 62184 - DNA, 269 bp, Glycine max
  unsure (1)..(269): unsure at all n locations
ccttaatctcgcttatgagccttttgggattttcacatgaattcancgagacaagagaaagtgagagagcccctcactaggaatagccatggagaggagcttcacaccagagagccttgataaaagctggagaggtgcttaatggacgaaaaagaaagagggagagaaagagagaggggggagcatgaaattngaactcttgagnttgttgtcttcacaagaactcccatttcatcaanaggtacaaccaggtgttacacatgcttcta

SEQ ID NO: 62185 - DNA, 199 bp, Glycine max
tgcactgctagcgtattgcgacacttttttttttctagcggtcagcgccaaggaccaagaagagttgggactatccacggcccacgaccatacaatcacggatgactgtgcccatttatatgcggaaaaactatggtagatgaatggtgatcatttctttacaccacatggcacccatgaggatcgaactgttggccct

SEQ ID NO: 62186 - DNA, 138 bp, Glycine max
ctaatatcgcaagtgagcacagaacggatctcctccctggcagattcttcgggattgcccatgataatctcacgatcaaaccggccgggcttcttaagggagggtcaacaacatcagggctattatggggctcaatta

SEQ ID NO: 62187 - DNA, 371 bp, Glycine max
  unsure (1)..(371): unsure at all n locations
tctgcaactttattttgtatcaactgaagggtacccgtttggaagttccatataaacttcctcaaatatatcaccatgcaagaagacattatccacatcaagttggaaggattggccattttttatcagctgcgacagccaaaaggactttaactgatgtaagttagcaactggagagaaaggatcatagatatcaataccagctggttgtgtgtaacccttagctaccaatctagctttgtggcgatccatagagccatcaggcttaaatttcactatgctcacacacctgtagccaatgcatngtgtaccaactgtaagaggagaccaagtgcatgtgtattgggatcaaagctttgatctcactgcat

SEQ ID NO: 62188 - DNA, 340 bp, Glycine max
  unsure (1)..(340): unsure at all n locations
tttgactttttcaattggtttaagttttttaaagctataactcttctaaatgggcttcttgaccacaaatgaagagtatatttaagcaacgggtttgtttgcattttcaaattaaatcattcctttaaaactttagaatcacttttcacaatcaatcttcttacaattcctttaccaagccttgnaatttctttgaaaccttcttcttcttctttgtaccaaaagctttctgaaagttttctgtttttccaacccttgaaacttgtgctattcatctttttcattccttctccctttgccaaaaagaattcgcccaagactaaccgcctgaaatcttttt

SEQ ID NO: 62189 - DNA, 400 bp, Glycine max
  unsure (1)..(400): unsure at all n locations
ttctcttgctattcctactccctttataagcctaaggtagcttacttttcacgctgagcatgcactcctgggcttagcaagaatggtgggttaatcacacgcttagcatggtgttcgcactatgccgcacctttggctttctcgtgggccttcttcgcgctaagcgtgtgctggtcgctaagcgagcacgtacactgagccggtcttatgtgctaagcgagctgtccaattcttccaactattctttaaggctttttcttctagtttttgcatcaattntcctctaaagcacttgagatcttcttcttctgacttatgctaattaaaaattgaaaatatattaatttcttcattatttcattcaaaacaatagtaaagtgaagaaaatgtaatcattctt

SEQ ID NO: 62190 - DNA, 411 bp, Glycine max
  unsure (1)..(411): unsure at all n locations
tgtcttaatngccaatagaaactcttctagctagcactgctctggttgttggaggagagtagcttcaaaggttgcctttcataaactcctaaaatatcttttttttttcttttttcttttagaaaaaatggaaacaatgaagtaacatttcacaatgttgcccaatgggtatgaaatattcaaagtgagcatactcgcgaatcttataaatccacattaattaaacccatgttttccctctcattgcaatcttgttttttgcgtgtggatttcactggccctggcccgcaacattgccaatttatgcatttcggcttttctttatctttttctttttgtgaatgagtcaatttcaattctcttgtttaattatatgcacgaaggcattatttataatattattatacatgc

SEQ ID NO: 62191 - DNA, 440 bp, Glycine max
  unsure (1)..(440): unsure at all n locations
ttattatatatatacttttctttaacgccatgggcctttggttgacgatatcagattcattntgaacaactctcttataatgagatcaaaataggtaaattaagcttcccttgaaacatgagttataagattcttacataagaattattattttttaaggtcagtttcttaaatatattttagtatcttaaaggattagtttctgattttcaactggagtgaagatatcccgagttaaacccctccccctcaaaaaataggattatcttaaaaattaatttttatctcttttccatctagtttaaaacattaaggaacatttggtagaagaaaaattttcagtttcccatgcatctgaagttgagaatgttttttttttcatgtgtgggtcctctctggtggtggggaactccaagatattctatatgaatgtccataat

SEQ ID NO: 62192 - DNA, 426 bp, Glycine max
  unsure (1)..(426): unsure at all n locations
ngttgagaaaatgtgcaaacaagagggaattggtgagacatgctattactatattttccacttcttatctaaccttggaaaggctccacaaagagaaagctaatattagaaagatgtttatttctgatgaatggatcttaaaccagttatcttaagagccttaggggaaaaaagcttgcaaggtagtgctcatgccttttttttggaatagtgtggtttacactcttaaagtcatggctccacttgtcaaagtgcttcgtcttgtggatggtgaaaggaaaccagccatgggctatatttatgaagcaatggacaaggcaaaaaaaacaattatcaagtctttcaacaacaacgaaagcaagtacaaagatgtgtttgcaatcattgataaaagatgaaattgtcaacttcatagaccattgcatg

SEQ ID NO: 62193 - DNA, 275 bp, Glycine max
atatctttctccacccaaacaatataacctcttggagccaacccactgggggcagcactgtcccatagaattgaaaccatataccaaagtatttacaaaagaaatttcctctagtttcatgatcttagtttcacaatctaaatggcatataaaaacatactctttacaacagcttgaagctgcttgaaggccttcaacaggttttaattcttcttgctagatgcaaaaattgtagtaaacttggatttaacaccaaaagatgctagaaagaaact

SEQ ID NO: 62194 - DNA, 425 bp, Glycine max
taatgaagccacaaggaaagaccactttcctttgcctttcatggactatatgttagagaggcttgcgggatgggcttattactgcttcttggatggatactctggatacaatcagattgctatggaccccaaggattaagaaaagatggccttcacatgcccttttggtgtctttgcttacagacagatgtcatttgggttatgtaatgcacctactacatttcagaggtgcatgttggccatttttgcaaatatggtggagaaaagtatcgaggtatttatggatgacttctcagtatttgggccctcttttgaatgcttcttgaagaacttgtagatggtgctacagagatgcgtggaaataaacctagttctgaattgggaaaagttccacttcatggttcgagaaagcatgcattgggcca

SEQ ID NO: 62195 - DNA, 445 bp, Glycine max
  unsure (1)..(445): unsure at all n locations
gcttatgtagattgggattntatattgataagctattttatgtgaaaaaaataatattcatagtaatatctgaaaaatataacttaacaaaaacttccccaaatatagaaaatagaatttcataaaggtatttcaaatacaaatccatatgtagcaacattctggttatttcaatgcccatacatcaaagaaaaagggaagcgcattaatttagtgaataccataacaatgttcataccattgttccttattaaaaaaactaaaggatgtcaaaaaacatagatgataaaatcattaaagtaatttatcaacaacattgaagaagcaaggaacaacaactataggaaagaaagctntaaacaaaaaattacagtcgtaataatatccaaccttttcaacttatatctaattctaacttctggatgtggggaaatcatctttttct

SEQ ID NO: 62196 - DNA, 431 bp, Glycine max
tgaaggtaagagaagatgagtggagggagagggagagaatggtcacttaatttatgcctcaaatgaggtatgaactttgaattataatttctaaaatgatcaaagttgaaaaaaatgcacacaccagatctttatttgtagcctaaatgtcacacaaaattggaaagaaatttgaatttttattctaatttcactcgaatttgaatttgaattggtggagcccaaatttcactaattatgattagtgaattttaagtacaagtcatcccactaattcaagatcaagtctaagaatctccactaagtgtgcttaggtatcatgaggcatgtaaagcatgaaggagatgcacaatgtgtgactatatgatgtgacaatggggtgtagcaagcaaatgctcacctcccccttaagatggtccaaaatttaattg

SEQ ID NO: 62197 - DNA, 480 bp, Glycine max
  unsure (1)..(480): unsure at all n locations
ttaagtcacctgcggcatgcaagctntgaacggagacttcaataattatatttcttattnggactctgaaagagacaagcattttcctttcccagcatgaccatgactaattcaaattggcttatattttttttaattnttttgcagatatagatataataaacaaaaacgccaaaacgagttaacacagatttccacggaaaacgaacgtgcacaagcacaccctctttctctttcactctcttgaatttcgcgggaaagctatgaatgaagcttgtgttgtgtgtttgtcatgtcaatggtggtgaagtggatgagtagtagaagtgtctctttcgctcactctcatttctccatttctccttatatttctcataagncgtaacaaacttcatgacaaattaatgaaaaaataaaatcaagggtaaatagcgaaattcaaaggctttaacaaattagtctttataaaaattaaattta

SEQ ID NO: 62198 - DNA, 406 bp, Glycine max
  unsure (1)..(406): unsure at all n locations
ngaggatagagacttcccaagctatttatcttctctctcatagaggctctctaactntctagctgtctcactccaaggagtggattcactcttgtctcttggatcgactcactctacggtggctcactcaagcttgaggatagagacttcccaagctatttatctactctcttaaagaggctctctacttggatggttangaatgaaggcttctacccttatttatactactccacctccacaatgaatggtggagattacttgtatcttagggtggagattaattctctagaatgctccacacattctatgagtctctncnctcttctactcccttccatatccttccataaggttccagaagggtccacacatctccaaaatattctagaggttttaacattct

SEQ ID NO: 62199 - DNA, 473 bp, Glycine max
ttaagtcacctgcggctgcaagcttgctgattacattctcccctttctattcaaattcttaattcttcttgacatcatcaaaatcttcatgatttacattctccccctttttgatgatgacaaccacctgtaggttaggagcaacaacaaagaaaaaatatctattcgcatatagtttactcccccttggttttgcaatgattgcttatatgagacggttgaagatttcatatttttcatatgtaaacaaattgtctcataaacaatagataatttttcttactattttatcctttatctttctctccccctttgtcaacataaaaaacaaatcatgaatagagaggagaaagatcttaccacttgttgcaatgtattagaatcaagtgataccaaaagacattaaaacaatcattcaatattaatcaagcaaaaaacaagtacaataacacatcaatcaaacacaatcaagt

SEQ ID NO: 62200 - DNA, 423 bp, Glycine max
  unsure (1)..(423): unsure at all n locations
ntaggagagaccattaaaactaaagtagttcctaaacaattatcaattgagggagcttcgccaagtgtccccatcgaaattgaaaaacctttattcaaacctttcaaagttagtgagaaggctaaacggaaaattagggaacttagaaaaactaaatccttaactgaaggcgtaggtgacaatcatagtgaattactaaacaagattggtagtttacttaaggtcattccagatactccccaagcctcggaaaatacttctaaaatggtaacaagaagtacctccaaattaattaatgttattaatgaagatagtgaccaaaactcagataacacaactgagataggatcagtatcagaaaagaatataaatccaattaattccaaaaactggaaaacaccctccaaattatattatcaacgt

SEQ ID NO: 62201 - DNA, 448 bp, Glycine max
  unsure (1)..(448): unsure at all n locations
nngcccggcttctaatgggaaacgcttctattgatatatctattntcataacatgatcatttggatgccctaccctagcatgccaaagattagcaacattggaagaagaaacatgnnattttgagcttatgttagagctattattgacattagcagttgaataagggaggtcaacatttgtaacagggacagaagtagacatcaacaggaaaggattgccttgaagttgaagaatgtgaaatgagtaaaggccatcaacacccacaactccttcaaggaggaccttatgtgtctcctgagatttgacaagacagagatgaggatgaaattcaaaaaacacaaagttatctttggcaaactaactcacacttaacaaatttttcgaaatagaaggaagatgtaacaattagttaagtttaaagattataccagtgtcattaggagaaat

SEQ ID NO: 62202 - DNA, 424 bp, Glycine max
  unsure (1)..(424): unsure at all n locations
tgttacgtataaggtcttcttcacttaaacaagaactcattatctatcaataattnatacctttgtaatcatcaaaatctaaggtaaggataggtcgtctagtgatcatgggatcttctagacctaatagccttaacatcctccactttcaaaanttgctcgtggagtgtgtagttccaacacaaagcctctttatacatcaaaactctcactttcaaattctccaagtcatttataggtggtgttcgaatcactagatgacccttgtgcttcaaccaaggttctccacaaacacatttcctaactaccatctcgcatcttcctcagcactgttttggaaaacaatatgctttgccaagaatatgatgggttattacctaagtcagcacccataaaatcccctttatggaagtattaggctttg

SEQ ID NO: 62203 - DNA, 452 bp, Glycine max
  unsure (1)..(452): unsure at all n locations
agcttatagggagccatgccaatagtaaattgataactanntatataagngaactctatcaacggcagaaaactcttccaactccccttttgctctaagacacacgccccttaaaggtcctccagcgacaaaatggttcattcattggccatcagtctgagggtggtaggctgaacttagtctaagcttggttcccaatgctctgtttatgctctcacaaaatctagaggtaaacctaggatctctatcagacactatgctagatggcacaccatgtaatctaacaatctcactaatatacagggaggtcaacttctctaaggaaaatcttatattaatgggaataaagtgagcagacttggtcagtctatcaacaataacccagatagaatctaaacctttgagggttctatgtagtcctacaacaaaatccatggaaatgctgccccact

SEQ ID NO: 62204 - DNA, 369 bp, Glycine max
tttacttagaattagttaggttcaatggaggttatgtaaaattaaaaccccctgggggccatgccttttataggggtgaaaacccctcatttctggtggaaatcacgattaacacgcttagccgccctgcttgcctatactggttcatcgcaaatgacaaatttttggaattacaaaggatcgcactaagcccgaccctgtcgcgctaagcatgttcatcccttctattgagtttcaacgatgaactcgctaagcacgtctatgcgctaagcgagagtagtgtttcagacacttataaatttttcaattttgttcagcgctaagcctagctgttatgctaagcgcatttttgtttctatttttcaattt

SEQ ID NO: 62205 - DNA, 399 bp, Glycine max
  unsure (1)..(399): unsure at all n locations
aactacctaaccagaaacagggagaggcagaatactctggccaaacacattcaaataccacagcttttcttactcatataccccagaaacattctcttcgttccgattctctaaccattggatcgacttgagaattttactggagattcctagtacataaatctacatcttgaccgttgggatctgctaaaaaatgtctagaacccaatgtgtactacctttcccataaccagcaatgcacaaacattnttctgcagacattcaaaaatctgttgacaattcaacaacattnttctgcataatagggcagatttcgaaatccatcttgcccacatacaattatgctcagattggatcctacaagtcctagatcatgtataaatcatatttagaccaaaa

SEQ ID NO: 62206 - DNA, 265 bp, Glycine max
acacacgactcttcattgtcacaaatatttaactgtgcggctcaagtgattaactcgcgggtgcccagggattccatccatactcatcggacattaaactcacgctcttaaaaagtcttacagtcgtgtgatggtacagttcataactcataactcaatgcacacagcatctcaatacatgtgcgatctcaccattcatcacatatttcatttatcacttacacacaatctcaatcacaatttcttgacctaatataacatttat

SEQ ID NO: 62207 - DNA, 439 bp, Glycine max
  unsure (1)..(439): unsure at all n locations
agctgttcgcacatcgntctcgtgtatgatattcactcgacaagggttgaagtagaggagaccttcaatcctataacgcaacgtggcggacaaaaatgggcagttaacttgaatggccattactgtcaatgcgaaaggtattctgcgcttcactatccatgttcacacattattgcagcttgtggttacgtgagcatgaactactaccaatatatagatgttgtttacaccaatgagcacatcttanaagcatactccgcacagtggtggcctcttgggaatgaagcggcaattcctccttctgatgaggcatggacactaatccctgacccaactacaattcgtgcgaaaggtcggccaanatcaacaaggataaggaatgagatggattgggtcgaaccatctgaccaccgacaaaaatgtagtagatgtggagctg

SEQ ID NO: 62208 - DNA, 417 bp, Glycine max
  unsure (1)..(417): unsure at all n locations
tgttaacaaagtcaccaggaaccctcatgctcatatctntgattacgagtggttnttatttgcattttagagaatattatgctaaaaaatagatatttaaacatgttttctatttattttttcagttagttcgtgtgagataatctgcaacactttttggttcaagagtaatattgttggcagagaagatataagtaggaaggttagaaaggagacgacagttcataaagtctattctttcttttttttcactcagttttattcagtaattttaaatgctagacactaaactaagtggaaggtgaggagattttctatttgatggacctttaatacaaagcatctagacatccgcttgtaaagtaatttctcgtgactttttcttttactataataaaatttggtttttctatggta

SEQ ID NO: 62209 - DNA, 262 bp, Glycine max
ccggcgcactttaatcatttcaacattcttttcggcgtctattctttaacacccccttttgattgaatattcatatatacattattaaatggtaatgcttttttttaaaaacacaaatttttatgaatctacttctaccacacattcttttacctattttttttttttcacaaaacagttgacatattataacacatttatccacctttattactaataagattttaattgggaccatgttgctattatcctataaaacaga

SEQ ID NO: 62210 - DNA, 293 bp, Glycine max
  unsure (1)..(293): unsure at all n locations
tttttaaagtatcctaaatttttattccatgcttatcgaaaatattggcttatatgggtacgtgggttcgtcttctatctcaattttgccaaaacaagccacaagtaactttgaatgaaagtactataaatacacgactagaagtgcagactataaaagagccaagaactgaaacctaaaacaagataatcaactaagtggattacaatatactatcaaacacgtaaattgatttacacaattattcataaaatcttggatttcaatntaagtatataattacgttaaatatt

SEQ ID NO: 62211 - DNA, 385 bp, Glycine max
  unsure (1)..(385): unsure at all n locations
ggaaagaanatgctccctcaaaaanaatgcggccctgggattaaaaatctctacctctttaatattaacctcttatctaaggggaggtggagatttctccagaaagtttgcaattcggtccccttttattagattcaaacatggatgttctttctctgatctatcacatctgacccacaaaactagtttgcttctaacattattcacaatgacaaaaatggctcccaaatgaaatttcggtatgttctttggttgtgcaacacaaattttcattgtgtgcataattgtntttaatctaaactctacaaattttgttgaaattgaaattgtttattccaataattatacaatctcaaaatcttctaagggaaatatctaggaaagt

SEQ ID NO: 62212 - DNA, 242 bp, Glycine max
  unsure (1)..(242): unsure at all n locations
aagatatgatcttcttgacattagggggcttcatggtggaacaaccaatatgggaactccttaagatgcttatgaggatcttcacctgcaagaccatgaaacttangtagcaagtgtgttagtctaatcttgagaacatatgctcagaatgctcaaaatgctcaaaatgatcaggatgcacactatgcctaactaatctatgaaaggttctatctatttcatgatcaaaggattctaaatca

SEQ ID NO: 62213 - DNA, 397 bp, Glycine max
  unsure (1)..(397): unsure at all n locations
tcacgtcagaacctggaatcgatacaaacatgtatcgatacaccttttgaaatattggaacgtgacatcagttgaaaacattttcaaactcattttgctactagtaatcgattacaacaatatggtaatcgattaccagagagtaaaaactctttggtaaagggtttgtcaaaaactcatgtgctattcaaagatntgaaaaactttttaatacttatcttgattggagtctttcttcattcttgaatcttgagtcttgaatcttgatcttgattcttgagatcttgagtcttgattcttgattcttgattcttgaatcttgatcttgattcttgagatcttgaatcttgatcttgattcttgagatcttgaatctttgtttgtaggctttcttctt

SEQ ID NO: 62214 - DNA, 425 bp, Glycine max
  unsure (1)..(425): unsure at all n locations
ttgganaatgatntatatacaaaagttagtcgtataaagctgtctatctacctcccattcctcactcacttctcatcatgtggctgcttcttcactttatattttggagaatcttaagaagggtggaccactcattccctccaaaagatttttgcaggagaaatccatactaaattttacagaacgaaagcattttttatctttccatttttaccaaaaaaattgtttaccaaattatgagtacctacatatattaattagtttcaaacactaataatntaaagataatacttgtttatacataaaattattccgtaatataaaatattctattttcaaagcttacattattcaaaacataataattcatatcactaagatttaaacaaaaataaaaatgaaaacatgacataaaatttcataaa

SEQ ID NO: 62215 - DNA, 354 bp, Glycine max
  unsure (1)..(354): unsure at all n locations
acacttgatgaattctctttccttcatctctctttgaagattaaagtgcagttggccacacataggaaaggatttccatgctaaaaccgaagcaagtaaacacaatgcaaaggaaggaggtttctacactacatanaaggccgaaatttccatttaagttattgccagttcatgcattttaatagaaactaccaattttattgggtattattatgaacatgagttctttcttatttcttattctttatcttaaagtacggtattaaatatgacatcgaaaaatgctgatgggaagccgagagttgatttatagtttgaaaatgaacaagcatgggaattttgaatgaatataat

SEQ ID NO: 62216 - DNA, 447 bp, Glycine max
gacacgatacactactaagactgacgcgaaaacacaattacagtaatatcattgaataagtttatatcgattcatcatcatttcatcagatgaagaacttgtttaacaaatattgaagcatacattattctccagttaaaaaagatacaaggggtaaaataaatcctcactcgtatatatacataaactcaatgaacaaataaataaagaataaatcatatattctttctcaagtagttaaagtaaataaagtaattttcctttctacacactctctaaaatcaaccctttactcagtttgtttggaccttagctccatcatcatcccctgcagctaagtctggttttaatctcctccaattgctgcagaacttgctgaacttcatgcctaccagctggagaaggatccacacaatgcaatgctaacttcaatgtgttaagcaattc

SEQ ID NO: 62217 - DNA, 384 bp, Glycine max
  unsure (1)..(384): unsure at all n locations
cacagaagggacctggagatatgtcggngtgcaagagaccttggggacgtcaggtggggtgttattgcccaaaaccaagcttgaccaatcccgacccaacccaggcatagtcagtcagtgagaacctgtgacgtacctaaacaggcgagctcctggcagtctacccgataaagaacaaagaccacaaagcacggaggcttgtgtggtggctggccagctatggatcttgagtgatatttgggttatggcctctggtaatcgattacaaagggtgtgtaatcgattacaaggcttacgaatggggtcaggaaattgagatggcctctggtaatcgattaccaaggggtgtaatcgactaccacgcttataaatagagacaatatg

SEQ ID NO: 62218 - DNA, 431 bp, Glycine max
  unsure (1)..(431): unsure at all n locations
aagctgtccaaacggaagaaaagaaaccgaatttgacanaattatatttatgcctaaaacaagaatgattaaaaagtctcggattgggnacttacccgttgaagaatgaagaacggacgaagaacgggtaagaacggaggaaaaccttcacggatttgcttacaggaacctctcggaagctttacggaagcacctcggcttggattttcttcacagaaacaatttttttttacccaaaacagctgaaatgcatagccaggggaatcaggcacccttagaacaacccccttttgcctttttataggaaaaagggggaggaggttgccgcccagctcgcttaggcgagctgggttgcttccaccttaagcaagaaaatgcctagaaacctctagaagggcctagatttgaaaattactatttgcaccccccat

SEQ ID NO: 62219 - DNA, 195 bp, Glycine max
aatctgaatctaaaacaagcatcccacttatatactctatggtaagcaagtactacccacctttagtactactctgcagcagaaacaaatctctcagattaaagctgaacagtaatcttctataaggcaaacagccagaggaactattttacaacaagggaccccggcatggtaaattactggttaaaaccggct

SEQ ID NO: 62220 - DNA, 429 bp, Glycine max
  unsure (1)..(429): unsure at all n locations
tagcatcattagttctaatgggcatgacttccacttctctttgaacatantcaactgctaggagaatgtanacataacccaaaagagacaaggaaatgggcccatgaanatctaatgcgcccagaacatcaaaacacctcatagaatagcatatgttgcttgagcatatgttgtcgccatgtaagtgcactttctgctctctgacactgctcacaagtgctacaaaatttccacacatctttaaagatggtgggccaataaaagccacagtcaagcactttgcgagctgtcctttgaactcccagtgcggaagaatggcaaaactgcaggactgagtcagtctcatgatctgggatgcatcgtctaatgacctgatcactgcacaatttccacaagtaggcgtcatcccaaataaaatgcttagcatca

SEQ ID NO: 62221 - DNA, 412 bp, Glycine max
  unsure (1)..(412): unsure at all n locations
cgcctttattatggagatacagaataacgtaacanacattatattttacttaanngcgcacnctcaatagatttttaaataaaattcttaaccaatattatgagaatgccagttaatatttatctacgacaattcaattaataagaaattataatatgtactagcttcattcatatttataagattcatatttataagacattggtggcttatttatacataagacaattaattaatttagatattagcataatatttatctataattaaaaatacataaatttgttcttaatattattaagaatttattcatcttcttcgatcttcaaacgagagagaaagacataatttcaagtaacatctaattataggctaaaataaataagaatattttaataaaaaatagttaaaa

SEQ ID NO: 62222 - DNA, 424 bp, Glycine max
  unsure (1)..(424): unsure at all n locations
tgtaaaaattaacaattgaatntaatgtatagattttatttacttgatgacacagccctcatatatttcacttatgcncatcaactgtgganatctanataggaaaaaagacgcangaccactgtttcattgattcttgcacttagtgataaaatcctganatccagtatcatatcacagagtattgaacagttcatgtaagcttgggaaattaagtgttttgattgaaatatanttgatcatgattttaatggctagaatgaataaaaaatggggatgtgtactttcgagacatacaaactagcagttaaaattgtaaccagttcagaaaagagaagatgaagaaaaccaagaaaaccaagaaaacccaaggggcagtttagtttgagaaaatgttttcaattttcactgtttcctaaataaa

SEQ ID NO: 62223 - DNA, 354 bp, Glycine max
  unsure (1)..(354): unsure at all n locations
aatgaaaccaatcttatagaagcaatggatgctgtgtgcaaacatagtattggcctaacgaagaggaagatgccaggtttatcatttggtactgaagtccttgttatatacattagctgacatctttaactattccacatttgagaataaatgaagattcttacctcaattgaaatttcccagagaaggtattactggtgaccctgacagtccattcaccacaatcattcctcgtgaggaatatgctaacaagtacggtccaactactggtgacaaaattcgtcttggtgacactgatttgtttgctaacattgagaaagattncgctctctatggtgatgaatgtgtttttgg

SEQ ID NO: 62224 - DNA, 423 bp, Glycine max
tttaatatcaaatttaaaacaatgctaaatgttgttaatttttcatatacatataattaattatctttgctaaatcacattcttgcttcaatacgaatttgtttatttgaattttttaaaatgattttttttattaaaaataggtttgaaaatattataattttatgaaaaaatatatgactaaaaaatagtatttttgatttataatataaagaatgaatgtttttttttattcatgttatcattttgagtaaaaacaatttaaacaaactttgtgtcaatgagagtaaggcggaccctcacatcgcccatgacattttaaaaaattactattacttataaaatcgaattcaaatattttagataaatagcatgccctgttaatggccagaaaaaatattttacgattcaattttcattttg

SEQ ID NO: 62225 - DNA, 383 bp, Glycine max
atccattatgaaccactcccataatgctgtccaccatgctctaaaaggcaaagaatggttgtcaacgaagtctaagaaaaaagaactagagatgaatcatgaacttcaataagatgtgtgatgtgcctataaactaagctgagacacctatataaccttgcctcaattttatgcttctcactttccccttaccgactaatgaatatttttttccttttaccataagaataagattgccttgacaaaatatgctgcaatgggaaatcaaagttttttggtgggtgctgcttgaccaaaggtgaacattaatttgggtctatgcaaaaatttataaccctataaagaggcctatccctctctaaatttaaatgaagcatgccatg

SEQ ID NO: 62226 - DNA, 261 bp, Glycine max
acgaacatcatctagagtgtcatctccaacagcggctggttcgcgcatgtgatatcccctttccacaaacttgcctcagtgggatctttactgtgcatctcctaccgctcgagaacctgtctgtccacacatcggggggcgcgcaacgaccactgagtcgatatacaggctgtgggtatatggcatctggaaggtcgctgtgcgaacccccaagctgagagacataaacagagatgcattgactgagcaagatccactacc

SEQ ID NO: 62227 - DNA, 331 bp, Glycine max
cgacactataaaactcagctgagatgagaaggaaacgggattcttttgctttttcgtgacacaagggacctgagatatgtgcggggtccgacacctgggacctcagtgggtgcaatgccaaaacagcttgacatccgaccccccggcatatcattagtgaaacccggatgacctaacaggcgacttctgcagtcacagatatagaacaagacccacaccggagcttggtgtggtgcccctgtaacttttgatgatatatgggatatgggctctggtaatcgattaaccaacggtgtggtaatcgattacaaggcttaaaaatgaagacagg

SEQ ID NO: 62228 - DNA, 406 bp, Glycine max
  unsure (1)..(406): unsure at all n locations
actacacatacctctctaatagctaagctcacctccttgagatgagaagctagagcttagctacacaccccctataatagctaagctcacccccatgacaaaaaacatgaaaataaaaaaaaaaagttcttattacaaagacaactcanaatgccccgaaatacaaggctaaaaccctatactactagaatggccanaatacaaggcctagacgaaggaaaaacctattctaatatttacaaagataagtgggctcatacttagcccatgggctcgaaatctaccctaaggctcatgagaacactagggcctttccttggatctctaacccaatctacttggagtcttctagccaatgcccttgcggtgtaggatttgatcacttagcactgccacaattcctaca

SEQ ID NO: 62229 - DNA, 410 bp, Glycine max
taataacccaaaaaaaagatgcacccatatacaatcaatgcagcttcgttacctagaatatttacacatatcttcaaggtgtatatgttacttacatcacacacctccttggctaaattcacatacatgcatactcaaagcattttggggtaccaaaaattgcacatgtgcacatcttggtatatctaatacctatacatacacaaacttcatgatgaatcttgactatctacacaataaggtgctacattttatgctctattcaagtgtgtgctacctaaagccgcatgcaaattcaagtatattctccttcgctgactaaaatcgcattcaaactaaaaggtatacattttttggcaatgtatgttctttacataacatgcaacaatattatgtatatttctttgtga

SEQ ID NO: 62230 - DNA, 396 bp, Glycine max
aagctaagccattctcgacatactttctcgagttgattttttgaaatacgaacgctcaaatgatgttaacttgacccatctacgatataacttttactcggatgtccgatgagtcctggaatatatcgacacgctcgaaattgaatgttgaagctctaagcctattcaacaacaataacgttttactcggatgtccgattcagtgacgtaatatatcgggacgctcgaaattgaatgttgaacctctgagccaactcaaacgacaataacttttttactcggatgtctgattgagtcccgtattatatcgagacggtcaaaattgaatgtttaagctttaagccaattcatacgacaataactttttactcggatgtctgattgagtcccgtatat

SEQ ID NO: 62231 - DNA, 415 bp, Glycine max
  unsure (1)..(415): unsure at all n locations
gatatccatcataaacatacaggcacatccacagcatcgatcatgagagaggacccatgacacgtaaagatgaacacaaatctaatctgccctttggactaagaaaatcccttccacgtgaggcagtgtgtttcaaattctgaaaccaaataagaaagctaagggttaaagaaaggaaacaaaactcccccagtgttcttttactattgagattgcaatatgctcaattgctcaccaactgtgaacatgaatctacacctttccaatgtaagtttcacacttttaatttgcccattgaacaactacattctattcaaagttttgtacaatatgcaatgatttcacatcctaaaaaaaagcttgggtatgatcatgcttcatgcacatgaatagntacaagtttcacattttcata

SEQ ID NO: 62232 - DNA, 451 bp, Glycine max
  unsure (1)..(451): unsure at all n locations
tacaatactcaagcttgacctgaattaacaataaatggcatgatcctggcctgattatttgttaaaagtcttttaaaggtctgacatgacttataaacctgtttaagggcctactttgatacattgncattatactttatttttcattttgatacattaagttttaaaattttattttgatcttttatgattctggaaagtttcattttaattttttatgtttttcacagtttattatggtcatttctttcatttttcattaaaatgttagtgttccgttaatgttttaaattttgaaataataaattattttaactgttattatcttaaattagttatcttacttatatttagtgcttcatcaaaattaaaaaatataaataatatggatattaagatttgagtttaatacctatgcacactgtcattaatcacaaatcatcgcttgaat

SEQ ID NO: 62233 - DNA, 403 bp, Glycine max
  unsure (1)..(403): unsure at all n locations
tgcagctgctgattacactctccctcttctttattctaatnnctcctgacatcatcaaaatctgcatgatttacatgctttgtgttctggctcaaaatctgttctataattggcgcctagcttataccaattttagttctgaaatttacattgaaaattattgtgaaaacaagtgccaaaactagaggcttcttgagtccttttttttttggttttttgttactatatctagagccattctaagtttttctttgagtcctagcttgcttttatgtactcttcattgctttaattgtcgaacatccctgaaaatttgcctgttaaactataatgtgttactatcatctaattttttggtctcgcgtattcttggctcttgcttcttgtagagaattccctataa

SEQ ID NO: 62234 - DNA, 404 bp, Glycine max
  unsure (1)..(404): unsure at all n locations
ngtgcaaatcaaatcactcctacatttcatctctagcattcattntctntctttacccactcctcacgtntggttttttagggaaaaacgccataactaaacgcgtcgcaagggatccctatcgcaccagatccaaatctagaacgatgggtgatcaagaggagacgcacgaacagatgaaagccgacatgtcggctctgaaagaacaaatggcctccatgatggaggccatgttaagtatgaagcaactcatatagaagaacgcggccaccgccgccgctgccagttcggctgccgaagcaaacccgactctcttggcaactacgcaccatcctccctcaaacatagtatgacggngaagggacacactggggcaccgatggcagcccttacctgggatacaa

SEQ ID NO: 62235 - DNA, 307 bp, Glycine max
aaaaaaccggacaaaagaagatttgagaataaatcggatagatagatagatggagaaataaaactggtaagaaagattgataaaaaaattgttgtctcttcagtccagcccaatttcgattcagtccaatgctataattttctgaaataaattaaaaccaaaaattagtcaagtcgcccaatgataaacacataattaattcgcaataaggctaatcataattaaatgggacaaaagggttagacaatgaaaaatatgcacatcaatcccccacacttaccttttgactcctggcaaaatcaaaagc

SEQ ID NO: 62236 - DNA, 353 bp, Glycine max
  unsure (1)..(353): unsure at all n locations
tcanaccacagcaactcacaatctaggcatctgtttcccttaatttatnggatttccaaggtttgagaagttaagatgagaatggggtaaatttagagtaaactctcacctcacacaagtctatgacatcgatctaaacttgctcaaactgatttttatgccctaaattccaccgaatcataatttgactccttaacacccaattttttttntaccctatgaatggctctngccttcacttcgggcatttggttttcttttttgcacagtccaagcattcttataagtccctaatgacattttaaactagggattactcactttaacctccatttaccactgaatcccctttt

SEQ ID NO: 62237 - DNA, 351 bp, Glycine max
cctccatacaaaagactggttgatgcacaagctcttatgaatgccattactattccacttacctaccttttggggagtgtcattaaggataatgctgcctttcttacatctaatcgtatcaagaatcctatgagatctaaataacttgtgtatatctgggaagcactattttcttttattacagttccatcgcctagttacgttttcatagctgggaaaactaaaaaatataccttatttaatatctactctaataatgtaacaccatgatttttccaggctttgatgagataattaaaatttatgtgaattttcttgataagttacaatagacaattctattgaaaatta

SEQ ID NO: 62238 - DNA, 375 bp, Glycine max
  unsure (1)..(375): unsure at all n locations
actcacttagcgcatagaagtcacatgtagaagcagataatacgtgaaggcgtgcttagtgcgagtcgcgcgctaaacgcgtgaacaccaactcactcgctaagcgcaacggtcgtgcttagcgcgagattgtgtaaatnttacactgacttcacctatgaaaagaggagggagcaaaagaaagagatatatcgagacacacagctctacattgaatatccacgagattagagactcccaaatacgagacacaaacctaatagtcatttgttgccttcatctccatccctattgagcttgtctctcctcatcaaccccttgcaattgttaaacctctcatgacactaacagattaaaccttttattggtgggagc

SEQ ID NO: 62239 - DNA, 431 bp, Glycine max
  unsure (1)..(431): unsure at all n locations
agcttcctcgggccatattgtttagctatcattggaagtagtataccagtgggacgttactctttaaagcaaaatggcatttaccttctccataaatacaaacatcaattgtaattaaagtaagcttatgcgcatacttccttacaaatgttctcttgcacaagacattctattaaccgaaaaaatgcacccatatacaatcaaggcggctgcgctacctagattatatacacgtacttccaaggtgtagtttgtacttacatcacacacatctccttggctaaattcacatacatgcatacccaaagcaatttggggtaccaaaaattgcacatgtacaccgtttgggatttctaatacctatacatacacaaactntatgatgaatcttgactttctacacaataaggtgctacatattcatgctcttt

SEQ ID NO: 62240 - DNA, 227 bp, Glycine max
gacctatgaaactcagcttatgcctaaccaaattaatcaatttatcttcaacttttcttacctataagcaagaattaagaaaaaatactgtgtctttccaaactgtccaaatggacaattcgagattcaatacaacgattaatcccaattgtccatattaatcgttgtattcaatctcaaacggggaactatggttcactcacaatgaggatgatttttatatttca

SEQ ID NO: 62241 - DNA, 382 bp, Glycine max
  unsure (1)..(382): unsure at all n locations
atcacatctgcacatgccataacactggcaatcangatgagatagaagacaaagtgtttacatgtccaccaataatgcatgacttaagtgttctgctacttatcaatagaccataacaaaaatgacttcacctttttctacaagacacataaacaagctctccctctggccatcagtttagctccattttttataccaaaggacttaatatgccctttactgaaaatgtttggagaagattttatttggtaggaaatattgccaaggaatttgattgtcagcagtggctggcctacanatgaattntacgtacaatggcaacatttgattcgtacagcctatccactgcgaaaacggcttcgcagctatatcattttaagct

SEQ ID NO: 62242 - DNA, 303 bp, Glycine max
  unsure (1)..(303): unsure at all n locations
gagtgacgtgtccagcttcaggacgacgaatataccgatttccaggaaaaaatagttcgccggcggtgggcatcactggtcacccccatggtcaagttcgatccagacatagtcctcgaattttatgccaatgcttggcctacagaggagggcgtgcgagatatgatgtcttgggtgaggggtcagtggatcccgtttgatgcagatgctatcggccagctcctgggatatcctttantgttggaggagggtcangagtgcgagtatggtcagaggaggaaccggtccgatgggttcgacgag

SEQ ID NO: 62243 - DNA, 419 bp, Glycine max
  unsure (1)..(419): unsure at all n locations
tgaatagttgaagaggagtcacactctatccaaagatngttccactctttcttcttggctatttccaaagtaaggatgacatccaaaatctcaacatagaggggagattgaatacctatgttagtagagaaaccaccaataaaacctctagagtggtcacgaaacaattggccaaaaccaacatgaccagggaccctctggcagaaccgtctgtattacatttaatgattccaagctcagtggcaacctataaaacttacttaataagagtggctttaggagggtggatgttgactaaaagagccttaagaatggtgaattttagcatagagtgagccatgtgacctttagatcgagactccaccagagaggaagctgaggaaatgagatcggtagcaacctgacaagaaacaatgaaa

SEQ ID NO: 62244 - DNA, 451 bp, Glycine max
  unsure (1)..(451): unsure at all n locations
agcctttcaattcattctatgtacccgngtgttgttttatattttgttcangcaattttattccccgtttcatttgctatttatacccccttttgacgtgcttaagccatttatttaagtcatttctcgcttaatctaaaaataaaatatatcttcaccgatcgtttgaattgtatcatccgttacatttggttaaaatgaattccgaccgttcggtcgtgccgtaaccacgttggaaatcaaaaaaagaggtaaaataataatttaataataaaaaaataccttttagtaaagtaaagcaaaaaatcaatcggacgttttctctctgggatttctcattcttaattgaattgactaataactaaagtgaaattaaggctaaaatcaacttggctagtcaagctcgtccacacaaatagggttgtgaaagttatcatttcagtttcttacc

SEQ ID NO: 62245 - DNA, 418 bp, Glycine max
  unsure (1)..(418): unsure at all n locations
tccatcaagtggtaatcagagcacaagagcttcaagtaggtgctctttatacctccattaattntttgctttaccttctcttccattggtgtttcttcatttttctccatgtatctcctcacatttcttgtgctaaatgttgttaacatgattctttaaagtttccaccggctaaacttgctatagaagctagatttggttttctatgattcaaatttcttgttcttgttcttgaaccatcaattgtgttgagtttaggttcctttgagttttgtcttgttattttttgtggctgaaacctaaaccataaaattcttacaaaataaagtagaagaaaacctcaaaaatctagagtgacttgttcacctattgtagttttgtcataaaagtcatgtctagtcatgaaacttgtcacata

SEQ ID NO: 62246 - DNA, 427 bp, Glycine max
  unsure (1)..(427): unsure at all n locations
tggacgaatctgaacctaagtttctgatgtgtgtccactattaaccttacactatcccaccnntnctttccctttctctctctcttctctcaaatcccaccgaccctacccttcttccctctctttctctaaccttcgcagtccttatttctacttcgaaccccttcttggccctggcccctccttttaaccttcattgacaccctcgatgacaagggggtcgccttcccctttttctctctccctccaaatctaggactccaacaatgacttccttctcatcaagtcggtccttacacctcctctgttggctcaaccctgacactgtgcaccactgtctcttcctccgatggatgcctctacatcgataaccagatttgcgagggtgtatggtggaggctttgcgagggtggacttgcaatttgtg

SEQ ID NO: 62247 - DNA, 371 bp, Glycine max
atccagcagccacacgaatcctgtacaataacaccattgtagtttgctttttataagaagatttctacattaaaaaaaacctagtgaacataattattttaacagaagatacatgtgttataaacaaaacaaaaatacctaacaacatgtgtcatttctcacttctttagtaaaatccttctcgaagaggtaaaattatgaaaaaaataggtttacaagaaaattatctctgtacatgacaattcttttgttgaacacaagcttagactaaatacactagaactcaagactcaatgaacaccctacaaacatatttatatattacctatgcataggatctctcatggttaaaaaacctactcatgttctcg

SEQ ID NO: 62248 - DNA, 347 bp, Glycine max
  unsure (1)..(347): unsure at all n locations
atctaacgccgactctgctagtctaaacatgtttaggaaatattataatatcttatattgcctattttcatgattaaaaaagatgcttacataataatttagatgttcggaaacagnntaaatttataattagttttttttttaaaaacacccgctgctctttttaatctaaaaaatctgcgacttatgtttatttgccaatacttgtacctccttttataaaccgttttcatactcttgtgccgtgtcaaagctgattattcttataaccattttttagcaaacttatacaaacatttttattnattataatggagaattggagtaagttaatttttgtttttatt

SEQ ID NO: 62249 - DNA, 408 bp, Glycine max
  unsure (1)..(408): unsure at all n locations
aaccaaacagagccaagggagaaaactcttgtcaacacatcaaccaaaatcacagcttttctctcttaaggaccacaagaacaattccttcgatccaattccgtaaccggtggatcgactccaaaattttactggaagtctatagtgcataagcctacattgtgacgcgtgggatcgactagcaaacatccagaactcattctgtactactctntccacagccaaccacacacaagcattttctgcaccaagctaaaattctgctgcacctattttgacagcaaaattctgcataagtgcagatttcgaaaatcacacttcctctcatccaatcttgctcaaatcgaatcctacaagtcccaaatcatgtatcanacatgtctaaaccaaagccaaacttcaaaccac

SEQ ID NO: 62250 - DNA, 229 bp, Glycine max
tccccgggccaaaggaaaaggaattccttatgaaaaaagagaggattccatctaagggggaaaccatagaagaaaaaattcccttccagaatggggaaagaaaaaaataacaagggaaaaatggtaaaaacttcttgtcttaatctcaagaaaccacaaaattttctccaaggtcttggaccagacaatatctgtacaataccgattgtccccaatgacaaaagaaaga

SEQ ID NO: 62251 - DNA, 225 bp, Glycine max
agataggggatgaggaaaagagaaagtagtagtgaggagaataaattatgggatgtaaaaaaaaaaattgagataaaagggtaaagtaagaaaagtggataaaatagagaaggaaagagaaagagtatgatagaagaaggaataagagtggagataaaaagaggaaggaagaaagaatgagagtgagaggtagaaaaaaaaaaaggggagagaaagagaagaaaa

SEQ ID NO: 62252 - DNA, 407 bp, Glycine max
  unsure (1)..(407): unsure at all n locations
tctggtgggacatctngacttgctntccaatctgttattctctacagattctgccttcttctattttcagattgggaatgcctctaacagcacctttgtcaatgattttcttcatgcctcttaagtgcagatgtccaaatctttgatgccatattctgacttcatcttctttggaggatagacatgtggaggagtagctggtttcttgaggtgtccataggtaacagatgtcctttgatctgctgcccttcattaaaacttcactcttcttatttgtcaccaagcattctgactttgtgaagtttacattgaatccttcatcacacaactgactgatgctgatcaagtttgcagtcagtcccttccccagcagtactttgttcagactacgaagtccatcatgaact

SEQ ID NO: 62253 - DNA, 381 bp, Glycine max
ctggcagctaaaactgccacaagctatgtgttccgtagtgctggctacaagtttattgacggaaacgaattcagtcgcatagtatatcataatccgtcgttggaaatgcataacaagctgcgtcactttgtgattgaattaactactgatccctgtgtgcctatagttttatcgcaattaacgtcgctatctcctaattatggacatattagttttcggtgcctaaatcagtcactaaacatatgttgggatcaaattgttccgccgctagagtcagtggctatgtgggttttcttccattagtgcgtggaaagacaagttcatcactgcatatctgtcactaaccgtatatgaatatgtatatatatttaactagtgaaa

SEQ ID NO: 62254 - DNA, 409 bp, Glycine max
  unsure (1)..(409): unsure at all n locations
tatacgaatgacttggagagtttgcagagaggatatcatatgctctttgttgctacgangnaccatgtgattctgatgacagttntgctgaagccattgacactgcaaagcaagctgattttgctgttataattgctgggcttgatgcaacgctagagacagaggatcatgaccgagttagtcttctcttgcctggtaaacaaatgaaccttgtttcatctgtagctgatgctactaaaaatcccactattcttgttcttattggtggaggacctcttgatgtcttttttgctgaaaaaaatccacaaatcgcatgtattatttggttgggataccctggtgaagctgggggaaagctctacctgaaataattttggagagttaatccacggattatacttataaaaga

SEQ ID NO: 62255 - DNA, 403 bp, Glycine max
aacgaagatgatgatcttagcctctttgtaaaaaggttcaacaagctcctgaaaatcagaagaaatcaaaggagaccacaatttaaacctaaaagaaggacataagattcatcctctactccaaaatgctttgaatgcaatcaacctggacatctcagcgttgattgcccaatcttcaagaaaagaaaggagaaatctgacaagaaaaattttagtgaaaagaagatgaagaacgcctacatcacatgggatgacaatgatatggaatcatctgaagattcagaaaatgaagagataaatctatgtctaatgactaaaagttatgacagcgatgaagaggtagcatcttcaaataacaacttatccatttcttttgatgaactacaagatgcaatttcttatt

SEQ ID NO: 62256 - DNA, 414 bp, Glycine max
  unsure (1)..(414): unsure at all n locations
cggatgtgattcttgcattatttaaggagatatgttacacttcatctcaaatttgngtattataccagacaagggaaccattntgctaacagctttgtgatcagaacgagtcgggtggactgggccacgtgtaactttttgtattgcattcatcacattgcatcaaattttaataaagactttaaaaatattgacttataaaaacaagtnatcaatatgggtaagtttctaaccactttctccatcaaataatttatttattatgtgttcaacatatttattactcattgttttgtcttttgccataggatatgagatgaggaaaccatgatttgaggcaaagttgctcacaatgcgatcaaagtttccacgagaagaaaattggttagaccaaatttccaagagaaaatggac

SEQ ID NO: 62257 - DNA, 393 bp, Glycine max
aaagaggtctgaacttttaagcgtaattcttaaatgagtcaaaggtgaaaaaaagcatacacatgacctttatttatagcttaagggtcacacaaaaatagaggatttgtggagcctaattttgaagccaaaatttcactaattatgagtagtgaattttagctatggttcatcccactaatccaagatcaagttcaagattctccactaggtgtgtttaagtgtcatgaggcattgtaagcatgaaggacatgcacaaagtgtgactatatgatgtgacaatgaggcgtagcaaacacatactcaccttctcctctaaaatttaattggattggggttctcccaattcaattaaatctatttctcaacacacacatcagatatgtacttaat

SEQ ID NO: 62258 - DNA, 384 bp, Glycine max
  unsure (1)..(384): unsure at all n locations
aaattgtgccttcaagttgactaatgttaattccgctgacaaccttgtgaaagttgtgcaccccgaatacaaaggcttctatgaatcattatctactttctcatacaaatctgcatgtgcttgttgaaaactatcttgcccaagattatgaatcatgtcttcnatacaatttttgatgtctttatcaaccgcccgagtgcgagcaattattggcatgacaagaaattccacatgtcatatccattttgtgtaattcaaaatgatctcgtgacatataagatgtgatcatatttcatttactgagtggcatctcccgttcaaacatttaacacatggacagaaaaattttccacccaacttgtgcaatacacttagtaatttatg

SEQ ID NO: 62259 - DNA, 230 bp, Glycine max
aagaggacccccgggaaccttaccctacgaagacactgacaaaacttatcctctcttttaggacaagatggaggctggggtcaagaaatttcttccataaacctggatgcactgtactgcatgtcataaagctaaatctgacgagatcacgcatcctctgctgccttgatgtaaggacgtccctcacactgcacacattatttcacatgatacatcatacaatgctaacg

SEQ ID NO: 62260 - DNA, 366 bp, Glycine max
actaagctggaattaaaagttgattgagcaaatgttatcttttttatttaagcgcacaaaacgattggttgctcataccaagcatattattctcttgagtttgtgcatacatacttattacatcaaaaaatcatgatctataatatatgaccaaggcaatgtttaagcagagaaattgtttggcaaataacttgtttatatgttatcaatggcggatgaggaagccttattccccaataacacaccattcaccttatggtacctccatgacgggcctcccgtcacaaaatgaatatggaggttgggtagttgtggttgtcaacaagttgtactatagcttaaaatgcatagcacatgcatttacct

SEQ ID NO: 62261 - DNA, 410 bp, Glycine max
  unsure (1)..(410): unsure at all n locations
catataaaactcaaatcaagtttcaagctatattaaatattaatgagttaagtcgaattgaaccanactngagtaattttccatcctacttatttgtatctaaggagntattgatcaacaaatagttgatggagaattccacccaacacacccaaaacattttgcatcatatgaaacatttggctcatgaattaaattcaacgagccaattatcaaattgaacttcaaactattttcgaattggtttggttcattgtcaccctacagacaatgactccctttttgtagattttcttagcctcttattgggtatgatgtggcctctccaattattttggttctctctgctcttgtatttataagtctagcaacgaatttctctggtgttataaggattgtggtgtcaacat

SEQ ID NO: 62262 - DNA, 409 bp, Glycine max
  unsure (1)..(409): unsure at all n locations
ttgtactggagttgaactgaacgcanatcaacgattatttttattactatgctcacatgtttatatgaagccaagaccatctcgttaatccagttcacttatctctagattttcattttccatacactgatacaccgatgccaattttctttttgaaaatatttgccaatgtggaaaggaaactatagctttccagttcgtgcaaattgcaaaatactataaagtaggcaaatgtgcggcgccagctatttcctgttatatgttacgcggagaattaccaatagccttatcttataatttattgatgggaaattgatgcatttgttaaacttaattaaagcacaatcagtgaaacaaactctgtcgacctgacaaccttaattggttgatataattttttattattatt

SEQ ID NO: 62263 - DNA, 451 bp, Glycine max
  unsure (1)..(451): unsure at all n locations
agcttgattcatttggctttctaatatatttttactggtaacaaaaataaataaactatatgattttaattataataacaccattattattgtgtgcttttggtgttcttcaattttattcatgtttaatccatataataattaaattaaaggtcagaataaataattaaaactttatttacaaaaatcatatgaaattttatcctttacttttttatacaaanattagatgcagntctttaaatatatgtgtcaataaatattgatcggttagtaaatattatgagtttgaatctcattatggatgtgagtattttgttattaagtaatatataagtatgtctgcaagtaacttttaaatcttcaattttcattaaattataatatttgggtgcataagaagtctagtgagagagagagagagagagagagaaattttattaaattaaaa

SEQ ID NO: 62264 - DNA, 425 bp, Glycine max
cgcttgctcttcttctggtggcttgcattgctattattcttatttgaaggccattaacaataataagattgtgcaccaagagggtgctatagatgatgagaatgaaaatgttacctcaattactaatactattaccactattactactactactacccctacagaatggtcatatccaattcgtgtggggtggattccagtgaagagggttctaatggggtcaatgctgtggagcaaggcaagcaaattggaggagaacattgcatggcagagagagaggggatcccctctgcttggcctacaaaggcagggtcctgatagtgggtggcaaagccataactcggaatcaccggtgtggcaaagaccaatactgaggggggagaagtgtgagttgccaaggtttagtggcctcattctctatgatg

SEQ ID NO: 62265 - DNA, 330 bp, Glycine max
  unsure (1)..(330): unsure at all n locations
ttcatggaatcataactcaatgtaaaaaagtgctccctttttctgctcccctgttttcattcactaagcctggtggaaataaagctgcgtgctcatgcatgctntagcaatgttagcattntctgctttttatttgatgtggattgattgaggaggtctctttttctgtggactaaatcatctctcaagatgtaatntctgctttttcatctaaatatagattcaacatcttaatcgtaaaaaaaaatattaacaataattagtatgcaactaataacatatatacgtggtatgaccttctataagctaatagcttaatggatttattta

SEQ ID NO: 62266 - DNA, 408 bp, Glycine max
aatactagacgagaaagacttctcatcatttatgaaatgcatattactaccaaatatcatcatgtcatccacatagaaacataaaatgacacattcattatcatcaaattgtttcacatacacacatttatcactattattgatttgaaaaccatatgaaagaaacaactggtcaaactttttgtgccattgctttggaacttgtttcaaaccatataaagatataacaagtttgcaaactttttttttctttatctggttctacaaagcctttaggttggttcatataaatttctaattctaattcaccatttaaaaaagcagcttctacatccatttgatgaatttccaaattaaaaacacaagcaattgtaattaaaactctaatggtagtaactttacagatac

SEQ ID NO: 62267 - DNA, 421 bp, Glycine max
tgagtataattcattgtttgtgttatgagcctacatcaatcttttgtattattgatgtttctggcacaatcaagtgatagttggtgtctccatatgtgcatacactgtgattatgttttcatttctaaaattcatttggagtatctactgttgattctagatgagtgatccttcttgatttaaaattattgtctcctaatcaatcgagtgttcatcttattattggctgctcatcttccaatcatgtctagttaaaatgcttgataatctttcttgttattacttctaatacgaataaagagagacttcacctttgacaatcacgttaagatgttttgagaggaaatacttgagtagacatgatcattgttacctatagaagaaagtcaaacttagtaagacgtgtacctgtattccttga

SEQ ID NO: 62268 - DNA, 334 bp, Glycine max
  unsure (1)..(334): unsure at all n locations
taatgggattgtgcaccaagagggtgctcttgatgatgagaatgaaaatggtacctcaattactaatactattaccactattactactactactacccctacataatgctcagagccaagttgtgtggggtggatttnagtgaagagggttctaatggggtcaatgctgtggagcaaggcaagcaaattggaggagaacattgcatggcagacagagaggggatcccctctgcttggcctacaaaggcagggtcctgatagtgggtggcaaagccataactcggaatcaccggtgtggcaaagaccaatactcgagggggagaaatgtgagttg

SEQ ID NO: 62269 - DNA, 415 bp, Glycine max
  unsure (1)..(415): unsure at all n locations
ataaaagaaaaaatattaaacctaaattaacatacatctcgatatacaatacacaaattattactattaaattatgtaaaataaaatacgaatacacaagcgcgacaatatcagtatttccggtactttagtataatgaatggtaaaacatactgtcaaaaattactttctaatcgatatatgtctatgcggcaaagaatttatatatgttctaacaaataaaaaggtagaattgacaataagaaaataaagagtatgtaggggcttacaatgatggtgataagggaaatactaggtcacccagcaatattgctgatgcacccagcaaattattgaaactaccattttgccttttaagataaaattataaaaaacgcgaattacctcccggaagacactgtntgttcgaatagct

SEQ ID NO: 62270 - DNA, 321 bp, Glycine max
  unsure (1)..(321): unsure at all n locations
ggaaaaaggaaaacaaggttaagtncacattgggaaaagccagctaatgaaggttcattggaatttcttctataataacttaatattgtcctttatatgaagtgactcattttacccggatgattttcattgcatttgagattgagttttctttctctctatctgctaagttataaatatgatgactgcaaaaaatattttcctaggggaagcttgatgataaacaacanacatactattnttgtggtcttttccttaccactcattgattattcaactgctgtctggtatactacttcacagttttctaatgtgcatatt

SEQ ID NO: 62271 - DNA, 398 bp, Glycine max
  unsure (1)..(398): unsure at all n locations
acctgcggcatgcaagctcgaccctcataccatttgtgacagacattcngtgtctgtctatggggctcccttctttgtaggattctgacaaactacgattgtctatngtggattggtcaagaacctccagcattgccttgatgatcactgccttgcgaagcacggcaaccatgtctgactccatcctgtcccttaagccgcggagaactttggcaccgcgggtgcactttgtctcttcattcagttgctgaagatcaaataagagattggtgatctcttccttttacacttgattgtttaacttcttggaaaactgagagaggctgccgtcttccgtggagatgatattccctgttcaatgtcaagatcgacgtcttcagggtcttccgagcctgttc

SEQ ID NO: 62272 - DNA, 292 bp, Glycine max
tttcttggtgaataaacctttcccgggtaagctatcttgagacacaccaggtcttttcctaaaggaaacacttcgaatttgttaattttttattttaataaacacttacaaatgtttattgatttatgccaaaacccctcttaataaacattccaccggctactcataatctttggggtctgaaggaaatttaaaaaaagacctcattattataaagtataaattgaaaggagactactaatacttataatagtactcattttttgtttttgtataaaaaaatgatacactc

SEQ ID NO: 62273 - DNA, 343 bp, Glycine max
gcttagctagacctcttagctatattacacctggagatatgctgctttgagaagcaattgcctttcataattaagtgaggcagcacaagagccagcctattagccaggactttggacattattttgtagacacaccctatgagagagatgggtctatactcattaacagattgggggctattggttttggagatgagggctatgaaagatgcattacttcctttggggaatctgccattaatgaagaattcatcagagaatatgatataatcaggttctatagtctcccaaaactgattgatgaaattgaaattcaaaccatccaggccaggacttttatctt

SEQ ID NO: 62274 - DNA, 414 bp, Glycine max
aatgtacctatgaatggagcctctgctatgttaatatgttctccctgagagaatatggcgagggagattccgaatgacagattctattatggcaccacaatgatcacggacatatttattaattgaaccaggatgaacatattccagataaatataagaacggtcctcaacctgcaagcacatatgttaaggttttaatgctgtcacagaataatgattattaatcttgagtagctaattatgaagtaagagattgcttactatttcactgccaaaatactgtacgatgtttgaatgttttaaattgctaagaactttaatttcctggagaaaaagaataaactaataagaaggataaagaggatctataaaataacatatctttcaaactattacggaacgataaatatatat

SEQ ID NO: 62275 - DNA, 470 bp, Glycine max
ggaccttaagcgacgcggctgcaacttcttactataggcagtttctttgatcttctttcaaaatagattgagcaatccctgcagcaagttagatggttcctgactcctgctctatcttcaaaagccacatccttgaaaaataccttgcttctctcttgagcttgaaaatcactgaatacagcggcaccacagagaagttacaacaaagctcatcacaatatgacaaggagagagaggaattgtagaataatataagaaatcttgaccagacaatattgaactaaatctagaagacaaaataattaattaattacctgtcaagatttaaacttaggctgaggatgccaacatgaattgtgaaaggatgaagctcccaaatggtttctagggatgggtgacatatattacactacatgtatgtcttaaaagttgaaatccccatatgccacaatctactagactcgccacta

SEQ ID NO: 62276 - DNA, 409 bp, Glycine max
  unsure (1)..(409): unsure at all n locations
tgtacccgaatttatttggacaaatttagattatantattccttanataacactctttaagaattatttgcccattctgtcgaattattattatttccacaactacactattcatgctgtaacagaagaaaatgttgagtttgttgagaggggaaaagtggtttattgacaatagatcgggcacatgaaatatgagattagtttggtcaggtgtccattcttgtcaattaatgttcttctacagcttacattgttntattgtcaattaaagggttatacagtttaattatttttaatattacttttaaaaaaatcttatnttttctatcatcataacattggtgcagaaaatttataagactcaaattcaaaattttatttaagaatatcaacttcaatactattcaaa

SEQ ID NO: 62277 - DNA, 273 bp, Glycine max
actttattatttttatcctgttttgcatatgatatgatttactcatttgtaactttttattatatatgatattgaatttataaaaatagaatctagagagtgataatgatatcatactagcttatgtagttcttgcttattcgttggatattttataaataaaaagctccaagtgtttaaaagtaatgtgataccaaatatataaatactactaaatatgttttgctacagaattaactagagatgttaaatgattacataaatacgccattt

SEQ ID NO: 62278 - DNA, 284 bp, Glycine max
  unsure (1)..(284): unsure at all n locations
gaaagaaattttttttactcgcaaaccaaagagaggggattataaangaagaacatccaagtataaaaaagaaggggctggcgtctttaancaaggagcgaaaaaaggggattngacttttacttattacaanaaataaannaggagtgagacacggtaatatactggagtgatatttgatggaagagaaaaataaaaactatttagcaggaaaaaaaataaagattttttctatcataagaagaagccnnaaaatataccggaattattcatttagacacaga

SEQ ID NO: 62279 - DNA, 409 bp, Glycine max
  unsure (1)..(409): unsure at all n locations
catgaaccntcaatctttaatgtaatttactagtttgtgaagtgacaattaaagacttctattaaaaaactaaaatagaaaagctttcctttgacaaatgagtggttaatgacatttgataaagaaacacttgttagaaaaagatggttctataaataaataaataaaatcattgttatgcgtttctgcatattttgaaattgactaaaagaaaataagataggtctgcatatatacttcaaaaacttatggcagtcccttccagtttacaagcatataacatatggaagggagaagcttgtgtgtgcctatctttctttcacggtattcaagcaccaaaagcttctcttttcattatatacttgttgcgagacttggacatcatttataatgatatgcccttcgtgat

SEQ ID NO: 62280 - DNA, 379 bp, Glycine max
  unsure (1)..(379): unsure at all n locations
agactgnngnctatataagacgcaccaatgccacatgcataaaggctatcattttacttgactaanattataatttttattttattaattataaaatattaaaaaattcatacacttgtattaattaatacttgactaaaacacttttattttatagctaatttattttttttattttcggtcaaagatcacgagtatttctccaatccactagatcaaaaattaattccacttgtaatacataattgtcgtaatctaaaacatttttacatacgaatgtaatctgatataaaatctctgaaaaataagaataagttcacctttatttgctttatagaaaaattcagttaatgtttcctttatttgaaagcatatattt

SEQ ID NO: 62281 - DNA, 372 bp, Glycine max
ctgcagctaaacaaatagacccattttttttttttgggagaaattgtggaaaagccttttactcttggacaggcttaaaccatggccggactttgcactacttaatcatggcctctatctcagaaatgtatgaataggtgggaggaagataagaatttctgaatattcccgagtttgcactggtatgactacaatcactgccaatgggaacatatgtatctagacctctggactttaaatatatatatctattttgtgaccaaaaaaaacatgacttggggagctgcacaatgccactacgagatgaggactgttaacttgactatgtagccccaactagctcttatttctaaaagggctcttgatttaagg

SEQ ID NO: 62282 - DNA, 352 bp, Glycine max
ttgtgttttctttacaatggaagcccactttctgccagccaatttatgtgaaactaggggggctatagcaagtgtttgtgaaacattgtaagtttactttatgcaaacctcatctatttgaaaaaaaacatgaatttacatgtagcaaaacctcattagtctagacagaacattgatgcaggtaatacaatattgaagatgacaacctaatttggctgaaaaaacgcatattttagcttcctcctattgacgccaacaaaaagatgcacagggacatttgttggtaatccaaattgtaatttctgtaacctcgcccaattgctatttgaaaactgtccatttggtaggcttg

SEQ ID NO: 62283 - DNA, 395 bp, Glycine max
ttcaaaatgttgttaactgatttccaacgttccaaaatatttttcaaatggtgtaatcgattacactatattggtaatcgattactagtgtatctgaacgttggaattcaaatccaattgtgaagagtcacaaccttttataaaacgcattgtgtaatcgattacatgattattgtaatcgattaccaattgtaactcttgaataaaaagtcaaaagttgtaactcttaacatgaatttctcaaggttatacctctttcaatggttttcttgaccagacatgaagagtctataaaagtaagaccttgacttacattcaaaataacttttacaactctccttgttcttcctttgacagaaagctttctaagttgtgttttccaaaccttgttttct

SEQ ID NO: 62284 - DNA, 416 bp, Glycine max
  unsure (1)..(416): unsure at all n locations
tttgaatntgaaatgcaggatggggatcttattatgctgtttatggcaactcatgagccccatttttcaatattaagagaggtgattttgtcaagatatcaatagatataatcatgtgtagtttaatttgaaaaatcaaatatcctgaaccatgtgataaagtgatttttatttttaacacagcatgtagcaatagctacagatttgaaatttactattttacctttgtatacaaaattaattcctaacattctaagcatgtacaggatgtaccaatacagcggcagcactcaaaagatgccgctaagcctttcaaggtataataaccgatttacattctacaactacaattttgctgttgatatcatcatgagccttatgaatttaataactgtctgcaagttttgcatatttgg

SEQ ID NO: 62285 - DNA, 449 bp, Glycine max
  unsure (1)..(449): unsure at all n locations
agctttgatgcaacatatggttaggttaatttatcaacgagatgatgcgctccatgagaggttggatcaaatggagaatagagatcataatgaaaaagaaaggaggagaagagggaatgatggtgttcctagacaaaaccgaattgatggtattaaactcaacattcctccctttaaaagaaagaatgatccggaggcctacttgcagtgggagatgaaaatagagcatgttttctcatgcaacaactatgaggaggaccaaaaggtgaagcttgctgccacggagttttccgactatgctcttgtgtggtggaacaagctacaaaaggagagagcaagaaatgaagagccaatggttgatacatggacggagatgaaaaagatcatgangaagcggtatgtgctggctagttactcaaggggacttgaaattaagcttcaaaaactaa

SEQ ID NO: 62286 - DNA, 244 bp, Glycine max
agaaactttttgagtctcgtaaagagatccacgctctggtaaagaataaaatattgtcattcagtaagttcttattgatacgatcaaccactggtttaagcttgtcattaaacatgagtgctgctctattttcctcgtcaacacatattgacccattatcccatgaatatagatttatgtggatgcagcctataggtccagcctatcaaggaaacactcttgctcaagtgcggcaaatcctgca

SEQ ID NO: 62287 - DNA, 402 bp, Glycine max
aaccaacttcactatttctagatagaaattccaatattctatattacctgctcattaactagaggaggaaaagcctccaacatacacccgcctagcatgttatgttacctgtcattcaattcatcaaagatatgccataatcaaggaaagtcatgctaaacttataatgaaacttaaataagactgttgtcagtctcagcaagcctccatactcggaaagactaaacttaaaatgttgtgttgacgaaagtagtgtgtttctactctttttctataatgactctttttcttctcaatgaaagagaatattctctcccagcagcacagtgatactaaacaaacaaaagcgccataaatagaaacacatgttataagaagacagaacacacctttcacctacag

SEQ ID NO: 62288 - DNA, 419 bp, Glycine max
  unsure (1)..(419): unsure at all n locations
gagtagaaacatgggaccaactcattttatnncaatacaaatgtgttatctagacaagatctgagagaccatacaagtttcctagcggtttctaattatatgggccattaagtctatcatatgctgacaatagccgagaagcccatgaatttcttcaggggcggagtaagtgtccgccattgccttggccttggctaacaatcggtgaagttcttgactcctgttcaaggtgagagcaaaccgatccatccacatggttgcctcttggtgtaaagagtcgatcacccttcctctagcctctatttccgcgtatacttgggcatactcatacgcgaccctatgctcgtgggccgtggctagacttaactcttcttggtacttggcgatgatagctagcatgttggtctacctctcgcata

SEQ ID NO: 62289 - DNA, 321 bp, Glycine max
aaacggccggccaccaaattcaatagtcacttttaaaaggacatagacccttacacttcttaagatttcatatttcatcctaaaatgagaaattcattattcaatattcatacctttttggcttaccaaatctgttggttcatctgatagcaatcaccgggagaaagaaccctatatcttcttggtgaatcttaatcttgatagaaacagaattatcctttacagctctctttgcctgtcacatgaataagaacactttaatagccaacagcaagttccatactttggtaagcataagctgaattatttggtgtgttgaac

SEQ ID NO: 62290 - DNA, 390 bp, Glycine max
  unsure (1)..(390): unsure at all n locations
tctatccacccctctattaactaagataacttccttaataataattacggatgaaaataactcaactaataatcaaacatcgaacataattactaataatatagtaatatatatatcacggggttacatttcccccgcgaacactaggtccacgaaactggacggcatgtaacctactatcttctcatagtagaacactggcagagtgtctaccatcatggtgaggtgtcactgtgatcaagcaagctagagacctagcatgatcacagattcacctccactcgctatgtttctatgaacccgggtataaggccgctattaactcacagcgtgtgcaaatagcgttggtatgcgtgtgcatcanatgaataaatatctacctcatgcata

SEQ ID NO: 62291 - DNA, 397 bp, Glycine max
  unsure (1)..(397): unsure at all n locations
gcttcttatccaaggctcatcttggtggagaagctccctcctttattgcttattccctaanggatggcgcccnctctcaactaattttctttggctttccgcggattctcctgggggaaaaacaccatttaaaggccccattggaacttaaagaatccagctccattaaaacccccacagccaaccttccatcaagtgggtaataaaacacaagagctttaagtagtgctccttaaacctcattaattttttcttaacttctttccattgtggtcttcattttctcctgtatctctccatatcttgtctaatgttgtaacatgattctttaagtttcaccgataaactgctataaagttgatttggtttttaggttcaaattcttgttcttgtttga

SEQ ID NO: 62292 - DNA, 418 bp, Glycine max
tgactagagtcatcaagagattataaatatgtgttcatgtcatgttgttcaataaacatcaaggatcaatccattttgaatcatctatcttcaatatgttttcaacatcatctctcaaacattcttcaatcaatctttcaatatctttctacagaattttctgaatcatttctcttcatctttctaaaagttgttgatcaacactttctcttccaagaaaagttctttgttcaaaaacttgtgttattcatctttttcattctcttctcccttttccaaaagaacgaaggattaaccgcctgaattcttttatgtctctcttcttccttacaaaagattcaaaggactaaccccttgagaattcttttgattctttccttccccttaagcaaaagatttcaaaggactcaccgcctga

SEQ ID NO: 62293 - DNA, 449 bp, Glycine max
  unsure (1)..(449): unsure at all n locations
agctttcgattcattctatgtacccgtagtgtgtcctattgngntncgcgccattttattctcgttntggttactttttataccccctgttgacgtgcttaagccattttacttaaatcatttctcgcttaacttaaaaataaaataaatttccaccgaacgtttgaattgtattatccattaacttcggttaaaataaattccgaccgttcggtcgtgccgtaaccacgttggaaatcaaaaagaggtaaaaaataatataataatcaaaaagacatcttttagtaaaataaagcggaaaatcaatcggacattntctctttgggatttctcattcttaatcgaattgattaataactaaagtgaaactaaaggctaatatcaattcgcctagtcaagctcgtccataaaaatagggctttgaagtttgtcatttcattttctcacta

SEQ ID NO: 62294 - DNA, 423 bp, Glycine max
  unsure (1)..(423): unsure at all n locations
tgtcaccaacanaagtctgaagaccatcgaacttgtccattatctttctaagaagagaggaattatcttcaactggtaggttgccttcatcatcagcgggttgagcaccctttttgacccaagagccatcatgctctttgcggtaaccaaaagaagcaatcacagcagcaccaattaaaaaggatctcttgattggaacgtaaggttcagaatcaagaggaatttgaaaattgcgaaaaaagagagtaacaaggtgtggatatggcaaaggagcatttaatcgcaatgccttatgcatgcgatatctgactaaatgtgcccagtcaagttgacacccggtatgaaaggcccacatgataacaagatcttcctcagaaacttgggcaaggttggaagatcgtggaagcaaaatctgcacaataa

SEQ ID NO: 62295 - DNA, 439 bp, Glycine max
  unsure (1)..(439): unsure at all n locations
agctttgtacttgaataattgggcttcctgttttacatngntcngngnaantagcaaattaggtagattagatgggcctaatcaacgcccatccattccttctaaggattcactctatatattatggttaggtagctaatcacttcattttgtaaaaaaacaaaattagttacttgtgcaacctgctctcttctctcaattggtcctcattcttcgacctcttttctcttttgttctaccattttcttgcacacaaatattttatttttccattgatgatgatcatgganggctaaacaatcaatcaatccaacgatccactccatgcaagggtgagattgagttctgaattggcatctctaatctttgcgaatggtcatctttctcttccatcctattttggactttcatgattacgataatgcttatgattgaaaat

SEQ ID NO: 62296 - DNA, 423 bp, Glycine max
tcccagttatggagaggtaaatcctctgttggtttttccttgtatgtacttgatgtaaatacttgtatatctatttaatgatgttttgtgtgttcactatgctatcagaccttcattctaccatgctttttccttgatcacgtggatgcatgtgttttttgtagatgcaattgcctttggtgttttgatgatgatcatgatgatatgatgcaattgatgcaaatgggcttttcaagattaaattcaagacaatacttcaagattacaagtcacaacatcaagatgatcactagtatattaggaagggaattcctaattcaattagcaaaaggtttggccaagtaatttaaattaaaaagtgtttttcaaaggatttactctctggtaatcgattaccagaggatgtaatcgattaccagtggc

SEQ ID NO: 62297 - DNA, 429 bp, Glycine max
acttaatcaacacaaaagctctttgtgtcttgttattccacccaaacgcacccttcgtaaacattcggtcataggacttgctatagtgctaaaattctggataaagcgtcgataaaatgatgcaagaccaaggaaagatctcacctccgaaactgttgtagggctcggccaagtcttgatagcatccactcttgttagatcaacggatactccatctttagacaccacatatccaagaaacaccacactttgcaccaagatatcacatctttccctcttcccatagagtctttgtgctcttaggagctcaaatattatgttcacatgagtgaaatgctcctctatagatttgctatacaccaatatgtcatcaagataaacaacaaccaacttacccagaaaaggctcgagtacttcgttcatgaccct

SEQ ID NO: 62298 - DNA, 430 bp, Glycine max
  unsure (1)..(430): unsure at all n locations
tagtcgagaaattcgaatggacataactctgcatttagatgtccgtttcngngacatatgatatcgagaagttcgaaattgaacaacggaagctctcgacacactcgaatggtcataacatttcactccgatgtctgattcgaggacataaaatatcgagacgctcgaaattgaacaacggaagcactcgagaaattcaaatggtcataacttttcacaggatgtcctattcgcagacataactcatctagacgctcgaaattgaacaaaggaagctctcgacaaatttgaatggtcataactcttcacacaaatgtcctattcgaaaacataaaatatcgagacgctcgaaattgaacaatggaagctctngacaaattcgaatggtcgtatctcttcacacagaagtccgattcggggacataatata

SEQ ID NO: 62299 - DNA, 392 bp, Glycine max
  unsure (1)..(392): unsure at all n locations
agaaagacaccacaagaagcatggagtggaagaaagcctggtatctctcacttgagggtctctgggagtatagcttatgttcatgtcccagacgagagaagagaataacttgatgacaagagtgagagattcatcttcatcggctatgattcaatttcaatagggtacaagttgtacaacccaaacaacatgaagatggtaattagtcgagatgttgtgttcgacgaagaaaaacaatgngactttgagactcatgaanaggaatactacttctttcctccacttgaggaagagaagacaccttaacatgttcaataagagctcaccccatcaacatcaaccactcatgaagacactttgtcatcttctgagagtgaaagggttgtgtcatg

SEQ ID NO: 62300 - DNA, 398 bp, Glycine max
  unsure (1)..(398): unsure at all n locations
aggttatatttacagaaggaaatgtccagaagcaatggtcataaacctaacttaagcctactctgtgttttcagcccatgcatgcaaccctaatactgcaaagctgttaccctaaacactgcaaatatgtcacttgcaacactacaagcaagtcacgagatgcatctatctcgccactagagaaggcgagacattcacatgtcctacgtggacatatctcgccaatggtgaaggcgagagcacccttcatctgtctcgccaattcagaaggtgagaccttctccatgtcacaccccgtaacgccaatggacatggcggatccaacgtggatgtgtntcgcccgtgccacaggcggtacccttcacgtaagcagttttctcgccatctttcatggcggg

SEQ ID NO: 62301 - DNA, 235 bp, Glycine max
catcagagggcgggtcaaagcctacagaaaagaatgacaattcccattgcaaagattgggagaagggtaaagaggactaagaagattgcgagaaagctcctgaccacggattgaatgaaaacagaagaacttttcatagaggtctttggagcgtgcaatatctgaacaatactgcactgtcaccttgtgtacccactatgaaggaacggatacccccaactacaatggtcttctt

SEQ ID NO: 62302 - DNA, 371 bp, Glycine max
gttgtgtagaagagattcttacatattatattcatcttcattacaagttttatgacaaacgtgtcaacccctttgatatgactcttctctcattcagagtggtgaggtggggtgattctgttcatctccataatctatatttatagaacaaacatccttttcataaataaggaaacaaaaccttcgcttatagatgatatctttaaactctaacactatcttacagataatatcctgttaaatatttgctatatcctagagatttgaattgtgttctaacactccttcccttaattaagacttctatacttccacttcaatgtctggcattatggatactcatcggagtcatcctttctgctatgcagact

SEQ ID NO: 62303 - DNA, 390 bp, Glycine max
tgaatacttacgataaaattctgctgcttatagtattcctttggtcgcaaaaccagagatgcaccaccagcgaagttcagacttacttgcggaataatgtcaacattgctaaaaacagaatagccagaaagagatagataaagagtgtcaaaatcttctatttttagaatccaaacatgaatagaagaatgtcagaaatcaacaaaatatgtatgaacagttaagcttaacctggaggtggttattaagtaacactgatttcccctggaaagaacactgcgtacagattgtggaataacagctgcaatctgcatcaacaataattctgctgttaattattgataaatttcctaaaaaggaaaataagatcactattgctaatcacacatt

SEQ ID NO: 62304 - DNA, 175 bp, Glycine max
  unsure (1)..(175): unsure at all n locations
gggcatcacttggtacccccatggccaaattccacccagacatagtcctcgaattttatgccaatgctcggcctacagaggagggcgtgcgagatatgcgatcctgggtgaggggtcagtggatcccgttcgatgcggatgctctcagcaagttcctgngataccctttagtgct

SEQ ID NO: 62305 - DNA, 419 bp, Glycine max
  unsure (1)..(419): unsure at all n locations
ctttaagagcaagaaaagaattagttatacctaggttatatctttttttttacacacnatcccaggcatgcatgttattctacttgcttgcaaattagtatccccaatgtcgatgcaaaacttcaattcctattatttttctcacattcaaactactaaagtgttatttgttaaaacgtcaactttgtcaaacattcgtcgcagcagacaaaacaataaaatcaatcattgctttatggaatcatatataattaagttaattaattccacgttcgaagtatgttacctttgccttattgattgaagttcaagtctgaggggcatctatcaacaaaagcaaatgttggtatgtgattggagcagcctctattggtaaagaagttaattatcgtccctgaatgaaaatgtgttactcaccc

SEQ ID NO: 62306 - DNA, 381 bp, Glycine max
  unsure (1)..(381): unsure at all n locations
ttttttccctcttagaaacaaaagaaagatacggcttcgttctctatcgaaaccgcgaaacaagttagaagatttctcttcgattgaagggttcctctccgtgtgggatttcaaaagagaaaaatggctgtttgtggtggctactaatggttgtgggtgatggataaaaagctggctcattggaaatggttttggaagaaaggaggagaaggatatggtcctcttccaaggctacacacaaagaanaggctgaaacactcaagtgtttttgctcacaagagaagaagatttcctcatacaccacacgttgtattgaagatcgcaacggtcagatcatggacatctatcctatgaacctccagaccaaatttcaagaagatc

SEQ ID NO: 62307 - DNA, 259 bp, Glycine max
ggactgacttacaatgtgggttggctgcatgtctcctagagcccgatgaagatttcattaacatggtaccccattgcatatatgatagacgcttagtatatttggagcataatgcttgtgcatctaattgatatatgattggatgcatagacatgcgatttgagtccttagaatacgtcgaatgatgtgaaaatgaataacacgtgtcgcgttgagatgtgatgttacctgacaagtggtggaatgggatgagttgtgt

SEQ ID NO: 62308 - DNA, 392 bp, Glycine max
  unsure (1)..(392): unsure at all n locations
gctatacagaacagaataatagtgagtggcttttcttgtcggaaccctcttttacaagagaaataacacactattttcccattcatagagactgacagcttggctgacaagagaatcgactgaatctatgagatgaagatcttaaagaagcccaaacccaagagcactcttgaaagaaaattccaatccatagtgtcaaaagctttcttgatgtcaatcttgagggcagcattgcctctgaagcatttgttgtctaacatgttcaccgcttcagacagtactgcagtgcaatctgagatttgttttccctggatgaatcctctttgctgcggngaaatgatctttgaggcaacgatagaaaaaagtctagaggcaaaagtctttgtattatc

SEQ ID NO: 62309 - DNA, 370 bp, Glycine max
  unsure (1)..(370): unsure at all n locations
acactatgatactaagctttagccaatggacttaccttgataattcccttgatattccttttgagccctggttccctttccctggtttggaacttcattacaagccctaaagtgaaaaaaccatgattatttcattatccttaaggaaattttggagcctttggaattgttttgggaataagtgtgggggggtttttgtttcattggacaacttgttttgttggctatgcttcatgatgaattttgngccatacttgatggacattgtatattggttaaatgttgaacatgctgaatgaaatgttgttcctcaaaggctaanaagtaaaaaaaaaaaaaaaaaaaaaatcaaaaaaaaaaatctcaaaaa

SEQ ID NO: 62310 - DNA, 459 bp, Glycine max
  unsure (1)..(459): unsure at all n locations
gcagcttaaaagaaatctcaggaccgcatgtttctttgtgtcttgatgtaagcacgggttggtaccaaaccaatataaaactcttgtgtttgtcttcttcttccgtacactctttaatttccgctttgcactttaattatcgcttttactgttggttaagataatatttctgttctttactttcttaacattatagtaaaagcctaagaagggtagattttaattagtaaaggttcagtaataattaattcaacccctccttcttaattattccgaggccacttgatccaacaaaacataacattatcattttgatcaattgtgtttaaaanaacttcatcaactgatattggcaggcccccttccttcttaaacttattctcaaagcaattttgaccccctttttcaccactctanggtgctgaatccatcaaccatttacagatagccatttcattg

SEQ ID NO: 62311 - DNA, 454 bp, Glycine max
tacataacactaagcttgagcgggtaagtcatacgaaagtcacgtgctcatgcaatatttgttatccgtggctatacgagacatcttgccaaacaaagtcaagttagcaataactcgcctgtgctttttcttccatgctatatgtagcaaagtcattgatccagtcaagtttgatgagttggaacatgaggccgcaattatactgtgccagctggaaatgtattttccccctgctttcttagacatcatgattcacttgattgtgcatatggtcagagaaatcaaatgttgtggtgctgtttatctacggtggatgtacccggttgagcgatacatgaagatcttaaaagggtatacaaagaatctatatcatctagaagcatctattgttgagaggtacattgcagaagaagccattgagttttgttcagaatacttatagaaagctaaacct

SEQ ID NO: 62312 - DNA, 363 bp, Glycine max
  unsure (1)..(363): unsure at all n locations
agcacttcaattccatatgcttagtcacccgaaagtatgtgtcgntcttagaaaacaaaaangctgcggagctatcacaatacatttttagcggcctagcaatactggnnacaattccaagccctgaaataaagttccgcagccaattagcctgaattgtagcctcaaaacatgctacaaattcagcttccatggtggatgcagcaaaacctgattgtttgcactctttcatgatattgctcctccggctaagagaaatacaaagccaagagtggattttcttgtatccacacatccagcaaagtctgagtctgaatatccaatcacctctaggtgatcagacctcttatatgtaagcatgtg

SEQ ID NO: 62313 - DNA, 446 bp, Glycine max
  unsure (1)..(446): unsure at all n locations
agctntataagagataactatccatantagattgactgtatggaaacgtacatctagtccactcaatatatgctctagctaatcatcatgaatggagatatatgttagacaagtggccttatatatcttaagaaggggggagagattgaattaagatattccaaactacttccccaaataaaaatctatttcactttttattcaagttataaattcccttaacaatgaacttcttaaatattgattcaaataaaacaatttgaatatgaatgtaaagcaataataaataaaggagtttaagggaagagaaagtgcaaactcatatttatactggttcggccacacccttgtgcctacgttcagtccccaagcaacccgcttgagagttccactatcttgtaaattcattttacaagttctaaacacacaaggacaatcctttcttt

SEQ ID NO: 62314 - DNA, 423 bp, Glycine max
  unsure (1)..(423): unsure at all n locations
ntggcaagctagaatcatttaccccatttctgactgccagttggtgtgtccagnccaagtggntcctaagaagacaggcctctcagtgatcaagaatgagagggatgagcttatccccacaagagtgcagaatagttggcgagtctgcattgattataggaggctgaaccagacaaccagaaaaaatcattttcccctgccattcattgatcaaatgcttgagcgcttggcaggtaagtctcattactattttcttgatggtgtttctggttatttacaaattcatattgctcctgaggatcaagaaaagaccacattcacctgtccctttggcacttttgcctataggaggatgccctttggcctatgcaacgcccttggtaccttccagtggtgtatacttagcattttcagtgacttttt

SEQ ID NO: 62315 - DNA, 313 bp, Glycine max
  unsure (1)..(313): unsure at all n locations
ttgtttatatattttagtactatatcctncatccaattacaatccgagtgcactggtgtgcctcttttgccaatctaaaaaagctcgacatcttctatacgggatggttgccaatcttcagaatttgctcgggggtctagaacatccaaatatgggaagactacattgatgttggaagatgatgccctgttcttgccttcctttattctagatgattgaagcatgcaactcttcatgtagcacatctatgcgatcttttatcatctaaaactgtgacaatctttccctgctgcctactataatatcattgcca

SEQ ID NO: 62316 - DNA, 430 bp, Glycine max
  unsure (1)..(430): unsure at all n locations
acacataaaactaagcttaatctcatactcatagttaatacnnggttttattatgtatatatgcccncaatgttaagaactgtgctatanagacatgcatctctgctgaggacaaattgtatcccaataaatgttactatttatgtaaactactaagaaaaaagaaaatgcatatttctttcctagtggcaagatatgaccattgtatactcattatatacatctgttatgacgtatttaaagaaaagaagagagaaaatataactaatactaacaactctatcttcttgatactatcttttcaacgcttttttattaaatagtcttttttttaaattaaaaagaatttttgatcttaattagatgagagaatcatatatgataagactaataaaaatttggaattttaataatattttaaccatcttaa

SEQ ID NO: 62317 - DNA, 349 bp, Glycine max
  unsure (1)..(349): unsure at all n locations
agcttgatcaaaacaagtatctaatcttttttatgatctctatcatacagangctcattcaaatcattctcaaacactcatttcatacaaaacaatccactgcatatcattttcaattagttggctgttcaaacacgctttttgttcaatcaaataactcaaaaggctaagatttagagaactcacacatataaactgaaatttgaatgactgatcattaatcataaaataactgaaaataaacaagaatgttctaaatgcacaaatttaaatgtcttgctcctgtgcatgctcattgagatccaacacttgagtanatggtgaatgctgagggatacgctactctatc

SEQ ID NO: 62318 - DNA, 322 bp, Glycine max
  unsure (1)..(322): unsure at all n locations
ctcagcttacaaggagctacatcagtgaagcttcaccttctatggtttattctcttgtagatggcacctcctctcacctcttctcctttatctntcactgcaactccatggttgaaaatcaccattgaaggaccttattgaagctcatagatccaacctccatagaagcttctcaagcaagcttccatcagaaacattataaactatgtcagtaaggactcgcagtttttcatgaggaaaaatacttgtacttgggggcatgtcactccgtttggaacttccttgagactcaagttaatcaccatgggggggggggggaggt

SEQ ID NO: 62319 - DNA, 440 bp, Glycine max
  unsure (1)..(440): unsure at all n locations
agcttgagatgaggaagtgttgaatgatgatactnncngcnnnnatngngaccacagagtggtacctggagatatgtcgcgggggtcaggagaccttggggacgttaggtggggtgctatttgccaaaaccaagcttgaccaatcccgacccaacccgggcatagtcggtcagtgagaacctgtgatgtacctaaacaggcgagctcctggcagtcaacagataaaaggaacaaagaccacaaagcaaggaggcttgtggtggctggccagctgtgaattttgtgtgacatgtggattgtggcctctggtaatcgattaccaagggtgggtaatcgattacaaggcttaaaaatgaagacaggaggctaagatggtctctggtaatccgataccaaggggtgtaatctgataccaagcttgacaacgaagtctggaaact

SEQ ID NO: 62320 - DNA, 426 bp, Glycine max
ggtagagttatgtctcgtatcggtttaatcaattacaactttatcataatcaattgcatagttgttcttaagacaatgactgatttattcaggagtctctgttttaatcgattaccatttgatataatcgattacttctctttctataagtgttttagaagtgaacaagaatactttaatcgattactttgagtatctaatcaattacattattcttgagttgtttctagattttggaaagaacactttaattgattaaaaagataattcaatcgattacttcattgaattaattgattaccttgtagatttaatcaattataggtagttataattgttttctctataaataactggcttgtgttctcttctaaataataatgaaataagtttgtgtttgagcaaagatcacgtgctgttatcaaa

SEQ ID NO: 62321 - DNA, 326 bp, Glycine max
cgttggttcatataaacctccttctctcaatcaccactacgaaaagttgtcatctcttcattagccgtacacatagtcaaaaagagatacttctccacgattatacgaggagaagctttctcatatactggacaaagaggctctttgtacctatacctgccttatgagtcaatctcttagcaacctgccttggcttgaatatctcaatgacacccagcgaatcctctttggtgttaatgactcacttacctacaaaggcctatgacccaccacgcgaaaatacaatggacccatctctgtcactctggctggagatcatctcagac

SEQ ID NO: 62322 - DNA, 304 bp, Glycine max
tgataagagggagccaacaacggagagcctgcttgttaatctttcccgcactcaggagagaaactcagtagatgtgctacttgtggtcaagacaccatagagatggcagaatgagagctaatgacaaaaggggtggtcgaccttgattagactatagagcggcgtagtcaaccttgagcaactatatataggacgggggatgaggtcaacaaacggatttgccttctctagagctagggactcactacagggtagactgagaaattattgccatcattaaaaagtcgtctgatataacaaacta

SEQ ID NO: 62323 - DNA, 370 bp, Glycine max
  unsure (1)..(370): unsure at all n locations
agaaagatctatatgtaggcttgctaagggtagagagaggaagactacagatttggatcaagtaaagtgtgttaaggatgaagaangccaagtcttagtgcatgaaaaagatatcaaggaaaggtggaaggcgtatttccacaacttatttaatgatggatatggatatgactctagcagtctagacacaagagaagaggaccggaactataagtactatcgtcggattcagaaacaggaagtaaaggaagcgttgaaaagaatgagtaacgggtaggcggtggggccagacaacatacctattgaagtgtggaaaactcttggagatagaggtcttgagtggctcaccaaactcttttatgaaattatg

SEQ ID NO: 62324 - DNA, 416 bp, Glycine max
  unsure (1)..(416): unsure at all n locations
ntanatgtaactaanannatgtaactaattatctttaagtttcacttaccttcatgcagcctataaggcattgcttcagctgggcattcccaaatgtgcatatgcctaatgtaaggatttccttggctcacacctacagggattcttagtgactactttaatgtaccctaaaaagatataaattgcattctttaatgtctntccccaaagaaactttaacagagaagaatcaaacttcttaacatatctatgcaagtctagtttcatcattctacaactttgtttatggtaggtttacctaacattatatgttgtagaacaatttcacaattattgaagaaaacatataggggactccaaacattgcaccttatgtcgtatctaccatagtatcccccacggtcagatttgacaac

SEQ ID NO: 62325 - DNA, 354 bp, Glycine max
  unsure (1)..(354): unsure at all n locations
tgatttcaacacctgctatagcaccactatagtgtgctatngagtattgactactatatgaaacaataaatatcttaaacatattggtatgcttgtaacaagctgtcaatggaacccattagtttgcagacaatattatttactttagatgacattgggattntactcaacttttgataacagaaactctgaatacaaatacctcttcgttggaattcatggatcattagtgttgatgaggaatatccaagtctggatttgtaatttgacctgttatttctgcagatgctgtcatctaaagatgtcaactntgtcgggtacacatataagaactatganatcgtgaatgatgat

SEQ ID NO: 62326 - DNA, 427 bp, Glycine max
ctttctctttcctttgtgactgcaaaactgaagaagccaagctcgcttacttcccatcctcacgcatgtccttactgagcgccagtttcaccgcctcgacgccaattgccttggcctcctcgtcgtctctgtcatcaaggccaaccgcacgctctatactgggcgatggtcctgccgagaccctttgtgaaagctgctaaaaattttagaattcttttgtttttgaaagaatttaaaattctaaatttatagttaaaaatatattccatgttaaaatgttaaaattttaaatttcttctatgagcatctaaaaagattattcaggcggaaaaaattttaaatcctctaaataattacttttcccattttaattccctcattcaaacataaaacaaatccaacttgtactgttttcactaatttttcc
